(19) United States
(12) Patent Application Publication
(10) Pub. No.: US 2024/0131193 A1
(43) Pub. Date: Apr. 25, 2024

(54) MODIFIED POLYNUCLEOTIDES FOR THE PRODUCTION OF CYTOPLASMIC AND CYTOSKELETAL PROTEINS

(71) Applicant: Modema TX, Inc., Cambridge, MA (US)

(72) Inventors: Antonin DE FOUGEROLLES, Waterloo (BE); Justin GUILD, Framingham, MA (US)

(21) Appl. No.: 18/161,598

(22) Filed: Jan. 30, 2023

Related U.S. Application Data
(63) Continuation of application No. 16/577,734, filed on Sep. 20, 2019, now Pat. No. 11,564,998.
Application No. 16/577,734 is a continuation of application No. 15/425,645, filed on Feb. 6, 2017, now Pat. No. 10,463,751.
Application No. 15/425,645 is a continuation of application No. 15/042,173, filed on Feb. 12, 2016, now Pat. No. 9,572,897.
Application No. 15/042,173 is a continuation of application No. 14/390,098, filed on Oct. 2, 2014, now Pat. No. 9,303,079.
(60) Provisional application No. 61/618,862, filed on Apr. 2, 2012.
(60) Provisional application No. 61/618,866, filed on Apr. 2, 2012.
(60) Provisional application No. 61/618,868, filed on Apr. 2, 2012.
(60) Provisional application No. 61/618,870, filed on Apr. 2, 2012.
(60) Provisional application No. 61/618,873, filed on Apr. 2, 2012.
(60) Provisional application No. 61/618,878, filed on Apr. 2, 2012.
(60) Provisional application No. 61/618,885, filed on Apr. 2, 2012.
(60) Provisional application No. 61/618,896, filed on Apr. 2, 2012.
(60) Provisional application No. 61/618,911, filed on Apr. 2, 2012.
(60) Provisional application No. 61/618,922, filed on Apr. 2, 2012.
(60) Provisional application No. 61/618,935, filed on Apr. 2, 2012.
(60) Provisional application No. 61/618,945, filed on Apr. 2, 2012.
(60) Provisional application No. 61/618,953, filed on Apr. 2, 2012.
(60) Provisional application No. 61/618,961, filed on Apr. 2, 2012.
(60) Provisional application No. 61/618,957, filed on Apr. 2, 2012.
(60) Provisional application No. 61/648,286, filed on May 17, 2012.
(60) Provisional application No. 61/648,244, filed on May 17, 2012.
(60) Provisional application No. 61/668,157, filed on Jul. 5, 2012.
(60) Provisional application No. 61/681,650, filed on Aug. 10, 2012.
(60) Provisional application No. 61/681,667, filed on Aug. 10, 2012.
(60) Provisional application No. 61/681,675, filed on Aug. 10, 2012.
(60) Provisional application No. 61/681,648, filed on Aug. 10, 2012.
(60) Provisional application No. 61/681,687, filed on Aug. 10, 2012.
(60) Provisional application No. 61/681,654, filed on Aug. 10, 2012.
(60) Provisional application No. 61/681,696, filed on Aug. 10, 2012.
(60) Provisional application No. 61/681,647, filed on Aug. 10, 2012.
(60) Provisional application No. 61/681,704, filed on Aug. 10, 2012.
(60) Provisional application No. 61/681,720, filed on Aug. 10, 2012.
(60) Provisional application No. 61/681,742, filed on Aug. 10, 2012.
(60) Provisional application No. 61/681,658, filed on Aug. 10, 2012.
(60) Provisional application No. 61/681,649, filed on Aug. 10, 2012.
(60) Provisional application No. 61/681,645, filed on Aug. 10, 2012.
(60) Provisional application No. 61/681,661, filed on Aug. 10, 2012.
(60) Provisional application No. 61/681,712, filed on Aug. 10, 2012.
(60) Provisional application No. 61/696,381, filed on Sep. 4, 2012.
(60) Provisional application No. 61/709,303, filed on Oct. 3, 2012.
(60) Provisional application No. 61/712,490, filed on Oct. 11, 2012.
(60) Provisional application No. 61/737,168, filed on Dec. 14, 2012.
(60) Provisional application No. 61/737,203, filed on Dec. 14, 2012.
(60) Provisional application No. 61/737,155, filed on Dec. 14, 2012.
(60) Provisional application No. 61/737,213, filed on Dec. 14, 2012.
(60) Provisional application No. 61/737,139, filed on Dec. 14, 2012.
(60) Provisional application No. 61/737,174, filed on Dec. 14, 2012.
(60) Provisional application No. 61/737,135, filed on Dec. 14, 2012.
(60) Provisional application No. 61/737,152, filed on Dec. 14, 2012.
(60) Provisional application No. 61/737,184, filed on Dec. 14, 2012.
(60) Provisional application No. 61/737,160, filed on Dec. 14, 2012.
(60) Provisional application No. 61/737,130, filed on Dec. 14, 2012.
(60) Provisional application No. 61/737,191, filed on Dec. 14, 2012.
(60) Provisional application No. 61/737,134, filed on Dec. 14, 2012.
(60) Provisional application No. 61/737,147, filed on Dec. 14, 2012.

(51) Int. Cl. A61K 48/00; A61K 9/127; A61K 9/14; A61K 9/51; A61K 31/7115; A61K 38/17; A61K 38/18; A61K 38/19; A61K 38/21; A61K 38/45; A61K 38/48; A61K 47/54; C07H 21/02; C07K 14/005; C07K 14/435; C07K 14/47; C07K 14/475; C07K 14/485; C07K 14/495; C07K 14/505; C07K 14/515; C07K 14/525; C07K 14/535; C07K 14/54; C07K 14/56; C07K 14/61; C07K 14/62; C07K 14/705; C07K 14/745; C07K 16/00; C07K 16/28; C07K 16/40; C12N 9/00; C12N 9/02; C12N 9/10; C12N 9/12; C12N 9/16; C12N 9/24; C12N 9/42; C12N 9/64; C12N 9/68; C12N 9/88; C12N 15/11; C12N 15/52; C12N 15/85; C12N 15/87; C12P 13/04; C12P 21/00

(52) U.S. Cl. CPC A61K 48/0066; A61K 9/1271; A61K 9/145; A61K 9/5123; A61K 9/5146; A61K 9/5153; A61K 31/7115; A61K 38/17; A61K 38/177; A61K 38/1816; A61K 38/1891; A61K 38/191; A61K 38/193; A61K 38/212; A61K 38/45; A61K 38/4846; A61K 47/543; A61K 48/0033; A61K 48/005; A61K 48/0075; C07H 21/02; C07K 14/005; C07K 14/435; C07K 14/43595; C07K 14/47; C07K 14/4705; C07K 14/4713; C07K 14/4723; C07K 14/4746; C07K 14/475; C07K 14/485; C07K 14/495; C07K 14/505; C07K 14/515; C07K 14/525; C07K 14/535; C07K 14/5418; C07K 14/56; C07K 14/61; C07K 14/62; C07K 14/705; C07K 14/745; C07K 16/00; C07K 16/2863; C07K 16/2887; C07K 16/40; C12N 9/0069; C12N 9/0091; C12N 9/1051; C12N 9/1241; C12N 9/16; C12N 9/2402; C12N 9/2445; C12N 9/6435; C12N 9/6437; C12N 9/644; C12N 9/6443; C12N 9/6451; C12N 9/88; C12N 9/93; C12N 15/11; C12N 15/52; C12N 15/85; C12N 15/87; C12P 13/04; C12P 21/00; C12P 21/005; C12Y 603/02019; A61K 38/00; Y02A 50/30

(57) ABSTRACT

The invention relates to compositions including polynucleotides encoding polypeptides which have been chemically modified by replacing the uridines with 1-methyl-pseudouridine to improve one or more of the stability and/or clearance in tissues, receptor uptake and/or kinetics, cellular access by the compositions, engagement with translational machinery, mRNA half-life, translation efficiency, immune evasion, protein production capacity, secretion efficiency, accessibility to circulation, protein half-life and/or modulation of a cell's status, function, and/or activity.

### REFERENCE TO SEQUENCE LISTING

[0001] The present application is being filed along with a Sequence Listing in electronic XML format. The Sequence Listing file entitled 51165-009006_Sequence_Listing 2_16_23, was created on Feb. 16, 2023 and is 77,070,454 bytes in size. The information in electronic format of the Sequence Listing is incorporated herein by reference in its entirety.

### FIELD OF THE INVENTION

[0002] The invention relates to compositions, methods, processes, kits and devices for the design, preparation, manufacture and/or formulation of polynucleotides, primary constructs and modified mRNA molecules (mmRNA).

### BACKGROUND OF THE INVENTION

[0003] There are multiple problems with prior methodologies of effecting protein expression. For example, introduced DNA can integrate into host cell genomic DNA at some frequency, resulting in alterations and/or damage to the host cell genomic DNA. Alternatively, the heterologous deoxyribonucleic acid (DNA) introduced into a cell can be inherited by daughter cells (whether or not the heterologous DNA has integrated into the chromosome) or by offspring.

[0004] In addition, assuming proper delivery and no damage or integration into the host genome, there are multiple steps which must occur before the encoded protein is made. Once inside the cell, DNA must be transported into the nucleus where it is transcribed into RNA. The RNA transcribed from DNA must then enter the cytoplasm where it is translated into protein. Not only do the multiple processing steps from administered DNA to protein create lag times before the generation of the functional protein, each step represents an opportunity for error and damage to the cell. Further, it is known to be difficult to obtain DNA expression in cells as DNA frequently enters a cell but is not expressed or not expressed at reasonable rates or concentrations. This can be a particular problem when DNA is introduced into primary cells or modified cell lines.

[0005] In the early 1990's Bloom and colleagues successfully rescued vasopressin-deficient rats by injecting in vitro-transcribed vasopressin mRNA into the hypothalamus (Science 255: 996-998; 1992). However, the low levels of translation and the immunogenicity of the molecules hampered the development of mRNA as a therapeutic and efforts have since focused on alternative applications that could instead exploit these pitfalls, i.e. immunization with mRNAs coding for cancer antigens.

[0006] Others have investigated the use of mRNA to deliver a polypeptide of interest and shown that certain chemical modifications of mRNA molecules, particularly pseudouridine and 5-methyl-cytosine, have reduced immunostimulatory effect.

[0007] These studies are disclosed in, for example, Ribostem Limited in United Kingdom patent application serial number 0316089.2 filed on Jul. 9, 2003 now abandoned, PCT application number PCT/GB2004/002981 filed on Jul. 9, 2004 published as WO2005005622, U.S. patent application national phase entry Ser. No. 10/563,897 filed on Jun. 8, 2006 published as US20060247195 now abandoned, and European patent application national phase entry serial number EP2004743322 filed on Jul. 9, 2004 published as EP1646714 now withdrawn; Novozymes, Inc. in PCT application number PCT/US2007/88060 filed on Dec. 19, 2007 published as WO2008140615, United States patent application national phase entry Ser. No. 12/520,072 filed on Jul. 2, 2009 published as US20100028943 and European patent application national phase entry Ser. No. EP2007874376 filed on Jul. 7, 2009 published as EP2104739; University of Rochester in PCT application number PCT/US2006/46120 filed on Dec. 4, 2006 published as WO2007064952 and U.S. patent application Ser. No. 11/606,995 filed on Dec. 1, 2006 published as US20070141030; BioNTech AG in European patent application serial number EP2007024312 filed Dec. 14, 2007 now abandoned, PCT application number PCT/EP2008/01059 filed on Dec. 12, 2008 published as WO2009077134, European patent application national phase entry serial number EP2008861423 filed on Jun. 2, 2010 published as EP2240572, United States patent application national phase entry Ser. No. 12/,735,060 filed Nov. 24, 2010 published as US20110065103, German patent application serial number DE 10 2005 046 490 filed Sep. 28, 2005, PCT application PCT/EP2006/0448 filed Sep. 28, 2006 published as WO2007036366, national phase European patent EP1934345 published Mar. 21, 2012 and national phase U.S. patent application Ser. No. 11/992,638 filed Aug. 14, 2009 published as 20100129877; Immune Disease Institute Inc. in U.S. patent application Ser. No. 13/088,009 filed Apr. 15, 2011 published as US20120046346 and PCT application PCT/US2011/32679 filed Apr. 15, 2011 published as WO20110130624; Shire Human Genetic Therapeutics in U.S. patent application Ser. No. 12/957,340 filed on Nov. 20, 2010 published as US20110244026; Sequitur Inc. in PCT application PCT/US1998/019492 filed on Sep. 18, 1998 published as WO1999014346; The Scripps Research Institute in PCT application number PCT/US2010/00567 filed on Feb. 24, 2010 published as WO2010098861, and United States patent application national phase entry Ser. No. 13/203,229 filed Nov. 3, 2011 published as US20120053333; Ludwig-Maximillians University in PCT application number PCT/EP2010/004681 filed on Jul. 30, 2010 published as WO2011012316; Cellscript Inc. in U.S. Pat. No. 8,039,214 filed Jun. 30, 2008 and granted Oct. 18, 2011, U.S. patent application Ser. No. 12/962,498 filed on Dec. 7, 2010 published as US20110143436, 12/962,468 filed on Dec. 7, 2010 published as US20110143397, 13/237,451 filed on Sep. 20, 2011 published as US20120009649, and PCT applications PCT/US2010/59305 filed Dec. 7, 2010 published as WO2011071931 and PCT/US2010/59317 filed on Dec. 7, 2010 published as WO2011071936; The Trustees of the University of Pennsylvania in PCT application number PCT/US2006/32372 filed on Aug. 21, 2006 published as WO2007024708, and U.S. patent application national phase entry Ser. No. 11/990,646 filed on Mar. 27, 2009 published as US20090286852; Curevac GMBH in German patent application serial numbers DE10 2001 027 283.9 filed Jun. 5, 2001, DE10 2001 062 480.8 filed Dec. 19, 2001, and DE 20 2006 051 516 filed Oct. 31, 2006 all abandoned, European patent numbers EP1392341 granted Mar. 30, 2005 and EP1458410 granted Jan. 2, 2008, PCT application numbers PCT/EP2002/06180 filed Jun. 5, 2002 published as WO2002098443, PCT/EP2002/14577 filed on Dec. 19, 2002 published as WO2003051401, PCT/EP2007/09469 filed on Dec. 31, 2007 published as WO2008052770, PCT/EP2008/03033 filed on Apr. 16, 2008 published as WO2009127230, PCT/EP2006/004784 filed on May 19, 2005 published as WO2006122828, PCT/EP2008/00081 filed on Jan. 9, 2007 published as WO2008083949, and U.S. patent application Ser. No. 10/729,830 filed on Dec. 5, 2003 published as US20050032730, 10/870,110 filed on Jun. 18, 2004 published as US20050059624, 11/914,945 filed on Jul. 7, 2008 published as US20080267873, 12/446,912 filed on Oct. 27, 2009 published as US2010047261 now abandoned, 12/522,214 filed on Jan. 4, 2010 published as US20100189729, 12/787,566 filed on May 26, 2010 published as US20110077287, 12/787,755 filed on May 26, 2010 published as US20100239608, 13/185,119 filed on Jul. 18, 2011 published as US20110269950, and Ser. No. 13/106,548 filed on May 12, 2011 published as US20110311472 all of which are herein incorporated by reference in their entirety.

[0008] Notwithstanding these reports which are limited to a selection of chemical modifications including pseudouridine and 5-methyl-cytosine, there remains a need in the art for therapeutic modalities to address the myriad of barriers surrounding the efficacious modulation of intracellular translation and processing of nucleic acids encoding polypeptides or fragments thereof.

[0009] To this end, the inventors have shown that certain modified mRNA sequences have the potential as therapeutics with benefits beyond just evading, avoiding or diminishing the immune response. Such studies are detailed in published co-pending applications International Application PCT/US2011/046861 filed Aug. 5, 2011 and PCT/US2011/054636 filed Oct. 3, 2011, International Application number PCT/US2011/054617 filed Oct. 3, 2011, the contents of which are incorporated herein by reference in their entirety.

[0010] The present invention addresses this need by providing nucleic acid based compounds or polynucleotides which encode a polypeptide of interest (e.g., modified mRNA or mmRNA) and which have structural and/or chemical features that avoid one or more of the problems in the art, for example, features which are useful for optimizing formulation and delivery of nucleic acid-based therapeutics while retaining structural and functional integrity, overcoming the threshold of expression, improving expression rates, half life and/or protein concentrations, optimizing protein localization, and avoiding deleterious bio-responses such as the immune response and/or degradation pathways.

### SUMMARY OF THE INVENTION

[0011] Described herein are compositions, methods, processes, kits and devices for the design, preparation, manufacture and/or formulation of modified mRNA (mmRNA) molecules.

[0012] The details of various embodiments of the invention are set forth in the description below. Other features, objects, and advantages of the invention will be apparent from the description and the drawings, and from the claims.

### BRIEF DESCRIPTION OF THE DRAWINGS

[0013] The foregoing and other objects, features and advantages will be apparent from the following description of particular embodiments of the invention, as illustrated in the accompanying drawings in which like reference characters refer to the same parts throughout the different views. The drawings are not necessarily to scale, emphasis instead being placed upon illustrating the principles of various embodiments of the invention.

[0014] FIG. 1 is a schematic of a primary construct of the present invention.

[0015] FIG. 2 illustrates lipid structures in the prior art useful in the present invention. Shown are the structures for 98N12-5 (TETA5-LAP), DLin-DMA, DLin-K-DMA (2,2-Dilinoleyl-4-dimethylaminomethyl-[1,3]-dioxolane), DLin-KC2-DMA, DLin-MC3-DMA and C12-200.

[0016] FIG. 3 is a representative plasmid useful in the IVT reactions taught herein. The plasmid contains Insert 64818, designed by the instant inventors.

[0017] FIG. 4 is a gel profile of modified mRNA encapsulated in PLGA microspheres.

[0018] FIG. 5 is a histogram of Factor IX protein production PLGA formulation Factor IX modified mRNA.

[0019] FIGS. 6A, 6B and 6C are histograms showing VEGF protein production in human keratinocyte cells after transfection of modified mRNA at a range of doses. FIG. 6A shows protein production after transfection of modified mRNA comprising natural nucleoside triphosphate (NTP). FIG. 6B shows protein production after transfection of modified mRNA fully modified with pseudouridine (Pseudo-U) and 5-methylcytosine (5 mC). FIG. 6C shows protein production after transfection of modified mRNA fully modified with N1-methyl-pseudouridine (N1-methyl-Pseudo-U) and 5-methylcytosine (5 mC).

[0020] FIG. 7 is a histogram of VEGF protein production in HEK293 cells.

[0021] FIGS. 8A and 8B are histograms of VEGF expression and IFN-alpha induction after transfection of VEGF modified mRNA in peripheral blood mononuclear cells (PBMC). FIG. 8A shows VEGF expression. FIG. 8B shows IFN-alpha induction.

[0022] FIG. 9 is a histogram of VEGF protein production in HeLa cells from VEGF modified mRNA.

[0023] FIG. 10 is a histogram of VEGF protein production from lipoplexed VEGF modified mRNA in mice.

[0024] FIG. 11 is a histogram of G-CSF protein production in HeLa cells from G-CSF modified mRNA.

[0025] FIG. 12 is a histogram of Factor IX protein production in HeLa cell supernatant from Factor IX modified mRNA.

### DETAILED DESCRIPTION

[0026] It is of great interest in the fields of therapeutics, diagnostics, reagents and for biological assays to be able to deliver a nucleic acid, e.g., a ribonucleic acid (RNA) inside a cell, whether in vitro, in vivo, in situ or ex vivo, such as to cause intracellular translation of the nucleic acid and production of an encoded polypeptide of interest. Of particular importance is the delivery and function of a non-integrative polynucleotide.

[0027] Described herein are compositions (including pharmaceutical compositions) and methods for the design, preparation, manufacture and/or formulation of polynucleotides encoding one or more polypeptides of interest. Also provided are systems, processes, devices and kits for the selection, design and/or utilization of the polynucleotides encoding the polypeptides of interest described herein.

[0028] According to the present invention, these polynucleotides are preferably modified as to avoid the deficiencies of other polypeptide-encoding molecules of the art. Hence these polynucleotides are referred to as modified mRNA or mmRNA.

[0029] The use of modified polynucleotides in the fields of antibodies, viruses, veterinary applications and a variety of in vivo settings has been explored by the inventors and these studies are disclosed in for example, co-pending and co-owned U.S. provisional patent application Ser. Nos. 61/470,451 filed Mar. 31, 2011 teaching in vivo applications of mmRNA; 61/517,784 filed on Apr. 26, 2011 teaching engineered nucleic acids for the production of antibody polypeptides; 61/519,158 filed May 17, 2011 teaching veterinary applications of mmRNA technology; 61/533,537 filed on Sep. 12, 2011 teaching antimicrobial applications of mmRNA technology; 61/533,554 filed on Sep. 12, 2011 teaching viral applications of mmRNA technology, 61/542,533 filed on Oct. 3, 2011 teaching various chemical modifications for use in mmRNA technology; 61/570,690 filed on Dec. 14, 2011 teaching mobile devices for use in making or using mmRNA technology; 61/570,708 filed on Dec. 14, 2011 teaching the use of mmRNA in acute care situations; 61/576,651 filed on Dec. 16, 2011 teaching terminal modification architecture for mmRNA; 61/576,705 filed on Dec. 16, 2011 teaching delivery methods using lipidoids for mmRNA; 61/578,271 filed on Dec. 21, 2011 teaching methods to increase the viability of organs or tissues using mmRNA; 61/581,322 filed on Dec. 29, 2011 teaching mmRNA encoding cell penetrating peptides; 61/581,352 filed on Dec. 29, 2011 teaching the incorporation of cytotoxic nucleosides in mmRNA and 61/631,729 filed on Jan. 10, 2012 teaching methods of using mmRNA for crossing the blood brain barrier; all of which are herein incorporated by reference in their entirety.

[0030] Provided herein, in part, are polynucleotides, primary constructs and/or mmRNA encoding polypeptides of interest which have been designed to improve one or more of the stability and/or clearance in tissues, receptor uptake and/or kinetics, cellular access by the compositions, engagement with translational machinery, mRNA half-life, translation efficiency, immune evasion, protein production capacity, secretion efficiency (when applicable), accessibility to circulation, protein half-life and/or modulation of a cell's status, function and/or activity.

### I. Compositions of the Invention (mmRNA)

[0031] The present invention provides nucleic acid molecules, specifically polynucleotides, primary constructs and/or mmRNA which encode one or more polypeptides of interest. The term “nucleic acid,” in its broadest sense, includes any compound and/or substance that comprise a polymer of nucleotides. These polymers are often referred to as polynucleotides. Exemplary nucleic acids or polynucleotides of the invention include, but are not limited to, ribonucleic acids (RNAs), deoxyribonucleic acids (DNAs), threose nucleic acids (TNAs), glycol nucleic acids (GNAs), peptide nucleic acids (PNAs), locked nucleic acids (LNAs, including LNA having a β-D-ribo configuration, α-LNA having an α-L-ribo configuration (a diastereomer of LNA), 2′-amino-LNA having a 2′-amino functionalization, and 2′-amino-α-LNA having a 2′-amino functionalization) or hybrids thereof.

[0032] In preferred embodiments, the nucleic acid molecule is a messenger RNA (mRNA). As used herein, the term “messenger RNA” (mRNA) refers to any polynucleotide which encodes a polypeptide of interest and which is capable of being translated to produce the encoded polypeptide of interest in vitro, in vivo, in situ or ex vivo.

[0033] Traditionally, the basic components of an mRNA molecule include at least a coding region, a 5′UTR, a 3′UTR, a 5′ cap and a poly-A tail. Building on this wild type modular structure, the present invention expands the scope of functionality of traditional mRNA molecules by providing polynucleotides or primary RNA constructs which maintain a modular organization, but which comprise one or more structural and/or chemical modifications or alterations which impart useful properties to the polynucleotide including, in some embodiments, the lack of a substantial induction of the innate immune response of a cell into which the polynucleotide is introduced. As such, modified mRNA molecules of the present invention are termed “mmRNA.” As used herein, a “structural” feature or modification is one in which two or more linked nucleotides are inserted, deleted, duplicated, inverted or randomized in a polynucleotide, primary construct or mmRNA without significant chemical modification to the nucleotides themselves. Because chemical bonds will necessarily be broken and reformed to effect a structural modification, structural modifications are of a chemical nature and hence are chemical modifications. However, structural modifications will result in a different sequence of nucleotides. For example, the polynucleotide “ATCG” may be chemically modified to “AT-5meC-G”. The same polynucleotide may be structurally modified from “ATCG” to “ATCCCG”. Here, the dinucleotide “CC” has been inserted, resulting in a structural modification to the polynucleotide.

mmRNA Architecture

[0034] The mmRNA of the present invention are distinguished from wild type mRNA in their functional and/or structural design features which serve to, as evidenced herein, overcome existing problems of effective polypeptide production using nucleic acid-based therapeutics.

[0035] FIG. 1 shows a representative polynucleotide primary construct 100 of the present invention. As used herein, the term “primary construct” or “primary mRNA construct” refers to a polynucleotide transcript which encodes one or more polypeptides of interest and which retains sufficient structural and/or chemical features to allow the polypeptide of interest encoded therein to be translated. Primary constructs may be polynucleotides of the invention. When structurally or chemically modified, the primary construct may be referred to as an mmRNA.

[0036] Returning to FIG. 1, the primary construct 100 here contains a first region of linked nucleotides 102 that is flanked by a first flanking region 104 and a second flaking region 106. As used herein, the “first region” may be referred to as a “coding region” or “region encoding” or simply the “first region.” This first region may include, but is not limited to, the encoded polypeptide of interest. The polypeptide of interest may comprise at its 5′ terminus one or more signal sequences encoded by a signal sequence region 103. The flanking region 104 may comprise a region of linked nucleotides comprising one or more complete or incomplete 5′ UTRs sequences. The flanking region 104 may also comprise a 5′ terminal cap 108. The second flanking region 106 may comprise a region of linked nucleotides comprising one or more complete or incomplete 3′ UTRs. The flanking region 106 may also comprise a 3′ tailing sequence 110.

[0037] Bridging the 5′ terminus of the first region 102 and the first flanking region 104 is a first operational region 105. Traditionally this operational region comprises a Start codon. The operational region may alternatively comprise any translation initiation sequence or signal including a Start codon.

[0038] Bridging the 3′ terminus of the first region 102 and the second flanking region 106 is a second operational region 107. Traditionally this operational region comprises a Stop codon. The operational region may alternatively comprise any translation initiation sequence or signal including a Stop codon. According to the present invention, multiple serial stop codons may also be used.

[0039] Generally, the shortest length of the first region of the primary construct of the present invention can be the length of a nucleic acid sequence that is sufficient to encode for a dipeptide, a tripeptide, a tetrapeptide, a pentapeptide, a hexapeptide, a heptapeptide, an octapeptide, a nonapeptide, or a decapeptide. In another embodiment, the length may be sufficient to encode a peptide of 2-30 amino acids, e.g. 5-30, 10-30, 2-25, 5-25, 10-25, or 10-20 amino acids. The length may be sufficient to encode for a peptide of at least 11, 12, 13, 14, 15, 17, 20, 25 or 30 amino acids, or a peptide that is no longer than 40 amino acids, e.g. no longer than 35, 30, 25, 20, 17, 15, 14, 13, 12, 11 or 10 amino acids. Examples of dipeptides that the polynucleotide sequences can encode or include, but are not limited to, carnosine and anserine.

[0040] Generally, the length of the first region encoding the polypeptide of interest of the present invention is greater than about 30 nucleotides in length (e.g., at least or greater than about 35, 40, 45, 50, 55, 60, 70, 80, 90, 100, 120, 140, 160, 180, 200, 250, 300, 350, 400, 450, 500, 600, 700, 800, 900, 1,000, 1,100, 1,200, 1,300, 1,400, 1,500, 1,600, 1,700, 1,800, 1,900, 2,000, 2,500, and 3,000, 4,000, 5,000, 6,000, 7,000, 8,000, 9,000, 10,000, 20,000, 30,000, 40,000, 50,000, 60,000, 70,000, 80,000, 90,000 or up to and including 100,000 nucleotides). As used herein, the “first region” may be referred to as a “coding region” or “region encoding” or simply the “first region.”

[0041] In some embodiments, the polynucleotide, primary construct, or mmRNA includes from about 30 to about 100,000 nucleotides (e.g., from 30 to 50, from 30 to 100, from 30 to 250, from 30 to 500, from 30 to 1,000, from 30 to 1,500, from 30 to 3,000, from 30 to 5,000, from 30 to 7,000, from 30 to 10,000, from 30 to 25,000, from 30 to 50,000, from 30 to 70,000, from 100 to 250, from 100 to 500, from 100 to 1,000, from 100 to 1,500, from 100 to 3,000, from 100 to 5,000, from 100 to 7,000, from 100 to 10,000, from 100 to 25,000, from 100 to 50,000, from 100 to 70,000, from 100 to 100,000, from 500 to 1,000, from 500 to 1,500, from 500 to 2,000, from 500 to 3,000, from 500 to 5,000, from 500 to 7,000, from 500 to 10,000, from 500 to 25,000, from 500 to 50,000, from 500 to 70,000, from 500 to 100,000, from 1,000 to 1,500, from 1,000 to 2,000, from 1,000 to 3,000, from 1,000 to 5,000, from 1,000 to 7,000, from 1,000 to 10,000, from 1,000 to 25,000, from 1,000 to 50,000, from 1,000 to 70,000, from 1,000 to 100,000, from 1,500 to 3,000, from 1,500 to 5,000, from 1,500 to 7,000, from 1,500 to 10,000, from 1,500 to 25,000, from 1,500 to 50,000, from 1,500 to 70,000, from 1,500 to 100,000, from 2,000 to 3,000, from 2,000 to 5,000, from 2,000 to 7,000, from 2,000 to 10,000, from 2,000 to 25,000, from 2,000 to 50,000, from 2,000 to 70,000, and from 2,000 to 100,000).

[0042] According to the present invention, the first and second flanking regions may range independently from 15-1,000 nucleotides in length (e.g., greater than 30, 40, 45, 50, 55, 60, 70, 80, 90, 100, 120, 140, 160, 180, 200, 250, 300, 350, 400, 450, 500, 600, 700, 800, and 900 nucleotides or at least 30, 40, 45, 50, 55, 60, 70, 80, 90, 100, 120, 140, 160, 180, 200, 250, 300, 350, 400, 450, 500, 600, 700, 800, 900, and 1,000 nucleotides).

[0043] According to the present invention, the tailing sequence may range from absent to 500 nucleotides in length (e.g., at least 60, 70, 80, 90, 120, 140, 160, 180, 200, 250, 300, 350, 400, 450, or 500 nucleotides). Where the tailing region is a polyA tail, the length may be determined in units of or as a function of polyA Binding Protein binding. In this embodiment, the polyA tail is long enough to bind at least 4 monomers of PolyA Binding Protein. PolyA Binding Protein monomers bind to stretches of approximately 38 nucleotides. As such, it has been observed that polyA tails of about 80 nucleotides and 160 nucleotides are functional.

[0044] According to the present invention, the capping region may comprise a single cap or a series of nucleotides forming the cap. In this embodiment the capping region may be from 1 to 10, e.g. 2-9, 3-8, 4-7, 1-5, 5-10, or at least 2, or 10 or fewer nucleotides in length. In some embodiments, the cap is absent.

[0045] According to the present invention, the first and second operational regions may range from 3 to 40, e.g., 5-30, 10-20, 15, or at least 4, or 30 or fewer nucleotides in length and may comprise, in addition to a Start and/or Stop codon, one or more signal and/or restriction sequences.

Cyclic mmRNA

[0046] According to the present invention, a primary construct or mmRNA may be cyclized, or concatemerized, to generate a translation competent molecule to assist interactions between poly-A binding proteins and 5′-end binding proteins. The mechanism of cyclization or concatemerization may occur through at least 3 different routes: 1) chemical, 2) enzymatic, and 3) ribozyme catalyzed. The newly formed 5′-/3′-linkage may be intramolecular or intermolecular.

[0047] In the first route, the 5′-end and the 3′-end of the nucleic acid contain chemically reactive groups that, when close together, form a new covalent linkage between the 5′-end and the 3′-end of the molecule. The 5′-end may contain an NHS-ester reactive group and the 3′-end may contain a 3′-amino-terminated nucleotide such that in an organic solvent the 3′-amino-terminated nucleotide on the 3′-end of a synthetic mRNA molecule will undergo a nucleophilic attack on the 5′-NHS-ester moiety forming a new 5′-/3′-amide bond.

[0048] In the second route, T4 RNA ligase may be used to enzymatically link a 5′-phosphorylated nucleic acid molecule to the 3′-hydroxyl group of a nucleic acid forming a new phosphorodiester linkage. In an example reaction, 1p g of a nucleic acid molecule is incubated at 37° C. for 1 hour with 1-10 units of T4 RNA ligase (New England Biolabs, Ipswich, MA) according to the manufacturer's protocol. The ligation reaction may occur in the presence of a split oligonucleotide capable of base-pairing with both the 5′- and 3′-region in juxtaposition to assist the enzymatic ligation reaction.

[0049] In the third route, either the 5′- or 3′-end of the cDNA template encodes a ligase ribozyme sequence such that during in vitro transcription, the resultant nucleic acid molecule can contain an active ribozyme sequence capable of ligating the 5′-end of a nucleic acid molecule to the 3′-end of a nucleic acid molecule. The ligase ribozyme may be derived from the Group I Intron, Group I Intron, Hepatitis Delta Virus, Hairpin ribozyme or may be selected by SELEX (systematic evolution of ligands by exponential enrichment). The ribozyme ligase reaction may take 1 to 24 hours at temperatures between 0 and 37° C.

mmRNA Multimers

[0050] According to the present invention, multiple distinct polynucleotides, primary constructs or mmRNA may be linked together through the 3′-end using nucleotides which are modified at the 3′-terminus. Chemical conjugation may be used to control the stoichiometry of delivery into cells. For example, the glyoxylate cycle enzymes, isocitrate lyase and malate synthase, may be supplied into HepG2 cells at a 1:1 ratio to alter cellular fatty acid metabolism. This ratio may be controlled by chemically linking polynucleotides, primary constructs or mmRNA using a 3′-azido terminated nucleotide on one polynucleotide, primary construct or mmRNA species and a C5-ethynyl or alkynyl-containing nucleotide on the opposite polynucleotide, primary construct or mmRNA species. The modified nucleotide is added post-transcriptionally using terminal transferase (New England Biolabs, Ipswich, MA) according to the manufacturer's protocol. After the addition of the 3′-modified nucleotide, the two polynucleotide, primary construct or mmRNA species may be combined in an aqueous solution, in the presence or absence of copper, to form a new covalent linkage via a click chemistry mechanism as described in the literature.

[0051] In another example, more than two polynucleotides may be linked together using a functionalized linker molecule. For example, a functionalized saccharide molecule may be chemically modified to contain multiple chemical reactive groups (SH—, NH₂—, N₃, etc. . . . ) to react with the cognate moiety on a 3′-functionalized mRNA molecule (i.e., a 3′-maleimide ester, 3′-NHS-ester, alkynyl). The number of reactive groups on the modified saccharide can be controlled in a stoichiometric fashion to directly control the stoichiometric ratio of conjugated polynucleotide, primary construct or mmRNA.

mmRNA Conjugates and Combinations

[0052] In order to further enhance protein production, primary constructs or mmRNA of the present invention can be designed to be conjugated to other polynucleotides, dyes, intercalating agents (e.g. acridines), cross-linkers (e.g. psoralene, mitomycin C), porphyrins (TPPC4, texaphyrin, Sapphyrin), polycyclic aromatic hydrocarbons (e.g., phenazine, dihydrophenazine), artificial endonucleases (e.g. EDTA), alkylating agents, phosphate, amino, mercapto, PEG (e.g., PEG-40K), MPEG, [MPEG]₂, polyamino, alkyl, substituted alkyl, radiolabeled markers, enzymes, haptens (e.g. biotin), transport/absorption facilitators (e.g., aspirin, vitamin E, folic acid), synthetic ribonucleases, proteins, e.g., glycoproteins, or peptides, e.g., molecules having a specific affinity for a co-ligand, or antibodies e.g., an antibody, that binds to a specified cell type such as a cancer cell, endothelial cell, or bone cell, hormones and hormone receptors, non-peptidic species, such as lipids, lectins, carbohydrates, vitamins, cofactors, or a drug.

[0053] Conjugation may result in increased stability and/or half life and may be particularly useful in targeting the polynucleotides, primary constructs or mmRNA to specific sites in the cell, tissue or organism.

[0054] According to the present invention, the mmRNA or primary constructs may be administered with, or further encode one or more of RNAi agents, siRNAs, shRNAs, miRNAs, miRNA binding sites, antisense RNAs, ribozymes, catalytic DNA, tRNA, RNAs that induce triple helix formation, aptamers or vectors, and the like.

[0055] Bifunctional mmRNA

[0056] In one embodiment of the invention are bifunctional polynucleotides (e.g., bifunctional primary constructs or bifunctional mmRNA). As the name implies, bifunctional polynucleotides are those having or capable of at least two functions. These molecules may also by convention be referred to as multi-functional.

[0057] The multiple functionalities of bifunctional polynucleotides may be encoded by the RNA (the function may not manifest until the encoded product is translated) or may be a property of the polynucleotide itself. It may be structural or chemical. Bifunctional modified polynucleotides may comprise a function that is covalently or electrostatically associated with the polynucleotides. Further, the two functions may be provided in the context of a complex of a mmRNA and another molecule.

[0058] Bifunctional polynucleotides may encode peptides which are anti-proliferative. These peptides may be linear, cyclic, constrained or random coil. They may function as aptamers, signaling molecules, ligands or mimics or mimetics thereof. Anti-proliferative peptides may, as translated, be from 3 to 50 amino acids in length. They may be 5-40, 10-30, or approximately 15 amino acids long. They may be single chain, multichain or branched and may form complexes, aggregates or any multi-unit structure once translated.

### Noncoding Polynucleotides and Primary Constructs

[0059] As described herein, provided are polynucleotides and primary constructs having sequences that are partially or substantially not translatable, e.g., having a noncoding region. Such noncoding region may be the “first region” of the primary construct. Alternatively, the noncoding region may be a region other than the first region. Such molecules are generally not translated, but can exert an effect on protein production by one or more of binding to and sequestering one or more translational machinery components such as a ribosomal protein or a transfer RNA (tRNA), thereby effectively reducing protein expression in the cell or modulating one or more pathways or cascades in a cell which in turn alters protein levels. The polynucleotide or primary construct may contain or encode one or more long noncoding RNA (lncRNA, or lincRNA) or portion thereof, a small nucleolar RNA (sno-RNA), micro RNA (miRNA), small interfering RNA (siRNA) or Piwi-interacting RNA (piRNA).

### Polypeptides of Interest

[0060] According to the present invention, the primary construct is designed to encode one or more polypeptides of interest or fragments thereof. A polypeptide of interest may include, but is not limited to, whole polypeptides, a plurality of polypeptides or fragments of polypeptides, which independently may be encoded by one or more nucleic acids, a plurality of nucleic acids, fragments of nucleic acids or variants of any of the aforementioned. As used herein, the term “polypeptides of interest” refer to any polypeptide which is selected to be encoded in the primary construct of the present invention. As used herein, “polypeptide” means a polymer of amino acid residues (natural or unnatural) linked together most often by peptide bonds. The term, as used herein, refers to proteins, polypeptides, and peptides of any size, structure, or function. In some instances the polypeptide encoded is smaller than about 50 amino acids and the polypeptide is then termed a peptide. If the polypeptide is a peptide, it will be at least about 2, 3, 4, or at least 5 amino acid residues long. Thus, polypeptides include gene products, naturally occurring polypeptides, synthetic polypeptides, homologs, orthologs, paralogs, fragments and other equivalents, variants, and analogs of the foregoing. A polypeptide may be a single molecule or may be a multi-molecular complex such as a dimer, trimer or tetramer. They may also comprise single chain or multichain polypeptides such as antibodies or insulin and may be associated or linked. Most commonly disulfide linkages are found in multichain polypeptides. The term polypeptide may also apply to amino acid polymers in which one or more amino acid residues are an artificial chemical analogue of a corresponding naturally occurring amino acid.

[0061] The term “polypeptide variant” refers to molecules which differ in their amino acid sequence from a native or reference sequence. The amino acid sequence variants may possess substitutions, deletions, and/or insertions at certain positions within the amino acid sequence, as compared to a native or reference sequence. Ordinarily, variants will possess at least about 50% identity (homology) to a native or reference sequence, and preferably, they will be at least about 80%, more preferably at least about 90% identical (homologous) to a native or reference sequence.

[0062] In some embodiments “variant mimics” are provided. As used herein, the term “variant mimic” is one which contains one or more amino acids which would mimic an activated sequence. For example, glutamate may serve as a mimic for phosphoro-threonine and/or phosphoro-serine. Alternatively, variant mimics may result in deactivation or in an inactivated product containing the mimic, e.g., phenylalanine may act as an inactivating substitution for tyrosine; or alanine may act as an inactivating substitution for serine.

[0063] “Homology” as it applies to amino acid sequences is defined as the percentage of residues in the candidate amino acid sequence that are identical with the residues in the amino acid sequence of a second sequence after aligning the sequences and introducing gaps, if necessary, to achieve the maximum percent homology. Methods and computer programs for the alignment are well known in the art. It is understood that homology depends on a calculation of percent identity but may differ in value due to gaps and penalties introduced in the calculation.

[0064] By “homologs” as it applies to polypeptide sequences means the corresponding sequence of other species having substantial identity to a second sequence of a second species.

[0065] “Analogs” is meant to include polypeptide variants which differ by one or more amino acid alterations, e.g., substitutions, additions or deletions of amino acid residues that still maintain one or more of the properties of the parent or starting polypeptide.

[0066] The present invention contemplates several types of compositions which are polypeptide based including variants and derivatives. These include substitutional, insertional, deletion and covalent variants and derivatives. The term “derivative” is used synonymously with the term “variant” but generally refers to a molecule that has been modified and/or changed in any way relative to a reference molecule or starting molecule.

[0067] As such, mmRNA encoding polypeptides containing substitutions, insertions and/or additions, deletions and covalent modifications with respect to reference sequences, in particular the polypeptide sequences disclosed herein, are included within the scope of this invention. For example, sequence tags or amino acids, such as one or more lysines, can be added to the peptide sequences of the invention (e.g., at the N-terminal or C-terminal ends). Sequence tags can be used for peptide purification or localization. Lysines can be used to increase peptide solubility or to allow for biotinylation. Alternatively, amino acid residues located at the carboxy and amino terminal regions of the amino acid sequence of a peptide or protein may optionally be deleted providing for truncated sequences. Certain amino acids (e.g., C-terminal or N-terminal residues) may alternatively be deleted depending on the use of the sequence, as for example, expression of the sequence as part of a larger sequence which is soluble, or linked to a solid support.

[0068] “Substitutional variants” when referring to polypeptides are those that have at least one amino acid residue in a native or starting sequence removed and a different amino acid inserted in its place at the same position. The substitutions may be single, where only one amino acid in the molecule has been substituted, or they may be multiple, where two or more amino acids have been substituted in the same molecule.

[0069] As used herein the term “conservative amino acid substitution” refers to the substitution of an amino acid that is normally present in the sequence with a different amino acid of similar size, charge, or polarity. Examples of conservative substitutions include the substitution of a non-polar (hydrophobic) residue such as isoleucine, valine and leucine for another non-polar residue. Likewise, examples of conservative substitutions include the substitution of one polar (hydrophilic) residue for another such as between arginine and lysine, between glutamine and asparagine, and between glycine and serine. Additionally, the substitution of a basic residue such as lysine, arginine or histidine for another, or the substitution of one acidic residue such as aspartic acid or glutamic acid for another acidic residue are additional examples of conservative substitutions. Examples of non-conservative substitutions include the substitution of a non-polar (hydrophobic) amino acid residue such as isoleucine, valine, leucine, alanine, methionine for a polar (hydrophilic) residue such as cysteine, glutamine, glutamic acid or lysine and/or a polar residue for a non-polar residue.

[0070] “Insertional variants” when referring to polypeptides are those with one or more amino acids inserted immediately adjacent to an amino acid at a particular position in a native or starting sequence. “Immediately adjacent” to an amino acid means connected to either the alpha-carboxy or alpha-amino functional group of the amino acid.

[0071] “Deletional variants” when referring to polypeptides are those with one or more amino acids in the native or starting amino acid sequence removed. Ordinarily, deletional variants will have one or more amino acids deleted in a particular region of the molecule.

[0072] “Covalent derivatives” when referring to polypeptides include modifications of a native or starting protein with an organic proteinaceous or non-proteinaceous derivatizing agent, and/or post-translational modifications. Covalent modifications are traditionally introduced by reacting targeted amino acid residues of the protein with an organic derivatizing agent that is capable of reacting with selected side-chains or terminal residues, or by harnessing mechanisms of post-translational modifications that function in selected recombinant host cells. The resultant covalent derivatives are useful in programs directed at identifying residues important for biological activity, for immunoassays, or for the preparation of anti-protein antibodies for immunoaffinity purification of the recombinant glycoprotein. Such modifications are within the ordinary skill in the art and are performed without undue experimentation.

[0073] Certain post-translational modifications are the result of the action of recombinant host cells on the expressed polypeptide. Glutaminyl and asparaginyl residues are frequently post-translationally deamidated to the corresponding glutamyl and aspartyl residues. Alternatively, these residues are deamidated under mildly acidic conditions. Either form of these residues may be present in the polypeptides produced in accordance with the present invention.

[0074] Other post-translational modifications include hydroxylation of proline and lysine, phosphorylation of hydroxyl groups of seryl or threonyl residues, methylation of the alpha-amino groups of lysine, arginine, and histidine side chains (T. E. Creighton, Proteins: Structure and Molecular Properties, W.H. Freeman & Co., San Francisco, pp. 79-86 (1983)).

[0075] “Features” when referring to polypeptides are defined as distinct amino acid sequence-based components of a molecule. Features of the polypeptides encoded by the mmRNA of the present invention include surface manifestations, local conformational shape, folds, loops, half-loops, domains, half-domains, sites, termini or any combination thereof.

[0076] As used herein when referring to polypeptides the term “surface manifestation” refers to a polypeptide based component of a protein appearing on an outermost surface.

[0077] As used herein when referring to polypeptides the term “local conformational shape” means a polypeptide based structural manifestation of a protein which is located within a definable space of the protein.

[0078] As used herein when referring to polypeptides the term “fold” refers to the resultant conformation of an amino acid sequence upon energy minimization. A fold may occur at the secondary or tertiary level of the folding process. Examples of secondary level folds include beta sheets and alpha helices. Examples of tertiary folds include domains and regions formed due to aggregation or separation of energetic forces. Regions formed in this way include hydrophobic and hydrophilic pockets, and the like.

[0079] As used herein the term “turn” as it relates to protein conformation means a bend which alters the direction of the backbone of a peptide or polypeptide and may involve one, two, three or more amino acid residues.

[0080] As used herein when referring to polypeptides the term “loop” refers to a structural feature of a polypeptide which may serve to reverse the direction of the backbone of a peptide or polypeptide. Where the loop is found in a polypeptide and only alters the direction of the backbone, it may comprise four or more amino acid residues. Oliva et al. have identified at least 5 classes of protein loops (J. Mol Biol 266 (4): 814-830; 1997). Loops may be open or closed. Closed loops or “cyclic” loops may comprise 2, 3, 4, 5, 6, 7, 8, 9, 10 or more amino acids between the bridging moieties. Such bridging moieties may comprise a cysteine-cysteine bridge (Cys-Cys) typical in polypeptides having disulfide bridges or alternatively bridging moieties may be non-protein based such as the dibromozylyl agents used herein.

[0081] As used herein when referring to polypeptides the term “half-loop” refers to a portion of an identified loop having at least half the number of amino acid resides as the loop from which it is derived. It is understood that loops may not always contain an even number of amino acid residues. Therefore, in those cases where a loop contains or is identified to comprise an odd number of amino acids, a half-loop of the odd-numbered loop will comprise the whole number portion or next whole number portion of the loop (number of amino acids of the loop/2+/−0.5 amino acids). For example, a loop identified as a 7 amino acid loop could produce half-loops of 3 amino acids or 4 amino acids (7/2=3.5+/−0.5 being 3 or 4).

[0082] As used herein when referring to polypeptides the term “domain” refers to a motif of a polypeptide having one or more identifiable structural or functional characteristics or properties (e.g., binding capacity, serving as a site for protein-protein interactions).

[0083] As used herein when referring to polypeptides the term “half-domain” means a portion of an identified domain having at least half the number of amino acid resides as the domain from which it is derived. It is understood that domains may not always contain an even number of amino acid residues. Therefore, in those cases where a domain contains or is identified to comprise an odd number of amino acids, a half-domain of the odd-numbered domain will comprise the whole number portion or next whole number portion of the domain (number of amino acids of the domain/2+/−0.5 amino acids). For example, a domain identified as a 7 amino acid domain could produce half-domains of 3 amino acids or 4 amino acids (7/2=3.5+/−0.5 being 3 or 4). It is also understood that sub-domains may be identified within domains or half-domains, these subdomains possessing less than all of the structural or functional properties identified in the domains or half domains from which they were derived. It is also understood that the amino acids that comprise any of the domain types herein need not be contiguous along the backbone of the polypeptide (i.e., nonadjacent amino acids may fold structurally to produce a domain, half-domain or subdomain).

[0084] As used herein when referring to polypeptides the terms “site” as it pertains to amino acid based embodiments is used synonymously with “amino acid residue” and “amino acid side chain.” A site represents a position within a peptide or polypeptide that may be modified, manipulated, altered, derivatized or varied within the polypeptide based molecules of the present invention.

[0085] As used herein the terms “termini” or “terminus” when referring to polypeptides refers to an extremity of a peptide or polypeptide. Such extremity is not limited only to the first or final site of the peptide or polypeptide but may include additional amino acids in the terminal regions. The polypeptide based molecules of the present invention may be characterized as having both an N-terminus (terminated by an amino acid with a free amino group (NH2)) and a C-terminus (terminated by an amino acid with a free carboxyl group (COOH)). Proteins of the invention are in some cases made up of multiple polypeptide chains brought together by disulfide bonds or by non-covalent forces (multimers, oligomers). These sorts of proteins will have multiple N- and C-termini. Alternatively, the termini of the polypeptides may be modified such that they begin or end, as the case may be, with a non-polypeptide based moiety such as an organic conjugate.

[0086] Once any of the features have been identified or defined as a desired component of a polypeptide to be encoded by the primary construct or mmRNA of the invention, any of several manipulations and/or modifications of these features may be performed by moving, swapping, inverting, deleting, randomizing or duplicating. Furthermore, it is understood that manipulation of features may result in the same outcome as a modification to the molecules of the invention. For example, a manipulation which involved deleting a domain would result in the alteration of the length of a molecule just as modification of a nucleic acid to encode less than a full length molecule would.

[0087] Modifications and manipulations can be accomplished by methods known in the art such as, but not limited to, site directed mutagenesis. The resulting modified molecules may then be tested for activity using in vitro or in vivo assays such as those described herein or any other suitable screening assay known in the art.

[0088] According to the present invention, the polypeptides may comprise a consensus sequence which is discovered through rounds of experimentation. As used herein a “consensus” sequence is a single sequence which represents a collective population of sequences allowing for variability at one or more sites.

[0089] As recognized by those skilled in the art, protein fragments, functional protein domains, and homologous proteins are also considered to be within the scope of polypeptides of interest of this invention. For example, provided herein is any protein fragment (meaning a polypeptide sequence at least one amino acid residue shorter than a reference polypeptide sequence but otherwise identical) of a reference protein 10, 20, 30, 40, 50, 60, 70, 80, 90, 100 or greater than 100 amino acids in length. In another example, any protein that includes a stretch of about 20, about 30, about 40, about 50, or about 100 amino acids which are about 40%, about 50%, about 60%, about 70%, about 80%, about 90%, about 95%, or about 100% identical to any of the sequences described herein can be utilized in accordance with the invention. In certain embodiments, a polypeptide to be utilized in accordance with the invention includes 2, 3, 4, 5, 6, 7, 8, 9, 10, or more mutations as shown in any of the sequences provided or referenced herein.

### Encoded Polypeptides

[0090] The primary constructs or mmRNA of the present invention may be designed to encode polypeptides of interest selected from any of several target categories including, but not limited to, biologics, antibodies, vaccines, therapeutic proteins or peptides, cell penetrating peptides, secreted proteins, plasma membrane proteins, cytoplasmic or cytoskeletal proteins, intracellular membrane bound proteins, nuclear proteins, proteins associated with human disease, targeting moieties or those proteins encoded by the human genome for which no therapeutic indication has been identified but which nonetheless have utility in areas of research and discovery.

[0091] In one embodiment primary constructs or mmRNA may encode variant polypeptides which have a certain identity with a reference polypeptide sequence. As used herein, a “reference polypeptide sequence” refers to a starting polypeptide sequence. Reference sequences may be wild type sequences or any sequence to which reference is made in the design of another sequence. A “reference polypeptide sequence” may, e.g., be any one of SEQ ID NOs: 4924-9439 as disclosed herein, e.g., any of SEQ ID NOs 4672, 4673, 4674, 4675, 4676, 4677, 4678, 4679, 4680, 4681, 4682, 4683, 4684, 4685, 4686, 4687, 4688, 4689, 4690, 4691, 4692, 4693, 4694, 4695, 4696, 4697, 4698, 4699, 4700, 4701, 4702, 4703, 4704, 4705, 4706, 4707, 4708, 4709, 4710, 4711, 4712, 4713, 4714, 4715, 4716, 4717, 4718, 4719, 4720, 4721, 4722, 4723, 4724, 4725, 4726, 4727, 4728, 4729, 4730, 4731, 4732, 4733, 4734, 4735, 4736, 4737, 4738, 4739, 4740, 4741, 4742, 4743, 4744, 4745, 4746, 4747, 4748, 4749, 4750, 4751, 4752, 4753, 4754, 4755, 4756, 4757, 4758, 4759, 4760, 4761, 4762, 4763, 4764, 4765, 4766, 4767, 4768, 4769, 4770, 4771, 4772, 4773, 4774, 4775, 4776, 4777, 4778, 4779, 4780, 4781, 4782, 4783, 4784, 4785, 4786, 4787, 4788, 4789, 4790, 4791, 4792, 4793, 4794, 4795, 4796, 4797, 4798, 4799, 4800, 4801, 4802, 4803, 4804, 4805, 4806, 4807, 4808, 4809, 4810, 4811, 4812, 4813, 4814, 4815, 4816, 4817, 4818, 4819, 4820, 4821, 4822, 4823, 4824, 4825, 4826, 4827, 4828, 4829, 4830, 4831, 4832, 4833, 4834, 4835, 4836, 4837, 4838, 4839, 4840, 4841, 4842, 4843, 4844, 4845, 4846, 4847, 4848, 4849, 4850, 4851, 4852, 4853, 4854, 4855, 4856, 4857, 4858, 4859, 4860, 4861, 4862, 4863, 4864, 4865, 4866, 4867, 4868, 4869, 4870, 4871, 4872, 4873, 4874, 4875, 4876, 4877, 4878, 4879, 4880, 4881, 4882, 4883, 4884, 4885, 4886, 4887, 4888, 4889, 4890, 4891, 4892, 4893, 4894, 4895, 4896, 4897, 4898, 4899, 4900, 4901, 4902, 4903, 4904, 4905, 4906, 4907, 4908, 4909, 4910, 4911, 4912, 4913, 4914, 4915, 4916, 4917, 4918, 4919, 4920, 4921, 4922, 4923, 4924, 4925, 4926, 4927, 4928, 4929, 4930, 4931, 4932, 4933, 4934, 4935, 4936, 4937, 4938, 4939, 4940, 4941, 4942, 4943, 4944, 4945, 4946, 4947, 4948, 4949, 4950, 4951, 4952, 4953, 4954, 4955, 4956, 4957, 4958, 4959, 4960, 4961, 4962, 4963, 4964, 4965, 4966, 4967, 4968, 4969, 4970, 4971, 4972, 4973, 4974, 4975, 4976, 4977, 4978, 4979, 4980, 4981, 4982, 4983, 4984, 4985, 4986, 4987, 4988, 4989, 4990, 4991, 4992, 4993, 4994, 4995, 4996, 4997, 4998, 4999, 5000, 5001, 5002, 5003, 5004, 5005, 5006, 5007, 5008, 5009, 5010, 5011, 5012, 5013, 5014, 5015, 5016, 5017, 5018, 5019, 5020, 5021, 5022, 5023, 5024, 5025, 5026, 5027, 5028, 5029, 5030, 5031, 5032, 5033, 5034, 5035, 5036, 5037, 5038, 5039, 5040, 5041, 5042, 5043, 5044, 5045, 5046, 5047, 5048, 5049, 5050, 5051, 5052, 5053, 5054, 5055, 5056, 5057, 5058, 5059, 5060, 5061, 5062, 5063, 5064, 5065, 5066, 5067, 5068, 5069, 5070, 5071, 5072, 5073, 5074, 5075, 5076, 5077, 5078, 5079, 5080, 5081, 5082, 5083, 5084, 5085, 5086, 5087, 5088, 5089, 5090, 5091, 5092, 5093, 5094, 5095, 5096, 5097, 5098, 5099, 5100, 5101, 5102, 5103, 5104, 5105, 5106, 5107, 5108, 5109, 5110, 5111, 5112, 5113, 5114,5115, 5116, 5117, 5118, 5119, 5120, 5121, 5122, 5123, 5124, 5125, 5126, 5127, 5128, 5129, 5130, 5131, 5132, 5133, 5134, 5135, 5136, 5137, 5138, 5139, 5140, 5141, 5142, 5143, 5144, 5145, 5146, 5147, 5148, 5149, 5150, 5151, 5152, 5153, 5154, 5155, 5156, 5157, 5158, 5159, 5160, 5161, 5162, 5163, 5164, 5165, 5166, 5167, 5168, 5169, 5170, 5171, 5172, 5173, 5174, 5175, 5176, 5177, 5178, 5179, 5180, 5181, 5182, 5183, 5184, 5185, 5186, 5187, 5188, 5189, 5190, 5191, 5192, 5193, 5194, 5195, 5196, 5197, 5198, 5199, 5200, 5201, 5202, 5203, 5204, 5205, 5206, 5207, 5208, 5209, 5210, 5211, 5212, 5213, 5214, 5215, 5216, 5217, 5218, 5219, 5220, 5221, 5222, 5223, 5224, 5225, 5226, 5227, 5228, 5229, 5230, 5231, 5232, 5233, 5234, 5235, 5236, 5237, 5238, 5239, 5240, 5241, 5242, 5243, 5244, 5245, 5246, 5247, 5248, 5249, 5250, 5251, 5252, 5253, 5254, 5255, 5256, 5257, 5258, 5259, 5260, 5261, 5262, 5263, 5264, 5265, 5266, 5267, 5268, 5269, 5270, 5271, 5272, 5273, 5274, 5275, 5276, 5277, 5278, 5279, 5280, 5281, 5282, 5283, 5284, 5285, 5286, 5287, 5288, 5289, 5290, 5291, 5292, 5293, 5294, 5295, 5296, 5297, 5298, 5299, 5300, 5301, 5302, 5303, 5304, 5305, 5306, 5307, 5308, 5309, 5310, 5311, 5312, 5313, 5314, 5315, 5316, 5317, 5318, 5319, 5320, 5321, 5322, 5323, 5324, 5325, 5326, 5327, 5328, 5329, 5330, 5331, 5332, 5333, 5334, 5335, 5336, 5337, 5338, 5339, 5340, 5341, 5342, 5343, 5344, 5345, 5346, 5347, 5348, 5349, 5350, 5351, 5352, 5353, 5354, 5355, 5356, 5357, 5358, 5359, 5360, 5361, 5362, 5363, 5364, 5365, 5366, 5367, 5368, 5369, 5370, 5371, 5372, 5373, 5374, 5375, 5376, 5377, 5378, 5379, 5380, 5381, 5382, 5383, 5384, 5385, 5386, 5387, 5388, 5389, 5390, 5391, 5392, 5393, 5394, 5395, 5396, 5397, 5398, 5399, 5400, 5401, 5402, 5403, 5404, 5405, 5406, 5407, 5408, 5409, 5410, 5411, 5412, 5413, 5414, 5415, 5416, 5417, 5418, 5419, 5420, 5421, 5422, 5423, 5424, 5425, 5426, 5427, 5428, 5429, 5430, 5431, 5432, 5433, 5434, 5435, 5436, 5437, 5438, 5439, 5440, 5441, 5442, 5443, 5444, 5445, 5446, 5447, 5448, 5449, 5450, 5451, 5452, 5453, 5454, 5455, 5456, 5457, 5458, 5459, 5460, 5461, 5462, 5463, 5464, 5465, 5466, 5467, 5468, 5469, 5470, 5471, 5472, 5473, 5474, 5475, 5476, 5477, 5478, 5479, 5480, 5481, 5482, 5483, 5484, 5485, 5486, 5487, 5488, 5489, 5490, 5491, 5492, 5493, 5494, 5495, 5496, 5497, 5498, 5499, 5500, 5501, 5502, 5503, 5504, 5505, 5506, 5507, 5508, 5509, 5510, 5511, 5512, 5513, 5514, 5515, 5516, 5517, 5518, 5519, 5520, 5521, 5522, 5523, 5524, 5525, 5526, 5527, 5528, 5529, 5530, 5531, 5532, 5533, 5534, 5535, 5536, 5537, 5538, 5539, 5540, 5541, 5542, 5543, 5544, 5545, 5546, 5547, 5548, 5549, 5550, 5551, 5552, 5553, 5554, 5555, 5556, 5557, 5558, 5559, 5560, 5561, 5562, 5563, 5564, 5565, 5566, 5567, 5568, 5569, 5570, 5571, 5572, 5573, 5574, 5575, 5576, 5577, 5578, 5579, 5580, 5581, 5582, 5583, 5584, 5585, 5586, 5587, 5588, 5589, 5590, 5591, 5592, 5593, 5594, 5595, 5596, 5597, 5598, 5599, 5600, 5601, 5602, 5603, 5604, 5605, 5606, 5607, 5608, 5609, 5610, 5611, 5612, 5613, 5614, 5615, 5616, 5617, 5618, 5619, 5620, 5621, 5622, 5623, 5624, 5625, 5626, 5627, 5628, 5629, 5630, 5631, 5632, 5633, 5634, 5635, 5636, 5637, 5638, 5639, 5640, 5641, 5642, 5643, 5644, 5645, 5646, 5647, 5648, 5649, 5650, 5651, 5652, 5653, 5654, 5655, 5656, 5657, 5658, 5659, 5660, 5661, 5662, 5663, 5664, 5665, 5666, 5667, 5668, 5669, 5670, 5671, 5672, 5673, 5674, 5675, 5676, 5677, 5678, 5679, 5680, 5681, 5682, 5683, 5684, 5685, 5686, 5687, 5688, 5689, 5690, 5691, 5692, 5693, 5694, 5695, 5696, 5697, 5698, 5699, 5700, 5701, 5702, 5703, 5704, 5705, 5706, 5707, 5708, 5709, 5710, 5711, 5712, 5713, 5714, 5715, 5716, 5717, 5718, 5719, 5720, 5721, 5722, 5723, 5724, 5725, 5726, 5727, 5728, 5729, 5730, 5731, 5732, 5733, 5734, 5735, 5736, 5737, 5738, 5739, 5740, 5741, 5742, 5743, 5744, 5745, 5746, 5747, 5748, 5749, 5750, 5751, 5752, 5753, 5754, 5755, 5756, 5757, 5758, 5759, 5760, 5761, 5762, 5763, 5764, 5765, 5766, 5767, 5768, 5769, 5770, 5771, 5772, 5773, 5774, 5775, 5776, 5777, 5778, 5779, 5780, 5781, 5782, 5783, 5784, 5785, 5786, 5787, 5788, 5789, 5790, 5791, 5792, 5793, 5794, 5795, 5796, 5797, 5798, 5799, 5800, 5801, 5802, 5803, 5804, 5805, 5806, 5807, 5808, 5809, 5810, 5811, 5812, 5813, 5814, 5815, 5816, 5817, 5818, 5819, 5820, 5821, 5822, 5823, 5824, 5825, 5826, 5827, 5828, 5829, 5830, 5831, 5832, 5833, 5834, 5835, 5836, 5837, 5838, 5839, 5840, 5841, 5842, 5843, 5844, 5845, 5846, 5847, 5848, 5849, 5850, 5851, 5852, 5853, 5854, 5855, 5856, 5857, 5858, 5859, 5860, 5861, 5862, 5863, 5864, 5865, 5866, 5867, 5868, 5869, 5870, 5871, 5872, 5873, 5874, 5875, 5876, 5877, 5878, 5879, 5880, 5881, 5882, 5883, 5884, 5885, 5886, 5887, 5888, 5889, 5890, 5891, 5892, 5893, 5894, 5895, 5896, 5897, 5898, 5899, 5900, 5901, 5902, 5903, 5904, 5905, 5906, 5907, 5908, 5909, 5910, 5911, 5912, 5913, 5914, 5915, 5916, 5917, 5918, 5919, 5920, 5921, 5922, 5923, 5924, 5925, 5926, 5927, 5928, 5929, 5930, 5931, 5932, 5933, 5934, 5935, 5936, 5937, 5938, 5939, 5940, 5941, 5942, 5943, 5944, 5945, 5946, 5947, 5948, 5949, 5950, 5951, 5952, 5953, 5954, 5955, 5956, 5957, 5958, 5959, 5960, 5961, 5962, 5963, 5964, 5965, 5966, 5967, 5968, 5969, 5970, 5971, 5972, 5973, 5974, 5975, 5976, 5977, 5978, 5979, 5980, 5981, 5982, 5983, 5984, 5985, 5986, 5987, 5988, 5989, 5990, 5991, 5992, 5993, 5994, 5995, 5996, 5997, 5998, 5999, 6000, 6001, 6002, 6003, 6004, 6005, 6006, 6007, 6008, 6009, 6010, 6011, 6012, 6013, 6014, 6015, 6016, 6017, 6018, 6019, 6020, 6021, 6022, 6023, 6024, 6025, 6026, 6027, 6028, 6029, 6030, 6031, 6032, 6033, 6034, 6035, 6036, 6037, 6038, 6039, 6040, 6041, 6042, 6043, 6044, 6045, 6046, 6047, 6048, 6049, 6050, 6051, 6052, 6053, 6054, 6055, 6056, 6057, 6058, 6059, 6060, 6061, 6062, 6063, 6064, 6065, 6066, 6067, 6068, 6069, 6070, 6071, 6072, 6073, 6074, 6075, 6076, 6077, 6078, 6079, 6080, 6081, 6082, 6083, 6084, 6085, 6086, 6087, 6088, 6089, 6090, 6091, 6092, 6093, 6094, 6095, 6096, 6097, 6098, 6099, 6100, 6101, 6102, 6103, 6104, 6105, 6106, 6107, 6108, 6109, 6110, 6111, 6112, 6113, 6114, 6115, 6116, 6117, 6118, 6119, 6120, 6121, 6122, 6123, 6124, 6125, 6126, 6127, 6128, 6129, 6130, 6131, 6132, 6133, 6134, 6135, 6136, 6137, 6138, 6139, 6140, 6141, 6142, 6143, 6144, 6145, 6146, 6147, 6148, 6149, 6150, 6151, 6152, 6153, 6154, 6155, 6156, 6157, 6158, 6159, 6160, 6161, 6162, 6163, 6164, 6165, 6166, 6167, 6168, 6169, 6170, 6171, 6172, 6173, 6174, 6175, 6176, 6177, 6178, 6179, 6180, 6181, 6182, 6183, 6184, 6185, 6186, 6187, 6188, 6189, 6190, 6191, 6192, 6193, 6194, 6195, 6196, 6197, 6198, 6199, 6200, 6201, 6202, 6203, 6204, 6205, 6206, 6207, 6208, 6209, 6210, 6211, 6212, 6213, 6214, 6215, 6216, 6217, 6218, 6219, 6220, 6221, 6222, 6223, 6224, 6225, 6226, 6227, 6228, 6229, 6230, 6231, 6232, 6233, 6234, 6235, 6236, 6237, 6238, 6239, 6240, 6241, 6242, 6243, 6244, 6245, 6246, 6247, 6248, 6249, 6250, 6251, 6252, 6253, 6254, 6255, 6256, 6257, 6258, 6259, 6260, 6261, 6262, 6263, 6264, 6265, 6266, 6267, 6268, 6269, 6270, 6271, 6272, 6273, 6274, 6275, 6276, 6277, 6278, 6279, 6280, 6281, 6282, 6283, 6284, 6285, 6286, 6287, 6288, 6289, 6290, 6291, 6292, 6293, 6294, 6295, 6296, 6297, 6298, 6299, 6300, 6301, 6302, 6303, 6304, 6305, 6306, 6307, 6308, 6309, 6310, 6311, 6312, 6313, 6314, 6315, 6316, 6317, 6318, 6319, 6320, 6321, 6322, 6323, 6324, 6325, 6326, 6327, 6328, 6329, 6330, 6331, 6332, 6333, 6334, 6335, 6336, 6337, 6338, 6339, 6340, 6341, 6342, 6343, 6344, 6345, 6346, 6347, 6348, 6349, 6350, 6351, 6352, 6353, 6354, 6355, 6356, 6357, 6358, 6359, 6360, 6361, 6362, 6363, 6364, 6365, 6366, 6367, 6368, 6369, 6370, 6371, 6372, 6373, 6374, 6375, 6376, 6377, 6378, 6379, 6380, 6381, 6382, 6383, 6384, 6385, 6386, 6387, 6388, 6389, 6390, 6391, 6392, 6393, 6394, 6395, 6396, 6397, 6398, 6399, 6400, 6401, 6402, 6403, 6404, 6405, 6406, 6407, 6408, 6409, 6410, 6411, 6412, 6413, 6414, 6415, 6416, 6417, 6418, 6419, 6420, 6421, 6422, 6423, 6424, 6425, 6426, 6427, 6428, 6429, 6430, 6431, 6432, 6433, 6434, 6435, 6436, 6437, 6438, 6439, 6440, 6441, 6442, 6443, 6444, 6445, 6446, 6447, 6448, 6449, 6450, 6451, 6452, 6453, 6454, 6455, 6456, 6457, 6458, 6459, 6460, 6461, 6462, 6463, 6464, 6465, 6466, 6467, 6468, 6469, 6470, 6471, 6472, 6473, 6474, 6475, 6476, 6477, 6478, 6479, 6480, 6481, 6482, 6483, 6484, 6485, 6486, 6487, 6488, 6489, 6490, 6491, 6492, 6493, 6494, 6495, 6496, 6497, 6498, 6499, 6500, 6501, 6502, 6503, 6504, 6505, 6506, 6507, 6508, 6509, 6510, 6511, 6512, 6513, 6514, 6515, 6516, 6517, 6518, 6519, 6520, 6521, 6522, 6523, 6524, 6525, 6526, 6527, 6528, 6529, 6530, 6531, 6532, 6533, 6534, 6535, 6536, 6537, 6538, 6539, 6540, 6541, 6542, 6543, 6544, 6545, 6546, 6547, 6548, 6549, 6550, 6551, 6552, 6553, 6554, 6555, 6556, 6557, 6558, 6559, 6560, 6561, 6562, 6563, 6564, 6565, 6566, 6567, 6568, 6569, 6570, 6571, 6572, 6573, 6574, 6575, 6576, 6577, 6578, 6579, 6580, 6581, 6582, 6583, 6584, 6585, 6586, 6587, 6588, 6589, 6590, 6591, 6592, 6593, 6594, 6595, 6596, 6597, 6598, 6599, 6600, 6601, 6602, 6603, 6604, 6605, 6606, 6607, 6608, 6609, 6610, 6611, 6612, 6613, 6614, 6615, 6616, 6617, 6618, 6619, 6620, 6621, 6622, 6623, 6624, 6625, 6626, 6627, 6628, 6629, 6630, 6631, 6632, 6633, 6634, 6635, 6636, 6637, 6638, 6639, 6640, 6641, 6642, 6643, 6644, 6645, 6646, 6647, 6648, 6649, 6650, 6651, 6652, 6653, 6654, 6655, 6656, 6657, 6658, 6659, 6660, 6661, 6662, 6663, 6664, 6665, 6666, 6667, 6668, 6669, 6670, 6671, 6672, 6673, 6674, 6675, 6676, 6677, 6678, 6679, 6680, 6681, 6682, 6683, 6684, 6685, 6686, 6687, 6688, 6689, 6690, 6691, 6692, 6693, 6694, 6695, 6696, 6697, 6698, 6699, 6700, 6701, 6702, 6703, 6704, 6705, 6706, 6707, 6708, 6709, 6710, 6711, 6712, 6713, 6714, 6715, 6716, 6717, 6718, 6719, 6720, 6721, 6722, 6723, 6724, 6725, 6726, 6727, 6728, 6729, 6730, 6731, 6732, 6733, 6734, 6735, 6736, 6737, 6738, 6739, 6740, 6741, 6742, 6743, 6744, 6745, 6746, 6747, 6748, 6749, 6750, 6751, 6752, 6753, 6754, 6755, 6756, 6757, 6758, 6759, 6760, 6761, 6762, 6763, 6764, 6765, 6766, 6767, 6768, 6769, 6770, 6771, 6772, 6773, 6774, 6775, 6776, 6777, 6778, 6779, 6780, 6781, 6782, 6783, 6784, 6785, 6786, 6787, 6788, 6789, 6790, 6791, 6792, 6793, 6794, 6795, 6796, 6797, 6798, 6799, 6800, 6801, 6802, 6803, 6804, 6805, 6806, 6807, 6808, 6809, 6810, 6811, 6812, 6813, 6814, 6815, 6816, 6817, 6818, 6819, 6820, 6821, 6822, 6823, 6824, 6825, 6826, 6827, 6828, 6829, 6830, 6831, 6832, 6833, 6834, 6835, 6836, 6837, 6838, 6839, 6840, 6841, 6842, 6843, 6844, 6845, 6846, 6847, 6848, 6849, 6850, 6851, 6852, 6853, 6854, 6855, 6856, 6857, 6858, 6859, 6860, 6861, 6862, 6863, 6864, 6865, 6866, 6867, 6868, 6869, 6870, 6871, 6872, 6873, 6874, 6875, 6876, 6877, 6878, 6879, 6880, 6881, 6882, 6883, 6884, 6885, 6886, 6887, 6888, 6889, 6890, 6891, 6892, 6893, 6894, 6895, 6896, 6897, 6898, 6899, 6900, 6901, 6902, 6903, 6904, 6905, 6906, 6907, 6908, 6909, 6910, 6911, 6912, 6913, 6914, 6915, 6916, 6917, 6918, 6919, 6920, 6921, 6922, 6923, 6924, 6925, 6926, 6927, 6928, 6929, 6930, 6931, 6932, 6933, 6934, 6935, 6936, 6937, 6938, 6939, 6940, 6941, 6942, 6943, 6944, 6945, 6946, 6947, 6948, 6949, 6950, 6951, 6952, 6953, 6954, 6955, 6956, 6957, 6958, 6959, 6960, 6961, 6962, 6963, 6964, 6965, 6966, 6967, 6968, 6969, 6970, 6971, 6972, 6973, 6974, 6975, 6976, 6977, 6978, 6979, 6980, 6981, 6982, 6983, 6984, 6985, 6986, 6987, 6988, 6989, 6990, 6991, 6992, 6993, 6994, 6995, 6996, 6997, 6998, 6999, 7000, 7001, 7002, 7003, 7004, 7005, 7006, 7007, 7008, 7009, 7010, 7011, 7012, 7013, 7014, 7015, 7016, 7017, 7018, 7019, 7020, 7021, 7022, 7023, 7024, 7025, 7026, 7027, 7028, 7029, 7030, 7031, 7032, 7033, 7034, 7035, 7036, 7037, 7038, 7039, 7040, 7041, 7042, 7043, 7044, 7045, 7046, 7047, 7048, 7049, 7050, 7051, 7052, 7053, 7054, 7055, 7056, 7057, 7058, 7059, 7060, 7061, 7062, 7063, 7064, 7065, 7066, 7067, 7068, 7069, 7070, 7071, 7072, 7073, 7074, 7075, 7076, 7077, 7078, 7079, 7080, 7081, 7082, 7083, 7084, 7085, 7086, 7087, 7088, 7089, 7090, 7091, 7092, 7093, 7094, 7095, 7096, 7097, 7098, 7099, 7100, 7101, 7102, 7103, 7104, 7105, 7106, 7107, 7108, 7109, 7110, 7111, 7112, 7113, 7114, 7115, 7116, 7117, 7118, 7119, 7120, 7121, 7122, 7123, 7124, 7125, 7126, 7127, 7128, 7129, 7130, 7131, 7132, 7133, 7134, 7135, 7136, 7137, 7138, 7139, 7140, 7141, 7142, 7143, 7144, 7145, 7146, 7147, 7148, 7149, 7150, 7151, 7152, 7153, 7154, 7155, 7156, 7157, 7158, 7159, 7160, 7161, 7162, 7163, 7164, 7165, 7166, 7167, 7168, 7169, 7170, 7171, 7172, 7173, 7174, 7175, 7176, 7177, 7178, 7179, 7180, 7181, 7182, 7183, 7184, 7185, 7186, 7187, 7188, 7189, 7190, 7191, 7192, 7193, 7194, 7195, 7196, 7197, 7198, 7199, 7200, 7201, 7202, 7203, 7204, 7205, 7206, 7207, 7208, 7209, 7210, 7211, 7212, 7213, 7214, 7215, 7216, 7217, 7218, 7219, 7220, 7221, 7222, 7223, 7224, 7225, 7226, 7227, 7228, 7229, 7230, 7231, 7232, 7233, 7234, 7235, 7236, 7237, 7238, 7239, 7240, 7241, 7242, 7243, 7244, 7245, 7246, 7247, 7248, 7249, 7250, 7251, 7252, 7253, 7254, 7255, 7256, 7257, 7258, 7259, 7260, 7261, 7262, 7263, 7264, 7265, 7266, 7267, 7268, 7269, 7270, 7271, 7272, 7273, 7274, 7275, 7276, 7277, 7278, 7279, 7280, 7281, 7282, 7283, 7284, 7285, 7286, 7287, 7288, 7289, 7290, 7291, 7292, 7293, 7294, 7295, 7296, 7297, 7298, 7299, 7300, 7301, 7302, 7303, 7304, 7305, 7306, 7307, 7308, 7309, 7310, 7311, 7312, 7313, 7314, 7315, 7316, 7317, 7318, 7319, 7320, 7321, 7322, 7323, 7324, 7325, 7326, 7327, 7328, 7329, 7330, 7331, 7332, 7333, 7334, 7335, 7336, 7337, 7338, 7339, 7340, 7341, 7342, 7343, 7344, 7345, 7346, 7347, 7348, 7349, 7350, 7351, 7352, 7353, 7354, 7355, 7356, 7357, 7358, 7359, 7360, 7361, 7362, 7363, 7364, 7365, 7366, 7367, 7368, 7369, 7370, 7371, 7372, 7373, 7374, 7375, 7376, 7377, 7378, 7379, 7380, 7381, 7382, 7383, 7384, 7385, 7386, 7387, 7388, 7389, 7390, 7391, 7392, 7393, 7394, 7395, 7396, 7397, 7398, 7399, 7400, 7401, 7402, 7403, 7404, 7405, 7406, 7407, 7408, 7409, 7410, 7411, 7412, 7413, 7414, 7415, 7416, 7417, 7418, 7419, 7420, 7421, 7422, 7423, 7424, 7425, 7426, 7427, 7428, 7429, 7430, 7431, 7432, 7433, 7434, 7435, 7436, 7437, 7438, 7439, 7440, 7441, 7442, 7443, 7444, 7445, 7446, 7447, 7448, 7449, 7450, 7451, 7452, 7453, 7454, 7455, 7456, 7457, 7458, 7459, 7460, 7461, 7462, 7463, 7464, 7465, 7466, 7467, 7468, 7469, 7470, 7471, 7472, 7473, 7474, 7475, 7476, 7477, 7478, 7479, 7480, 7481, 7482, 7483, 7484, 7485, 7486, 7487, 7488, 7489, 7490, 7491, 7492, 7493, 7494, 7495, 7496, 7497, 7498, 7499, 7500, 7501, 7502, 7503, 7504, 7505, 7506, 7507, 7508, 7509, 7510, 7511, 7512, 7513, 7514, 7515, 7516, 7517, 7518, 7519, 7520, 7521, 7522, 7523, 7524, 7525, 7526, 7527, 7528, 7529, 7530, 7531, 7532, 7533, 7534, 7535, 7536, 7537, 7538, 7539, 7540, 7541, 7542, 7543, 7544, 7545, 7546, 7547, 7548, 7549, 7550, 7551, 7552, 7553, 7554, 7555, 7556, 7557, 7558, 7559, 7560, 7561, 7562, 7563, 7564, 7565, 7566, 7567, 7568, 7569, 7570, 7571, 7572, 7573, 7574, 7575, 7576, 7577, 7578, 7579, 7580, 7581, 7582, 7583, 7584, 7585, 7586, 7587, 7588, 7589, 7590, 7591, 7592, 7593, 7594, 7595, 7596, 7597, 7598, 7599, 7600, 7601, 7602, 7603, 7604, 7605, 7606, 7607, 7608, 7609, 7610, 7611, 7612, 7613, 7614, 7615, 7616, 7617, 7618, 7619, 7620, 7621, 7622, 7623, 7624, 7625, 7626, 7627, 7628, 7629, 7630, 7631, 7632, 7633, 7634, 7635, 7636, 7637, 7638, 7639, 7640, 7641, 7642, 7643, 7644, 7645, 7646, 7647, 7648, 7649, 7650, 7651, 7652, 7653, 7654, 7655, 7656, 7657, 7658, 7659, 7660, 7661, 7662, 7663, 7664, 7665, 7666, 7667, 7668, 7669, 7670, 7671, 7672, 7673, 7674, 7675, 7676, 7677, 7678, 7679, 7680, 7681, 7682, 7683, 7684, 7685, 7686, 7687, 7688, 7689, 7690, 7691, 7692, 7693, 7694, 7695, 7696, 7697, 7698, 7699, 7700, 7701, 7702, 7703, 7704, 7705, 7706, 7707, 7708, 7709, 7710, 7711, 7712, 7713, 7714, 7715, 7716, 7717, 7718, 7719, 7720, 7721, 7722, 7723, 7724, 7725, 7726, 7727, 7728, 7729, 7730, 7731, 7732, 7733, 7734, 7735, 7736, 7737, 7738, 7739, 7740, 7741, 7742, 7743, 7744, 7745, 7746, 7747, 7748, 7749, 7750, 7751, 7752, 7753, 7754, 7755, 7756, 7757, 7758, 7759, 7760, 7761, 7762, 7763, 7764, 7765, 7766, 7767, 7768, 7769, 7770, 7771, 7772, 7773, 7774, 7775, 7776, 7777, 7778, 7779, 7780, 7781, 7782, 7783, 7784, 7785, 7786, 7787, 7788, 7789, 7790, 7791, 7792, 7793, 7794, 7795, 7796, 7797, 7798, 7799, 7800, 7801, 7802, 7803, 7804, 7805, 7806, 7807, 7808, 7809, 7810, 7811, 7812, 7813, 7814, 7815, 7816, 7817, 7818, 7819, 7820, 7821, 7822, 7823, 7824, 7825, 7826, 7827, 7828, 7829, 7830, 7831, 7832, 7833, 7834, 7835, 7836, 7837, 7838, 7839, 7840, 7841, 7842, 7843, 7844, 7845, 7846, 7847, 7848, 7849, 7850, 7851, 7852, 7853, 7854, 7855, 7856, 7857, 7858, 7859, 7860, 7861, 7862, 7863, 7864, 7865, 7866, 7867, 7868, 7869, 7870, 7871, 7872, 7873, 7874, 7875, 7876, 7877, 7878, 7879, 7880, 7881, 7882, 7883, 7884, 7885, 7886, 7887, 7888, 7889, 7890, 7891, 7892, 7893, 7894, 7895, 7896, 7897, 7898, 7899, 7900, 7901, 7902, 7903, 7904, 7905, 7906, 7907, 7908, 7909, 7910, 7911, 7912, 7913, 7914, 7915, 7916, 7917, 7918, 7919, 7920, 7921, 7922, 7923, 7924, 7925, 7926, 7927, 7928, 7929, 7930, 7931, 7932, 7933, 7934, 7935, 7936, 7937, 7938, 7939, 7940, 7941, 7942, 7943, 7944, 7945, 7946, 7947, 7948, 7949, 7950, 7951, 7952, 7953, 7954, 7955, 7956, 7957, 7958, 7959, 7960, 7961, 7962, 7963, 7964, 7965, 7966, 7967, 7968, 7969, 7970, 7971, 7972, 7973, 7974, 7975, 7976, 7977, 7978, 7979, 7980, 7981, 7982, 7983, 7984, 7985, 7986, 7987, 7988, 7989, 7990, 7991, 7992, 7993, 7994, 7995, 7996, 7997, 7998, 7999, 8000, 8001, 8002, 8003, 8004, 8005, 8006, 8007, 8008, 8009, 8010, 8011, 8012, 8013, 8014, 8015, 8016, 8017, 8018, 8019, 8020, 8021, 8022, 8023, 8024, 8025, 8026, 8027, 8028, 8029, 8030, 8031, 8032, 8033, 8034, 8035, 8036, 8037, 8038, 8039, 8040, 8041, 8042, 8043, 8044, 8045, 8046, 8047, 8048, 8049, 8050, 8051, 8052, 8053, 8054, 8055, 8056, 8057, 8058, 8059, 8060, 8061, 8062, 8063, 8064, 8065, 8066, 8067, 8068, 8069, 8070, 8071, 8072, 8073, 8074, 8075, 8076, 8077, 8078, 8079, 8080, 8081, 8082, 8083, 8084, 8085, 8086, 8087, 8088, 8089, 8090, 8091, 8092, 8093, 8094, 8095, 8096, 8097, 8098, 8099, 8100, 8101, 8102, 8103, 8104, 8105, 8106, 8107, 8108, 8109, 8110, 8111, 8112, 8113, 8114, 8115, 8116, 8117, 8118, 8119, 8120, 8121, 8122, 8123, 8124, 8125, 8126, 8127, 8128, 8129, 8130, 8131, 8132, 8133, 8134, 8135, 8136, 8137, 8138, 8139, 8140, 8141, 8142, 8143, 8144, 8145, 8146, 8147, 8148, 8149, 8150, 8151, 8152, 8153, 8154, 8155, 8156, 8157, 8158, 8159, 8160, 8161, 8162, 8163, 8164, 8165, 8166, 8167, 8168, 8169, 8170, 8171, 8172, 8173, 8174, 8175, 8176, 8177, 8178, 8179, 8180, 8181, 8182, 8183, 8184, 8185, 8186, 8187, 8188, 8189, 8190, 8191, 8192, 8193, 8194, 8195, 8196, 8197, 8198, 8199, 8200, 8201, 8202, 8203, 8204, 8205, 8206, 8207, 8208, 8209, 8210, 8211, 8212, 8213, 8214, 8215, 8216, 8217, 8218, 8219, 8220, 8221, 8222, 8223, 8224, 8225, 8226, 8227, 8228, 8229, 8230, 8231, 8232, 8233, 8234, 8235, 8236, 8237, 8238, 8239, 8240, 8241, 8242, 8243, 8244, 8245, 8246, 8247, 8248, 8249, 8250, 8251, 8252, 8253, 8254, 8255, 8256, 8257, 8258, 8259, 8260, 8261, 8262, 8263, 8264, 8265, 8266, 8267, 8268, 8269, 8270, 8271, 8272, 8273, 8274, 8275, 8276, 8277, 8278, 8279, 8280, 8281, 8282, 8283, 8284, 8285, 8286, 8287, 8288, 8289, 8290, 8291, 8292, 8293, 8294, 8295, 8296, 8297, 8298, 8299, 8300, 8301, 8302, 8303, 8304, 8305, 8306, 8307, 8308, 8309, 8310, 8311, 8312, 8313, 8314, 8315, 8316, 8317, 8318, 8319, 8320, 8321, 8322, 8323, 8324, 8325, 8326, 8327, 8328, 8329, 8330, 8331, 8332, 8333, 8334, 8335, 8336, 8337, 8338, 8339, 8340, 8341, 8342, 8343, 8344, 8345, 8346, 8347, 8348, 8349, 8350, 8351, 8352, 8353, 8354, 8355, 8356, 8357, 8358, 8359, 8360, 8361, 8362, 8363, 8364, 8365, 8366, 8367, 8368, 8369, 8370, 8371, 8372, 8373, 8374, 8375, 8376, 8377, 8378, 8379, 8380, 8381, 8382, 8383, 8384, 8385, 8386, 8387, 8388, 8389, 8390, 8391, 8392, 8393, 8394, 8395, 8396, 8397, 8398, 8399, 8400, 8401, 8402, 8403, 8404, 8405, 8406, 8407, 8408, 8409, 8410, 8411, 8412, 8413, 8414, 8415, 8416, 8417, 8418, 8419, 8420, 8421, 8422, 8423, 8424, 8425, 8426, 8427, 8428, 8429, 8430, 8431, 8432, 8433, 8434, 8435, 8436, 8437, 8438, 8439, 8440, 8441, 8442, 8443, 8444, 8445, 8446, 8447, 8448, 8449, 8450, 8451, 8452, 8453, 8454, 8455, 8456, 8457, 8458, 8459, 8460, 8461, 8462, 8463, 8464, 8465, 8466, 8467, 8468, 8469, 8470, 8471, 8472, 8473, 8474, 8475, 8476, 8477, 8478, 8479, 8480, 8481, 8482, 8483, 8484, 8485, 8486, 8487, 8488, 8489, 8490, 8491, 8492, 8493, 8494, 8495, 8496, 8497, 8498, 8499, 8500, 8501, 8502, 8503, 8504, 8505, 8506, 8507, 8508, 8509, 8510, 8511, 8512, 8513, 8514, 8515, 8516, 8517, 8518, 8519, 8520, 8521, 8522, 8523, 8524, 8525, 8526, 8527, 8528, 8529, 8530, 8531, 8532, 8533, 8534, 8535, 8536, 8537, 8538, 8539, 8540, 8541, 8542, 8543, 8544, 8545, 8546, 8547, 8548, 8549, 8550, 8551, 8552, 8553, 8554, 8555, 8556, 8557, 8558, 8559, 8560, 8561, 8562, 8563, 8564, 8565, 8566, 8567, 8568, 8569, 8570, 8571, 8572, 8573, 8574, 8575, 8576, 8577, 8578, 8579, 8580, 8581, 8582, 8583, 8584, 8585, 8586, 8587, 8588, 8589, 8590, 8591, 8592, 8593, 8594, 8595, 8596, 8597, 8598, 8599, 8600, 8601, 8602, 8603, 8604, 8605, 8606, 8607, 8608, 8609, 8610, 8611, 8612, 8613, 8614, 8615, 8616, 8617, 8618, 8619, 8620, 8621, 8622, 8623, 8624, 8625, 8626, 8627, 8628, 8629, 8630, 8631, 8632, 8633, 8634, 8635, 8636, 8637, 8638, 8639, 8640, 8641, 8642, 8643, 8644, 8645, 8646, 8647, 8648, 8649, 8650, 8651, 8652, 8653, 8654, 8655, 8656, 8657, 8658, 8659, 8660, 8661, 8662, 8663, 8664, 8665, 8666, 8667, 8668, 8669, 8670, 8671, 8672, 8673, 8674, 8675, 8676, 8677, 8678, 8679, 8680, 8681, 8682, 8683, 8684, 8685, 8686, 8687, 8688, 8689, 8690, 8691, 8692, 8693, 8694, 8695, 8696, 8697, 8698, 8699, 8700, 8701, 8702, 8703, 8704, 8705, 8706, 8707, 8708, 8709, 8710, 8711, 8712, 8713, 8714, 8715, 8716, 8717, 8718, 8719, 8720, 8721, 8722, 8723, 8724, 8725, 8726, 8727, 8728, 8729, 8730, 8731, 8732, 8733, 8734, 8735, 8736, 8737, 8738, 8739, 8740, 8741, 8742, 8743, 8744, 8745, 8746, 8747, 8748, 8749, 8750, 8751, 8752, 8753, 8754, 8755, 8756, 8757, 8758, 8759, 8760, 8761, 8762, 8763, 8764, 8765, 8766, 8767, 8768, 8769, 8770, 8771, 8772, 8773, 8774, 8775, 8776, 8777, 8778, 8779, 8780, 8781, 8782, 8783, 8784, 8785, 8786, 8787, 8788, 8789, 8790, 8791, 8792, 8793, 8794, 8795, 8796, 8797, 8798, 8799, 8800, 8801, 8802, 8803, 8804, 8805, 8806, 8807, 8808, 8809, 8810, 8811, 8812, 8813, 8814, 8815, 8816, 8817, 8818, 8819, 8820, 8821, 8822, 8823, 8824, 8825, 8826, 8827, 8828, 8829, 8830, 8831, 8832, 8833, 8834, 8835, 8836, 8837, 8838, 8839, 8840, 8841, 8842, 8843, 8844, 8845, 8846, 8847, 8848, 8849, 8850, 8851, 8852, 8853, 8854, 8855, 8856, 8857, 8858, 8859, 8860, 8861, 8862, 8863, 8864, 8865, 8866, 8867, 8868, 8869, 8870, 8871, 8872, 8873, 8874, 8875, 8876, 8877, 8878, 8879, 8880, 8881, 8882, 8883, 8884, 8885, 8886, 8887, 8888, 8889, 8890, 8891, 8892, 8893, 8894, 8895, 8896, 8897, 8898, 8899, 8900, 8901, 8902, 8903, 8904, 8905, 8906, 8907, 8908, 8909, 8910, 8911, 8912, 8913, 8914, 8915, 8916, 8917, 8918, 8919, 8920, 8921, 8922, 8923, 8924, 8925, 8926, 8927, 8928, 8929, 8930, 8931, 8932, 8933, 8934, 8935, 8936, 8937, 8938, 8939, 8940, 8941, 8942, 8943, 8944, 8945, 8946, 8947, 8948, 8949, 8950, 8951, 8952, 8953, 8954, 8955, 8956, 8957, 8958, 8959, 8960, 8961, 8962, 8963, 8964, 8965, 8966, 8967, 8968, 8969, 8970, 8971, 8972, 8973, 8974, 8975, 8976, 8977, 8978, 8979, 8980, 8981, 8982, 8983, 8984, 8985, 8986, 8987, 8988, 8989, 8990, 8991, 8992, 8993, 8994, 8995, 8996, 8997, 8998, 8999, 9000, 9001, 9002, 9003, 9004, 9005, 9006, 9007, 9008, 9009, 9010, 9011, 9012, 9013, 9014, 9015, 9016, 9017, 9018, 9019, 9020, 9021, 9022, 9023, 9024, 9025, 9026, 9027, 9028, 9029, 9030, 9031, 9032, 9033, 9034, 9035, 9036, 9037, 9038, 9039, 9040, 9041, 9042, 9043, 9044, 9045, 9046, 9047, 9048, 9049, 9050, 9051, 9052, 9053, 9054, 9055, 9056, 9057, 9058, 9059, 9060, 9061, 9062, 9063, 9064, 9065, 9066, 9067, 9068, 9069, 9070, 9071, 9072, 9073, 9074, 9075, 9076, 9077, 9078, 9079, 9080, 9081, 9082, 9083, 9084, 9085, 9086, 9087, 9088, 9089, 9090, 9091, 9092, 9093, 9094, 9095, 9096, 9097, 9098, 9099, 9100, 9101, 9102, 9103, 9104, 9105, 9106, 9107, 9108, 9109, 9110, 9111, 9112, 9113, 9114, 9115, 9116, 9117, 9118, 9119, 9120, 9121, 9122, 9123, 9124, 9125, 9126, 9127, 9128, 9129, 9130, 9131, 9132, 9133, 9134, 9135, 9136, 9137, 9138, 9139, 9140, 9141, 9142, 9143, 9144, 9145, 9146, 9147, 9148, 9149, 9150, 9151, 9152, 9153, 9154, 9155, 9156, 9157, 9158, 9159, 9160, 9161, 9162, 9163, 9164, 9165, 9166, 9167, 9168, 9169, 9170, 9171, 9172, 9173, 9174, 9175, 9176, 9177, 9178, 9179, 9180, 9181, 9182, 9183, 9184, 9185, 9186, 9187.

[0092] The term “identity” as known in the art, refers to a relationship between the sequences of two or more peptides, as determined by comparing the sequences. In the art, identity also means the degree of sequence relatedness between peptides, as determined by the number of matches between strings of two or more amino acid residues. Identity measures the percent of identical matches between the smaller of two or more sequences with gap alignments (if any) addressed by a particular mathematical model or computer program (i.e., “algorithms”). Identity of related peptides can be readily calculated by known methods. Such methods include, but are not limited to, those described in Computational Molecular Biology, Lesk, A. M., ed., Oxford University Press, New York, 1988; Biocomputing: Informatics and Genome Projects, Smith, D. W., ed., Academic Press, New York, 1993; Computer Analysis of Sequence Data, Part 1, Griffin, A. M., and Griffin, H. G., eds., Humana Press, New Jersey, 1994; Sequence Analysis in Molecular Biology, von Heinje, G., Academic Press, 1987; Sequence Analysis Primer, Gribskov, M. and Devereux, J., eds., M. Stockton Press, New York, 1991; and Carillo et al., SIAM J. Applied Math. 48, 1073 (1988).

[0093] In some embodiments, the polypeptide variant may have the same or a similar activity as the reference polypeptide. Alternatively, the variant may have an altered activity (e.g., increased or decreased) relative to a reference polypeptide. Generally, variants of a particular polynucleotide or polypeptide of the invention will have at least about 40%, 45%, 50%, 55%, 60%, 65%, 70%, 75%, 80%, 85%, 90%, 91%, 92%, 93%, 94%, 95%, 96%, 97%, 98%, 99% but less than 100% sequence identity to that particular reference polynucleotide or polypeptide as determined by sequence alignment programs and parameters described herein and known to those skilled in the art. Such tools for alignment include those of the BLAST suite (Stephen F. Altschul, Thomas L. Madden, Alejandro A. Schaffer, Jinghui Zhang, Zheng Zhang, Webb Miller, and David J. Lipman (1997), “Gapped BLAST and PSI-BLAST: a new generation of protein database search programs”, Nucleic Acids Res. 25:3389-3402.) Other tools are described herein, specifically in the definition of “Identity.”

[0094] Default parameters in the BLAST algorithm include, for example, an expect threshold of 10, Word size of 28, Match/Mismatch Scores 1, -2, Gap costs Linear. Any filter can be applied as well as a selection for species specific repeats, e.g., Homo sapiens.

### Biologics

[0095] The polynucleotides, primary constructs or mmRNA disclosed herein, may encode one or more biologics. As used herein, a “biologic” is a polypeptide-based molecule produced by the methods provided herein and which may be used to treat, cure, mitigate, prevent, or diagnose a serious or life-threatening disease or medical condition. Biologics, according to the present invention include, but are not limited to, allergenic extracts (e.g. for allergy shots and tests), blood components, gene therapy products, human tissue or cellular products used in transplantation, vaccines, monoclonal antibodies, cytokines, growth factors, enzymes, thrombolytics, and immunomodulators, among others.

[0096] According to the present invention, one or more biologics currently being marketed or in development may be encoded by the polynucleotides, primary constructs or mmRNA of the present invention. While not wishing to be bound by theory, it is believed that incorporation of the encoding polynucleotides of a known biologic into the primary constructs or mmRNA of the invention will result in improved therapeutic efficacy due at least in part to the specificity, purity and/or selectivity of the construct designs.

### Antibodies

[0097] The primary constructs or mmRNA disclosed herein, may encode one or more antibodies or fragments thereof. The term “antibody” includes monoclonal antibodies (including full length antibodies which have an immunoglobulin Fc region), antibody compositions with polyepitopic specificity, multispecific antibodies (e.g., bispecific antibodies, diabodies, and single-chain molecules), as well as antibody fragments. The term “immunoglobulin” (Ig) is used interchangeably with “antibody” herein. As used herein, the term “monoclonal antibody” refers to an antibody obtained from a population of substantially homogeneous antibodies, i.e., the individual antibodies comprising the population are identical except for possible naturally occurring mutations and/or post-translation modifications (e.g., isomerizations, amidations) that may be present in minor amounts. Monoclonal antibodies are highly specific, being directed against a single antigenic site.

[0098] The monoclonal antibodies herein specifically include “chimeric” antibodies (immunoglobulins) in which a portion of the heavy and/or light chain is identical with or homologous to corresponding sequences in antibodies derived from a particular species or belonging to a particular antibody class or subclass, while the remainder of the chain(s) is(are) identical with or homologous to corresponding sequences in antibodies derived from another species or belonging to another antibody class or subclass, as well as fragments of such antibodies, so long as they exhibit the desired biological activity. Chimeric antibodies of interest herein include, but are not limited to, “primatized” antibodies comprising variable domain antigen-binding sequences derived from a non-human primate (e.g., Old World Monkey, Ape etc.) and human constant region sequences.

[0099] An “antibody fragment” comprises a portion of an intact antibody, preferably the antigen binding and/or the variable region of the intact antibody. Examples of antibody fragments include Fab, Fab′, F(ab′)₂ and Fv fragments; diabodies; linear antibodies; nanobodies; single-chain antibody molecules and multispecific antibodies formed from antibody fragments.

[0100] Any of the five classes of immunoglobulins, IgA, IgD, IgE, IgG and IgM, may be encoded by the mmRNA of the invention, including the heavy chains designated alpha, delta, epsilon, gamma and mu, respectively. Also included are polynucleotide sequences encoding the subclasses, gamma and mu. Hence any of the subclasses of antibodies may be encoded in part or in whole and include the following subclasses: IgG1, IgG2, IgG3, IgG4, IgA1 and IgA2.

[0101] According to the present invention, one or more antibodies or fragments currently being marketed or in development may be encoded by the polynucleotides, primary constructs or mmRNA of the present invention. While not wishing to be bound by theory, it is believed that incorporation into the primary constructs of the invention will result in improved therapeutic efficacy due at least in part to the specificity, purity and selectivity of the mmRNA designs.

[0102] Antibodies encoded in the polynucleotides, primary constructs or mmRNA of the invention may be utilized to treat conditions or diseases in many therapeutic areas such as, but not limited to, blood, cardiovascular, CNS, poisoning (including antivenoms), dermatology, endocrinology, gastrointestinal, medical imaging, musculoskeletal, oncology, immunology, respiratory, sensory and anti-infective.

[0103] In one embodiment, primary constructs or mmRNA disclosed herein may encode monoclonal antibodies and/or variants thereof. Variants of antibodies may also include, but are not limited to, substitutional variants, conservative amino acid substitution, insertional variants, deletional variants and/or covalent derivatives. In one embodiment, the primary construct and/or mmRNA disclosed herein may encode an immunoglobulin Fc region. In another embodiment, the primary constructs and/or mmRNA may encode a variant immunoglobulin Fc region. As a non-limiting example, the primary constructs and/or mmRNA may encode an antibody having a variant immunoglobulin Fc region as described in U.S. Pat. No. 8,217,147 herein incorporated by reference in its entirety.

### Vaccines

[0104] The primary constructs or mmRNA disclosed herein, may encode one or more vaccines. As used herein, a “vaccine” is a biological preparation that improves immunity to a particular disease or infectious agent. According to the present invention, one or more vaccines currently being marketed or in development may be encoded by the polynucleotides, primary constructs or mmRNA of the present invention. While not wishing to be bound by theory, it is believed that incorporation into the primary constructs or mmRNA of the invention will result in improved therapeutic efficacy due at least in part to the specificity, purity and selectivity of the construct designs.

[0105] Vaccines encoded in the polynucleotides, primary constructs or mmRNA of the invention may be utilized to treat conditions or diseases in many therapeutic areas such as, but not limited to, cardiovascular, CNS, dermatology, endocrinology, oncology, immunology, respiratory, and anti-infective.

### Therapeutic Proteins or Peptides

[0106] The primary constructs or mmRNA disclosed herein, may encode one or more validated or “in testing” therapeutic proteins or peptides.

[0107] According to the present invention, one or more therapeutic proteins or peptides currently being marketed or in development may be encoded by the polynucleotides, primary constructs or mmRNA of the present invention. While not wishing to be bound by theory, it is believed that incorporation into the primary constructs or mmRNA of the invention will result in improved therapeutic efficacy due at least in part to the specificity, purity and selectivity of the construct designs.

[0108] Therapeutic proteins and peptides encoded in the polynucleotides, primary constructs or mmRNA of the invention may be utilized to treat conditions or diseases in many therapeutic areas such as, but not limited to, blood, cardiovascular, CNS, poisoning (including antivenoms), dermatology, endocrinology, genetic, genitourinary, gastrointestinal, musculoskeletal, oncology, and immunology, respiratory, sensory and anti-infective.

### Cell-Penetrating Polypeptides

[0109] The primary constructs or mmRNA disclosed herein, may encode one or more cell-penetrating polypeptides. As used herein, “cell-penetrating polypeptide” or CPP refers to a polypeptide which may facilitate the cellular uptake of molecules. A cell-penetrating polypeptide of the present invention may contain one or more detectable labels. The polypeptides may be partially labeled or completely labeled throughout. The polynucleotide, primary construct or mmRNA may encode the detectable label completely, partially or not at all. The cell-penetrating peptide may also include a signal sequence. As used herein, a “signal sequence” refers to a sequence of amino acid residues bound at the amino terminus of a nascent protein during protein translation. The signal sequence may be used to signal the secretion of the cell-penetrating polypeptide.

[0110] In one embodiment, the polynucleotides, primary constructs or mmRNA may also encode a fusion protein. The fusion protein may be created by operably linking a charged protein to a therapeutic protein. As used herein, “operably linked” refers to the therapeutic protein and the charged protein being connected in such a way to permit the expression of the complex when introduced into the cell. As used herein, “charged protein” refers to a protein that carries a positive, negative or overall neutral electrical charge. Preferably, the therapeutic protein may be covalently linked to the charged protein in the formation of the fusion protein. The ratio of surface charge to total or surface amino acids may be approximately 0.1, 0.2, 0.3, 0.4, 0.5, 0.6, 0.7, 0.8 or 0.9.

[0111] The cell-penetrating polypeptide encoded by the polynucleotides, primary constructs or mmRNA may form a complex after being translated. The complex may comprise a charged protein linked, e.g. covalently linked, to the cell-penetrating polypeptide. “Therapeutic protein” refers to a protein that, when administered to a cell has a therapeutic, diagnostic, and/or prophylactic effect and/or elicits a desired biological and/or pharmacological effect.

[0112] In one embodiment, the cell-penetrating polypeptide may comprise a first domain and a second domain. The first domain may comprise a supercharged polypeptide. The second domain may comprise a protein-binding partner. As used herein, “protein-binding partner” includes, but is not limited to, antibodies and functional fragments thereof, scaffold proteins, or peptides. The cell-penetrating polypeptide may further comprise an intracellular binding partner for the protein-binding partner. The cell-penetrating polypeptide may be capable of being secreted from a cell where the polynucleotide, primary construct or mmRNA may be introduced. The cell-penetrating polypeptide may also be capable of penetrating the first cell.

[0113] In a further embodiment, the cell-penetrating polypeptide is capable of penetrating a second cell. The second cell may be from the same area as the first cell, or it may be from a different area. The area may include, but is not limited to, tissues and organs. The second cell may also be proximal or distal to the first cell.

[0114] In one embodiment, the polynucleotides, primary constructs or mmRNA may encode a cell-penetrating polypeptide which may comprise a protein-binding partner. The protein binding partner may include, but is not limited to, an antibody, a supercharged antibody or a functional fragment. The polynucleotides, primary constructs or mmRNA may be introduced into the cell where a cell-penetrating polypeptide comprising the protein-binding partner is introduced.

### Secreted Proteins

[0115] Human and other eukaryotic cells are subdivided by membranes into many functionally distinct compartments. Each membrane-bounded compartment, or organelle, contains different proteins essential for the function of the organelle. The cell uses “sorting signals,” which are amino acid motifs located within the protein, to target proteins to particular cellular organelles.

[0116] One type of sorting signal, called a signal sequence, a signal peptide, or a leader sequence, directs a class of proteins to an organelle called the endoplasmic reticulum (ER).

[0117] Proteins targeted to the ER by a signal sequence can be released into the extracellular space as a secreted protein. Similarly, proteins residing on the cell membrane can also be secreted into the extracellular space by proteolytic cleavage of a “linker” holding the protein to the membrane. While not wishing to be bound by theory, the molecules of the present invention may be used to exploit the cellular trafficking described above. As such, in some embodiments of the invention, polynucleotides, primary constructs or mmRNA are provided to express a secreted protein. The secreted proteins may be selected from those described herein or those in US Patent Publication, 20100255574, the contents of which are incorporated herein by reference in their entirety.

[0118] In one embodiment, these may be used in the manufacture of large quantities of valuable human gene products.

### Plasma Membrane Proteins

[0119] In some embodiments of the invention, polynucleotides, primary constructs or mmRNA are provided to express a protein of the plasma membrane.

### Cytoplasmic or Cytoskeletal Proteins

[0120] In some embodiments of the invention, polynucleotides, primary constructs or mmRNA are provided to express a cytoplasmic or cytoskeletal protein.

### Intracellular Membrane Bound Proteins

[0121] In some embodiments of the invention, polynucleotides, primary constructs or mmRNA are provided to express an intracellular membrane bound protein.

### Nuclear Proteins

[0122] In some embodiments of the invention, polynucleotides, primary constructs or mmRNA are provided to express a nuclear protein.

Proteins Associated with Human Disease

[0123] In some embodiments of the invention, polynucleotides, primary constructs or mmRNA are provided to express a protein associated with human disease.

### Miscellaneous Proteins

[0124] In some embodiments of the invention, polynucleotides, primary constructs or mmRNA are provided to express a protein with a presently unknown therapeutic function.

### Targeting Moieties

[0125] In some embodiments of the invention, polynucleotides, primary constructs or mmRNA are provided to express a targeting moiety. These include a protein-binding partner or a receptor on the surface of the cell, which functions to target the cell to a specific tissue space or to interact with a specific moiety, either in vivo or in vitro. Suitable protein-binding partners include, but are not limited to, antibodies and functional fragments thereof, scaffold proteins, or peptides. Additionally, polynucleotide, primary construct or mmRNA can be employed to direct the synthesis and extracellular localization of lipids, carbohydrates, or other biological moieties or biomolecules.

### Polypeptide Libraries

[0126] In one embodiment, the polynucleotides, primary constructs or mmRNA may be used to produce polypeptide libraries. These libraries may arise from the production of a population of polynucleotides, primary constructs or mmRNA, each containing various structural or chemical modification designs. In this embodiment, a population of polynucleotides, primary constructs or mmRNA may comprise a plurality of encoded polypeptides, including but not limited to, an antibody or antibody fragment, protein binding partner, scaffold protein, and other polypeptides taught herein or known in the art. In a preferred embodiment, the polynucleotides are primary constructs of the present invention, including mmRNA which may be suitable for direct introduction into a target cell or culture which in turn may synthesize the encoded polypeptides.

[0127] In certain embodiments, multiple variants of a protein, each with different amino acid modification(s), may be produced and tested to determine the best variant in terms of pharmacokinetics, stability, biocompatibility, and/or biological activity, or a biophysical property such as expression level. Such a library may contain 10, 10², 10³, 10⁴, 10⁵, 10⁶, 10⁷, 10⁸, 10⁹, or over 10⁹ possible variants (including, but not limited to, substitutions, deletions of one or more residues, and insertion of one or more residues).

### Anti-Microbial and Anti-Viral Polypeptides

[0128] The polynucleotides, primary constructs and mmRNA of the present invention may be designed to encode on or more antimicrobial peptides (AMP) or antiviral peptides (AVP). AMPs and AVPs have been isolated and described from a wide range of animals such as, but not limited to, microorganisms, invertebrates, plants, amphibians, birds, fish, and mammals (Wang et al., Nucleic Acids Res. 2009; 37 (Database issue):D933-7). For example, anti-microbial polypeptides are described in Antimicrobial Peptide Database (aps.unmc.edu/AP/main.php; Wang et al., Nucleic Acids Res. 2009; 37 (Database issue):D933-7), CAMP: Collection of Anti-Microbial Peptides (www.bicnirrh.res.in/antimicrobial/); Thomas et al., Nucleic Acids Res. 2010; 38 (Database issue):D774-80), U.S. Pat. Nos. 5,221,732, 5,447,914, 5,519,115, 5,607,914, 5,714,577, 5,734,015, 5,798,336, 5,821,224, 5,849,490, 5,856,127, 5,905,187, 5,994,308, 5,998,374, 6,107,460, 6,191,254, 6,211,148, 6,300,489, 6,329,504, 6,399,370, 6,476,189, 6,478,825, 6,492,328, 6,514,701, 6,573,361, 6,573,361, 6,576,755, 6,605,698, 6,624,140, 6,638,531, 6,642,203, 6,653,280, 6,696,238, 6,727,066, 6,730,659, 6,743,598, 6,743,769, 6,747,007, 6,790,833, 6,794,490, 6,818,407, 6,835,536, 6,835,713, 6,838,435, 6,872,705, 6,875,907, 6,884,776, 6,887,847, 6,906,035, 6,911,524, 6,936,432, 7,001,924, 7,071,293, 7,078,380, 7,091,185, 7,094,759, 7,166,769, 7,244,710, 7,314,858, and 7,582,301, the contents of which are incorporated by reference in their entirety.

[0129] The anti-microbial polypeptides described herein may block cell fusion and/or viral entry by one or more enveloped viruses (e.g., HIV, HCV). For example, the anti-microbial polypeptide can comprise or consist of a synthetic peptide corresponding to a region, e.g., a consecutive sequence of at least about 5, 10, 15, 20, 25, 30, 35, 40, 45, 50, 55, or 60 amino acids of the transmembrane subunit of a viral envelope protein, e.g., HIV-1 gp120 or gp41. The amino acid and nucleotide sequences of HIV-1 gp120 or gp41 are described in, e.g., Kuiken et al., (2008). “HIV Sequence Compendium,” Los Alamos National Laboratory.

[0130] In some embodiments, the anti-microbial polypeptide may have at least about 75%, 80%, 85%, 90%, 95%, 100% sequence homology to the corresponding viral protein sequence. In some embodiments, the anti-microbial polypeptide may have at least about 75%, 80%, 85%, 90%, 95%, or 100% sequence homology to the corresponding viral protein sequence.

[0131] In other embodiments, the anti-microbial polypeptide may comprise or consist of a synthetic peptide corresponding to a region, e.g., a consecutive sequence of at least about 5, 10, 15, 20, 25, 30, 35, 40, 45, 50, 55, or 60 amino acids of the binding domain of a capsid binding protein. In some embodiments, the anti-microbial polypeptide may have at least about 75%, 80%, 85%, 90%, 95%, or 100% sequence homology to the corresponding sequence of the capsid binding protein.

[0132] The anti-microbial polypeptides described herein may block protease dimerization and inhibit cleavage of viral proproteins (e.g., HIV Gag-pol processing) into functional proteins thereby preventing release of one or more enveloped viruses (e.g., HIV, HCV). In some embodiments, the anti-microbial polypeptide may have at least about 75%, 80%, 85%, 90%, 95%, 100% sequence homology to the corresponding viral protein sequence.

[0133] In other embodiments, the anti-microbial polypeptide can comprise or consist of a synthetic peptide corresponding to a region, e.g., a consecutive sequence of at least about 5, 10, 15, 20, 25, 30, 35, 40, 45, 50, 55, or 60 amino acids of the binding domain of a protease binding protein. In some embodiments, the anti-microbial polypeptide may have at least about 75%, 80%, 85%, 90%, 95%, 100% sequence homology to the corresponding sequence of the protease binding protein.

[0134] The anti-microbial polypeptides described herein can include an in vitro-evolved polypeptide directed against a viral pathogen.

### Anti-Microbial Polypeptides

[0135] Anti-microbial polypeptides (AMPs) are small peptides of variable length, sequence and structure with broad spectrum activity against a wide range of microorganisms including, but not limited to, bacteria, viruses, fungi, protozoa, parasites, prions, and tumor/cancer cells. (See, e.g., Zaiou, J Mol Med, 2007; 85:317; herein incorporated by reference in its entirety). It has been shown that AMPs have broad-spectrum of rapid onset of killing activities, with potentially low levels of induced resistance and concomitant broad anti-inflammatory effects.

[0136] In some embodiments, the anti-microbial polypeptide (e.g., an anti-bacterial polypeptide) may be under 10 kDa, e.g., under 8 kDa, 6 kDa, 4 kDa, 2 kDa, or 1 kDa. In some embodiments, the anti-microbial polypeptide (e.g., an anti-bacterial polypeptide) consists of from about 6 to about 100 amino acids, e.g., from about 6 to about 75 amino acids, about 6 to about 50 amino acids, about 6 to about 25 amino acids, about 25 to about 100 amino acids, about 50 to about 100 amino acids, or about 75 to about 100 amino acids. In certain embodiments, the anti-microbial polypeptide (e.g., an anti-bacterial polypeptide) may consist of from about 15 to about 45 amino acids. In some embodiments, the anti-microbial polypeptide (e.g., an anti-bacterial polypeptide) is substantially cationic.

[0137] In some embodiments, the anti-microbial polypeptide (e.g., an anti-bacterial polypeptide) may be substantially amphipathic. In certain embodiments, the anti-microbial polypeptide (e.g., an anti-bacterial polypeptide) may be substantially cationic and amphipathic. In some embodiments, the anti-microbial polypeptide (e.g., an anti-bacterial polypeptide) may be cytostatic to a Gram-positive bacterium. In some embodiments, the anti-microbial polypeptide (e.g., an anti-bacterial polypeptide) may be cytotoxic to a Gram-positive bacterium. In some embodiments, the anti-microbial polypeptide (e.g., an anti-bacterial polypeptide) may be cytostatic and cytotoxic to a Gram-positive bacterium. In some embodiments, the anti-microbial polypeptide (e.g., an anti-bacterial polypeptide) may be cytostatic to a Gram-negative bacterium. In some embodiments, the anti-microbial polypeptide (e.g., an anti-bacterial polypeptide) may be cytotoxic to a Gram-negative bacterium. In some embodiments, the anti-microbial polypeptide (e.g., an anti-bacterial polypeptide) may be cytostatic and cytotoxic to a Gram-positive bacterium. In some embodiments, the anti-microbial polypeptide may be cytostatic to a virus, fungus, protozoan, parasite, prion, or a combination thereof. In some embodiments, the anti-microbial polypeptide may be cytotoxic to a virus, fungus, protozoan, parasite, prion, or a combination thereof. In certain embodiments, the anti-microbial polypeptide may be cytostatic and cytotoxic to a virus, fungus, protozoan, parasite, prion, or a combination thereof. In some embodiments, the anti-microbial polypeptide may be cytotoxic to a tumor or cancer cell (e.g., a human tumor and/or cancer cell). In some embodiments, the anti-microbial polypeptide may be cytostatic to a tumor or cancer cell (e.g., a human tumor and/or cancer cell). In certain embodiments, the anti-microbial polypeptide may be cytotoxic and cytostatic to a tumor or cancer cell (e.g., a human tumor or cancer cell). In some embodiments, the anti-microbial polypeptide (e.g., an anti-bacterial polypeptide) may be a secreted polypeptide.

[0138] In some embodiments, the anti-microbial polypeptide comprises or consists of a defensin. Exemplary defensins include, but are not limited to, α-defensins (e.g., neutrophil defensin 1, defensin alpha 1, neutrophil defensin 3, neutrophil defensin 4, defensin 5, defensin 6), β-defensins (e.g., beta-defensin 1, beta-defensin 2, beta-defensin 103, beta-defensin 107, beta-defensin 110, beta-defensin 136), and 6-defensins. In other embodiments, the anti-microbial polypeptide comprises or consists of a cathelicidin (e.g., hCAP18).

### Anti-Viral Polypeptides

[0139] Anti-viral polypeptides (AVPs) are small peptides of variable length, sequence and structure with broad spectrum activity against a wide range of viruses. See, e.g., Zaiou, J Mol Med, 2007; 85:317. It has been shown that AVPs have a broad-spectrum of rapid onset of killing activities, with potentially low levels of induced resistance and concomitant broad anti-inflammatory effects. In some embodiments, the anti-viral polypeptide is under 10 kDa, e.g., under 8 kDa, 6 kDa, 4 kDa, 2 kDa, or 1 kDa. In some embodiments, the anti-viral polypeptide comprises or consists of from about 6 to about 100 amino acids, e.g., from about 6 to about 75 amino acids, about 6 to about 50 amino acids, about 6 to about 25 amino acids, about 25 to about 100 amino acids, about 50 to about 100 amino acids, or about 75 to about 100 amino acids. In certain embodiments, the anti-viral polypeptide comprises or consists of from about 15 to about 45 amino acids. In some embodiments, the anti-viral polypeptide is substantially cationic. In some embodiments, the anti-viral polypeptide is substantially amphipathic. In certain embodiments, the anti-viral polypeptide is substantially cationic and amphipathic. In some embodiments, the anti-viral polypeptide is cytostatic to a virus. In some embodiments, the anti-viral polypeptide is cytotoxic to a virus. In some embodiments, the anti-viral polypeptide is cytostatic and cytotoxic to a virus. In some embodiments, the anti-viral polypeptide is cytostatic to a bacterium, fungus, protozoan, parasite, prion, or a combination thereof. In some embodiments, the anti-viral polypeptide is cytotoxic to a bacterium, fungus, protozoan, parasite, prion or a combination thereof. In certain embodiments, the anti-viral polypeptide is cytostatic and cytotoxic to a bacterium, fungus, protozoan, parasite, prion, or a combination thereof. In some embodiments, the anti-viral polypeptide is cytotoxic to a tumor or cancer cell (e.g., a human cancer cell). In some embodiments, the anti-viral polypeptide is cytostatic to a tumor or cancer cell (e.g., a human cancer cell). In certain embodiments, the anti-viral polypeptide is cytotoxic and cytostatic to a tumor or cancer cell (e.g., a human cancer cell). In some embodiments, the anti-viral polypeptide is a secreted polypeptide.

### Cytotoxic Nucleosides

[0140] In one embodiment, the polynucleotides, primary constructs or mmRNA of the present invention may incorporate one or more cytotoxic nucleosides. For example, cytotoxic nucleosides may be incorporated into polynucleotides, primary constructs or mmRNA such as bifunctional modified RNAs or mRNAs. Cytotoxic nucleoside anti-cancer agents include, but are not limited to, adenosine arabinoside, cytarabine, cytosine arabinoside, 5-fluorouracil, fludarabine, floxuridine, FTORAFUR® (a combination of tegafur and uracil), tegafur ((RS)-5-fluoro-1-(tetrahydrofuran-2-yl)pyrimidine-2,4(1H,3H)-dione), and 6-mercaptopurine.

[0141] A number of cytotoxic nucleoside analogues are in clinical use, or have been the subject of clinical trials, as anticancer agents. Examples of such analogues include, but are not limited to, cytarabine, gemcitabine, troxacitabine, decitabine, tezacitabine, 2′-deoxy-2′-methylidenecytidine (DMDC), cladribine, clofarabine, 5-azacytidine, 4′-thio-aracytidine, cyclopentenylcytosine and 1-(2-C-cyano-2-deoxy-beta-D-arabino-pentofuranosyl)-cytosine. Another example of such a compound is fludarabine phosphate. These compounds may be administered systemically and may have side effects which are typical of cytotoxic agents such as, but not limited to, little or no specificity for tumor cells over proliferating normal cells.

[0142] A number of prodrugs of cytotoxic nucleoside analogues are also reported in the art. Examples include, but are not limited to, N4-behenoyl-1-beta-D-arabinofuranosylcytosine, N4-octadecyl-1-beta-D-arabinofuranosylcytosine, N4-palmitoyl-1-(2-C-cyano-2-deoxy-beta-D-arabino-pentofuranosyl) cytosine, and P-4055 (cytarabine 5′-elaidic acid ester). In general, these prodrugs may be converted into the active drugs mainly in the liver and systemic circulation and display little or no selective release of active drug in the tumor tissue. For example, capecitabine, a prodrug of 5′-deoxy-5-fluorocytidine (and eventually of 5-fluorouracil), is metabolized both in the liver and in the tumor tissue. A series of capecitabine analogues containing “an easily hydrolysable radical under physiological conditions” has been claimed by Fujiu et al. (U.S. Pat. No. 4,966,891) and is herein incorporated by reference. The series described by Fujiu includes N4 alkyl and aralkyl carbamates of 5′-deoxy-5-fluorocytidine and the implication that these compounds will be activated by hydrolysis under normal physiological conditions to provide 5′-deoxy-5-fluorocytidine.

[0143] A series of cytarabine N4-carbamates has been by reported by Fadl et al (Pharmazie. 1995, 50, 382-7, herein incorporated by reference) in which compounds were designed to convert into cytarabine in the liver and plasma. WO 2004/041203, herein incorporated by reference, discloses prodrugs of gemcitabine, where some of the prodrugs are N4-carbamates. These compounds were designed to overcome the gastrointestinal toxicity of gemcitabine and were intended to provide gemcitabine by hydrolytic release in the liver and plasma after absorption of the intact prodrug from the gastrointestinal tract. Nomura et al (Bioorg Med. Chem. 2003, 11, 2453-61, herein incorporated by reference) have described acetal derivatives of 1-(3-C-ethynyl-β-D-ribo-pentofaranosyl) cytosine which, on bioreduction, produced an intermediate that required further hydrolysis under acidic conditions to produce a cytotoxic nucleoside compound.

[0144] Cytotoxic nucleotides which may be chemotherapeutic also include, but are not limited to, pyrazolo [3,4-D]-pyrimidines, allopurinol, azathioprine, capecitabine, cytosine arabinoside, fluorouracil, mercaptopurine, 6-thioguanine, acyclovir, ara-adenosine, ribavirin, 7-deaza-adenosine, 7-deaza-guanosine, 6-aza-uracil, 6-aza-cytidine, thymidine ribonucleotide, 5-bromodeoxyuridine, 2-chloro-purine, and inosine, or combinations thereof.

### Flanking Regions: Untranslated Regions (UTRs)

[0145] Untranslated regions (UTRs) of a gene are transcribed but not translated. The 5′UTR starts at the transcription start site and continues to the start codon but does not include the start codon; whereas, the 3′UTR starts immediately following the stop codon and continues until the transcriptional termination signal. There is growing body of evidence about the regulatory roles played by the UTRs in terms of stability of the nucleic acid molecule and translation. The regulatory features of a UTR can be incorporated into the polynucleotides, primary constructs and/or mmRNA of the present invention to enhance the stability of the molecule. The specific features can also be incorporated to ensure controlled down-regulation of the transcript in case they are misdirected to undesired organs sites.

### 5′ UTR and Translation Initiation

[0146] Natural 5′UTRs bear features which play roles in for translation initiation. They harbor signatures like Kozak sequences which are commonly known to be involved in the process by which the ribosome initiates translation of many genes. Kozak sequences have the consensus CCR(A/G)CCAUGG, where R is a purine (adenine or guanine) three bases upstream of the start codon (AUG), which is followed by another ‘G’. 5′UTR also have been known to form secondary structures which are involved in elongation factor binding.

[0147] By engineering the features typically found in abundantly expressed genes of specific target organs, one can enhance the stability and protein production of the polynucleotides, primary constructs or mmRNA of the invention. For example, introduction of 5′ UTR of liver-expressed mRNA, such as albumin, serum amyloid A, Apolipoprotein A/B/E, transferrin, alpha fetoprotein, erythropoietin, or Factor VIII, could be used to enhance expression of a nucleic acid molecule, such as a mmRNA, in hepatic cell lines or liver. Likewise, use of 5′ UTR from other tissue-specific mRNA to improve expression in that tissue is possible for muscle (MyoD, Myosin, Myoglobin, Myogenin, Herculin), for endothelial cells (Tie-1, CD36), for myeloid cells (C/EBP, AML1, G-CSF, GM-CSF, CD11b, MSR, Fr-1, i-NOS), for leukocytes (CD45, CD18), for adipose tissue (CD36, GLUT4, ACRP30, adiponectin) and for lung epithelial cells (SP-A/B/C/D).

[0148] Other non-UTR sequences may be incorporated into the 5′ (or 3′ UTR) UTRs. For example, introns or portions of introns sequences may be incorporated into the flanking regions of the polynucleotides, primary constructs or mmRNA of the invention. Incorporation of intronic sequences may increase protein production as well as mRNA levels.

### 3′ UTR and the AU Rich Elements

[0149] 3′ UTRs are known to have stretches of Adenosines and Uridines embedded in them. These AU rich signatures are particularly prevalent in genes with high rates of turnover. Based on their sequence features and functional properties, the AU rich elements (AREs) can be separated into three classes (Chen et al, 1995): Class I AREs contain several dispersed copies of an AUUUA motif within U-rich regions. C-Myc and MyoD contain class I AREs. Class II AREs possess two or more overlapping UUAUUUA(U/A)(U/A) nonamers. Molecules containing this type of AREs include GM-CSF and TNF-α. Class III ARES are less well defined. These U rich regions do not contain an AUUUA motif c-Jun and Myogenin are two well-studied examples of this class. Most proteins binding to the AREs are known to destabilize the messenger, whereas members of the ELAV family, most notably HuR, have been documented to increase the stability of mRNA. HuR binds to AREs of all the three classes. Engineering the HuR specific binding sites into the 3′ UTR of nucleic acid molecules will lead to HuR binding and thus, stabilization of the message in vivo.

[0150] Introduction, removal or modification of 3′ UTR AU rich elements (AREs) can be used to modulate the stability of polynucleotides, primary constructs or mmRNA of the invention. When engineering specific polynucleotides, primary constructs or mmRNA, one or more copies of an ARE can be introduced to make polynucleotides, primary constructs or mmRNA of the invention less stable and thereby curtail translation and decrease production of the resultant protein. Likewise, AREs can be identified and removed or mutated to increase the intracellular stability and thus increase translation and production of the resultant protein. Transfection experiments can be conducted in relevant cell lines, using polynucleotides, primary constructs or mmRNA of the invention and protein production can be assayed at various time points post-transfection. For example, cells can be transfected with different ARE-engineering molecules and by using an ELISA kit to the relevant protein and assaying protein produced at 6 hour, 12 hour, 24 hour, 48 hour, and 7 days post-transfection.

Incorporating microRNA Binding Sites

[0151] microRNAs (or miRNA) are 19-25 nucleotide long noncoding RNAs that bind to the 3′UTR of nucleic acid molecules and down-regulate gene expression either by reducing nucleic acid molecule stability or by inhibiting translation. The polynucleotides, primary constructs or mmRNA of the invention may comprise one or more microRNA target sequences, microRNA sequences, or microRNA seeds. Such sequences may correspond to any known microRNA such as those taught in US Publication US2005/0261218 and US Publication US2005/0059005, the contents of which are incorporated herein by reference in their entirety.

[0152] A microRNA sequence comprises a “seed” region, i.e., a sequence in the region of positions 2-8 of the mature microRNA, which sequence has perfect Watson-Crick complementarity to the miRNA target sequence. A microRNA seed may comprise positions 2-8 or 2-7 of the mature microRNA. In some embodiments, a microRNA seed may comprise 7 nucleotides (e.g., nucleotides 2-8 of the mature microRNA), wherein the seed-complementary site in the corresponding miRNA target is flanked by an adenine (A) opposed to microRNA position 1. In some embodiments, a microRNA seed may comprise 6 nucleotides (e.g., nucleotides 2-7 of the mature microRNA), wherein the seed-complementary site in the corresponding miRNA target is flanked byan adenine (A) opposed to microRNA position 1. See for example, Grimson A, Farh K K, Johnston W K, Garrett-Engele P, Lim L P, Bartel D P; Mol Cell. 2007 Jul. 6; 27(1):91-105; each of which is herein incorporated by reference in their entirety. The bases of the microRNA seed have complete complementarity with the target sequence. By engineering microRNA target sequences into the 3′UTR of polynucleotides, primary constructs or mmRNA of the invention one can target the molecule for degradation or reduced translation, provided the microRNA in question is available. This process will reduce the hazard of off target effects upon nucleic acid molecule delivery. Identification of microRNA, microRNA target regions, and their expression patterns and role in biology have been reported (Bonauer et al., Curr Drug Targets 2010 11:943-949; Anand and Cheresh Curr Opin Hematol 2011 18:171-176; Contreras and Rao Leukemia 2012 26:404-413 (2011 Dec. 20. doi: 10.1038/leu.2011.356); Bartel Cell 2009 136:215-233; Landgraf et al, Cell, 2007 129:1401-1414; each of which is herein incorporated by reference in its entirety).

[0153] For example, if the nucleic acid molecule is an mRNA and is not intended to be delivered to the liver but ends up there, then miR-122, a microRNA abundant in liver, can inhibit the expression of the gene of interest if one or multiple target sites of miR-122 are engineered into the 3′ UTR of the polynucleotides, primary constructs or mmRNA. Introduction of one or multiple binding sites for different microRNA can be engineered to further decrease the longevity, stability, and protein translation of a polynucleotides, primary constructs or mmRNA.

[0154] As used herein, the term “microRNA site” refers to a microRNA target site or a microRNA recognition site, or any nucleotide sequence to which a microRNA binds or associates. It should be understood that “binding” may follow traditional Watson-Crick hybridization rules or may reflect any stable association of the microRNA with the target sequence at or adjacent to the microRNA site.

[0155] Conversely, for the purposes of the polynucleotides, primary constructs or mmRNA of the present invention, microRNA binding sites can be engineered out of (i.e. removed from) sequences in which they naturally occur in order to increase protein expression in specific tissues. For example, miR-122 binding sites may be removed to improve protein expression in the liver. Regulation of expression in multiple tissues can be accomplished through introduction or removal or one or several microRNA binding sites.

[0156] Examples of tissues where microRNA are known to regulate mRNA, and thereby protein expression, include, but are not limited to, liver (miR-122), muscle (miR-133, miR-206, miR-208), endothelial cells (miR-17-92, miR-126), myeloid cells (miR-142-3p, miR-142-5p, miR-16, miR-21, miR-223, miR-24, miR-27), adipose tissue (let-7, miR-30c), heart (miR-1d, miR-149), kidney (miR-192, miR-194, miR-204), and lung epithelial cells (let-7, miR-133, miR-126). MicroRNA can also regulate complex biological processes such as angiogenesis (miR-132) (Anand and Cheresh Curr Opin Hematol 2011 18:171-176; herein incorporated by reference in its entirety). In the polynucleotides, primary constructs or mmRNA of the present invention, binding sites for microRNAs that are involved in such processes may be removed or introduced, in order to tailor the expression of the polynucleotides, primary constructs or mmRNA expression to biologically relevant cell types or to the context of relevant biological processes. A listing of MicroRNA, miR sequences and miR binding sites is listed in Table 9 of U.S. Provisional Application No. 61/753,661 filed Jan. 17, 2013, in Table 9 of U.S. Provisional Application No. 61/754,159 filed Jan. 18, 2013, and in Table 7 of U.S. Provisional Application No. 61/758,921 filed Jan. 31, 2013, each of which are herein incorporated by reference in their entireties.

[0157] Examples of use of microRNA to drive tissue or disease-specific gene expression are listed (Getner and Naldini, Tissue Antigens. 2012, 80:393-403; herein incoroporated by reference in its entirety). In addition, microRNA seed sites can be incorporated into mRNA to decrease expression in certain cells which results in a biological improvement. An example of this is incorporation of miR-142 sites into a UGT1A1-expressing lentiviral vector. The presence of miR-142 seed sites reduced expression in hematopoietic cells, and as a consequence reduced expression in antigen-presentating cells, leading to the absence of an immune response against the virally expressed UGT1A1 (Schmitt et al., Gastroenterology 2010; 139:999-1007; Gonzalez-Asequinolaza et al. Gastroenterology 2010, 139:726-729; both herein incorporated by reference in its entirety). Incorporation of miR-142 sites into modified mRNA could not only reduce expression of the encoded protein in hematopoietic cells, but could also reduce or abolish immune responses to the mRNA-encoded protein. Incorporation of miR-142 seed sites (one or multiple) into mRNA would be important in the case of treatment of patients with complete protein deficiencies (UGT1A1 type I, LDLR-deficient patients, CRIM-negative Pompe patients, etc.).

[0158] Lastly, through an understanding of the expression patterns of microRNA in different cell types, polynucleotides, primary constructs or mmRNA can be engineered for more targeted expression in specific cell types or only under specific biological conditions. Through introduction of tissue-specific microRNA binding sites, polynucleotides, primary constructs or mmRNA could be designed that would be optimal for protein expression in a tissue or in the context of a biological condition.

[0159] Transfection experiments can be conducted in relevant cell lines, using engineered polynucleotides, primary constructs or mmRNA and protein production can be assayed at various time points post-transfection. For example, cells can be transfected with different microRNA binding site-engineering polynucleotides, primary constructs or mmRNA and by using an ELISA kit to the relevant protein and assaying protein produced at 6 hour, 12 hour, 24 hour, 48 hour, 72 hour and 7 days post-transfection. In vivo experiments can also be conducted using microRNA-binding site-engineered molecules to examine changes in tissue-specific expression of formulated polynucleotides, primary constructs or mmRNA.

### 5′ Capping

[0160] The 5′ cap structure of an mRNA is involved in nuclear export, increasing mRNA stability and binds the mRNA Cap Binding Protein (CBP), which is responsibile for mRNA stability in the cell and translation competency through the association of CBP with poly(A) binding protein to form the mature cyclic mRNA species. The cap further assists the removal of 5′ proximal introns removal during mRNA splicing.

[0161] Endogenous mRNA molecules may be 5′-end capped generating a 5′-ppp-5′-triphosphate linkage between a terminal guanosine cap residue and the 5′-terminal transcribed sense nucleotide of the mRNA molecule. This 5′-guanylate cap may then be methylated to generate an N7-methyl-guanylate residue. The ribose sugars of the terminal and/or anteterminal transcribed nucleotides of the 5′ end of the mRNA may optionally also be 2′-O-methylated. 5′-decapping through hydrolysis and cleavage of the guanylate cap structure may target a nucleic acid molecule, such as an mRNA molecule, for degradation.

[0162] Modifications to the polynucleotides, primary constructs, and mmRNA of the present invention may generate a non-hydrolyzable cap structure preventing decapping and thus increasing mRNA half-life. Because cap structure hydrolysis requires cleavage of 5′-ppp-5′ phosphorodiester linkages, modified nucleotides may be used during the capping reaction. For example, a Vaccinia Capping Enzyme from New England Biolabs (Ipswich, MA) may be used with α-thio-guanosine nucleotides according to the manufacturer's instructions to create a phosphorothioate linkage in the 5′-ppp-5′ cap. Additional modified guanosine nucleotides may be used such as α-methyl-phosphonate and seleno-phosphate nucleotides.

[0163] Additional modifications include, but are not limited to, 2′-O-methylation of the ribose sugars of 5′-terminal and/or 5′-anteterminal nucleotides of the mRNA (as mentioned above) on the 2′-hydroxyl group of the sugar ring. Multiple distinct 5′-cap structures can be used to generate the 5′-cap of a nucleic acid molecule, such as an mRNA molecule.

[0164] Cap analogs, which herein are also referred to as synthetic cap analogs, chemical caps, chemical cap analogs, or structural or functional cap analogs, differ from natural (i.e. endogenous, wild-type or physiological) 5′-caps in their chemical structure, while retaining cap function. Cap analogs may be chemically (i.e. non-enzymatically) or enzymatically synthesized and/or linked to a nucleic acid molecule.

[0165] For example, the Anti-Reverse Cap Analog (ARCA) cap contains two guanines linked by a 5′-5′-triphosphate group, wherein one guanine contains an N7 methyl group as well as a 3′-O-methyl group (i.e., N7,3′-O-dimethyl-guanosine-5′-triphosphate-5′-guanosine (m⁷G-3′mppp-G; which may equivaliently be designated 3′ O-Me-m7G(5′)ppp(5′)G). The 3′-O atom of the other, unmodified, guanine becomes linked to the 5′-terminal nucleotide of the capped nucleic acid molecule (e.g. an mRNA or mmRNA). The N7- and 3′-O-methlyated guanine provides the terminal moiety of the capped nucleic acid molecule (e.g. mRNA or mmRNA).

[0166] Another exemplary cap is mCAP, which is similar to ARCA but has a 2′-O-methyl group on guanosine (i.e., N7,2′-O-dimethyl-guanosine-5′-triphosphate-5′-guanosine, m⁷Gm-ppp-G).

[0167] While cap analogs allow for the concomitant capping of a nucleic acid molecule in an in vitro transcription reaction, up to 20% of transcripts can remain uncapped. This, as well as the structural differences of a cap analog from an endogenous 5′-cap structures of nucleic acids produced by the endogenous, cellular transcription machinery, may lead to reduced translational competency and reduced cellular stability.

[0168] Polynucleotides, primary constructs and mmRNA of the invention may also be capped post-transcriptionally, using enzymes, in order to generate more authentic 5′-cap structures. As used herein, the phrase “more authentic” refers to a feature that closely mirrors or mimics, either structurally or functionally, an endogenous or wild type feature. That is, a “more authentic” feature is better representative of an endogenous, wild-type, natural or physiological cellular function and/or structure as compared to synthetic features or analogs, etc., of the prior art, or which outperforms the corresponding endogenous, wild-type, natural or physiological feature in one or more respects. Non-limiting examples of more authentic 5′cap structures of the present invention are those which, among other things, have enhanced binding of cap binding proteins, increased half life, reduced susceptibility to 5′ endonucleases and/or reduced 5′decapping, as compared to synthetic 5′cap structures known in the art (or to a wild-type, natural or physiological 5′cap structure). For example, recombinant Vaccinia Virus Capping Enzyme and recombinant 2′-O-methyltransferase enzyme can create a canonical 5′-5′-triphosphate linkage between the 5′-terminal nucleotide of an mRNA and a guanine cap nucleotide wherein the cap guanine contains an N7 methylation and the 5′-terminal nucleotide of the mRNA contains a 2′-O-methyl. Such a structure is termed the Cap1 structure. This cap results in a higher translational-competency and cellular stability and a reduced activation of cellular pro-inflammatory cytokines, as compared, e.g., to other 5′cap analog structures known in the art. Cap structures include, but are not limited to, 7mG(5′)ppp(5′)N,pN2p (cap 0), 7mG(5′)ppp(5′)N1mpNp (cap 1), and 7mG(5′)-ppp(5′)N1mpN2mp (cap 2).

[0169] Because the polynucleotides, primary constructs or mmRNA may be capped post-transcriptionally, and because this process is more efficient, nearly 100% of the polynucleotides, primary constructs or mmRNA may be capped. This is in contrast to ˜80% when a cap analog is linked to an mRNA in the course of an in vitro transcription reaction.

[0170] According to the present invention, 5′ terminal caps may include endogenous caps or cap analogs. According to the present invention, a 5′ terminal cap may comprise a guanine analog. Useful guanine analogs include, but are not limited to, inosine, N1-methyl-guanosine, 2′fluoro-guanosine, 7-deaza-guanosine, 8-oxo-guanosine, 2-amino-guanosine, LNA-guanosine, and 2-azido-guanosine.

### Viral Sequences

[0171] Additional viral sequences such as, but not limited to, the translation enhancer sequence of the barley yellow dwarf virus (BYDV-PAV), the Jaagsiekte sheep retrovirus (JSRV) and/or the Enzootic nasal tumor virus (See e.g., International Pub. No. WO2012129648; herein incorporated by reference in its entirety) can be engineered and inserted in the 3′ UTR of the polynucleotides, primary constructs or mmRNA of the invention and can stimulate the translation of the construct in vitro and in vivo. Transfection experiments can be conducted in relevant cell lines at and protein production can be assayed by ELISA at 12 hr, 24 hr, 48 hr, 72 hr and day 7 post-transfection.

### IRES Sequences

[0172] Further, provided are polynucleotides, primary constructs or mmRNA which may contain an internal ribosome entry site (IRES). First identified as a feature Picorna virus RNA, IRES plays an important role in initiating protein synthesis in absence of the 5′ cap structure. An IRES may act as the sole ribosome binding site, or may serve as one of multiple ribosome binding sites of an mRNA. Polynucleotides, primary constructs or mmRNA containing more than one functional ribosome binding site may encode several peptides or polypeptides that are translated independently by the ribosomes (“multicistronic nucleic acid molecules”). When polynucleotides, primary constructs or mmRNA are provided with an IRES, further optionally provided is a second translatable region. Examples of IRES sequences that can be used according to the invention include without limitation, those from picornaviruses (e.g. FMDV), pest viruses (CFFV), polio viruses (PV), encephalomyocarditis viruses (ECMV), foot-and-mouth disease viruses (FMDV), hepatitis C viruses (HCV), classical swine fever viruses (CSFV), murine leukemia virus (MLV), simian immune deficiency viruses (SIV) or cricket paralysis viruses (CrPV).

### Poly-A Tails

[0173] During RNA processing, a long chain of adenine nucleotides (poly-A tail) may be added to a polynucleotide such as an mRNA molecules in order to increase stability. Immediately after transcription, the 3′ end of the transcript may be cleaved to free a 3′ hydroxyl. Then poly-A polymerase adds a chain of adenine nucleotides to the RNA. The process, called polyadenylation, adds a poly-A tail that can be between, for example, approximately 100 and 250 residues long.

[0174] It has been discovered that unique poly-A tail lengths provide certain advantages to the polynucleotides, primary constructs or mmRNA of the present invention.

[0175] Generally, the length of a poly-A tail of the present invention is greater than 30 nucleotides in length. In another embodiment, the poly-A tail is greater than 35 nucleotides in length (e.g., at least or greater than about 35, 40, 45, 50, 55, 60, 70, 80, 90, 100, 120, 140, 160, 180, 200, 250, 300, 350, 400, 450, 500, 600, 700, 800, 900, 1,000, 1,100, 1,200, 1,300, 1,400, 1,500, 1,600, 1,700, 1,800, 1,900, 2,000, 2,500, and 3,000 nucleotides). In some embodiments, the polynucleotide, primary construct, or mmRNA includes from about 30 to about 3,000 nucleotides (e.g., from 30 to 50, from 30 to 100, from 30 to 250, from 30 to 500, from 30 to 750, from 30 to 1,000, from 30 to 1,500, from 30 to 2,000, from 30 to 2,500, from 50 to 100, from 50 to 250, from 50 to 500, from 50 to 750, from 50 to 1,000, from 50 to 1,500, from 50 to 2,000, from 50 to 2,500, from 50 to 3,000, from 100 to 500, from 100 to 750, from 100 to 1,000, from 100 to 1,500, from 100 to 2,000, from 100 to 2,500, from 100 to 3,000, from 500 to 750, from 500 to 1,000, from 500 to 1,500, from 500 to 2,000, from 500 to 2,500, from 500 to 3,000, from 1,000 to 1,500, from 1,000 to 2,000, from 1,000 to 2,500, from 1,000 to 3,000, from 1,500 to 2,000, from 1,500 to 2,500, from 1,500 to 3,000, from 2,000 to 3,000, from 2,000 to 2,500, and from 2,500 to 3,000).

[0176] In one embodiment, the poly-A tail is designed relative to the length of the overall polynucleotides, primary constructs or mmRNA. This design may be based on the length of the coding region, the length of a particular feature or region (such as the first or flanking regions), or based on the length of the ultimate product expressed from the polynucleotides, primary constructs or mmRNA.

[0177] In this context the poly-A tail may be 10, 20, 30, 40, 50, 60, 70, 80, 90, or 100% greater in length than the polynucleotides, primary constructs or mmRNA or feature thereof. The poly-A tail may also be designed as a fraction of polynucleotides, primary constructs or mmRNA to which it belongs. In this context, the poly-A tail may be 10, 20, 30, 40, 50, 60, 70, 80, or 90% or more of the total length of the construct or the total length of the construct minus the poly-A tail. Further, engineered binding sites and conjugation of polynucleotides, primary constructs or mmRNA for Poly-A binding protein may enhance expression.

[0178] Additionally, multiple distinct polynucleotides, primary constructs or mmRNA may be linked together to the PABP (Poly-A binding protein) through the 3′-end using modified nucleotides at the 3′-terminus of the poly-A tail. Transfection experiments can be conducted in relevant cell lines at and protein production can be assayed by ELISA at 12 hr, 24 hr, 48 hr, 72 hr and day 7 post-transfection.

[0179] In one embodiment, the polynucleotide primary constructs of the present invention are designed to include a polyA-G Quartet. The G-quartet is a cyclic hydrogen bonded array of four guanine nucleotides that can be formed by G-rich sequences in both DNA and RNA. In this embodiment, the G-quartet is incorporated at the end of the poly-A tail. The resultant mmRNA construct is assayed for stability, protein production and other parameters including half-life at various time points. It has been discovered that the polyA-G quartet results in protein production equivalent to at least 75% of that seen using a poly-A tail of 120 nucleotides alone.

### Quantification

[0180] In one embodiment, the polynucleotides, primary constructs or mmRNA of the present invention may be quantified in exosomes derived from one or more bodily fluid. As used herein “bodily fluids” include peripheral blood, serum, plasma, ascites, urine, cerebrospinal fluid (CSF), sputum, saliva, bone marrow, synovial fluid, aqueous humor, amniotic fluid, cerumen, breast milk, broncheoalveolar lavage fluid, semen, prostatic fluid, cowper's fluid or pre-ejaculatory fluid, sweat, fecal matter, hair, tears, cyst fluid, pleural and peritoneal fluid, pericardial fluid, lymph, chyme, chyle, bile, interstitial fluid, menses, pus, sebum, vomit, vaginal secretions, mucosal secretion, stool water, pancreatic juice, lavage fluids from sinus cavities, bronchopulmonary aspirates, blastocyl cavity fluid, and umbilical cord blood. Alternatively, exosomes may be retrieved from an organ selected from the group consisting of lung, heart, pancreas, stomach, intestine, bladder, kidney, ovary, testis, skin, colon, breast, prostate, brain, esophagus, liver, and placenta.

[0181] In the quantification method, a sample of not more than 2 mL is obtained from the subject and the exosomes isolated by size exclusion chromatography, density gradient centrifugation, differential centrifugation, nanomembrane ultrafiltration, immunoabsorbent capture, affinity purification, microfluidic separation, or combinations thereof. In the analysis, the level or concentration of a polynucleotide, primary construct or mmRNA may be an expression level, presence, absence, truncation or alteration of the administered construct. It is advantageous to correlate the level with one or more clinical phenotypes or with an assay for a human disease biomarker. The assay may be performed using construct specific probes, cytometry, qRT-PCR, real-time PCR, PCR, flow cytometry, electrophoresis, mass spectrometry, or combinations thereof while the exosomes may be isolated using immunohistochemical methods such as enzyme linked immunosorbent assay (ELISA) methods. Exosomes may also be isolated by size exclusion chromatography, density gradient centrifugation, differential centrifugation, nanomembrane ultrafiltration, immunoabsorbent capture, affinity purification, microfluidic separation, or combinations thereof.

[0182] These methods afford the investigator the ability to monitor, in real time, the level of polynucleotides, primary constructs or mmRNA remaining or delivered. This is possible because the polynucleotides, primary constructs or mmRNA of the present invention differ from the endogenous forms due to the structural or chemical modifications.

### II. Design and Synthesis of mmRNA

[0183] Polynucleotides, primary constructs or mmRNA for use in accordance with the invention may be prepared according to any available technique including, but not limited to chemical synthesis, enzymatic synthesis, which is generally termed in vitro transcription (IVT) or enzymatic or chemical cleavage of a longer precursor, etc. Methods of synthesizing RNAs are known in the art (see, e.g., Gait, M. J. (ed.) Oligonucleotide synthesis: a practical approach, Oxford [Oxfordshire], Washington, DC: TRL Press, 1984; and Herdewijn, P. (ed.) Oligonucleotide synthesis: methods and applications, Methods in Molecular Biology, v. 288 (Clifton, N.J.) Totowa, N.J.: Humana Press, 2005; both of which are incorporated herein by reference).

[0184] The process of design and synthesis of the primary constructs of the invention generally includes the steps of gene construction, mRNA production (either with or without modifications) and purification. In the enzymatic synthesis method, a target polynucleotide sequence encoding the polypeptide of interest is first selected for incorporation into a vector which will be amplified to produce a cDNA template. Optionally, the target polynucleotide sequence and/or any flanking sequences may be codon optimized. The cDNA template is then used to produce mRNA through in vitro transcription (IVT). After production, the mRNA may undergo purification and clean-up processes. The steps of which are provided in more detail below.

### Gene Construction

[0185] The step of gene construction may include, but is not limited to gene synthesis, vector amplification, plasmid purification, plasmid linearization and clean-up, and cDNA template synthesis and clean-up.

### Gene Synthesis

[0186] Once a polypeptide of interest, or target, is selected for production, a primary construct is designed. Within the primary construct, a first region of linked nucleosides encoding the polypeptide of interest may be constructed using an open reading frame (ORF) of a selected nucleic acid (DNA or RNA) transcript. The ORF may comprise the wild type ORF, an isoform, variant or a fragment thereof. As used herein, an “open reading frame” or “ORF” is meant to refer to a nucleic acid sequence (DNA or RNA) which is capable of encoding a polypeptide of interest. ORFs often begin with the start codon, ATG and end with a nonsense or termination codon or signal.

[0187] Further, the nucleotide sequence of the first region may be codon optimized. Codon optimization methods are known in the art and may be useful in efforts to achieve one or more of several goals. These goals include to match codon frequencies in target and host organisms to ensure proper folding, bias GC content to increase mRNA stability or reduce secondary structures, minimize tandem repeat codons or base runs that may impair gene construction or expression, customize transcriptional and translational control regions, insert or remove protein trafficking sequences, remove/add post translation modification sites in encoded protein (e.g. glycosylation sites), add, remove or shuffle protein domains, insert or delete restriction sites, modify ribosome binding sites and mRNA degradation sites, to adjust translational rates to allow the various domains of the protein to fold properly, or to reduce or eliminate problem secondary structures within the mRNA. Codon optimization tools, algorithms and services are known in the art, non-limiting examples include services from GeneArt (Life Technologies), DNA2.0 (Menlo Park CA) and/or proprietary methods. In one embodiment, the ORF sequence is optimized using optimization algorithms. Codon options for each amino acid are given in Table 1.

TABLE 1
Codon Options

| | Single | |
|---|---|---|
| Amino Acid | Letter Code | Codon Options |
| Isoleucine | I | ATT, ATC, ATA |
| Leucine | L | CTT, CTC, CTA, CTG, TTA, TTG |
| Valine | V | GTT, GTC, GTA, GTG |
| Phenylalanine | F | TTT, TTC |
| Methionine | M | ATG |
| Cysteine | C | TGT, TGC |
| Alanine | A | GCT, GCC, GCA, GCG |
| Glycine | G | GGT, GGC, GGA, GGG |
| Proline | P | CCT, CCC, CCA, CCG |
| Threonine | T | ACT, ACC, ACA, ACG |
| Serine | S | TCT, TCC, TCA, TCG, AGT, AGC |
| Tyrosine | Y | TAT, TAC |
| Tryptophan | W | TGG |
| Glutamine | Q | CAA, CAG |
| Asparagine | N | AAT, AAC |
| Histidine | H | CAT, CAC |
| Glutamic acid | E | GAA, GAG |
| Aspartic acid | D | GAT, GAC |
| Lysine | K | AAA, AAG |
| Arginine | R | CGT, CGC, CGA, CGG, AGA, AGG |
| Selenocysteine | Sec | UGA in mRNA in presence of |
| | | Selenocystein insertion element |
| | | (SECIS) |
| Stop codons | Stop | TAA, TAG, TGA |

[0188] Features, which may be considered beneficial in some embodiments of the present invention, may be encoded by the primary construct and may flank the ORF as a first or second flanking region. The flanking regions may be incorporated into the primary construct before and/or after optimization of the ORF. It is not required that a primary construct contain both a 5′ and 3′ flanking region. Examples of such features include, but are not limited to, untranslated regions (UTRs), Kozak sequences, an oligo(dT) sequence, and detectable tags and may include multiple cloning sites which may have XbaI recognition.

[0189] In some embodiments, a 5′ UTR and/or a 3′ UTR may be provided as flanking regions. Multiple 5′ or 3′ UTRs may be included in the flanking regions and may be the same or of different sequences. Any portion of the flanking regions, including none, may be codon optimized and any may independently contain one or more different structural or chemical modifications, before and/or after codon optimization. Combinations of features may be included in the first and second flanking regions and may be contained within other features. For example, the ORF may be flanked by a 5′ UTR which may contain a strong Kozak translational initiation signal and/or a 3′ UTR which may include an oligo(dT) sequence for templated addition of a poly-A tail. 5′UTR may comprise a first polynucleotide fragment and a second polynucleotide fragment from the same and/or different genes such as the 5′UTRs described in US Patent Application Publication No. 20100293625, herein incorporated by reference in its entirety.

[0190] Tables 2 and 3 provide a listing of exemplary UTRs which may be utilized in the primary construct of the present invention as flanking regions. Shown in Table 2 is a listing of a 5′-untranslated region of the invention. Variants of 5′ UTRs may be utilized wherein one or more nucleotides are added or removed to the termini, including A, T, C or G.

TABLE 2
5′-Untranslated Regions

| | Name/ | | SEQ |
|---|---|---|---|
| 5′ UTR | Descrip- | | ID |
| Identifier | tion | Sequence | NO. |
| 5UTR-001 | Upstream | GGGAAATAAGAGAGAAAAGAAGA | 1 |
| | UTR | GTAAGAAGAAATATAAGAGCCAC | |
| | | C | |
| 5UTR-002 | Upstream | GGGAGATCAGAGAGAAAAGAAGA | 2 |
| | UTR | GTAAGAAGAAATATAAGAGCCAC | |
| | | C | |
| 5UTR-003 | Upstream | GGAATAAAAGTCTCAACACAACA | 3 |
| | UTR | TATACAAAACAAACGAATCTCAA | |
| | | GCAATCAAGCATTCTACTTCTATT | |
| | | GCAGCAATTTAAATCATTTCTTTT | |
| | | AAAGCAAAAGCAATTTTCTGAAA | |
| | | ATTTTCACCATTTACGAACGATAG | |
| | | CAAC | |
| 5UTR-004 | Upstream | GGGAGACAAGCUUGGCAUUCCGG | 4 |
| | UTR | UACUGUUGGUAAAGCCACC | |

[0191] Shown in Table 3 is a representative listing of 3′-untranslated regions of the invention. Variants of 3′ UTRs may be utilized wherein one or more nucleotides are added or removed to the termini, including A, T, C or G.

TABLE 3
3′-Untranslated Regions

| 3' UTR | Name | | SEQ ID |
|---|---|---|---|
| Identifier | Description | Sequence | NO. |
| 3UTR- | Creatine | CGCCTGCCCACCTGCCACCGACTGCTG | 5 |
| 001 | Kinase | GAACCCAGCCAGTGGGAGGGCCTGGCC | |
| | | CACCAGAGTCCTGCTCCCTCACTCCTCG | |
| | | CCCCGCCCCCTGTCCCAGAGTCCCACCT | |
| | | GGGGGCTCTCTCCACCCTTCTCAGAGTT | |
| | | CCAGTTTCAACCAGAGTTCCAACCAATG | |
| | | GGCTCCATCCTCTGGATTCTGGCCAATG | |
| | | AAATATCTCCCTGGCAGGGTCCTCTTCTT | |
| | | TTCCCAGAGCTCCACCCCAACCAGGAGC | |
| | | TCTAGTTAATGGAGAGCTCCCAGCACAC | |
| | | TCGGAGCTTGTGCTTTGTCTCCACGCAA | |
| | | AGCGATAAATAAAAGCATTGGTGGCCTT | |
| | | TGGTCTTTGAATAAAGCCTGAGTAGGAA | |
| | | GTCTAGA | |
| 3UTR- | Myoglobin | GCCCCTGCCGCTCCCACCCCCACCCATC | 6 |
| 002 | | TGGGCCCCGGGTTCAAGAGAGAGCGGG | |
| | | GTCTGATCTCGTGTAGCCATATAGAGTT | |
| | | TGCTTCTGAGTGTCTGCTTTGTTTAGTAG | |
| | | AGGTGGGCAGGAGGAGCTGAGGGGCTG | |
| | | GGGCTGGGGTGTTGAAGTTGGCTTTGCA | |
| | | TGCCCAGCGATGCGCCTCCCTGTGGGAT | |
| | | GTCATCACCCTGGGAACCGGGAGTGGCC | |
| | | CTTGGCTCACTGTGTTCTGCATGGTTTGG | |
| | | ATCTGAATTAATTGTCCTTTCTTCTAAAT | |
| | | CCCAACCGAACTTCTTCCAACCTCCAAA | |
| | | CTGGCTGTAACCCCAAATCCAAGCCATT | |
| | | AACTACACCTGACAGTAGCAATTGTCTG | |
| | | ATTAATCACTGGCCCCTTGAAGACAGCA | |
| | | GAATGTCCCTTTGCAATGAGGAGGAGAT | |
| | | CTGGGCTGGGCGGGCCAGCTGGGGAAG | |
| | | CATTTGACTATCTGGAACTTGTGTGTGCC | |
| | | TCCTCAGGTATGGCAGTGACTCACCTGG | |
| | | TTTTAATAAAACAACCTGCAACATCTCA | |
| | | TGGTCTTTGAATAAAGCCTGAGTAGGAA | |
| | | GTCTAGA | |
| 3UTR- | α-actin | ACACACTCCACCTCCAGCACGCGACTTC | 7 |
| 003 | | TCAGGACGACGAATCTTCTCAATGGGGG | |
| | | GGCGGCTGAGCTCCAGCCACCCCGCAGT | |
| | | CACTTTCTTTGTAACAACTTCCGTTGCTG | |
| | | CCATCGTAAACTGACACAGTGTTTATAA | |
| | | CGTGTACATACATTAACTTATTACCTCAT | |
| | | TTTGTTATTTTTCGAAACAAAGCCCTGTG | |
| | | GAAGAAAATGGAAAACTTGAAGAAGCA | |
| | | TTAAAGTCATTCTGTTAAGCTGCGTAAA | |
| | | TGGTCTTTGAATAAAGCCTGAGTAGGAA | |
| | | GTCTAGA | |
| 3UTR- | Albumin | CATCACATTTAAAAGCATCTCAGCCTAC | 8 |
| 004 | | CATGAGAATAAGAGAAAGAAAATGAAG | |
| | | ATCAAAAGCTTATTCATCTGTTTTTCTTT | |
| | | TTCGTTGGTGTAAAGCCAACACCCTGTC | |
| | | TAAAAAACATAAATTTCTTTAATCATTTT | |
| | | GCCTCTTTTCTCTGTGCTTCAATTAATAA | |
| | | AAAATGGAAAGAATCTAATAGAGTGGT | |
| | | ACAGCACTGTTATTTTTCAAAGATGTGTT | |
| | | GCTATCCTGAAAATTCTGTAGGTTCTGT | |
| | | GGAAGTTCCAGTGTTCTCTCTTATTCCAC | |
| | | TTCGGTAGAGGATTTCTAGTTTCTTGTGG | |
| | | GCTAATTAAATAAATCATTAATACTCTT | |
| | | CTAATGGTCTTTGAATAAAGCCTGAGTA | |
| | | GGAAGTCTAGA | |
| 3UTR- | α-globin | GCTGCCTTCTGCGGGGCTTGCCTTCTGGC | 9 |
| 005 | | CATGCCCTTCTTCTCTCCCTTGCACCTGT | |
| | | ACCTCTTGGTCTTTGAATAAAGCCTGAG | |
| | | TAGGAAGGCGGCCGCTCGAGCATGCATC | |
| | | TAGA | |
| 3UTR- | G-CSF | GCCAAGCCCTCCCCATCCCATGTATTTAT | 10 |
| 006 | | CTCTATTTAATATTTATGTCTATTTAAGC | |
| | | CTCATATTTAAAGACAGGGAAGAGCAG | |
| | | AACGGAGCCCCAGGCCTCTGTGTCCTTC | |
| | | CCTGCATTTCTGAGTTTCATTCTCCTGCC | |
| | | TGTAGCAGTGAGAAAAAGCTCCTGTCCT | |
| | | CCCATCCCCTGGACTGGGAGGTAGATAG | |
| | | GTAAATACCAAGTATTTATTACTATGAC | |
| | | TGCTCCCCAGCCCTGGCTCTGCAATGGG | |
| | | CACTGGGATGAGCCGCTGTGAGCCCCTG | |
| | | GTCCTGAGGGTCCCCACCTGGGACCCTT | |
| | | GAGAGTATCAGGTCTCCCACGTGGGAGA | |
| | | CAAGAAATCCCTGTTTAATATTTAAACA | |
| | | GCAGTGTTCCCCATCTGGGTCCTTGCAC | |
| | | CCCTCACTCTGGCCTCAGCCGACTGCAC | |
| | | AGCGGCCCCTGCATCCCCTTGGCTGTGA | |
| | | GGCCCCTGGACAAGCAGAGGTGGCCAG | |
| | | AGCTGGGAGGCATGGCCCTGGGGTCCCA | |
| | | CGAATTTGCTGGGGAATCTCGTTTTTCTT | |
| | | CTTAAGACTTTTGGGACATGGTTTGACT | |
| | | CCCGAACATCACCGACGCGTCTCCTGTT | |
| | | TTTCTGGGTGGCCTCGGGACACCTGCCC | |
| | | TGCCCCCACGAGGGTCAGGACTGTGACT | |
| | | CTTTTTAGGGCCAGGCAGGTGCCTGGAC | |
| | | ATTTGCCTTGCTGGACGGGGACTGGGGA | |
| | | TGTGGGAGGGAGCAGACAGGAGGAATC | |
| | | ATGTCAGGCCTGTGTGTGAAAGGAAGCT | |
| | | CCACTGTCACCCTCCACCTCTTCACCCCC | |
| | | CACTCACCAGTGTCCCCTCCACTGTCAC | |
| | | ATTGTAACTGAACTTCAGGATAATAAAG | |
| | | TGTTTGCCTCCATGGTCTTTGAATAAAGC | |
| | | CTGAGTAGGAAGGCGGCCGCTCGAGCAT | |
| | | GCATCTAGA | |
| 3UTR- | Col1a2; | ACTCAATCTAAATTAAAAAAGAAAGAA | 11 |
| 007 | collagen, type | ATTTGAAAAAACTTTCTCTTTGCCATTTC | |
| | I, alpha 2 | TTCTTCTTCTTTTTTAACTGAAAGCTGAA | |
| | | TCCTTCCATTTCTTCTGCACATCTACTTG | |
| | | CTTAAATTGTGGGCAAAAGAGAAAAAG | |
| | | AAGGATTGATCAGAGCATTGTGCAATAC | |
| | | AGTTTCATTAACTCCTTCCCCCGCTCCCC | |
| | | CAAAAATTTGAATTTTTTTTTCAACACTC | |
| | | TTACACCTGTTATGGAAAATGTCAACCT | |
| | | TTGTAAGAAAACCAAAATAAAAATTGA | |
| | | AAAATAAAAACCATAAACATTTGCACCA | |
| | | CTTGTGGCTTTTGAATATCTTCCACAGAG | |
| | | GGAAGTTTAAAACCCAAACTTCCAAAGG | |
| | | TTTAAACTACCTCAAAACACTTTCCCAT | |
| | | GAGTGTGATCCACATTGTTAGGTGCTGA | |
| | | CCTAGACAGAGATGAACTGAGGTCCTTG | |
| | | TTTTGTTTTGTTCATAATACAAAGGTGCT | |
| | | AATTAATAGTATTTCAGATACTTGAAGA | |
| | | ATGTTGATGGTGCTAGAAGAATTTGAGA | |
| | | AGAAATACTCCTGTATTGAGTTGTATCG | |
| | | TGTGGTGTATTTTTTAAAAAATTTGATTT | |
| | | AGCATTCATATTTTCCATCTTATTCCCAA | |
| | | TTAAAAGTATGCAGATTATTTGCCCAAA | |
| | | TCTTCTTCAGATTCAGCATTTGTTCTTTG | |
| | | CCAGTCTCATTTTCATCTTCTTCCATGGT | |
| | | TCCACAGAAGCTTTGTTTCTTGGGCAAG | |
| | | CAGAAAAATTAAATTGTACCTATTTTGT | |
| | | ATATGTGAGATGTTTAAATAAATTGTGA | |
| | | AAAAAATGAAATAAAGCATGTTTGGTTT | |
| | | TCCAAAAGAACATAT | |
| 3UTR- | Col6a2; | CGCCGCCGCCCGGGCCCCGCAGTCGAGG | 12 |
| 008 | collagen, type | GTCGTGAGCCCACCCCGTCCATGGTGCT | |
| | VI, alpha 2 | AAGCGGGCCCGGGTCCCACACGGCCAG | |
| | | CACCGCTGCTCACTCGGACGACGCCCTG | |
| | | GGCCTGCACCTCTCCAGCTCCTCCCACG | |
| | | GGGTCCCCGTAGCCCCGGCCCCCGCCCA | |
| | | GCCCCAGGTCTCCCCAGGCCCTCCGCAG | |
| | | GCTGCCCGGCCTCCCTCCCCCTGCAGCC | |
| | | ATCCCAAGGCTCCTGACCTACCTGGCCC | |
| | | CTGAGCTCTGGAGCAAGCCCTGACCCAA | |
| | | TAAAGGCTTTGAACCCAT | |
| 3UTR- | RPN1; | GGGGCTAGAGCCCTCTCCGCACAGCGTG | 13 |
| 009 | ribophorin I | GAGACGGGGCAAGGAGGGGGGTTATTA | |
| | | GGATTGGTGGTTTTGTTTTGCTTTGTTTA | |
| | | AAGCCGTGGGAAAATGGCACAACTTTAC | |
| | | CTCTGTGGGAGATGCAACACTGAGAGCC | |
| | | AAGGGGTGGGAGTTGGGATAATTTTTAT | |
| | | ATAAAAGAAGTTTTTCCACTTTGAATTG | |
| | | CTAAAAGTGGCATTTTTCCTATGTGCAG | |
| | | TCACTCCTCTCATTTCTAAAATAGGGAC | |
| | | GTGGCCAGGCACGGTGGCTCATGCCTGT | |
| | | AATCCCAGCACTTTGGGAGGCCGAGGCA | |
| | | GGCGGCTCACGAGGTCAGGAGATCGAG | |
| | | ACTATCCTGGCTAACACGGTAAAACCCT | |
| | | GTCTCTACTAAAAGTACAAAAAATTAGC | |
| | | TGGGCGTGGTGGTGGGCACCTGTAGTCC | |
| | | CAGCTACTCGGGAGGCTGAGGCAGGAG | |
| | | AAAGGCATGAATCCAAGAGGCAGAGCT | |
| | | TGCAGTGAGCTGAGATCACGCCATTGCA | |
| | | CTCCAGCCTGGGCAACAGTGTTAAGACT | |
| | | CTGTCTCAAATATAAATAAATAAATAAA | |
| | | TAAATAAATAAATAAATAAAAATAAAG | |
| | | CGAGATGTTGCCCTCAAA | |
| 3UTR- | LRP1; low | GGCCCTGCCCCGTCGGACTGCCCCCAGA | 14 |
| 010 | density | AAGCCTCCTGCCCCCTGCCAGTGAAGTC | |
| | lipoprotein | CTTCAGTGAGCCCCTCCCCAGCCAGCCC | |
| | receptor-related | TTCCCTGGCCCCGCCGGATGTATAAATG | |
| | protein 1 | TAAAAATGAAGGAATTACATTTTATATG | |
| | | TGAGCGAGCAAGCCGGCAAGCGAGCAC | |
| | | AGTATTATTTCTCCATCCCCTCCCTGCCT | |
| | | GCTCCTTGGCACCCCCATGCTGCCTTCA | |
| | | GGGAGACAGGCAGGGAGGGCTTGGGGC | |
| | | TGCACCTCCTACCCTCCCACCAGAACGC | |
| | | ACCCCACTGGGAGAGCTGGTGGTGCAGC | |
| | | CTTCCCCTCCCTGTATAAGACACTTTGCC | |
| | | AAGGCTCTCCCCTCTCGCCCCATCCCTGC | |
| | | TTGCCCGCTCCCACAGCTTCCTGAGGGC | |
| | | TAATTCTGGGAAGGGAGAGTTCTTTGCT | |
| | | GCCCCTGTCTGGAAGACGTGGCTCTGGG | |
| | | TGAGGTAGGCGGGAAAGGATGGAGTGT | |
| | | TTTAGTTCTTGGGGGAGGCCACCCCAAA | |
| | | CCCCAGCCCCAACTCCAGGGGCACCTAT | |
| | | GAGATGGCCATGCTCAACCCCCCTCCCA | |
| | | GACAGGCCCTCCCTGTCTCCAGGGCCCC | |
| | | CACCGAGGTTCCCAGGGCTGGAGACTTC | |
| | | CTCTGGTAAACATTCCTCCAGCCTCCCCT | |
| | | CCCCTGGGGACGCCAAGGAGGTGGGCC | |
| | | ACACCCAGGAAGGGAAAGCGGGCAGCC | |
| | | CCGTTTTGGGGACGTGAACGTTTTAATA | |
| | | ATTTTTGCTGAATTCCTTTACAACTAAAT | |
| | | AACACAGATATTGTTATAAATAAAATTG | |
| | | T | |
| 3UTR- | Nnt1; | ATATTAAGGATCAAGCTGTTAGCTAATA | 15 |
| 011 | cardiotrophin- | ATGCCACCTCTGCAGTTTTGGGAACAGG | |
| | like cytokine | CAAATAAAGTATCAGTATACATGGTGAT | |
| | factor 1 | GTACATCTGTAGCAAAGCTCTTGGAGAA | |
| | | AATGAAGACTGAAGAAAGCAAAGCAAA | |
| | | AACTGTATAGAGAGATTTTTCAAAAGCA | |
| | | GTAATCCCTCAATTTTAAAAAAGGATTG | |
| | | AAAATTCTAAATGTCTTTCTGTGCATATT | |
| | | TTTTGTGTTAGGAATCAAAAGTATTTTAT | |
| | | AAAAGGAGAAAGAACAGCCTCATTTTA | |
| | | GATGTAGTCCTGTTGGATTTTTTATGCCT | |
| | | CCTCAGTAACCAGAAATGTTTTAAAAAA | |
| | | CTAAGTGTTTAGGATTTCAAGACAACAT | |
| | | TATACATGGCTCTGAAATATCTGACACA | |
| | | ATGTAAACATTGCAGGCACCTGCATTTT | |
| | | ATGTTTTTTTTTTCAACAAATGTGACTAA | |
| | | TTTGAAACTTTTATGAACTTCTGAGCTGT | |
| | | CCCCTTGCAATTCAACCGCAGTTTGAAT | |
| | | TAATCATATCAAATCAGTTTTAATTTTTT | |
| | | AAATTGTACTTCAGAGTCTATATTTCAA | |
| | | GGGCACATTTTCTCACTACTATTTTAATA | |
| | | CATTAAAGGACTAAATAATCTTTCAGAG | |
| | | ATGCTGGAAACAAATCATTTGCTTTATA | |
| | | TGTTTCATTAGAATACCAATGAAACATA | |
| | | CAACTTGAAAATTAGTAATAGTATTTTT | |
| | | GAAGATCCCATTTCTAATTGGAGATCTC | |
| | | TTTAATTTCGATCAACTTATAATGTGTAG | |
| | | TACTATATTAAGTGCACTTGAGTGGAAT | |
| | | TCAACATTTGACTAATAAAATGAGTTCA | |
| | | TCATGTTGGCAAGTGATGTGGCAATTAT | |
| | | CTCTGGTGACAAAAGAGTAAAATCAAAT | |
| | | ATTTCTGCCTGTTACAAATATCAAGGAA | |
| | | GACCTGCTACTATGAAATAGATGACATT | |
| | | AATCTGTCTTCACTGTTTATAATACGGAT | |
| | | GGATTTTTTTTCAAATCAGTGTGTGTTTT | |
| | | GAGGTCTTATGTAATTGATGACATTTGA | |
| | | GAGAAATGGTGGCTTTTTTTAGCTACCT | |
| | | CTTTGTTCATTTAAGCACCAGTAAAGAT | |
| | | CATGTCTTTTTATAGAAGTGTAGATTTTC | |
| | | TTTGTGACTTTGCTATCGTGCCTAAAGCT | |
| | | CTAAATATAGGTGAATGTGTGATGAATA | |
| | | CTCAGATTATTTGTCTCTCTATATAATTA | |
| | | GTTTGGTACTAAGTTTCTCAAAAAATTA | |
| | | TTAACACATGAAAGACAATCTCTAAACC | |
| | | AGAAAAAGAAGTAGTACAAATTTTGTTA | |
| | | CTGTAATGCTCGCGTTTAGTGAGTTTAA | |
| | | AACACACAGTATCTTTTGGTTTTATAATC | |
| | | AGTTTCTATTTTGCTGTGCCTGAGATTAA | |
| | | GATCTGTGTATGTGTGTGTGTGTGTGTGT | |
| | | GCGTTTGTGTGTTAAAGCAGAAAAGACT | |
| | | TTTTTAAAAGTTTTAAGTGATAAATGCA | |
| | | ATTTGTTAATTGATCTTAGATCACTAGTA | |
| | | AACTCAGGGCTGAATTATACCATGTATA | |
| | | TTCTATTAGAAGAAAGTAAACACCATCT | |
| | | TTATTCCTGCCCTTTTTCTTCTCTCAAAG | |
| | | TAGTTGTAGTTATATCTAGAAAGAAGCA | |
| | | ATTTTGATTTCTTGAAAAGGTAGTTCCTG | |
| | | CACTCAGTTTAAACTAAAAATAATCATA | |
| | | CTTGGATTTTATTTATTTTTGTCATAGTA | |
| | | AAAATTTTAATTTATATATATTTTTATTT | |
| | | AGTATTATCTTATTCTTTGCTATTTGCCA | |
| | | ATCCTTTGTCATCAATTGTGTTAAATGAA | |
| | | TTGAAAATTCATGCCCTGTTCATTTTATT | |
| | | TTACTTTATTGGTTAGGATATTTAAAGG | |
| | | ATTTTTGTATATATAATTTCTTAAATTAA | |
| | | TATTCCAAAAGGTTAGTGGACTTAGATT | |
| | | ATAAATTATGGCAAAAATCTAAAAACAA | |
| | | CAAAAATGATTTTTATACATTCTATTTCA | |
| | | TTATTCCTCTTTTTCCAATAAGTCATACA | |
| | | ATTGGTAGATATGACTTATTTTATTTTTG | |
| | | TATTATTCACTATATCTTTATGATATTTA | |
| | | AGTATAAATAATTAAAAAAATTTATTGT | |
| | | ACCTTATAGTCTGTCACCAAAAAAAAAA | |
| | | AATTATCTGTAGGTAGTGAAATGCTAAT | |
| | | GTTGATTTGTCTTTAAGGGCTTGTTAACT | |
| | | ATCCTTTATTTTCTCATTTGTCTTAAATT | |
| | | AGGAGTTTGTGTTTAAATTACTCATCTA | |
| | | AGCAAAAAATGTATATAAATCCCATTAC | |
| | | TGGGTATATACCCAAAGGATTATAAATC | |
| | | ATGCTGCTATAAAGACACATGCACACGT | |
| | | ATGTTTATTGCAGCACTATTCACAATAG | |
| | | CAAAGACTTGGAACCAACCCAAATGTCC | |
| | | ATCAATGATAGACTTGATTAAGAAAATG | |
| | | TGCACATATACACCATGGAATACTATGC | |
| | | AGCCATAAAAAAGGATGAGTTCATGTCC | |
| | | TTTGTAGGGACATGGATAAAGCTGGAAA | |
| | | CCATCATTCTGAGCAAACTATTGCAAGG | |
| | | ACAGAAAACCAAACACTGCATGTTCTCA | |
| | | CTCATAGGTGGGAATTGAACAATGAGAA | |
| | | CACTTGGACACAAGGTGGGGAACACCA | |
| | | CACACCAGGGCCTGTCATGGGGTGGGGG | |
| | | GAGTGGGGAGGGATAGCATTAGGAGAT | |
| | | ATACCTAATGTAAATGATGAGTTAATGG | |
| | | GTGCAGCACACCAACATGGCACATGTAT | |
| | | ACATATGTAGCAAACCTGCACGTTGTGC | |
| | | ACATGTACCCTAGAACTTAAAGTATAAT | |
| | | TAAAAAAAAAAAGAAAACAGAAGCTAT | |
| | | TTATAAAGAAGTTATTTGCTGAAATAAA | |
| | | TGTGATCTTTCCCATTAAAAAAATAAAG | |
| | | AAATTTTGGGGTAAAAAAACACAATATA | |
| | | TTGTATTCTTGAAAAATTCTAAGAGAGT | |
| | | GGATGTGAAGTGTTCTCACCACAAAAGT | |
| | | GATAACTAATTGAGGTAATGCACATATT | |
| | | AATTAGAAAGATTTTGTCATTCCACAAT | |
| | | GTATATATACTTAAAAATATGTTATACA | |
| | | CAATAAATACATACATTAAAAAATAAGT | |
| | | AAATGTA | |
| 3UTR- | Col6a1; | CCCACCCTGCACGCCGGCACCAAACCCT | 16 |
| 012 | collagen type | GTCCTCCCACCCCTCCCCACTCATCACTA | |
| | VI, alpha 1 | AACAGAGTAAAATGTGATGCGAATTTTC | |
| | | CCGACCAACCTGATTCGCTAGATTTTTTT | |
| | | TAAGGAAAAGCTTGGAAAGCCAGGACA | |
| | | CAACGCTGCTGCCTGCTTTGTGCAGGGT | |
| | | CCTCCGGGGCTCAGCCCTGAGTTGGCAT | |
| | | CACCTGCGCAGGGCCCTCTGGGGCTCAG | |
| | | CCCTGAGCTAGTGTCACCTGCACAGGGC | |
| | | CCTCTGAGGCTCAGCCCTGAGCTGGCGT | |
| | | CACCTGTGCAGGGCCCTCTGGGGCTCAG | |
| | | CCCTGAGCTGGCCTCACCTGGGTTCCCC | |
| | | ACCCCGGGCTCTCCTGCCCTGCCCTCCTG | |
| | | CCCGCCCTCCCTCCTGCCTGCGCAGCTCC | |
| | | TTCCCTAGGCACCTCTGTGCTGCATCCCA | |
| | | CCAGCCTGAGCAAGACGCCCTCTCGGGG | |
| | | CCTGTGCCGCACTAGCCTCCCTCTCCTCT | |
| | | GTCCCCATAGCTGGTTTTTCCCACCAATC | |
| | | CTCACCTAACAGTTACTTTACAATTAAA | |
| | | CTCAAAGCAAGCTCTTCTCCTCAGCTTG | |
| | | GGGCAGCCATTGGCCTCTGTCTCGTTTTG | |
| | | GGAAACCAAGGTCAGGAGGCCGTTGCA | |
| | | GACATAAATCTCGGCGACTCGGCCCCGT | |
| | | CTCCTGAGGGTCCTGCTGGTGACCGGCC | |
| | | TGGACCTTGGCCCTACAGCCCTGGAGGC | |
| | | CGCTGCTGACCAGCACTGACCCCGACCT | |
| | | CAGAGAGTACTCGCAGGGGCGCTGGCTG | |
| | | CACTCAAGACCCTCGAGATTAACGGTGC | |
| | | TAACCCCGTCTGCTCCTCCCTCCCGCAG | |
| | | AGACTGGGGCCTGGACTGGACATGAGA | |
| | | GCCCCTTGGTGCCACAGAGGGCTGTGTC | |
| | | TTACTAGAAACAACGCAAACCTCTCCTT | |
| | | CCTCAGAATAGTGATGTGTTCGACGTTT | |
| | | TATCAAAGGCCCCCTTTCTATGTTCATGT | |
| | | TAGTTTTGCTCCTTCTGTGTTTTTTTCTGA | |
| | | ACCATATCCATGTTGCTGACTTTTCCAAA | |
| | | TAAAGGTTTTCACTCCTCTC | |
| 3UTR- | Calr; | AGAGGCCTGCCTCCAGGGCTGGACTGAG | 17 |
| 013 | calreticulin | GCCTGAGCGCTCCTGCCGCAGAGCTGGC | |
| | | CGCGCCAAATAATGTCTCTGTGAGACTC | |
| | | GAGAACTTTCATTTTTTTCCAGGCTGGTT | |
| | | CGGATTTGGGGTGGATTTTGGTTTTGTTC | |
| | | CCCTCCTCCACTCTCCCCCACCCCCTCCC | |
| | | CGCCCTTTTTTTTTTTTTTTTTTAAACTGG | |
| | | TATTTTATCTTTGATTCTCCTTCAGCCCT | |
| | | CACCCCTGGTTCTCATCTTTCTTGATCAA | |
| | | CATCTTTTCTTGCCTCTGTCCCCTTCTCTC | |
| | | ATCTCTTAGCTCCCCTCCAACCTGGGGG | |
| | | GCAGTGGTGTGGAGAAGCCACAGGCCT | |
| | | GAGATTTCATCTGCTCTCCTTCCTGGAGC | |
| | | CCAGAGGAGGGCAGCAGAAGGGGGTGG | |
| | | TGTCTCCAACCCCCCAGCACTGAGGAAG | |
| | | AACGGGGCTCTTCTCATTTCACCCCTCCC | |
| | | TTTCTCCCCTGCCCCCAGGACTGGGCCA | |
| | | CTTCTGGGTGGGGCAGTGGGTCCCAGAT | |
| | | TGGCTCACACTGAGAATGTAAGAACTAC | |
| | | AAACAAAATTTCTATTAAATTAAATTTT | |
| | | GTGTCTCC | |
| 3UTR- | Col1a1; | CTCCCTCCATCCCAACCTGGCTCCCTCCC | 18 |
| 014 | collagen, type | ACCCAACCAACTTTCCCCCCAACCCGGA | |
| | I, alpha 1 | AACAGACAAGCAACCCAAACTGAACCC | |
| | | CCTCAAAAGCCAAAAAATGGGAGACAA | |
| | | TTTCACATGGACTTTGGAAAATATTTTTT | |
| | | TCCTTTGCATTCATCTCTCAAACTTAGTT | |
| | | TTTATCTTTGACCAACCGAACATGACCA | |
| | | AAAACCAAAAGTGCATTCAACCTTACCA | |
| | | AAAAAAAAAAAAAAAAAAGAATAAATA | |
| | | AATAACTTTTTAAAAAAGGAAGCTTGGT | |
| | | CCACTTGCTTGAAGACCCATGCGGGGGT | |
| | | AAGTCCCTTTCTGCCCGTTGGGCTTATGA | |
| | | AACCCCAATGCTGCCCTTTCTGCTCCTTT | |
| | | CTCCACACCCCCCTTGGGGCCTCCCCTCC | |
| | | ACTCCTTCCCAAATCTGTCTCCCCAGAA | |
| | | GACACAGGAAACAATGTATTGTCTGCCC | |
| | | AGCAATCAAAGGCAATGCTCAAACACCC | |
| | | AAGTGGCCCCCACCCTCAGCCCGCTCCT | |
| | | GCCCGCCCAGCACCCCCAGGCCCTGGGG | |
| | | GACCTGGGGTTCTCAGACTGCCAAAGAA | |
| | | GCCTTGCCATCTGGCGCTCCCATGGCTCT | |
| | | TGCAACATCTCCCCTTCGTTTTTGAGGGG | |
| | | GTCATGCCGGGGGAGCCACCAGCCCCTC | |
| | | ACTGGGTTCGGAGGAGAGTCAGGAAGG | |
| | | GCCACGACAAAGCAGAAACATCGGATTT | |
| | | GGGGAACGCGTGTCAATCCCTTGTGCCG | |
| | | CAGGGCTGGGCGGGAGAGACTGTTCTGT | |
| | | TCCTTGTGTAACTGTGTTGCTGAAAGAC | |
| | | TACCTCGTTCTTGTCTTGATGTGTCACCG | |
| | | GGGCAACTGCCTGGGGGCGGGGATGGG | |
| | | GGCAGGGTGGAAGCGGCTCCCCATTTTA | |
| | | TACCAAAGGTGCTACATCTATGTGATGG | |
| | | GTGGGGTGGGGAGGGAATCACTGGTGCT | |
| | | ATAGAAATTGAGATGCCCCCCCAGGCCA | |
| | | GCAAATGTTCCTTTTTGTTCAAAGTCTAT | |
| | | TTTTATTCCTTGATATTTTTCTTTTTTTTT | |
| | | TTTTTTTTTTGTGGATGGGGACTTGTGAA | |
| | | TTTTTCTAAAGGTGCTATTTAACATGGG | |
| | | AGGAGAGCGTGTGCGGCTCCAGCCCAGC | |
| | | CCGCTGCTCACTTTCCACCCTCTCTCCAC | |
| | | CTGCCTCTGGCTTCTCAGGCCTCTGCTCT | |
| | | CCGACCTCTCTCCTCTGAAACCCTCCTCC | |
| | | ACAGCTGCAGCCCATCCTCCCGGCTCCC | |
| | | TCCTAGTCTGTCCTGCGTCCTCTGTCCCC | |
| | | GGGTTTCAGAGACAACTTCCCAAAGCAC | |
| | | AAAGCAGTTTTTCCCCCTAGGGGTGGGA | |
| | | GGAAGCAAAAGACTCTGTACCTATTTTG | |
| | | TATGTGTATAATAATTTGAGATGTTTTTA | |
| | | ATTATTTTGATTGCTGGAATAAAGCATG | |
| | | TGGAAATGACCCAAACATAATCCGCAGT | |
| | | GGCCTCCTAATTTCCTTCTTTGGAGTTGG | |
| | | GGGAGGGGTAGACATGGGGAAGGGGCT | |
| | | TTGGGGTGATGGGCTTGCCTTCCATTCCT | |
| | | GCCCTTTCCCTCCCCACTATTCTCTTCTA | |
| | | GATCCCTCCATAACCCCACTCCCCTTTCT | |
| | | CTCACCCTTCTTATACCGCAAACCTTTCT | |
| | | ACTTCCTCTTTCATTTTCTATTCTTGCAA | |
| | | TTTCCTTGCACCTTTTCCAAATCCTCTTC | |
| | | TCCCCTGCAATACCATACAGGCAATCCA | |
| | | CGTGCACAACACACACACACACTCTTCA | |
| | | CATCTGGGGTTGTCCAAACCTCATACCC | |
| | | ACTCCCCTTCAAGCCCATCCACTCTCCAC | |
| | | CCCCTGGATGCCCTGCACTTGGTGGCGG | |
| | | TGGGATGCTCATGGATACTGGGAGGGTG | |
| | | AGGGGAGTGGAACCCGTGAGGAGGACC | |
| | | TGGGGGCCTCTCCTTGAACTGACATGAA | |
| | | GGGTCATCTGGCCTCTGCTCCCTTCTCAC | |
| | | CCACGCTGACCTCCTGCCGAAGGAGCAA | |
| | | CGCAACAGGAGAGGGGTCTGCTGAGCCT | |
| | | GGCGAGGGTCTGGGAGGGACCAGGAGG | |
| | | AAGGCGTGCTCCCTGCTCGCTGTCCTGG | |
| | | CCCTGGGGGAGTGAGGGAGACAGACAC | |
| | | CTGGGAGAGCTGTGGGGAAGGCACTCG | |
| | | CACCGTGCTCTTGGGAAGGAAGGAGACC | |
| | | TGGCCCTGCTCACCACGGACTGGGTGCC | |
| | | TCGACCTCCTGAATCCCCAGAACACAAC | |
| | | CCCCCTGGGCTGGGGTGGTCTGGGGAAC | |
| | | CATCGTGCCCCCGCCTCCCGCCTACTCCT | |
| | | TTTTAAGCTT | |
| 3UTR- | Plod1 | TTGGCCAGGCCTGACCCTCTTGGACCTTT | 19 |
| 015 | procollagen- | CTTCTTTGCCGACAACCACTGCCCAGCA | |
| | lysine, 2- | GCCTCTGGGACCTCGGGGTCCCAGGGAA | |
| | oxoglutarate 5- | CCCAGTCCAGCCTCCTGGCTGTTGACTTC | |
| | dioxygenase 1 | CCATTGCTCTTGGAGCCACCAATCAAAG | |
| | | AGATTCAAAGAGATTCCTGCAGGCCAGA | |
| | | GGCGGAACACACCTTTATGGCTGGGGCT | |
| | | CTCCGTGGTGTTCTGGACCCAGCCCCTG | |
| | | GAGACACCATTCACTTTTACTGCTTTGTA | |
| | | GTGACTCGTGCTCTCCAACCTGTCTTCCT | |
| | | GAAAAACCAAGGCCCCCTTCCCCCACCT | |
| | | CTTCCATGGGGTGAGACTTGAGCAGAAC | |
| | | AGGGGCTTCCCCAAGTTGCCCAGAAAGA | |
| | | CTGTCTGGGTGAGAAGCCATGGCCAGAG | |
| | | CTTCTCCCAGGCACAGGTGTTGCACCAG | |
| | | GGACTTCTGCTTCAAGTTTTGGGGTAAA | |
| | | GACACCTGGATCAGACTCCAAGGGCTGC | |
| | | CCTGAGTCTGGGACTTCTGCCTCCATGG | |
| | | CTGGTCATGAGAGCAAACCGTAGTCCCC | |
| | | TGGAGACAGCGACTCCAGAGAACCTCTT | |
| | | GGGAGACAGAAGAGGCATCTGTGCACA | |
| | | GCTCGATCTTCTACTTGCCTGTGGGGAG | |
| | | GGGAGTGACAGGTCCACACACCACACTG | |
| | | GGTCACCCTGTCCTGGATGCCTCTGAAG | |
| | | AGAGGGACAGACCGTCAGAAACTGGAG | |
| | | AGTTTCTATTAAAGGTCATTTAAACCA | |
| 3UTR- | Nucb1; | TCCTCCGGGACCCCAGCCCTCAGGATTC | 20 |
| 016 | nucleobindin 1 | CTGATGCTCCAAGGCGACTGATGGGCGC | |
| | | TGGATGAAGTGGCACAGTCAGCTTCCCT | |
| | | GGGGGCTGGTGTCATGTTGGGCTCCTGG | |
| | | GGCGGGGGCACGGCCTGGCATTTCACGC | |
| | | ATTGCTGCCACCCCAGGTCCACCTGTCT | |
| | | CCACTTTCACAGCCTCCAAGTCTGTGGC | |
| | | TCTTCCCTTCTGTCCTCCGAGGGGCTTGC | |
| | | CTTCTCTCGTGTCCAGTGAGGTGCTCAGT | |
| | | GATCGGCTTAACTTAGAGAAGCCCGCCC | |
| | | CCTCCCCTTCTCCGTCTGTCCCAAGAGG | |
| | | GTCTGCTCTGAGCCTGCGTTCCTAGGTG | |
| | | GCTCGGCCTCAGCTGCCTGGGTTGTGGC | |
| | | CGCCCTAGCATCCTGTATGCCCACAGCT | |
| | | ACTGGAATCCCCGCTGCTGCTCCGGGCC | |
| | | AAGCTTCTGGTTGATTAATGAGGGCATG | |
| | | GGGTGGTCCCTCAAGACCTTCCCCTACC | |
| | | TTTTGTGGAACCAGTGATGCCTCAAAGA | |
| | | CAGTGTCCCCTCCACAGCTGGGTGCCAG | |
| | | GGGCAGGGGATCCTCAGTATAGCCGGTG | |
| | | AACCCTGATACCAGGAGCCTGGGCCTCC | |
| | | CTGAACCCCTGGCTTCCAGCCATCTCAT | |
| | | CGCCAGCCTCCTCCTGGACCTCTTGGCC | |
| | | CCCAGCCCCTTCCCCACACAGCCCCAGA | |
| | | AGGGTCCCAGAGCTGACCCCACTCCAGG | |
| | | ACCTAGGCCCAGCCCCTCAGCCTCATCT | |
| | | GGAGCCCCTGAAGACCAGTCCCACCCAC | |
| | | CTTTCTGGCCTCATCTGACACTGCTCCGC | |
| | | ATCCTGCTGTGTGTCCTGTTCCATGTTCC | |
| | | GGTTCCATCCAAATACACTTTCTGGAAC | |
| | | AAA | |
| 3UTR- | α-globin | GCTGGAGCCTCGGTGGCCATGCTTCTTG | 21 |
| 017 | | CCCCTTGGGCCTCCCCCCAGCCCCTCCTC | |
| | | CCCTTCCTGCACCCGTACCCCCGTGGTCT | |
| | | TTGAATAAAGTCTGAGTGGGCGGC | |

[0192] It should be understood that those listed in the previous tables are examples and that any UTR from any gene may be incorporated into the respective first or second flanking region of the primary construct. Furthermore, multiple wild-type UTRs of any known gene may be utilized. It is also within the scope of the present invention to provide artificial UTRs which are not variants of wild type genes. These UTRs or portions thereof may be placed in the same orientation as in the transcript from which they were selected or may be altered in orientation or location. Hence a 5′ or 3′ UTR may be inverted, shortened, lengthened, made chimeric with one or more other 5′ UTRs or 3′ UTRs. As used herein, the term “altered” as it relates to a UTR sequence, means that the UTR has been changed in some way in relation to a reference sequence. For example, a 3′ or 5′ UTR may be altered relative to a wild type or native UTR by the change in orientation or location as taught above or may be altered by the inclusion of additional nucleotides, deletion of nucleotides, swapping or transposition of nucleotides. Any of these changes producing an “altered” UTR (whether 3′ or 5′) comprise a variant UTR.

[0193] In one embodiment, a double, triple or quadruple UTR such as a 5′ or 3′ UTR may be used. As used herein, a “double” UTR is one in which two copies of the same UTR are encoded either in series or substantially in series. For example, a double beta-globin 3′ UTR may be used as described in US Patent publication 20100129877, the contents of which are incorporated herein by reference in its entirety.

[0194] It is also within the scope of the present invention to have patterned UTRs. As used herein “patterned UTRs” are those UTRs which reflect a repeating or alternating pattern, such as ABABAB or AABBAABBAABB or ABCABCABC or variants thereof repeated once, twice, or more than 3 times. In these patterns, each letter, A, B, or C represent a different UTR at the nucleotide level.

[0195] In one embodiment, flanking regions are selected from a family of transcripts whose proteins share a common function, structure, feature of property. For example, polypeptides of interest may belong to a family of proteins which are expressed in a particular cell, tissue or at some time during development. The UTRs from any of these genes may be swapped for any other UTR of the same or different family of proteins to create a new chimeric primary transcript. As used herein, a “family of proteins” is used in the broadest sense to refer to a group of two or more polypeptides of interest which share at least one function, structure, feature, localization, origin, or expression pattern.

[0196] After optimization (if desired), the primary construct components are reconstituted and transformed into a vector such as, but not limited to, plasmids, viruses, cosmids, and artificial chromosomes. For example, the optimized construct may be reconstituted and transformed into chemically competent E. coli, yeast, neurospora, maize, drosophila, etc. where high copy plasmid-like or chromosome structures occur by methods described herein.

[0197] The untranslated region may also include translation enhancer elements (TEE). As a non-limiting example, the TEE may include those described in US Application No. 20090226470, herein incorporated by reference in its entirety, and those known in the art.

### Stop Codons

[0198] In one embodiment, the primary constructs of the present invention may include at least two stop codons before the 3′ untranslated region (UTR). The stop codon may be selected from TGA, TAA and TAG. In one embodiment, the primary constructs of the present invention include the stop codon TGA and one additional stop codon. In a further embodiment the addition stop codon may be TAA. In another embodiment, the primary constructs of the present invention include three stop codons.

### Vector Amplification

[0199] The vector containing the primary construct is then amplified and the plasmid isolated and purified using methods known in the art such as, but not limited to, a maxi prep using the Invitrogen PURELINK™ HiPure Maxiprep Kit (Carlsbad, CA).

### Plasmid Linearization

[0200] The plasmid may then be linearized using methods known in the art such as, but not limited to, the use of restriction enzymes and buffers. The linearization reaction may be purified using methods including, for example Invitrogen's PURELINK™ PCR Micro Kit (Carlsbad, CA), and HPLC based purification methods such as, but not limited to, strong anion exchange HPLC, weak anion exchange HPLC, reverse phase HPLC (RP-HPLC), and hydrophobic interaction HPLC (HIC-HPLC) and Invitrogen's standard PURELINK™ PCR Kit (Carlsbad, CA). The purification method may be modified depending on the size of the linearization reaction which was conducted. The linearized plasmid is then used to generate cDNA for in vitro transcription (IVT) reactions.

cDNA Template Synthesis

[0201] A cDNA template may be synthesized by having a linearized plasmid undergo polymerase chain reaction (PCR). Table 4 is a listing of primers and probes that may be usefully in the PCR reactions of the present invention. It should be understood that the listing is not exhaustive and that primer-probe design for any amplification is within the skill of those in the art. Probes may also contain chemically modified bases to increase base-pairing fidelity to the target molecule and base-pairing strength. Such modifications may include 5-methyl-Cytidine, 2,6-di-amino-purine, 2′-fluoro, phosphoro-thioate, or locked nucleic acids.

TABLE 4
Primers and Probes

| Primer/ | | | |
|---|---|---|---|
| Probe | | Hybridization | |
| Identifier | Sequence (5′-3′) | target | SEQ ID NO. |
| UFP | TTGGACCCTCGTACAGAAGC | cDNA Template | 22 |
| | TAATACG | | |
| URP | Tₓ₁₆₀CTTCCTACTCAGGCTT | cDNA Template | 23 |
| | TATTCAAAGACCA | | |
| GBA1 | CCTTGACCTTCTGGAACTTC | Acid glucocere- | 24 |
| | | brosidase | |
| GBA2 | CCAAGCACTGAAACGGATAT | Acid glucocere- | 25 |
| | | brosidase | |
| LUC1 | GATGAAAAGTGCTCCAAGGA | Luciferase | 26 |
| LUC2 | AACCGTGATGAAAAGGTACC | Luciferase | 27 |
| LUC3 | TCATGCAGATTGGAAAGGTC | Luciferase | 28 |
| GCSF1 | CTTCTTGGACTGTCCAGAGG | G-CSF | 29 |
| GCSF2 | GCAGTCCCTGATACAAGAAC | G-CSF | 30 |
| GCSF3 | GATTGAAGGTGGCTCGCTAC | G-CSF | 31 |

*UFP is universal forward primer; URP is universal reverse primer.

[0202] In one embodiment, the cDNA may be submitted for sequencing analysis before undergoing transcription.

mRNA Production

[0203] The process of mRNA or mmRNA production may include, but is not limited to, in vitro transcription, cDNA template removal and RNA clean-up, and mRNA capping and/or tailing reactions.

### In Vitro Transcription

[0204] The cDNA produced in the previous step may be transcribed using an in vitro transcription (IVT) system. The system typically comprises a transcription buffer, nucleotide triphosphates (NTPs), an RNase inhibitor and a polymerase. The NTPs may be manufactured in house, may be selected from a supplier, or may be synthesized as described herein. The NTPs may be selected from, but are not limited to, those described herein including natural and unnatural (modified) NTPs. The polymerase may be selected from, but is not limited to, T7 RNA polymerase, T3 RNA polymerase and mutant polymerases such as, but not limited to, polymerases able to incorporate modified nucleic acids.

### RNA Polymerases

[0205] Any number of RNA polymerases or variants may be used in the design of the primary constructs of the present invention.

[0206] RNA polymerases may be modified by inserting or deleting amino acids of the RNA polymerase sequence. As a non-limiting example, the RNA polymerase may be modified to exhibit an increased ability to incorporate a 2′-modified nucleotide triphosphate compared to an unmodified RNA polymerase (see International Publication WO2008078180 and U.S. Pat. No. 8,101,385; herein incorporated by reference in their entireties).

[0207] Variants may be obtained by evolving an RNA polymerase, optimizing the RNA polymerase amino acid and/or nucleic acid sequence and/or by using other methods known in the art. As a non-limiting example, T7 RNA polymerase variants may be evolved using the continuous directed evolution system set out by Esvelt et al. (Nature (2011) 472(7344):499-503; herein incorporated by reference in its entirety) where clones of T7 RNA polymerase may encode at least one mutation such as, but not limited to, lysine at position 93 substituted for threonine (K93T), I4M, A7T, E63V, V64D, A65E, D66Y, T76N, C125R, S128R, A136T, N165S, G175R, H176 L, Y178H, F182 L, L196F, G198V, D208Y, E222K, S228A, Q239R, T243N, G259D, M267I, G280C, H300R, D351A, A354S, E356D, L360P, A383V, Y385C, D388Y, S397R, M401T, N410S, K450R, P451T, G452V, E484A, H523 L, H524N, G542V, E565K, K577E, K577M, N601S, S684Y, L699I, K713E, N748D, Q754R, E775K, A827V, D85iN or L864F. As another non-limiting example, T7 RNA polymerase variants may encode at least mutation as described in U.S. Pub. Nos. 20100120024 and 20070117112; herein incorporated by reference in their entireties. Variants of RNA polymerase may also include, but are not limited to, substitutional variants, conservative amino acid substitution, insertional variants, deletional variants and/or covalent derivatives.

[0208] In one embodiment, the primary construct may be designed to be recognized by the wild type or variant RNA polymerases. In doing so, the primary construct may be modified to contain sites or regions of sequence changes from the wild type or parent primary construct.

[0209] In one embodiment, the primary construct may be designed to include at least one substitution and/or insertion upstream of an RNA polymerase binding or recognition site, downstream of the RNA polymerase binding or recognition site, upstream of the TATA box sequence, downstream of the TATA box sequence of the primary construct but upstream of the coding region of the primary construct, within the 5′UTR, before the 5′UTR and/or after the 5′UTR.

[0210] In one embodiment, the 5′UTR of the primary construct may be replaced by the insertion of at least one region and/or string of nucleotides of the same base. The region and/or string of nucleotides may include, but is not limited to, at least 3, at least 4, at least 5, at least 6, at least 7 or at least 8 nucleotides and the nucleotides may be natural and/or unnatural. As a non-limiting example, the group of nucleotides may include 5-8 adenine, cytosine, thymine, a string of any of the other nucleotides disclosed herein and/or combinations thereof.

[0211] In one embodiment, the 5′UTR of the primary construct may be replaced by the insertion of at least two regions and/or strings of nucleotides of two different bases such as, but not limited to, adenine, cytosine, thymine, any of the other nucleotides disclosed herein and/or combinations thereof. For example, the 5′UTR may be replaced by inserting 5-8 adenine bases followed by the insertion of 5-8 cytosine bases. In another example, the 5′UTR may be replaced by inserting 5-8 cytosine bases followed by the insertion of 5-8 adenine bases.

[0212] In one embodiment, the primary construct may include at least one substitution and/or insertion downstream of the transcription start site which may be recognized by an RNA polymerase. As a non-limiting example, at least one substitution and/or insertion may occur downstream the transcription start site by substituting at least one nucleic acid in the region just downstream of the transcription start site (such as, but not limited to, +1 to +6). Changes to region of nucleotides just downstream of the transcription start site may affect initiation rates, increase apparent nucleotide triphosphate (NTP) reaction constant values, and increase the dissociation of short transcripts from the transcription complex curing initial transcription (Brieba et al, Biochemistry (2002) 41: 5144-5149; herein incorporated by reference in its entirety). The modification, substitution and/or insertion of at least one nucleic acid may cause a silent mutation of the nucleic acid sequence or may cause a mutation in the amino acid sequence.

[0213] In one embodiment, the primary construct may include the substitution of at least 1, at least 2, at least 3, at least 4, at least 5, at least 6, at least 7, at least 8, at least 9, at least 10, at least 11, at least 12 or at least 13 guanine bases downstream of the transcription start site.

[0214] In one embodiment, the primary construct may include the substitution of at least 1, at least 2, at least 3, at least 4, at least 5 or at least 6 guanine bases in the region just downstream of the transcription start site. As a non-limiting example, if the nucleotides in the region are GGGAGA the guanine bases may be substituted by at least 1, at least 2, at least 3 or at least 4 adenine nucleotides. In another non-limiting example, if the nucleotides in the region are GGGAGA the guanine bases may be substituted by at least 1, at least 2, at least 3 or at least 4 cytosine bases. In another non-limiting example, if the nucleotides in the region are GGGAGA the guanine bases may be substituted by at least 1, at least 2, at least 3 or at least 4 thymine, and/or any of the nucleotides described herein.

[0215] In one embodiment, the primary construct may include at least one substitution and/or insertion upstream of the start codon. For the purpose of clarity, one of skill in the art would appreciate that the start codon is the first codon of the protein coding region whereas the transcription start site is the site where transcription begins. The primary construct may include, but is not limited to, at least 1, at least 2, at least 3, at least 4, at least 5, at least 6, at least 7 or at least 8 substitutions and/or insertions of nucleotide bases. The nucleotide bases may be inserted or substituted at 1, at least 1, at least 2, at least 3, at least 4 or at least 5 locations upstream of the start codon. The nucleotides inserted and/or substituted may be the same base (e.g., all A or all C or all T or all G), two different bases (e.g., A and C, A and T, or C and T), three different bases (e.g., A, C and T or A, C and T) or at least four different bases. As a non-limiting example, the guanine base upstream of the coding region in the primary construct may be substituted with adenine, cytosine, thymine, or any of the nucleotides described herein. In another non-limiting example the substitution of guanine bases in the primary construct may be designed so as to leave one guanine base in the region downstream of the transcription start site and before the start codon (see Esvelt et al. Nature (2011) 472(7344):499-503; herein incorporated by reference in its entirety). As a non-limiting example, at least 5 nucleotides may be inserted at 1 location downstream of the transcription start site but upstream of the start codon and the at least 5 nucleotides may be the same base type.

cDNA Template Removal and Clean-Up

[0216] The cDNA template may be removed using methods known in the art such as, but not limited to, treatment with Deoxyribonuclease I (DNase I). RNA clean-up may also include a purification method such as, but not limited to, AGENCOURT® CLEANSEQ® system from Beckman Coulter (Danvers, MA), HPLC based purification methods such as, but not limited to, strong anion exchange HPLC, weak anion exchange HPLC, reverse phase HPLC (RP-HPLC), and hydrophobic interaction HPLC (HIC-HPLC).

[0217] Capping and/or Tailing Reactions

[0218] The primary construct or mmRNA may also undergo capping and/or tailing reactions. A capping reaction may be performed by methods known in the art to add a 5′ cap to the 5′ end of the primary construct. Methods for capping include, but are not limited to, using a Vaccinia Capping enzyme (New England Biolabs, Ipswich, MA).

[0219] A poly-A tailing reaction may be performed by methods known in the art, such as, but not limited to, 2′ O-methyltransferase and by methods as described herein. If the primary construct generated from cDNA does not include a poly-T, it may be beneficial to perform the poly-A-tailing reaction before the primary construct is cleaned.

mRNA Purification

[0220] Primary construct or mmRNA purification may include, but is not limited to, mRNA or mmRNA clean-up, quality assurance and quality control. mRNA or mmRNA clean-up may be performed by methods known in the arts such as, but not limited to, AGENCOURT® beads (Beckman Coulter Genomics, Danvers, MA), poly-T beads, LNA™ oligo-T capture probes (EXIQON® Inc, Vedbaek, Denmark) or HPLC based purification methods such as, but not limited to, strong anion exchange HPLC, weak anion exchange HPLC, reverse phase HPLC (RP-HPLC), and hydrophobic interaction HPLC (HIC-HPLC). The term “purified” when used in relation to a polynucleotide such as a “purified mRNA or mmRNA” refers to one that is separated from at least one contaminant. As used herein, a “contaminant” is any substance which makes another unfit, impure or inferior. Thus, a purified polynucleotide (e.g., DNA and RNA) is present in a form or setting different from that in which it is found in nature, or a form or setting different from that which existed prior to subjecting it to a treatment or purification method.

[0221] A quality assurance and/or quality control check may be conducted using methods such as, but not limited to, gel electrophoresis, UV absorbance, or analytical HPLC.

[0222] In another embodiment, the mRNA or mmRNA may be sequenced by methods including, but not limited to reverse-transcriptase-PCR.

[0223] In one embodiment, the mRNA or mmRNA may be quantified using methods such as, but not limited to, ultraviolet visible spectroscopy (UV/Vis). A non-limiting example of a UV/Vis spectrometer is a NANODROP® spectrometer (ThermoFisher, Waltham, MA). The quantified mRNA or mmRNA may be analyzed in order to determine if the mRNA or mmRNA may be of proper size, check that no degradation of the mRNA or mmRNA has occurred. Degradation of the mRNA and/or mmRNA may be checked by methods such as, but not limited to, agarose gel electrophoresis, HPLC based purification methods such as, but not limited to, strong anion exchange HPLC, weak anion exchange HPLC, reverse phase HPLC (RP-HPLC), and hydrophobic interaction HPLC (HIC-HPLC), liquid chromatography-mass spectrometry (LCMS), capillary electrophoresis (CE) and capillary gel electrophoresis (CGE).

### Signal Sequences

[0224] The primary constructs or mmRNA may also encode additional features which facilitate trafficking of the polypeptides to therapeutically relevant sites. One such feature which aids in protein trafficking is the signal sequence. As used herein, a “signal sequence” or “signal peptide” is a polynucleotide or polypeptide, respectively, which is from about 9 to 200 nucleotides (3-60 amino acids) in length which is incorporated at the 5′ (or N-terminus) of the coding region or polypeptide encoded, respectively. Addition of these sequences result in trafficking of the encoded polypeptide to the endoplasmic reticulum through one or more secretory pathways. Some signal peptides are cleaved from the protein by signal peptidase after the proteins are transported.

[0225] Table 5 is a representative listing of protein signal sequences which may be incorporated for encoding by the polynucleotides, primary constructs or mmRNA of the invention.

TABLE 5
Signal Sequences

| | | NUCLEOTIDE SEQUENCE | | ENCODED | |
|---|---|---|---|---|---|
| ID | Description | (5′-3′) | SEQ ID NO. | PEPTIDE | SEQ ID NO. |
| SS- | α-1- | ATGATGCCATCCTCAGTCTCA | 32 | MMPSSVS | 94 |
| 001 | anti- | TGGGGTATTTTGCTCTTGGCG | | WGILLAG | |
| | trypsin | GGTCTGTGCTGTCTCGTGCCG | | LCCLVPVS | |
| | | GTGTCGCTCGCA | | LA | |
| SS- | G-CSF | ATGGCCGGACCGGCGACTCAG | 33 | MAGPATQ | 95 |
| 002 | | TCGCCCATGAAACTCATGGCC | | SPMKLMA | |
| | | CTGCAGTTGTTGCTTTGGCAC | | LQLLLWH | |
| | | TCAGCCCTCTGGACCGTCCAA | | SALWTVQ | |
| | | GAGGCG | | EA | |
| SS- | Factor IX | ATGCAGAGAGTGAACATGATT | 34 | MQRVNMI | 96 |
| 003 | | ATGGCCGAGTCCCCATCGCTC | | MAESPSLI | |
| | | ATCACAATCTGCCTGCTTGGT | | TICLLGYL | |
| | | ACCTGCTTTCCGCCGAATGCA | | LSAECTVF | |
| | | CTGTCTTTCTGGATCACGAGA | | LDHENAN | |
| | | ATGCGAATAAGATCTTGAACC | | KILNRPKR | |
| | | GACCCAAACGG | | | |
| SS- | Prolactin | ATGAAAGGATCATTGCTGTTG | 35 | MKGSLLL | 97 |
| 004 | | CTCCTCGTGTCGAACCTTCTG | | LLVSNLLL | |
| | | CTTTGCCAGTCCGTAGCCCCC | | CQSVAP | |
| SS- | Albumin | ATGAAATGGGTGACGTTCATC | 36 | MKWVTFI | 98 |
| 005 | | TCACTGTTGTTTTTGTTCTCG | | SLLFLFSS | |
| | | TCCGCCTACTCCAGGGGAGTA | | AYSRG | |
| | | TTCCGCCGA | | VFRR | |
| SS- | HMMSP38 | ATGTGGTGGCGGCTCTGGTGG | 37 | MWWRLW | 99 |
| 006 | | CTGCTCCTGTTGCTCCTCTTG | | WLLLLLL | |
| | | CTGTGGCCCATGGTGTGGGCA | | LLPMWA | |
| MLS- | ornithine | TGCTCTTTAACCTCCGCATCC | 38 | MLFNLRIL | 100 |
| 001 | carbamoyl- | TGTTGAATAACGCTGCGTTCC | | LNNAAFR | |
| | trans- | GAAATGGGCATAACTTCATGG | | NGHNFMV | |
| | ferase | TACGCAACTTCAGATGCGGCC | | RNFRCGQ | |
| | | AGCCACTCCAG | | PLQ | |
| MLS- | Cyto- | ATGTCCGTCTTGACACCCCTG | 39 | MSVLTPL | 101 |
| 002 | chrome C | CTCTTGAGAGGGCTGACGGGG | | LLRGLTGS | |
| | Oxidase | TCCGCTAGACGCCTGCCGGTA | | ARRLPVP | |
| | subunit | CCGCGAGCGAAGATCCACTCC | | RAKIHSL | |
| | 8A | CTG | | | |
| MLS- | Cyto- | ATGAGCGTGCTCACTCCGTTG | 40 | MSVLTPL | 102 |
| 003 | chrome C | CTTCTTCGAGGGCTTACGGGA | | LLRGLTGS | |
| | Oxidase | TCGGCTCGGAGGTTGCCCGTC | | ARRLPVP | |
| | subunit | CCGAGAGCGAAGATCCATTCG | | RAKIHSL | |
| | 8A | TTG | | | |
| SS- | Type III, | TGACAAAAATAACTTTATCTC | 41 | MVTKITLS | 103 |
| 007 | bacterial | CCCAGAATTTTAGAATCCAAA | | PQNFRIQK | |
| | | AACAGGAAACCACACTACTA | | QETTLLKE | |
| | | AAAGAAAAATCAACCGAGAA | | KSTEKNSL | |
| | | AAATTCTTTAGCAAAAAGTAT | | AKSILAVK | |
| | | TCTCGCAGTAAAAATCACTTC | | NHFIELRS | |
| | | ATCGAATTAAGGTCAAAATTA | | KLSERFIS | |
| | | TCGGAACGTTTTATTTCGCAT | | HKNT | |
| | | AAGAACACT | | | |
| SS- | Viral | ATGCTGAGCTTTGTGGATACC | 42 | MLSFVDT | 104 |
| 008 | | CGCACCCTGCTGCTGCTGGCG | | RTLLLLA | |
| | | GTGACCAGCTGCCTGGCGACC | | VTSCLAT | |
| | | TGCCAG | | CQ | |
| SS- | viral | ATGGGCAGCAGCCAGGCGCC | 43 | MGSSQAP | 105 |
| 009 | | GCGCATGGGCAGCGTGGGCG | | RMGSVGG | |
| | | GCCATGGCCTGATGGCGCTGC | | HGLMALL | |
| | | TGATGGCGGGCCTGATTCTGC | | MAGLILP | |
| | | CGGGCATTCTGGCG | | GILA | |
| SS- | Viral | ATGGCGGGCATTTTTTATTTT | 44 | MAGIFYFL | 106 |
| 010 | | CTGTTTAGCTTTCTGTTTGGC | | FSFLFGIC | |
| | | ATTTGCGAT | | D | |
| SS- | Viral | ATGGAAAACCGCCTGCTGCGC | 45 | MENRLLR | 107 |
| 011 | | GTGTTTCTGGTGTGGGCGGCG | | VFLVWAA | |
| | | CTGACCATGGATGGCGCGAGC | | LTMDGAS | |
| | | GCG | | A | |
| SS- | Viral | ATGGCGCGCCAGGGCTGCTTT | 46 | MARQGCF | 108 |
| 012 | | GGCAGCTATCAGGTGATTAGC | | GSYQVISL | |
| | | CTGTTTACCTTTGCGATTGGC | | FTFAIGVN | |
| | | GTGAACCTGTGCCTGGGC | | LCLG | |
| SS- | Bacillus | ATGAGCCGCCTGCCGGTGCTG | 47 | MSRLPVL | 109 |
| 013 | | CTGCTGCTGCAGCTGCTGGTG | | LLLQLLV | |
| | | CGCCCGGGCCTGCAG | | RPGLQ | |
| SS- | Bacillus | ATGAAACAGCAGAAACGCCT | 48 | MKQQKRL | 110 |
| 014 | | GTATGCGCGCCTGCTGACCCT | | YARLLTL | |
| | | GCTGTTTGCGCTGATTTTTCT | | LFALIFLL | |
| | | GCTGCCGCATAGCAGCGCGAG | | PHSSASA | |
| | | CGCG | | | |
| SS- | Secretion | ATGGCGACGCCGCTGCCTCCG | 49 | MATPLPPP | 111 |
| 015 | signal | CCCTCCCCGCGGCACCTGCGG | | SPRHLRLL | |
| | | CTGCTGCGGCTGCTGCTCTCC | | RLLLSG | |
| | | GCCCTCGTCCTCGGC | | | |
| SS- | Secretion | ATGAAGGCTCCGGGTCGGCTC | 50 | MKAPGRL | 112 |
| 016 | signal | GTGCTCATCATCCTGTGCTCC | | VLIILCSV | |
| | | GTGGTCTTCTCT | | VFS | |
| SS- | Secretion | ATGCTTCAGCTTTGGAAACTT | 51 | MLQLWKL | 113 |
| 017 | signal | GTTCTCCTGTGCGGCGTGCTC | | LCGVLT | |
| | | ACT | | | |
| SS- | Secretion | ATGCTTTATCTCCAGGGTTGG | 52 | MLYLQG | 114 |
| 018 | signal | AGCATGCCTGCTGTGGCA | | WSMPAVA | |
| SS- | Secretion | ATGGATAACGTGCAGCCGAA | 53 | MDNVQPK | 115 |
| 019 | signal | AATAAAACATCGCCCCTTCTG | | IKHRPFCF | |
| | | CTTCAGTGTGAAAGGCCACGT | | SVKGHVK | |
| | | GAAGATGCTGCGGCTGGATAT | | MLRLDIIN | |
| | | TATCAACTCACTGGTAACAAC | | SLVTTVF | |
| | | AGTATTCATGCTCATCGTATC | | MLIVSVL | |
| | | TGTGTTGGCACTGATACCA | | ALIP | |
| SS- | Secretion | ATGCCCTGCCTAGACCAACAG | 54 | MPCLDQQ | 116 |
| 020 | signal | CTCACTGTTCATGCCCTACCC | | LTVHALP | |
| | | TGCCCTGCCCAGCCCTCCTCT | | CPAQPSSL | |
| | | CTGGCCTTCTGCCAAGTGGG | | AFCQVGF | |
| | | GTTCTTAACAGCA | | LTA | |
| SS- | Secretion | ATGAAAACCTTGTTCAATCCA | 55 | MKTLFNP | 117 |
| 021 | signal | GCCCCTGCCATTGCTGACCTG | | APAIADLD | |
| | | GATCCCCAGTTCTACACCCTC | | PQFYTLSD | |
| | | TCAGATGTGTTCTGCTGCAAT | | VFCCNESE | |
| | | GAAAGTGAGGCTGAGATTTTA | | AEILTGLT | |
| | | ACTGGCCTCACGGTGGGCAGC | | VGSAADA | |
| | | GCTGCAGATGCT | | | |
| SS- | Secretion | ATGAAGCCTCTCCTTGTTGTG | 56 | MKPLLVV | 118 |
| 022 | signal | TTTGTCTTTCTTTTCCTTTGG | | FVFLFLW | |
| | | GATCCAGTGCTGGCA | | DPVLA | |
| SS- | Secretion | ATGTCCTGTTCCCTAAAGTTT | 57 | MSCSLKF | 119 |
| 023 | signal | ACTTTGATTGTAATTTTTTTT | | TLIVIFFT | |
| | | TACTGTTGGCTTTCATCCAGC | | CTLSSS | |
| SS- | Secretion | ATGGTTCTTACTAAACCTCTT | 58 | MVLTKPL | 120 |
| 024 | signal | CAAAGAAATGGCAGCATGATG | | QRNGSM | |
| | | AGCTTTGAAAATGTGAAAGAA | | MSFENVK | |
| | | AAGAGCAGAGAAGGAGGGCC | | EKSREGG | |
| | | CCATGCACACACACCCGAAGA | | PHAHTPEE | |
| | | AGAATTGTGTTTCGTGGTAAC | | ELCFVVT | |
| | | ACACTACCCTCAGGTTCAGAC | | HTPQVQT | |
| | | CACACTCAACCTGTTTTTCCA | | TLNLFFHI | |
| | | TATATTCAAGGTTCTTACTCA | | FKVLTQPL | |
| | | ACCACTTTCCCTTCTGTGGG | | SLLWG | |
| | | GT | | | |
| SS- | Secretion | ATGGCCACCCCGCCATTCCGG | 59 | MATPPFR | 121 |
| 025 | signal | CTGATAAGGAAGATGTTTTCC | | LIRKMFSF | |
| | | TTCAAGGTGAGCAGATGGATG | | KVSRWM | |
| | | GGGCTTGCCTGCTTCCGGTCC | | GLACFRSL | |
| | | CTGGCGGCATCC | | AAS | |
| SS- | Secretion | ATGAGCTTTTTCCAACTCCTG | 60 | MSFFQLL | 122 |
| 026 | signal | ATGAAAAGGAAGGAACTCAT | | MKRKELIP | |
| | | TCCCTTGGTGGTGTTCATGAC | | LVVFMTV | |
| | | TGTGGCGGCGGGTGGAGCCTC | | AAGGASS | |
| | | ATCT | | | |
| SS- | Secretion | ATGGTCTCAGCTCTGCGGGGA | 61 | MVSALRG | 123 |
| 027 | signal | GCACCCCTGATCAGGGTGCAC | | APLIRVHS | |
| | | TCAAGCCCTGTTTCTTCTCCT | | SPVSSPSV | |
| | | TCTGTGAGTGGACCACGGAGG | | SGPAALV | |
| | | CTGGTGAGCTGCCTGTCATC | | SCLSSQSS | |
| | | CCAAAGCTCAGCTCTGAGC | | ALS | |
| SS- | Secretion | ATGATGGGGTCCCCAGTGAGT | 62 | MMGSPVS | 124 |
| 028 | signal | CATCTGCTGGCCGGCTTCTGT | | HLLAGFC | |
| | | GTGTGGGTCGTCTTGGGC | | VWVVLG | |
| SS- | Secretion | ATGGCAAGCATGGCTGCCGTG | 63 | MASMAA | 125 |
| 029 | signal | CTCACCTGGGCTCTGGCTCTT | | VLTWALA | |
| | | CTTTCAGCGTTTTCGGCCACC | | LLSAFSAT | |
| | | CAGGCA | | QA | |
| SS- | Secretion | ATGGTGCTCATGTGGACCAGT | 64 | MVLMWT | 126 |
| 030 | signal | GGTGACGCCTTCAAGACGGCC | | SGDAFKT | |
| | | TACTTCCTGCTGAAGGGTGCC | | AYFLLKG | |
| | | CCTCTGCAGTTCTCCGTGTGC | | APLQFSVC | |
| | | GGCCTGCTGCAGGTGCTGGTG | | GLLQVLV | |
| | | GACCTGGCCATCCTGGGGCAG | | DLAILGQ | |
| | | GCCTACGCC | | ATA | |
| SS- | Secretion | ATGGATTTTGTCGCTGGAGCC | 65 | MDFVAGA | 127 |
| 031 | signal | ATCGGAGGCGTCTGCGGTGTT | | IGGVCGV | |
| | | GCTGTGGGCTACCCCCTGGAC | | AVGYPLD | |
| | | ACGGTGAAGGTCAGGATCCA | | TVKVRIQT | |
| | | GACGGAGCCAAAGTACACAG | | EPLYTGIW | |
| | | GCATCTGGCACTGCGTCCGGG | | HCVRDTY | |
| | | ATACGTATCACCGAGAGCGCG | | HRERVWG | |
| | | TGTGGG | | FYRGLSLP | |
| | | GCTTCTACCGGGGCCTCTCGC | | VCTVSLV | |
| | | TGCCCGTGTGCACGGTGTCCC | | SS | |
| | | TGGTATCTTCC | | | |
| SS- | Secretion | ATGGAGAAGCCCCTCTTCCCA | 66 | MEKPLFPL | 128 |
| 032 | signal | TTAGTGCCTTTGCATTGGTTT | | VPLHWFG | |
| | | GGCTTTGGCTACACAGCACTG | | FGYTALV | |
| | | GTTGTTTCTGGTGGGATCGTT | | VSGGIVG | |
| | | GGCTATGTAAAAACAGGCAGC | | YVKTGSV | |
| | | GTGCCGTCCCTGGCTGCAGGG | | PSLAAGLL | |
| | | CTGCTCTTCGGCAGTCTAGCC | | FGSLA | |
| SS- | Secretion | ATGGGTCTGCTCCTTCCCCTG | 67 | MGLLLPL | 129 |
| 033 | signal | GCACTCTGCATCCTAGTCCTG | | ALCILVLC | |
| | | TGC | | | |
| SS- | Secretion | ATGGGGATCCAGACGAGCCCC | 68 | MGIQTSPV | 130 |
| 034 | signal | GTCCTGCTGGCCTCCCTGGGG | | LLASLGV | |
| | | GTGGGGCTGGTCACTCTGCTC | | GLVTLLG | |
| | | GGCCTGGCTGTGGGC | | LAVG | |
| SS- | Secretion | ATGTCGGACCTGCTACTACTG | 69 | MSDLLLL | 131 |
| 035 | signal | GGCCTGATTGGGGGCCTGACT | | GLIGGLTL | |
| | | CTCTTACTGCTGCTGACGCTG | | LLLLTLLA | |
| | | CTAGCCTTTGCC | | FA | |
| SS- | Secretion | ATGGAGACTGTGGTGATTGTT | 70 | METVVIV | 132 |
| 036 | signal | GCCATAGGTGTGCTGGCCACC | | AIGVLATI | |
| | | ATGTTTCTGGCTTCGTTTGCA | | FLASFAAL | |
| | | GCCTTGGTGCTGGTTTGCAGG | | VLVCRQ | |
| | | CAG | | | |
| SS- | Secretion | ATGCGCGGCTCTGTGGAGTGC | 71 | MAGSVEC | 133 |
| 037 | signal | ACCTGGGGTTGGGGGCACTGT | | TWGWGH | |
| | | GCCCCCAGCCCCCTGCTCCTT | | CAPSPLLL | |
| | | TGGACTCTACTTCTGTTTGCA | | WTLLLFA | |
| | | GCCCCATTTGGCCTGCTGGGG | | APFGLLG | |
| SS- | Secretion | ATGATGCCGTCCCGTACCAAC | 72 | MMPSRTN | 134 |
| 038 | signal | CTGGCTACTGGAATCCCCAGT | | LATGIPSS | |
| | | AGTAAAGTGAAATATTCAAGG | | KVKYSRL | |
| | | CTCTCCAGCACAGACGATGGC | | SSTDDGYI | |
| | | TACATTGACCTTCAGTTTAAG | | DLQFKKT | |
| | | AAAACCCCTCCTAAGATCCCT | | PPKIPYKA | |
| | | TATAAGGCCATCGCACTTGCC | | IALATVLF | |
| | | ACTGTGCTGTTTTTGATTGGC | | LIGA | |
| | | GCC | | | |
| SS- | Secretion | ATGGCCCTGCCCCAGATGTGT | 73 | MALPQMC | 135 |
| 039 | signal | GACGGGAGCCACTTGGCCTCC | | DGSHLAS | |
| | | ACCCTCCGCTATTGCATGACA | | TLRYCMT | |
| | | GTCAGCGGCACAGTGGTTCTG | | VSGTVVL | |
| | | GTGGCCGGGACGCTCTGCTTC | | VAGTLCF | |
| | | GCT | | A | |
| SS- | Vrg-6 | TGAAAAAGTGGTTCGTTGCTG | 74 | MKKWFV | 136 |
| 041 | | CCGGCATCGGCGCTGCCGGAC | | AAGIGAG | |
| | | TCATGCTCTCCAGCGCCGCCA | | LLMLSSA | |
| | | | | A | |
| SS- | PhoA | ATGAAACAGAGCACCATTGCG | 75 | MKQSTIA | 137 |
| 042 | | CTGGCGCTGCTGCCGCTGCTG | | LALLPLLF | |
| | | TTTACCCCGGTGACCAAAGCG | | TPVTKA | |
| SS- | OmpA | ATGAAAAAAACCGCGATTGC | 76 | MKKTAIAI | 138 |
| 043 | | GATTGCGGTGGCGCTGGCGGG | | AVALAGF | |
| | | CTTTGCGACCGTGGCGCAGGC | | ATVAQA | |
| | | G | | | |
| SS- | STI | ATGAAAAAACTGATGCTGGCG | 77 | MKKLML | 139 |
| 044 | | ATTTTTTTTAGCGTGCTGAGC | | AIFFSVLS | |
| | | TTTCCGAGCTTTAGCCAGAGC | | FPSFSQS | |
| SS- | STII | ATGAAAAAAAACATTGCGTTT | 78 | MKKNIAF | 140 |
| 045 | | CTGCTGGCGAGCATGTTTGTG | | LLASMFV | |
| | | TTTAGCATTGCGACCAACGCG | | FSIATNAY | |
| | | TATGCG | | A | |
| SS- | Amylase | ATGTTTGCGAAACGCTTTAAA | 79 | MFAKRFK | 141 |
| 046 | | ACCAGCCTGCTGCCGCTGTTT | | TSLLPLFA | |
| | | GCGGGCTTTCTGCTGCTGTTT | | GFLLLFHL | |
| | | CATCTGGTGCTGGCGGGCCCG | | VLAGPAA | |
| | | GCGGCGGCGAGC | | AS | |
| SS- | Alpha | ATGCGCTTTCCGAGCATTTTT | 80 | MRFPSIFT | 142 |
| 047 | Factor | ACCGCGGTGCTGTTTGCGGCG | | AVLFAAS | |
| | | AGCAGCGCGCTGGCG | | SALA | |
| SS- | Alpha | ATGCGCTTTCCGAGCATTTTT | 81 | MRFPSIFT | 143 |
| 048 | Factor | ACCACCGTGCTGTTTGCGGCG | | TVLFAASS | |
| | | AGCAGCGCGCTGGCG | | ALA | |
| SS- | Alpha | ATGCGCTTTCCGAGCATTTTT | 82 | MRFPSIFT | 144 |
| 049 | Factor | ACCAGCGTGCTGTTTGCGGCG | | SVLFAASS | |
| | | AGCAGCGCGCTGGCG | | ALA | |
| SS- | Alpha | ATGCGCTTTCCGAGCATTTTT | 83 | MRFPSIFT | 145 |
| 050 | Factor | ACCCATGTGCTGTTTGCGGCG | | HVLFAAS | |
| | | AGCAGCGCGCTGGCG | | SALA | |
| SS- | Alpha | ATGCGCTTTCCGAGCATTTTT | 84 | MRFPSIFT | 146 |
| 051 | Factor | ACCATTGTGCTGTTTGCGGCG | | IVLFAASS | |
| | | AGCAGCGCGCTGGCG | | ALA | |
| SS- | Alpha | ATGCGCTTTCCGAGCATTTTT | 85 | MRFPSIFT | 147 |
| 052 | Factor | ACCTTTGTGCTGTTTGCGGCG | | FVLFAASS | |
| | | AGCAGCGCGCTGGCG | | ALA | |
| SS- | Alpha | ATGCGCTTTCCGAGCATTTTT | 86 | MRFPSIFT | 148 |
| 053 | Factor | ACCGAAGTGCTGTTTGCGGCG | | EVLFAASS | |
| | | AGCAGCGCGCTGGCG | | ALA | |
| SS- | Alpha | ATGCGCTTTCCGAGCATTTTT | 87 | MRFPSIFT | 149 |
| 054 | Factor | ACCGGCGTGCTGTTTGCGGCG | | GVLFAAS | |
| | | AGCAGCGCGCTGGCG | | SALA | |
| SS- | Endoglu- | ATGCGTTCCTCCCCCCTCCTC | 88 | MRSSPLLR | 150 |
| 055 | canase V | CGCTCCGCCGTTGTGGCCGCC | | SAVVAAL | |
| | | CTGCCGGTGTTGGCCCTTGCC | | PVLALA | |
| SS- | Secretion | ATGGGCGCGGCGGCCGTGCGC | 89 | MGAAAV | 151 |
| 056 | signal | TGGCACTTGTGCGTGCTGCTG | | RWHLCVL | |
| | | GCCCTGGGCACACGCGGGCG | | LALGTRG | |
| | | GCTG | | RL | |
| SS- | Fungal | ATGAGGAGCTCCCTTGTGCTG | 90 | MRSSLVL | 152 |
| 057 | | TTCTTTGTCTCTGCGTGGACG | | FFVSAWT | |
| | | GCCTTGGCCAG | | ALA | |
| SS- | Fibro- | ATGCTCAGGGGTCCGGGACCC | 91 | MLRGPGP | 153 |
| 058 | nectin | GGGCGGCTGCTGCTGCTAGCA | | GRLLLLA | |
| | | GTCCTGTGCCTGGGGACATCG | | VLCLGTS | |
| | | GTGCGCTGCACCGAAACCGGG | | VRCTETG | |
| | | AAGAGCAAGAGG | | KSKR | |
| SS- | Fibro- | ATGCTTAGGGGTCCGGGGCCC | 92 | MLRGPGP | 154 |
| 059 | nectin | GGGCTGCTGCTGCTGGCCGTC | | GLLLLAV | |
| | | CAGCTGGGGACAGCGGTGCCC | | QCLGTAV | |
| | | TCCACG | | PSTGA | |
| SS- | Fibro- | ATGCGCCGGGGGGCCCTGACC | 93 | MRRGALT | 155 |
| 060 | nectin | GGGCTGCTCCTGGTCCTGTGC | | GLLLVLC | |
| | | CTGAGTGTTGTGCTACGTGCA | | LSVVLRA | |
| | | GCCCCCTCTGCAACAAGCAAG | | APSATSK | |
| | | AAGCGCAGG | | KRR | |

[0226] In the table, SS is secretion signal and MLS is mitochondrial leader signal. The primary constructs or mmRNA of the present invention may be designed to encode any of the signal sequences of SEQ ID NOs 94-155, or fragments or variants thereof. These sequences may be included at the beginning of the polypeptide coding region, in the middle or at the terminus or alternatively into a flanking region. Further, any of the polynucleotide primary constructs of the present invention may also comprise one or more of the sequences defined by SEQ ID NOs 32-93. These may be in the first region or either flanking region.

[0227] Additional signal sequences which may be utilized in the present invention include those taught in, for example, databases such as those found at www.signalpeptide.de/ or proline.bic.nus.edu.sg/spdb/. Those described in U.S. Pat. Nos. 8,124,379; 7,413,875 and 7,385,034 are also within the scope of the invention and the contents of each are incorporated herein by reference in their entirety.

### Protein Cleavage Signals and Sites

[0228] In one embodiment, the polypeptides of the present invention may include at least one protein cleavage signal containing at least one protein cleavage site. The protein cleavage site may be located at the N-terminus, the C-terminus, at any space between the N- and the C-termini such as, but not limited to, half-way between the N- and C-termini, between the N-terminus and the half way point, between the half way point and the C-terminus, and combinations thereof.

[0229] The polypeptides of the present invention may include, but is not limited to, a proprotein convertase (or prohormone convertase), thrombin or Factor Xa protein cleavage signal. Proprotein convertases are a family of nine proteinases, comprising seven basic amino acid-specific subtilisin-like serine proteinases related to yeast kexin, known as prohormone convertase 1/3 (PC1/3), PC2, furin, PC4, PC5/6, paired basic amino-acid cleaving enzyme 4 (PACE4) and PC7, and two other subtilases that cleave at non-basic residues, called subtilisin kexin isozyme 1 (SKI-1) and proprotein convertase subtilisin kexin 9 (PCSK9). Non-limiting examples of protein cleavage signal amino acid sequences are listing in Table 7. In Table 7, “X” refers to any amino acid, “n” may be 0, 2, 4 or 6 amino acids and “*” refers to the protein cleavage site. In Table 7, SEQ ID NO: 31895 refers to when n=4 and SEQ ID NO: 31896 refers to when n=6.

TABLE 7
Protein Cleavage Site Sequences

| Protein Cleavage Signal | Amino Acid Cleavage Sequence | SEQ ID NO |
|---|---|---|
| Proprotein convertase | R-X-X-R* | 31893 |
| | R-X-K/R-R* | 31894 |
| | K/R-Xn-K/R* | 31895 or 31896 |
| Thrombin | L-V-P-R*-G-S | 31897 |
| | L-V-P-R* | 31898 |
| | A/F/G/I/L/T/V/M-A/F/G/I/L/T/V/W-P-R* | 31899 |
| Factor Xa | I-E-G-R* | 31900 |
| | I-D-G-R* | 31901 |
| | A-E-G-R* | 31902 |
| | A/F/G/I/L/T/V/M-D/E-G-R* | 31903 |

[0230] In one embodiment, the primary constructs and the mmRNA of the present invention may be engineered such that the primary construct or mmRNA contains at least one encoded protein cleavage signal. The encoded protein cleavage signal may be located before the start codon, after the start codon, before the coding region, within the coding region such as, but not limited to, half way in the coding region, between the start codon and the half way point, between the half way point and the stop codon, after the coding region, before the stop codon, between two stop codons, after the stop codon and combinations thereof.

[0231] In one embodiment, the primary constructs or mmRNA of the present invention may include at least one encoded protein cleavage signal containing at least one protein cleavage site. The encoded protein cleavage signal may include, but is not limited to, a proprotein convertase (or prohormone convertase), thrombin and/or Factor Xa protein cleavage signal. One of skill in the art may use Table 1 above or other known methods to determine the appropriate encoded protein cleavage signal to include in the primary constructs or mmRNA of the present invention. For example, starting with the signal of Table 7 and considering the codons of Table 1 one can design a signal for the primary construct which can produce a protein signal in the resulting polypeptide.

[0232] In one embodiment, the polypeptides of the present invention include at least one protein cleavage signal and/or site.

[0233] As a non-limiting example, U.S. Pat. No. 7,374,930 and U.S. Pub. No. 20090227660, herein incorporated by reference in their entireties, use a furin cleavage site to cleave the N-terminal methionine of GLP-1 in the expression product from the Golgi apparatus of the cells. In one embodiment, the polypeptides of the present invention include at least one protein cleavage signal and/or site with the proviso that the polypeptide is not GLP-1.

[0234] In one embodiment, the primary constructs or mmRNA of the present invention includes at least one encoded protein cleavage signal and/or site.

[0235] In one embodiment, the primary constructs or mmRNA of the present invention includes at least one encoded protein cleavage signal and/or site with the proviso that the primary construct or mmRNA does not encode GLP-1.

[0236] In one embodiment, the primary constructs or mmRNA of the present invention may include more than one coding region. Where multiple coding regions are present in the primary construct or mmRNA of the present invention, the multiple coding regions may be separated by encoded protein cleavage sites. As a non-limiting example, the primary construct or mmRNA may be signed in an ordered pattern. On such pattern follows AXBY form where A and B are coding regions which may be the same or different coding regions and/or may encode the same or different polypeptides, and X and Y are encoded protein cleavage signals which may encode the same or different protein cleavage signals. A second such pattern follows the form AXYBZ where A and B are coding regions which may be the same or different coding regions and/or may encode the same or different polypeptides, and X, Y and Z are encoded protein cleavage signals which may encode the same or different protein cleavage signals. A third pattern follows the form ABXCY where A, B and C are coding regions which may be the same or different coding regions and/or may encode the same or different polypeptides, and X and Y are encoded protein cleavage signals which may encode the same or different protein cleavage signals.

[0237] In one embodiment, the polypeptides, primary constructs and mmRNA can also contain sequences that encode protein cleavage sites so that the polypeptides, primary constructs and mmRNA can be released from a carrier region or a fusion partner by treatment with a specific protease for said protein cleavage site.

[0238] In one embodiment, the polypeptides, primary constructs and mmRNA of the present invention may include a sequence encoding the 2A peptide. In one embodiment, this sequence may be used to separate the coding region of two or more polypeptides of interest. As a non-limiting example, the sequence encoding the 2A peptide may be between coding region A and coding region B (A-2Apep-B). The presence of the 2A peptide would result in the cleavage of one long protein into protein A, protein B and the 2A peptide. Protein A and protein B may be the same or different polypeptides of interest. In another embodiment, the 2A peptide may be used in the polynucleotides, primary constructs and/or mmRNA of the present invention to produce two, three, four, five, six, seven, eight, nine, ten or more proteins.

### Incorporating Post Transcriptional Control Modulators

[0239] In one embodiment, the polynucleotides, primary constructs and/or mmRNA of the present invention may include at least one post transcriptional control modulator. These post transcriptional control modulators may be, but are not limited to, small molecules, compounds and regulatory sequences. As a non-limiting example, post transcriptional control may be achieved using small molecules identified by PTC Therapeutics Inc. (South Plainfield, NJ) using their GEMS™ (Gene Expression Modulation by Small-Moleclues) screening technology.

[0240] The post transcriptional control modulator may be a gene expression modulator which is screened by the method detailed in or a gene expression modulator described in International Publication No. WO2006022712, herein incorporated by reference in its entirety. Methods identifying RNA regulatory sequences involved in translational control are described in International Publication No. WO2004067728, herein incorporated by reference in its entirety; methods identifying compounds that modulate untranslated region dependent expression of a gene are described in International Publication No. WO2004065561, herein incorporated by reference in its entirety.

[0241] In one embodiment, the polynucleotides, primary constructs and/or mmRNA of the present invention may include at least one post transcriptional control modulator is located in the 5′ and/or the 3′ untranslated region of the polynucleotides, primary constructs and/or mmRNA of the present invention

[0242] In another embodiment, the polynucleotides, primary constructs and/or mmRNA of the present invention may include at least one post transcription control modulator to modulate premature translation termination. The post transcription control modulators may be compounds described in or a compound found by methods outlined in International Publication Nso. WO2004010106, WO2006044456, WO2006044682, WO2006044503 and WO2006044505, each of which is herein incorporated by reference in its entirety. As a non-limiting example, the compound may bind to a region of the 28S ribosomal RNA in order to modulate premature translation termination (See e.g., WO2004010106, herein incorporated by reference in its entirety).

[0243] In one embodiment, polynucleotides, primary constructs and/or mmRNA of the present invention may include at least one post transcription control modulator to alter protein expression. As a non-limiting example, the expression of VEGF may be regulated using the compounds described in or a compound found by the methods described in International Publication Nos. WO2005118857, WO2006065480, WO2006065479 and WO2006058088, each of which is herein incorporated by reference in its entirety.

[0244] The polynucleotides, primary constructs and/or mmRNA of the present invention may include at least one post transcription control modulator to control translation. In one embodiment, the post transcription control modulator may be a RNA regulatory sequence. As a non-limiting example, the RNA regulatory sequence may be identified by the methods described in International Publication No. WO2006071903, herein incorporated by reference in its entirety.

### III. Modifications

[0245] Herein, in a polynucleotide (such as a primary construct or an mRNA molecule), the terms “modification” or, as appropriate, “modified” refer to modification with respect to A, G, U or C ribonucleotides. Generally, herein, these terms are not intended to refer to the ribonucleotide modifications in naturally occurring 5′-terminal mRNA cap moieties. In a polypeptide, the term “modification” refers to a modification as compared to the canonical set of 20 amino acids, moiety)

[0246] The modifications may be various distinct modifications. In some embodiments, the coding region, the flanking regions and/or the terminal regions may contain one, two, or more (optionally different) nucleoside or nucleotide modifications. In some embodiments, a modified polynucleotide, primary construct, or mmRNA introduced to a cell may exhibit reduced degradation in the cell, as compared to an unmodified polynucleotide, primary construct, or mmRNA.

[0247] The polynucleotides, primary constructs, and mmRNA can include any useful modification, such as to the sugar, the nucleobase, or the internucleoside linkage (e.g. to a linking phosphate/to a phosphodiester linkage/to the phosphodiester backbone). One or more atoms of a pyrimidine nucleobase may be replaced or substituted with optionally substituted amino, optionally substituted thiol, optionally substituted alkyl (e.g., methyl or ethyl), or halo (e.g., chloro or fluoro). In certain embodiments, modifications (e.g., one or more modifications) are present in each of the sugar and the internucleoside linkage. Modifications according to the present invention may be modifications of ribonucleic acids (RNAs) to deoxyribonucleic acids (DNAs), threose nucleic acids (TNAs), glycol nucleic acids (GNAs), peptide nucleic acids (PNAs), locked nucleic acids (LNAs) or hybrids thereof). Additional modifications are described herein.

[0248] As described herein, the polynucleotides, primary constructs, and mmRNA of the invention do not substantially induce an innate immune response of a cell into which the mRNA is introduced. Featues of an induced innate immune response include 1) increased expression of pro-inflammatory cytokines, 2) activation of intracellular PRRs (RIG-I, MDA5, etc, and/or 3) termination or reduction in protein translation.

[0249] In certain embodiments, it may desirable to intracellularly degrade a modified nucleic acid molecule introduced into the cell. For example, degradation of a modified nucleic acid molecule may be preferable if precise timing of protein production is desired. Thus, in some embodiments, the invention provides a modified nucleic acid molecule containing a degradation domain, which is capable of being acted on in a directed manner within a cell. In another aspect, the present disclosure provides polynucleotides comprising a nucleoside or nucleotide that can disrupt the binding of a major groove interacting, e.g. binding, partner with the polynucleotide (e.g., where the modified nucleotide has decreased binding affinity to major groove interacting partner, as compared to an unmodified nucleotide).

[0250] The polynucleotides, primary constructs, and mmRNA can optionally include other agents (e.g., RNAi-inducing agents, RNAi agents, siRNAs, shRNAs, miRNAs, antisense RNAs, ribozymes, catalytic DNA, tRNA, RNAs that induce triple helix formation, aptamers, vectors, etc.). In some embodiments, the polynucleotides, primary constructs, or mmRNA may include one or more messenger RNAs (mRNAs) and one or more modified nucleoside or nucleotides (e.g., mmRNA molecules). Details for these polynucleotides, primary constructs, and mmRNA follow.

### Polynucleotides and Primary Constructs

[0251] The polynucleotides, primary constructs, and mmRNA of the invention includes a first region of linked nucleosides encoding a polypeptide of interest, a first flanking region located at the 5′ terminus of the first region, and a second flanking region located at the 3′ terminus of the first region.

[0252] In some embodiments, the polynucleotide, primary construct, or mmRNA (e.g., the first region, first flanking region, or second flanking region) includes n number of linked nucleosides having Formula (Ia) or Formula (Ia-1):

[chemical structure]

or a pharmaceutically acceptable salt or stereoisomer thereof,
[0253] wherein
[0254] U is O, S, N(R^{U})ₙᵤ, or C(R^{U})ₙᵤ, wherein nu is an integer from 0 to 2 and each R^{U} is, independently, H, halo, or optionally substituted alkyl;
[0255] [symbol] a single bond or absent;
[0256] each of R^{1′}, R^{2′}, R¹″, R²″, R¹, R², R³, R⁴, and R⁵ is, independently, if present, H, halo, hydroxy, thiol, optionally substituted alkyl, optionally substituted alkoxy, optionally substituted alkenyloxy, optionally substituted alkynyloxy, optionally substituted aminoalkoxy, optionally substituted alkoxyalkoxy, optionally substituted hydroxyalkoxy, optionally substituted amino, azido, optionally substituted aryl, optionally substituted aminoalkyl, optionally substituted aminoalkenyl, optionally substituted aminoalkynyl, or absent; wherein the combination of R3 with one or more of R1′, R1″, R2′, R2″, or R5 (e.g., the combination of R1′ and R3, the combination of R1″ and R3, the combination of R2′ and R3, the combination of R2″ and R3, or the combination of R5 and R3) can join together to form optionally substituted alkylene or optionally substituted heteroalkylene and, taken together with the carbons to which they are attached, provide an optionally substituted heterocyclyl (e.g., a bicyclic, tricyclic, or tetracyclic heterocyclyl); wherein the combination of R5 with one or more of R1′, R1″, R2′, or R2″ (e.g., the combination of R1′ and R5, the combination of R1″ and R5, the combination of R2′ and R5, or the combination of R2″ and R5) can join together to form optionally substituted alkylene or optionally substituted heteroalkylene and, taken together with the carbons to which they are attached, provide an optionally substituted heterocyclyl (e.g., a bicyclic, tricyclic, or tetracyclic heterocyclyl); and wherein the combination of R⁴ and one or more of R^{1′}, R^{1″}, R^{2′}, R^{2″}, R³, or R⁵ can join together to form optionally substituted alkylene or optionally substituted heteroalkylene and, taken together with the carbons to which they are attached, provide an optionally substituted heterocyclyl (e.g., a bicyclic, tricyclic, or tetracyclic heterocyclyl); each of m′ and m″ is, independently, an integer from 0 to 3 (e.g., from 0 to 2, from 0 to 1, from 1 to 3, or from 1 to 2);
[0257] each of Y¹, Y², and Y³, is, independently, O, S, Se, —NR^{N1}—, optionally substituted alkylene, or optionally substituted heteroalkylene, wherein R^{N1} is H, optionally substituted alkyl, optionally substituted alkenyl, optionally substituted alkynyl, optionally substituted aryl, or absent;
[0258] each Y⁴ is, independently, H, hydroxy, thiol, boranyl, optionally substituted alkyl, optionally substituted alkenyl, optionally substituted alkynyl, optionally substituted alkoxy, optionally substituted alkenyloxy, optionally substituted alkynyloxy, optionally substituted thioalkoxy, optionally substituted alkoxyalkoxy, or optionally substituted amino;
[0259] each Y⁵ is, independently, O, S, Se, optionally substituted alkylene (e.g., methylene), or optionally substituted heteroalkylene;
[0260] n is an integer from 1 to 100,000; and
[0261] B is a nucleobase (e.g., a purine, a pyrimidine, or derivatives thereof), wherein the combination of B and R^{1′}, the combination of B and R^{2′}, the combination of B and R^{1″}, or the combination of B and R^{2″} can, taken together with the carbons to which they are attached, optionally form a bicyclic group (e.g., a bicyclic heterocyclyl) or wherein the combination of B, R^{1″}, and R³ or the combination of B, R^{2″}, and R³ can optionally form a tricyclic or tetracyclic group (e.g., a tricyclic or tetracyclic heterocyclyl, such as in Formula (IIo)-(IIp) herein). In some embodiments, the polynucleotide, primary construct, or mmRNA includes a modified ribose. In some embodiments, the polynucleotide, primary construct, or mmRNA (e.g., the first region, the first flanking region, or the second flanking region) includes n number of linked nucleosides having Formula (Ia-2)-(Ia-5) or a pharmaceutically acceptable salt or stereoisomer thereof.

[chemical structure]

[0262] In some embodiments, the polynucleotide, primary construct, or mmRNA (e.g., the first region, the first flanking region, or the second flanking region) includes n number of linked nucleosides having Formula (Ib) or Formula (Ib-1):

[chemical structure]

or a pharmaceutically acceptable salt or stereoisomer thereof,
[0263] wherein
[0264] U is O, S, N(R^{U})ₙᵤ, or C(R^{U})ₙᵤ, wherein nu is an integer from 0 to 2 and each R^{U} is, independently, H, halo, or optionally substituted alkyl;
[0265] [symbol] is a single bond or absent;
[0266] each of R¹, R^{3′}, R^{3″}, and R⁴ is, independently, H, halo, hydroxy, optionally substituted alkyl, optionally substituted alkoxy, optionally substituted alkenyloxy, optionally substituted alkynyloxy, optionally substituted aminoalkoxy, optionally substituted alkoxyalkoxy, optionally substituted hydroxyalkoxy, optionally substituted amino, azido, optionally substituted aryl, optionally substituted aminoalkyl, optionally substituted aminoalkenyl, optionally substituted aminoalkynyl, or absent; and wherein the combination of R¹ and R^{3′} or the combination of R¹ and R^{3″} can be taken together to form optionally substituted alkylene or optionally substituted heteroalkylene (e.g., to produce a locked nucleic acid);
[0267] each R⁵ is, independently, H, halo, hydroxy, optionally substituted alkyl, optionally substituted alkoxy, optionally substituted alkenyloxy, optionally substituted alkynyloxy, optionally substituted aminoalkoxy, optionally substituted alkoxyalkoxy, or absent;
[0268] each of Y¹, Y², and Y³ is, independently, O, S, Se, —NR^{N1}—, optionally substituted alkylene, or optionally substituted heteroalkylene, wherein R^{N1} is H, optionally substituted alkyl, optionally substituted alkenyl, optionally substituted alkynyl, or optionally substituted aryl;
[0269] each Y⁴ is, independently, H, hydroxy, thiol, boranyl, optionally substituted alkyl, optionally substituted alkenyl, optionally substituted alkynyl, optionally substituted alkoxy, optionally substituted alkenyloxy, optionally substituted alkynyloxy, optionally substituted alkoxyalkoxy, or optionally substituted amino;
[0270] n is an integer from 1 to 100,000; and
[0271] B is a nucleobase.

[0272] In some embodiments, the polynucleotide, primary construct, or mmRNA (e.g., the first region, first flanking region, or second flanking region) includes n number of linked nucleosides having Formula (Ic):

[chemical structure]

or a pharmaceutically acceptable salt or stereoisomer thereof,
[0273] wherein
[0274] U is O, S, N(R^{U})ₙᵤ, or C(R^{U})ₙᵤ, wherein nu is an integer from 0 to 2 and each R^{U} is, independently, H, halo, or optionally substituted alkyl;
[0275] [symbol] is a single bond or absent;
[0276] each of B¹, B², and B³ is, independently, a nucleobase (e.g., a purine, a pyrimidine, or derivatives thereof, as described herein), H, halo, hydroxy, thiol, optionally substituted alkyl, optionally substituted alkoxy, optionally substituted alkenyloxy, optionally substituted alkynyloxy, optionally substituted aminoalkoxy, optionally substituted alkoxyalkoxy, optionally substituted hydroxyalkoxy, optionally substituted amino, azido, optionally substituted aryl, optionally substituted aminoalkyl, optionally substituted aminoalkenyl, or optionally substituted aminoalkynyl, wherein one and only one of B¹, B², and B³ is a nucleobase;
[0277] each of R^{b1}, R^{b2}, R^{b3}, R³, and R⁵ is, independently, H, halo, hydroxy, thiol, optionally substituted alkyl, optionally substituted alkoxy, optionally substituted alkenyloxy, optionally substituted alkynyloxy, optionally substituted aminoalkoxy, optionally substituted alkoxyalkoxy, optionally substituted hydroxyalkoxy, optionally substituted amino, azido, optionally substituted aryl, optionally substituted aminoalkyl, optionally substituted aminoalkenyl or optionally substituted aminoalkynyl;
[0278] each of Y¹, Y², and Y³, is, independently, O, S, Se, —NR^{N1}—, optionally substituted alkylene, or optionally substituted heteroalkylene, wherein R^{N1} is H, optionally substituted alkyl, optionally substituted alkenyl, optionally substituted alkynyl, or optionally substituted aryl;
[0279] each Y⁴ is, independently, H, hydroxy, thiol, boranyl, optionally substituted alkyl, optionally substituted alkenyl, optionally substituted alkynyl, optionally substituted alkoxy, optionally substituted alkenyloxy, optionally substituted alkynyloxy, optionally substituted thioalkoxy, optionally substituted alkoxyalkoxy, or optionally substituted amino;
[0280] each Y⁵ is, independently, O, S, Se, optionally substituted alkylene (e.g., methylene), or optionally substituted heteroalkylene;
[0281] n is an integer from 1 to 100,000; and
[0282] wherein the ring including U can include one or more double bonds.

[0283] In particular embodiments, the ring including U does not have a double bond between U—CB³R^{b3} or between CB³R^{b3}—C^{B2}R^{b2}.

[0284] In some embodiments, the polynucleotide, primary construct, or mmRNA (e.g., the first region, first flanking region, or second flanking region) includes n number of linked nucleosides having Formula (Id):

[chemical structure]

or a pharmaceutically acceptable salt or stereoisomer thereof,
[0285] wherein
[0286] U is O, S, N(R^{U})ₙᵤ, or C(R^{U})ₙᵤ, wherein nu is an integer from 0 to 2 and each R^{U} is, independently, H, halo, or optionally substituted alkyl;
[0287] each R³ is, independently, H, halo, hydroxy, thiol, optionally substituted alkyl, optionally substituted alkoxy, optionally substituted alkenyloxy, optionally substituted alkynyloxy, optionally substituted aminoalkoxy, optionally substituted alkoxyalkoxy, optionally substituted hydroxyalkoxy, optionally substituted amino, azido, optionally substituted aryl, optionally substituted aminoalkyl, optionally substituted aminoalkenyl, or optionally substituted aminoalkynyl;
[0288] each of Y¹, Y², and Y³, is, independently, O, S, Se, —NR^{N1}—, optionally substituted alkylene, or optionally substituted heteroalkylene, wherein R^{N1} is H, optionally substituted alkyl, optionally substituted alkenyl, optionally substituted alkynyl, or optionally substituted aryl;
[0289] each Y⁴ is, independently, H, hydroxy, thiol, boranyl, optionally substituted alkyl, optionally substituted alkenyl, optionally substituted alkynyl, optionally substituted alkoxy, optionally substituted alkenyloxy, optionally substituted alkynyloxy, optionally substituted thioalkoxy, optionally substituted alkoxyalkoxy, or optionally substituted amino;
[0290] each Y⁵ is, independently, O, S, optionally substituted alkylene (e.g., methylene), or optionally substituted heteroalkylene;
[0291] n is an integer from 1 to 100,000; and
[0292] B is a nucleobase (e.g., a purine, a pyrimidine, or derivatives thereof).

[0293] In some embodiments, the polynucleotide, primary construct, or mmRNA (e.g., the first region, first flanking region, or second flanking region) includes n number of linked nucleosides having Formula (Ie):

[chemical structure]

or a pharmaceutically acceptable salt or stereoisomer thereof,
[0294] wherein
[0295] each of U′ and U″ is, independently, O, S, N(R^{U})ₙᵤ, or C(R^{U})ₙᵤ, wherein nu is an integer from 0 to 2 and each R^{U} is, independently, H, halo, or optionally substituted alkyl;
[0296] each R⁶ is, independently, H, halo, hydroxy, thiol, optionally substituted alkyl, optionally substituted alkoxy, optionally substituted alkenyloxy, optionally substituted alkynyloxy, optionally substituted aminoalkoxy, optionally substituted alkoxyalkoxy, optionally substituted hydroxyalkoxy, optionally substituted amino, azido, optionally substituted aryl, optionally substituted aminoalkyl, optionally substituted aminoalkenyl, or optionally substituted aminoalkynyl;
[0297] each Y^{5′} is, independently, O, S, optionally substituted alkylene (e.g., methylene or ethylene), or optionally substituted heteroalkylene;
[0298] n is an integer from 1 to 100,000; and
[0299] B is a nucleobase (e.g., a purine, a pyrimidine, or derivatives thereof).

[0300] In some embodiments, the polynucleotide, primary construct, or mmRNA (e.g., the first region, first flanking region, or second flanking region) includes n number of linked nucleosides having Formula (If) or (If-1):

[chemical structure]

or a pharmaceutically acceptable salt or stereoisomer thereof,
[0301] wherein
[0302] each of U′ and U″ is, independently, O, S, N, N(R^{U})ₙᵤ, or C(R^{U})ₙᵤ, wherein nu is an integer from 0 to 2 and each R^{U} is, independently, H, halo, or optionally substituted alkyl (e.g., U′ is O and U″ is N); [symbol]
[0303] [symbol] is a single bond or absent;
[0304] each of R^{1′}, R^{2′}, R^{1″}, R^{2″}, R³, and R⁴ is, independently, H, halo, hydroxy, thiol, optionally substituted alkyl, optionally substituted alkoxy, optionally substituted alkenyloxy, optionally substituted alkynyloxy, optionally substituted aminoalkoxy, optionally substituted alkoxyalkoxy, optionally substituted hydroxyalkoxy, optionally substituted amino, azido, optionally substituted aryl, optionally substituted aminoalkyl, optionally substituted aminoalkenyl, optionally substituted aminoalkynyl, or absent; and wherein the combination of R^{1′} and R³, the combination of R^{1″} and R³, the combination of R^{2′} and R³, or the combination of R^{2″} and R³ can be taken together to form optionally substituted alkylene or optionally substituted heteroalkylene (e.g., to produce a locked nucleic acid); each of m′ and m″ is, independently, an integer from 0 to 3 (e.g., from 0 to 2, from 0 to 1, from 1 to 3, or from 1 to 2);
[0305] each of Y¹, Y², and Y³, is, independently, O, S, Se, —NR^{N1}—, optionally substituted alkylene, or optionally substituted heteroalkylene, wherein R^{N1} is H, optionally substituted alkyl, optionally substituted alkenyl, optionally substituted alkynyl, optionally substituted aryl, or absent;
[0306] each Y⁴ is, independently, H, hydroxy, thiol, boranyl, optionally substituted alkyl, optionally substituted alkenyl, optionally substituted alkynyl, optionally substituted alkoxy, optionally substituted alkenyloxy, optionally substituted alkynyloxy, optionally substituted thioalkoxy, optionally substituted alkoxyalkoxy, or optionally substituted amino;
[0307] each Y⁵ is, independently, O, S, Se, optionally substituted alkylene (e.g., methylene), or optionally substituted heteroalkylene;
[0308] n is an integer from 1 to 100,000; and
[0309] B is a nucleobase (e.g., a purine, a pyrimidine, or derivatives thereof).

[0310] In some embodiments of the polynucleotides, primary constructs, or mmRNA (e.g., Formulas (Ia), (Ia-1)-(Ia-3), (Ib)-(If), and (IIa)-(IIp)), the ring including U has one or two double bonds.

[0311] In some embodiments of the polynucleotides, primary constructs, or mmRNA (e.g., Formulas (Ia)-(Ia-5), (Ib)-(If-1), (IIa)-(IIp), (IIb-1), (IIb-2), (IIc-1)-(IIc-2), (IIn-1), (IIn-2), (IVa)-(IV1), and (IXa)-(IXr)), each of R¹, R^{1′}, and R^{1″}, if present, is H. In further embodiments, each of R², R^{2′}, and R^{2″}, if present, is, independently, H, halo (e.g., fluoro), hydroxy, optionally substituted alkoxy (e.g., methoxy or ethoxy), or optionally substituted alkoxyalkoxy. In particular embodiments, alkoxyalkoxy is —(CH₂)ₛ₂(OCH₂CH₂)ₛ₁(CH₂)ₛ₃OR′, wherein s1 is an integer from 1 to 10 (e.g., from 1 to 6 or from 1 to 4), each of s2 and s3, independently, is an integer from 0 to 10 (e.g., from 0 to 4, from 0 to 6, from 1 to 4, from 1 to 6, or from 1 to 10), and R′ is H or C₁₋₂₀ alkyl). In some embodiments, s2 is 0, s1 is 1 or 2, s3 is 0 or 1, and R′ is C₁₋₆ alkyl.

[0312] In some embodiments of the polynucleotides, primary constructs, or mmRNA (e.g., Formulas (Ia)-(Ia-5), (Ib)-(If-1), (IIa)-(IIp), (IIb-1), (IIb-2), (IIc-1)-(IIc-2), (IIn-1), (IIn-2), (IVa)-(IV1), and (IXa)-(IXr)), each of R², R^{2′}, and R^{2″}, if present, is H. In further embodiments, each of R¹, R^{1′}, and R^{1″}, if present, is, independently, H, halo (e.g., fluoro), hydroxy, optionally substituted alkoxy (e.g., methoxy or ethoxy), or optionally substituted alkoxyalkoxy. In particular embodiments, alkoxyalkoxy is —(CH₂)ₛ₂(OCH₂CH₂)ₛ₁(CH₂)ₛ₃OR′, wherein s1 is an integer from 1 to 10 (e.g., from 1 to 6 or from 1 to 4), each of s2 and s3, independently, is an integer from 0 to 10 (e.g., from 0 to 4, from 0 to 6, from 1 to 4, from 1 to 6, or from 1 to 10), and R′ is H or C₁₋₂₀ alkyl). In some embodiments, s2 is 0, s1 is 1 or 2, s3 is 0 or 1, and R′ is C₁₋₆ alkyl.

[0313] In some embodiments of the polynucleotides, primary constructs, or mmRNA (e.g., Formulas (Ia)-(Ia-5), (Ib)-(If-1), (IIa)-(IIp), (IIb-1), (IIb-2), (IIc-1)-(IIc-2), (IIn-1), (IIn-2), (IVa)-(IV1), and (IXa)-(IXr)), each of R³, R⁴, and R⁵ is, independently, H, halo (e.g., fluoro), hydroxy, optionally substituted alkyl, optionally substituted alkoxy (e.g., methoxy or ethoxy), or optionally substituted alkoxyalkoxy. In particular embodiments, R³ is H, R⁴ is H, R⁵ is H, or R³, R⁴, and R⁵ are all H. In particular embodiments, R³ is C₁₋₆ alkyl, R⁴ is C₁₋₆ alkyl, R⁵ is C₁₋₆ alkyl, or R³, R⁴, and R⁵ are all C₁₋₆ alkyl. In particular embodiments, R³ and R⁴ are both H, and R⁵ is C₁₋₆ alkyl.

[0314] In some embodiments of the polynucleotides, primary constructs, or mmRNA (e.g., Formulas (Ia)-(Ia-5), (Ib)-(If-1), (IIa)-(IIp), (IIb-1), (IIb-2), (IIc-1)-(IIc-2), (IIn-1), (IIn-2), (IVa)-(IV1), and (IXa)-(IXr)), R³ and R⁵ join together to form optionally substituted alkylene or optionally substituted heteroalkylene and, taken together with the carbons to which they are attached, provide an optionally substituted heterocyclyl (e.g., a bicyclic, tricyclic, or tetracyclic heterocyclyl, such as trans-3′,4′ analogs, wherein R³ and R⁵ join together to form heteroalkylene (e.g., —(CH₂)_{b1}O(CH₂)_{b2}O(CH₂)_{b3}—, wherein each of b1, b2, and b3 are, independently, an integer from 0 to 3).

[0315] In some embodiments of the polynucleotides, primary constructs, or mmRNA (e.g., Formulas (Ia)-(Ia-5), (Ib)-(If-1), (IIa)-(IIp), (IIb-1), (IIb-2), (IIc-1)-(IIc-2), (IIn-1), (IIn-2), (IVa)-(IV1), and (IXa)-(IXr)), R³ and one or more of R^{1′}, R^{1″}, R^{2′}, R^{2″}, or R⁵ join together to form optionally substituted alkylene or optionally substituted heteroalkylene and, taken together with the carbons to which they are attached, provide an optionally substituted heterocyclyl (e.g., a bicyclic, tricyclic, or tetracyclic heterocyclyl, R³ and one or more of R^{1′}, R^{1″}, R^{2′}, R^{2″}, or R⁵ join together to form heteroalkylene (e.g., —(CH₂)_{b1}O(CH₂)_{b2}O(CH₂)_{b3}—, wherein each of b1, b2, and b3 are, independently, an integer from 0 to 3).

[0316] In some embodiments of the polynucleotides, primary constructs, or mmRNA (e.g., Formulas (Ia)-(Ia-5), (Ib)-(If-1), (IIa)-(IIp), (IIb-1), (IIb-2), (IIc-1)-(IIc-2), (IIn-1), (IIn-2), (IVa)-(IV1), and (IXa)-(IXr)), R⁵ and one or more of R^{1′}, R^{1″}, R^{2′}, or R^{2″} join together to form optionally substituted alkylene or optionally substituted heteroalkylene and, taken together with the carbons to which they are attached, provide an optionally substituted heterocyclyl (e.g., a bicyclic, tricyclic, or tetracyclic heterocyclyl, R⁵ and one or more of R^{1′}, R^{1″}, R^{2′}, or R^{2″} join together to form heteroalkylene (e.g., —(CH₂)_{b1}O(CH₂)_{b2}O(CH₂)_{b3}—, wherein each of b1, b2, and b3 are, independently, an integer from 0 to 3).

[0317] In some embodiments of the polynucleotides, primary constructs, or mmRNA (e.g., Formulas (Ia)-(Ia-5), (Ib)-(If-1), (IIa)-(IIp), (IIb-1), (IIb-2), (IIc-1)-(IIc-2), (IIn-1), (IIn-2), (IVa)-(IV1), and (IXa)-(IXr)), each Y² is, independently, O, S, or —NR^{N1}—, wherein R^{N1} is H, optionally substituted alkyl, optionally substituted alkenyl, optionally substituted alkynyl, or optionally substituted aryl. In particular embodiments, Y² is NR^{N1}—, wherein R^{N1} is H or optionally substituted alkyl (e.g., C₁₋₆ alkyl, such as methyl, ethyl, isopropyl, or n-propyl).

[0318] In some embodiments of the polynucleotides, primary constructs, or mmRNA (e.g., Formulas (Ia)-(Ia-5), (Ib)-(If-1), (IIa)-(IIp), (IIb-1), (IIb-2), (IIc-1)-(IIc-2), (IIn-1), (IIn-2), (IVa)-(IV1), and (IXa)-(IXr)), each Y³ is, independently, O or S.

[0319] In some embodiments of the polynucleotides, primary constructs, or mmRNA (e.g., Formulas (Ia)-(Ia-5), (Ib)-(If-1), (IIa)-(IIp), (IIb-1), (IIb-2), (IIc-1)-(IIc-2), (IIn-1), (IIn-2), (IVa)-(IV1), and (IXa)-(IXr)), R¹ is H; each R² is, independently, H, halo (e.g., fluoro), hydroxy, optionally substituted alkoxy (e.g., methoxy or ethoxy), or optionally substituted alkoxyalkoxy (e.g., —(CH₂)ₛ₂(OCH₂CH₂)ₛ₁(CH₂)ₛ₃OR′, wherein s1 is an integer from 1 to 10 (e.g., from 1 to 6 or from 1 to 4), each of s2 and s3, independently, is an integer from 0 to 10 (e.g., from 0 to 4, from 0 to 6, from 1 to 4, from 1 to 6, or from 1 to 10), and R′ is H or C₁₋₂₀ alkyl, such as wherein s2 is 0, s1 is 1 or 2, s3 is 0 or 1, and R′ is C₁₋₆ alkyl); each Y² is, independently, O or —NR^{N1}—, wherein R^{N1} is H, optionally substituted alkyl, optionally substituted alkenyl, optionally substituted alkynyl, or optionally substituted aryl (e.g., wherein R^{N1} is H or optionally substituted alkyl (e.g., C₁₋₆ alkyl, such as methyl, ethyl, isopropyl, or n-propyl)); and each Y³ is, independently, O or S (e.g., S). In further embodiments, R³ is H, halo (e.g., fluoro), hydroxy, optionally substituted alkyl, optionally substituted alkoxy (e.g., methoxy or ethoxy), or optionally substituted alkoxyalkoxy. In yet further embodiments, each Y¹ is, independently, O or —NR^{N1}—, wherein R^{N1} is H, optionally substituted alkyl, optionally substituted alkenyl, optionally substituted alkynyl, or optionally substituted aryl (e.g., wherein R^{N1} is H or optionally substituted alkyl (e.g., C₁₋₆ alkyl, such as methyl, ethyl, isopropyl, or n-propyl)); and each Y⁴ is, independently, H, hydroxy, thiol, optionally substituted alkyl, optionally substituted alkoxy, optionally substituted thioalkoxy, optionally substituted alkoxyalkoxy, or optionally substituted amino.

[0320] In some embodiments of the polynucleotides, primary constructs, or mmRNA (e.g., Formulas (Ia)-(Ia-5), (Ib)-(If-1), (IIa)-(IIp), (IIb-1), (IIb-2), (IIc-1)-(IIc-2), (IIn-1), (IIn-2), (IVa)-(IV1), and (IXa)-(IXr)), each R¹ is, independently, H, halo (e.g., fluoro), hydroxy, optionally substituted alkoxy (e.g., methoxy or ethoxy), or optionally substituted alkoxyalkoxy (e.g., —(CH₂)ₛ₂(OCH₂CH₂)ₛ₁(CH₂)ₛ₃OR′, wherein s1 is an integer from 1 to 10 (e.g., from 1 to 6 or from 1 to 4), each of s2 and s3, independently, is an integer from 0 to 10 (e.g., from 0 to 4, from 0 to 6, from 1 to 4, from 1 to 6, or from 1 to 10), and R′ is H or C₁₋₂₀ alkyl, such as wherein s2 is 0, s1 is 1 or 2, s3 is 0 or 1, and R′ is C₁₋₆ alkyl); R² is H; each Y² is, independently, O or —NR^{N1}—, wherein R^{N1} is H, optionally substituted alkyl, optionally substituted alkenyl, optionally substituted alkynyl, or optionally substituted aryl (e.g., wherein R^{N1} is H or optionally substituted alkyl (e.g., C₁₋₆ alkyl, such as methyl, ethyl, isopropyl, or n-propyl)); and each Y³ is, independently, O or S (e.g., S). In further embodiments, R³ is H, halo (e.g., fluoro), hydroxy, optionally substituted alkyl, optionally substituted alkoxy (e.g., methoxy or ethoxy), or optionally substituted alkoxyalkoxy. In yet further embodiments, each Y¹ is, independently, O or —NR^{N1}—, wherein R^{N1} is H, optionally substituted alkyl, optionally substituted alkenyl, optionally substituted alkynyl, or optionally substituted aryl (e.g., wherein R^{N1} is H or optionally substituted alkyl (e.g., C₁₋₆ alkyl, such as methyl, ethyl, isopropyl, or n-propyl)); and each Y⁴ is, independently, H, hydroxy, thiol, optionally substituted alkyl, optionally substituted alkoxy, optionally substituted thioalkoxy, optionally substituted alkoxyalkoxy, or optionally substituted amino.

[0321] In some embodiments of the polynucleotides, primary constructs, or mmRNA (e.g., Formulas (Ia)-(Ia-5), (Ib)-(If-1), (IIa)-(IIp), (IIb-1), (IIb-2), (IIc-1)-(IIc-2), (IIn-1), (IIn-2), (IVa)-(IV1), and (IXa)-(IXr)), the ring including U is in the β-D (e.g., β-D-ribo) configuration.

[0322] In some embodiments of the polynucleotides, primary constructs, or mmRNA (e.g., Formulas (Ia)-(Ia-5), (Ib)-(If-1), (IIa)-(IIp), (IIb-1), (IIb-2), (IIc-1)-(IIc-2), (IIn-1), (IIn-2), (IVa)-(IV1), and (IXa)-(IXr)), the ring including U is in the α-L (e.g., α-L-ribo) configuration.

[0323] In some embodiments of the polynucleotides, primary constructs, or mmRNA (e.g., Formulas (Ia)-(Ia-5), (Ib)-(If-1), (IIa)-(IIp), (IIb-1), (IIb-2), (IIc-1)-(IIc-2), (IIn-1), (IIn-2), (IVa)-(IV1), and (IXa)-(IXr)), one or more B is not pseudouridine (ψ) or 5-methyl-cytidine (m⁵C). In some embodiments, about 10% to about 100% of n number of B nucleobases is not ψ or m⁵C (e.g., from 10% to 20%, from 10% to 35%, from 10% to 50%, from 10% to 60%, from 10% to 75%, from 10% to 90%, from 10% to 95%, from 10% to 98%, from 10% to 99%, from 20% to 35%, from 20% to 50%, from 20% to 60%, from 20% to 75%, from 20% to 90%, from 20% to 95%, from 20% to 98%, from 20% to 99%, from 20% to 100%, from 50% to 60%, from 50% to 75%, from 50% to 90%, from 50% to 95%, from 50% to 98%, from 50% to 99%, from 50% to 100%, from 75% to 90%, from 75% to 95%, from 75% to 98%, from 75% to 99%, and from 75% to 100% of n number of B is not ψ or m⁵C). In some embodiments, B is not ψ or m⁵C.

[0324] In some embodiments of the polynucleotides, primary constructs, or mmRNA (e.g., Formulas (Ia)-(Ia-5), (Ib)-(If-1), (IIa)-(IIp), (IIb-1), (IIb-2), (IIc-1)-(IIc-2), (IIn-1), (IIn-2), (IVa)-(IV1), and (IXa)-(IXr)), when B is an unmodified nucleobase selected from cytosine, guanine, uracil and adenine, then at least one of Y¹, Y², or Y³ is not O.

[0325] In some embodiments, the polynucleotide, primary construct, or mmRNA includes a modified ribose. In some embodiments, the polynucleotide, primary construct, or mmRNA (e.g., the first region, the first flanking region, or the second flanking region) includes n number of linked nucleosides having Formula (IIa)-(IIc):

[chemical structure]

or a pharmaceutically acceptable salt or stereoisomer thereof. In particular embodiments, U is O or C(R^{U})ₙᵤ, wherein nu is an integer from 0 to 2 and each R^{U} is, independently, H, halo, or optionally substituted alkyl (e.g., U is —CH₂— or —CH—). In other embodiments, each of R¹, R², R³, R⁴, and R⁵ is, independently, H, halo, hydroxy, thiol, optionally substituted alkyl, optionally substituted alkoxy, optionally substituted alkenyloxy, optionally substituted alkynyloxy, optionally substituted aminoalkoxy, optionally substituted alkoxyalkoxy, optionally substituted hydroxyalkoxy, optionally substituted amino, azido, optionally substituted aryl, optionally substituted aminoalkyl, optionally substituted aminoalkenyl, optionally substituted aminoalkynyl, or absent (e.g., each R¹ and R² is, independently, H, halo, hydroxy, optionally substituted alkyl, or optionally substituted alkoxy; each R³ and R⁴ is, independently, H or optionally substituted alkyl; and R⁵ is H or hydroxy), and [symbol] is a single bond or double bond.

[0326] In particular embodiments, the polynucleotidesor mmRNA includes n number of linked nucleosides having Formula (IIb-1)-(IIb-2):

[chemical structure]

or a pharmaceutically acceptable salt or stereoisomer thereof. In some embodiments, U is O or C(R^{U})ₙᵤ, wherein nu is an integer from 0 to 2 and each R^{U} is, independently, H, halo, or optionally substituted alkyl (e.g., U is —CH₂— or —CH—). In other embodiments, each of R¹ and R² is, independently, H, halo, hydroxy, thiol, optionally substituted alkyl, optionally substituted alkoxy, optionally substituted alkenyloxy, optionally substituted alkynyloxy, optionally substituted aminoalkoxy, optionally substituted alkoxyalkoxy, optionally substituted hydroxyalkoxy, optionally substituted amino, azido, optionally substituted aryl, optionally substituted aminoalkyl, optionally substituted aminoalkenyl, optionally substituted aminoalkynyl, or absent (e.g., each R¹ and R² is, independently, H, halo, hydroxy, optionally substituted alkyl, or optionally substituted alkoxy, e.g., H, halo, hydroxy, alkyl, or alkoxy). In particular embodiments, R² is hydroxy or optionally substituted alkoxy (e.g., methoxy, ethoxy, or any described herein).

[0327] In particular embodiments, the polynucleotide, primary construct, or mmRNA includes n number of linked nucleosides having Formula (IIc-1)-(IIc-4):

[chemical structure]

or a pharmaceutically acceptable salt or stereoisomer thereof. In some embodiments, U is O or C(R^{U})ₙᵤ, wherein nu is an integer from 0 to 2 and each R^{U} is, independently, H, halo, or optionally substituted alkyl (e.g., U is —CH₂— or —CH—). In some embodiments, each of R¹, R², and R³ is, independently, H, halo, hydroxy, thiol, optionally substituted alkyl, optionally substituted alkoxy, optionally substituted alkenyloxy, optionally substituted alkynyloxy, optionally substituted aminoalkoxy, optionally substituted alkoxyalkoxy, optionally substituted hydroxyalkoxy, optionally substituted amino, azido, optionally substituted aryl, optionally substituted aminoalkyl, optionally substituted aminoalkenyl, optionally substituted aminoalkynyl, or absent (e.g., each R¹ and R² is, independently, H, halo, hydroxy, optionally substituted alkyl, or optionally substituted alkoxy, e.g., H, halo, hydroxy, alkyl, or alkoxy; and each R³ is, independently, H or optionally substituted alkyl)). In particular embodiments, R² is optionally substituted alkoxy (e.g., methoxy or ethoxy, or any described herein). In particular embodiments, R¹ is optionally substituted alkyl, and R² is hydroxy. In other embodiments, R¹ is hydroxy, and R² is optionally substituted alkyl. In further embodiments, R³ is optionally substituted alkyl.

[0328] In some embodiments, the polynucleotide, primary construct, or mmRNA includes an acyclic modified ribose. In some embodiments, the polynucleotide, primary construct, or mmRNA (e.g., the first region, the first flanking region, or the second flanking region) includes n number of linked nucleosides having Formula (IId)-(IIf):

[chemical structure]

or a pharmaceutically acceptable salt or stereoisomer thereof.

[0329] In some embodiments, the polynucleotide, primary construct, or mmRNA includes an acyclic modified hexitol. In some embodiments, the polynucleotide, primary construct, or mmRNA (e.g., the first region, the first flanking region, or the second flanking region) includes n number of linked nucleosides Formula (IIg)-(IIj):

[chemical structure]

or a pharmaceutically acceptable salt or stereoisomer thereof.

[0330] In some embodiments, the polynucleotide, primary construct, or mmRNA includes a sugar moiety having a contracted or an expanded ribose ring. In some embodiments, the polynucleotide, primary construct, or mmRNA (e.g., the first region, the first flanking region, or the second flanking region) includes n number of linked nucleosides having Formula (IIk)-(IIm):

[chemical structure]

or a pharmaceutically acceptable salt or stereoisomer thereof, wherein each of R^{1′}, R^{1″}, R^{2′}, and R^{2″} is, independently, H, halo, hydroxy, optionally substituted alkyl, optionally substituted alkoxy, optionally substituted alkenyloxy, optionally substituted alkynyloxy, optionally substituted aminoalkoxy, optionally substituted alkoxyalkoxy, or absent; and wherein the combination of R^{2′} and R³ or the combination of R^{2″} and R³ can be taken together to form optionally substituted alkylene or optionally substituted heteroalkylene.

[0331] In some embodiments, the polynucleotide, primary construct, or mmRNA includes a locked modified ribose. In some embodiments, the polynucleotide, primary construct, or mmRNA (e.g., the first region, the first flanking region, or the second flanking region) includes n number of linked nucleosides having Formula (IIn):

[chemical structure]

or a pharmaceutically acceptable salt or stereoisomer thereof, wherein R^{3′} is O, S, or —NR^{N1}—, wherein R^{N1} is H, optionally substituted alkyl, optionally substituted alkenyl, optionally substituted alkynyl, or optionally substituted aryl and R^{3″} is optionally substituted alkylene (e.g., —CH₂—, —CH₂CH₂—, or —CH₂CH₂CH₂—) or optionally substituted heteroalkylene (e.g., —CH₂NH—, —CH₂CH₂NH—, —CH₂OCH₂—, or —CH₂CH₂OCH₂—)(e.g., R^{3′} is O and R^{3″} is optionally substituted alkylene (e.g., —CH₂—, —CH₂CH₂—, or —CH₂CH₂CH₂—)).

[0332] In some embodiments, the polynucleotide, primary construct, or mmRNA includes n number of linked nucleosides having Formula (IIn-1)-(II-n2):

[chemical structure]

or a pharmaceutically acceptable salt or stereoisomer thereof, wherein R^{3′} is O, S, or —NR^{N1}—, wherein R^{N1} is H, optionally substituted alkyl, optionally substituted alkenyl, optionally substituted alkynyl, or optionally substituted aryl and R^{3″} is optionally substituted alkylene (e.g., —CH₂—, —CH₂CH₂—, or —CH₂CH₂CH₂—) or optionally substituted heteroalkylene (e.g., —CH₂NH—, —CH₂CH₂NH—, —CH₂OCH₂—, or —CH₂CH₂OCH₂—) (e.g., R^{3′} is O and R^{3″} is optionally substituted alkylene (e.g., —CH₂—, —CH₂CH₂—, or —CH₂CH₂CH₂—)).

[0333] In some embodiments, the polynucleotide, primary construct, or mmRNA includes a locked modified ribose that forms a tetracyclic heterocyclyl. In some embodiments, the polynucleotide, primary construct, or mmRNA (e.g., the first region, the first flanking region, or the second flanking region) includes n number of linked nucleosides having Formula (IIo):

[chemical structure]

or a pharmaceutically acceptable salt or stereoisomer thereof, wherein R^{12a}, R^{12c}, T^{1′}, T^{1″}, T^{2′}, T^{2″}, V¹, and V³ are as described herein.

[0334] Any of the formulas for the polynucleotides, primary constructs, or mmRNA can include one or more nucleobases described herein (e.g., Formulas (b1)-(b43)).

[0335] In one embodiment, the present invention provides methods of preparing a polynucleotide, primary construct, or mmRNA, wherein the polynucleotide comprises n number of nucleosides having Formula (Ia), as defined herein:

[chemical structure]

the method comprising reacting a compound of Formula (IIIa), as defined herein:

[chemical structure]

with an RNA polymerase, and a cDNA template.

[0336] In a further embodiment, the present invention provides methods of amplifying a polynucleotide, primary construct, or mmRNA comprising at least one nucleotide (e.g., mmRNA molecule), the method comprising: reacting a compound of Formula (IIIa), as defined herein, with a primer, a cDNA template, and an RNA polymerase.

[0337] In one embodiment, the present invention provides methods of preparing a polynucleotide, primary construct, or mmRNA comprising at least one nucleotide (e.g., mmRNA molecule), wherein the polynucleotide comprises n number of nucleosides having Formula (Ia), as defined herein:

[chemical structure]

the method comprising reacting a compound of Formula (IIIa-1), as defined herein:

[chemical structure]

with an RNA polymerase, and a cDNA template.

[0338] In a further embodiment, the present invention provides methods of amplifying a polynucleotide, primary construct, or mmRNA comprising at least one nucleotide (e.g., mmRNA molecule), the method comprising:
[0339] reacting a compound of Formula (IIIa-1), as defined herein, with a primer, a cDNA template, and an RNA polymerase.

[0340] In one embodiment, the present invention provides methods of preparing a modified mRNA comprising at least one nucleotide (e.g., mmRNA molecule), wherein the polynucleotide comprises n number of nucleosides having Formula (Ia-2), as defined herein:

[chemical structure]

the method comprising reacting a compound of Formula (IIIa-2), as defined herein:

[chemical structure]

with an RNA polymerase, and a cDNA template.

[0341] In a further embodiment, the present invention provides methods of amplifying a modified mRNA comprising at least one nucleotide (e.g., mmRNA molecule), the method comprising:
[0342] reacting a compound of Formula (IIIa-2), as defined herein, with a primer, a cDNA template, and an RNA polymerase.

[0343] In some embodiments, the reaction may be repeated from 1 to about 7,000 times. In any of the embodiments herein, B may be a nucleobase of Formula (b1)-(b43).

[0344] The polynucleotides, primary constructs, and mmRNA can optionally include 5′ and/or 3′ flanking regions, which are described herein.

Modified RNA (mmRNA) Molecules

[0345] The present invention also includes building blocks, e.g., modified ribonucleosides, modified ribonucleotides, of modified RNA (mmRNA) molecules. For example, these building blocks can be useful for preparing the polynucleotides, primary constructs, or mmRNA of the invention.

[0346] In some embodiments, the building block molecule has Formula (IIIa) or (IIIa-1):

[chemical structure]

or a pharmaceutically acceptable salt or stereoisomer thereof, wherein the substituents are as described herein (e.g., for Formula (Ia) and (Ia-1)), and wherein when B is an unmodified nucleobase selected from cytosine, guanine, uracil and adenine, then at least one of Y¹, Y², or Y³ is not O.

[0347] In some embodiments, the building block molecule, which may be incorporated into a polynucleotide, primary construct, or mmRNA, has Formula (IVa)-(IVb):

[chemical structure]

or a pharmaceutically acceptable salt or stereoisomer thereof, wherein B is as described herein (e.g., any one of (b1)-(b43)). In particular embodiments, Formula (IVa) or (IVb) is combined with a modified uracil (e.g., any one of formulas (b1)-(b9), (b21)-(b23), and (b28)-(b31), such as formula (b1), (b8), (b28), (b29), or (b30)). In particular embodiments, Formula (IVa) or (IVb) is combined with a modified cytosine (e.g., any one of formulas (b10)-(b14), (b24), (b25), and (b32)-(b36), such as formula (b10) or (b32)). In particular embodiments, Formula (IVa) or (IVb) is combined with a modified guanine (e.g., any one of formulas (b15)-(b17) and (b37)-(b40)). In particular embodiments, Formula (IVa) or (IVb) is combined with a modified adenine (e.g., any one of formulas (b18)-(b20) and (b41)-(b43)).

[0348] In some embodiments, the building block molecule, which may be incorporated into a polynucleotide, primary construct, or mmRNA, has Formula (IVc)-(IVk):

[chemical structure]

[chemical structure]

or a pharmaceutically acceptable salt or stereoisomer thereof, wherein B is as described herein (e.g., any one of (b1)-(b43)). In particular embodiments, one of Formulas (IVc)-(IVk) is combined with a modified uracil (e.g., any one of formulas (b1)-(b9), (b21)-(b23), and (b28)-(b31), such as formula (b1), (b8), (b28), (b29), or (b30)). In particular embodiments, one of Formulas (IVc)-(IVk) is combined with a modified cytosine (e.g., any one of formulas (b10)-(b14), (b24), (b25), and (b32)-(b36), such as formula (b10) or (b32)). In particular embodiments, one of Formulas (IVc)-(IVk) is combined with a modified guanine (e.g., any one of formulas (b15)-(b17) and (b37)-(b40)). In particular embodiments, one of Formulas (IVc)-(IVk) is combined with a modified adenine (e.g., any one of formulas (b18)-(b20) and (b41)-(b43)).

[0349] In other embodiments, the building block molecule, which may be incorporated into a polynucleotide, primary construct, or mmRNA, has Formula (Va) or (Vb):

[chemical structure]

or a pharmaceutically acceptable salt or stereoisomer thereof, wherein B is as described herein (e.g., any one of (b1)-(b43)).

[0350] In other embodiments, the building block molecule, which may be incorporated into a polynucleotide, primary construct, or mmRNA, has Formula (IXa)-(IXd):

[chemical structure]

or a pharmaceutically acceptable salt or stereoisomer thereof, wherein B is as described herein (e.g., any one of (b1)-(b43)). In particular embodiments, one of Formulas (IXa)-(IXd) is combined with a modified uracil (e.g., any one of formulas (b1)-(b9), (b21)-(b23), and (b28)-(b31), such as formula (b1), (b8), (b28), (b29), or (b30)). In particular embodiments, one of Formulas (IXa)-(IXd) is combined with a modified cytosine (e.g., any one of formulas (b10)-(b14), (b24), (b25), and (b32)-(b36), such as formula (b10) or (b32)). In particular embodiments, one of Formulas (IXa)-(IXd) is combined with a modified guanine (e.g., any one of formulas (b15)-(b17) and (b37)-(b40)). In particular embodiments, one of Formulas (IXa)-(IXd) is combined with a modified adenine (e.g., any one of formulas (b18)-(b20) and (b41)-(b43)).

[0351] In other embodiments, the building block molecule, which may be incorporated into a polynucleotide, primary construct, or mmRNA, has Formula (IXe)-(IXg):

[chemical structure]

or a pharmaceutically acceptable salt or stereoisomer thereof, wherein B is as described herein (e.g., any one of (b1)-(b43)). In particular embodiments, one of Formulas (IXe)-(IXg) is combined with a modified uracil (e.g., any one of formulas (b1)-(b9), (b21)-(b23), and (b28)-(b31), such as formula (b1), (b8), (b28), (b29), or (b30)). In particular embodiments, one of Formulas (IXe)-(IXg) is combined with a modified cytosine (e.g., any one of formulas (b10)-(b14), (b24), (b25), and (b32)-(b36), such as formula (b10) or (b32)). In particular embodiments, one of Formulas (IXe)-(IXg) is combined with a modified guanine (e.g., any one of formulas (b15)-(b17) and (b37)-(b40)). In particular embodiments, one of Formulas (IXe)-(IXg) is combined with a modified adenine (e.g., any one of formulas (b18)-(b20) and (b41)-(b43)).

[0352] In other embodiments, the building block molecule, which may be incorporated into a polynucleotide, primary construct, or mmRNA, has Formula (IXh)-(IXk):

[chemical structure]

or a pharmaceutically acceptable salt or stereoisomer thereof, wherein B is as described herein (e.g., any one of (b1)-(b43)). In particular embodiments, one of Formulas (IXh)-(IXk) is combined with a modified uracil (e.g., any one of formulas (b1)-(b9), (b21)-(b23), and (b28)-(b31), such as formula (b1), (b8), (b28), (b29), or (b30)). In particular embodiments, one of Formulas (IXh)-(IXk) is combined with a modified cytosine (e.g., any one of formulas (b10)-(b14), (b24), (b25), and (b32)-(b36), such as formula (b10) or (b32)). In particular embodiments, one of Formulas (IXh)-(IXk) is combined with a modified guanine (e.g., any one of formulas (b15)-(b17) and (b37)-(b40)). In particular embodiments, one of Formulas (IXh)-(IXk) is combined with a modified adenine (e.g., any one of formulas (b18)-(b20) and (b41)-(b43)).

[0353] In other embodiments, the building block molecule, which may be incorporated into a polynucleotide, primary construct, or mmRNA, has Formula (IXl)-(IXr):

[chemical structure]

or a pharmaceutically acceptable salt or stereoisomer thereof, wherein each r1 and r2 is, independently, an integer from 0 to 5 (e.g., from 0 to 3, from 1 to 3, or from 1 to 5) and B is as described herein (e.g., any one of (b1)-(b43)). In particular embodiments, one of Formulas (IXl)-(IXr) is combined with a modified uracil (e.g., any one of formulas (b1)-(b9), (b21)-(b23), and (b28)-(b31), such as formula (b1), (b8), (b28), (b29), or (b30)). In particular embodiments, one of Formulas (IXl)-(IXr) is combined with a modified cytosine (e.g., any one of formulas (b10)-(b14), (b24), (b25), and (b32)-(b36), such as formula (b10) or (b32)). In particular embodiments, one of Formulas (IXl)-(IXr) is combined with a modified guanine (e.g., any one of formulas (b15)-(b17) and (b37)-(b40)). In particular embodiments, one of Formulas (IXl)-(IXr) is combined with a modified adenine (e.g., any one of formulas (b18)-(b20) and (b41)-(b43)).

[0354] In some embodiments, the building block molecule, which may be incorporated into a polynucleotide, primary construct, or mmRNA, can be selected from the group consisting of:

[chemical structure]

[chemical structure]

[chemical structure]

or a pharmaceutically acceptable salt or stereoisomer thereof, wherein each r is, independently, an integer from 0 to 5 (e.g., from 0 to 3, from 1 to 3, or from 1 to 5).

[0355] In some embodiments, the building block molecule, which may be incorporated into a polynucleotide, primary construct, or mmRNA, can be selected from the group consisting of:

[chemical structure]

[chemical structure]

or a pharmaceutically acceptable salt or stereoisomer thereof, wherein each r is, independently, an integer from 0 to 5 (e.g., from 0 to 3, from 1 to 3, or from 1 to 5) and s1 is as described herein.

[0356] In some embodiments, the building block molecule, which may be incorporated into a nucleic acid (e.g., RNA, mRNA, polynucleotide, primary construct, or mmRNA), is a modified uridine (e.g., selected from the group consisting of:

[chemical structure]

[chemical structure]

[chemical structure]

[chemical structure]

[chemical structure]

[chemical structure]

[chemical structure]

[chemical structure]

[chemical structure]

[chemical structure]

[chemical structure]

[chemical structure]

[chemical structure]

[chemical structure]

[chemical structure]

[chemical structure]

[chemical structure]

[chemical structure]

[chemical structure]

[chemical structure]

or a pharmaceutically acceptable salt or stereoisomer thereof, wherein Y¹, Y³, Y⁴, Y⁶, and r are as described herein (e.g., each r is, independently, an integer from 0 to 5, such as from 0 to 3, from 1 to 3, or from 1 to 5)).

[0357] In some embodiments, the building block molecule, which may be incorporated into a polynucleotide, primary construct, or mmRNA, is a modified cytidine (e.g., selected from the group consisting of:

[chemical structure]

[chemical structure]

[chemical structure]

[chemical structure]

[chemical structure]

[chemical structure]

[chemical structure]

or a pharmaceutically acceptable salt or stereoisomer thereof, wherein Y¹, Y³, Y⁴, Y⁶, and r are as described herein (e.g., each r is, independently, an integer from 0 to 5, such as from 0 to 3, from 1 to 3, or from 1 to 5)). For example, the building block molecule, which may be incorporated into a polynucleotide, primary construct, or mmRNA, can be:

[chemical structure]

or a pharmaceutically acceptable salt or stereoisomer thereof, wherein each r is, independently, an integer from 0 to 5 (e.g., from 0 to 3, from 1 to 3, or from 1 to 5).

[0358] In some embodiments, the building block molecule, which may be incorporated into a polynucleotide, primary construct, or mmRNA, is a modified adenosine (e.g., selected from the group consisting of:

[chemical structure]

[chemical structure]

[chemical structure]

[chemical structure]

[chemical structure]

[chemical structure]

[chemical structure]

[chemical structure]

or a pharmaceutically acceptable salt or stereoisomer thereof, wherein Y¹, Y³, Y⁴, Y⁶, and r are as described herein (e.g., each r is, independently, an integer from 0 to 5, such as from 0 to 3, from 1 to 3, or from 1 to 5)).

[0359] In some embodiments, the building block molecule, which may be incorporated into a polynucleotide, primary construct, or mmRNA, is a modified guanosine (e.g., selected from the group consisting of:

[chemical structure]

[chemical structure]

[chemical structure]

[chemical structure]

[chemical structure]

[chemical structure]

[chemical structure]

or a pharmaceutically acceptable salt or stereoisomer thereof, wherein Y¹, Y³, Y⁴, Y⁶, and r are as described herein (e.g., each r is, independently, an integer from 0 to 5, such as from 0 to 3, from 1 to 3, or from 1 to 5)).

[0360] In some embodiments, the chemical modification can include replacement of C group at C-5 of the ring (e.g., for a pyrimidine nucleoside, such as cytosine or uracil) with N (e.g., replacement of the >CH group at C-5 with >NR^{N1} group, wherein R^{N}1 is H or optionally substituted alkyl). For example, the building block molecule, which may be incorporated into a polynucleotide, primary construct, or mmRNA, can be:

[chemical structure]

or a pharmaceutically acceptable salt or stereoisomer thereof, wherein each r is, independently, an integer from 0 to 5 (e.g., from 0 to 3, from 1 to 3, or from 1 to 5).

[0361] In another embodiment, the chemical modification can include replacement of the hydrogen at C-5 of cytosine with halo (e.g., Br, Cl, F, or I) or optionally substituted alkyl (e.g., methyl). For example, the building block molecule, which may be incorporated into a polynucleotide, primary construct, or mmRNA, can be:

[chemical structure]

or a pharmaceutically acceptable salt or stereoisomer thereof, wherein each r is, independently, an integer from 0 to 5 (e.g., from 0 to 3, from 1 to 3, or from 1 to 5).

[0362] In yet a further embodiment, the chemical modification can include a fused ring that is formed by the NH₂ at the C-4 position and the carbon atom at the C-5 position. For example, the building block molecule, which may be incorporated into a polynucleotide, primary construct, or mmRNA, can be:

[chemical structure]

or a pharmaceutically acceptable salt or stereoisomer thereof, wherein each r is, independently, an integer from 0 to 5 (e.g., from 0 to 3, from 1 to 3, or from 1 to 5).

### Modifications on the Sugar

[0363] The modified nucleosides and nucleotides (e.g., building block molecules), which may be incorporated into a polynucleotide, primary construct, or mmRNA (e.g., RNA or mRNA, as described herein), can be modified on the sugar of the ribonucleic acid. For example, the 2′ hydroxyl group (OH) can be modified or replaced with a number of different substituents. Exemplary substitutions at the 2′-position include, but are not limited to, H, halo, optionally substituted C₁₋₆ alkyl; optionally substituted C₁₋₆ alkoxy; optionally substituted C₆₋₁₀ aryloxy; optionally substituted C₃₋₈ cycloalkyl; optionally substituted C₃₋₈ cycloalkoxy; optionally substituted C₆₋₁₀ aryloxy; optionally substituted C₆₋₁₀ aryl-C₁₋₆ alkoxy, optionally substituted C₁₋₁₂ (heterocyclyl)oxy; a sugar (e.g., ribose, pentose, or any described herein); a polyethyleneglycol (PEG), —O(CH₂CH₂O), CH₂CH₂OR, where R is H or optionally substituted alkyl, and n is an integer from 0 to 20 (e.g., from 0 to 4, from 0 to 8, from 0 to 10, from 0 to 16, from 1 to 4, from 1 to 8, from 1 to 10, from 1 to 16, from 1 to 20, from 2 to 4, from 2 to 8, from 2 to 10, from 2 to 16, from 2 to 20, from 4 to 8, from 4 to 10, from 4 to 16, and from 4 to 20); “locked” nucleic acids (LNA) in which the 2′-hydroxyl is connected by a C₁₋₆ alkylene or C₁₋₆ heteroalkylene bridge to the 4′-carbon of the same ribose sugar, where exemplary bridges included methylene, propylene, ether, or amino bridges; aminoalkyl, as defined herein; aminoalkoxy, as defined herein; amino as defined herein; and amino acid, as defined herein Generally, RNA includes the sugar group ribose, which is a 5-membered ring having an oxygen. Exemplary, non-limiting modified nucleotides include replacement of the oxygen in ribose (e.g., with S, Se, or alkylene, such as methylene or ethylene); addition of a double bond (e.g., to replace ribose with cyclopentenyl or cyclohexenyl); ring contraction of ribose (e.g., to form a 4-membered ring of cyclobutane or oxetane); ring expansion of ribose (e.g., to form a 6- or 7-membered ring having an additional carbon or heteroatom, such as for anhydrohexitol, altritol, mannitol, cyclohexanyl, cyclohexenyl, and morpholino that also has a phosphoramidate backbone); multicyclic forms (e.g., tricyclo; and “unlocked” forms, such as glycol nucleic acid (GNA) (e.g., R-GNA or S-GNA, where ribose is replaced by glycol units attached to phosphodiester bonds), threose nucleic acid (TNA, where ribose is replace with α-L-threofuranosyl-(3′→2′)), and peptide nucleic acid (PNA, where 2-amino-ethyl-glycine linkages replace the ribose and phosphodiester backbone). The sugar group can also contain one or more carbons that possess the opposite stereochemical configuration than that of the corresponding carbon in ribose. Thus, a polynucleotide, primary construct, or mmRNA molecule can include nucleotides containing, e.g., arabinose, as the sugar.

### Modifications on the Nucleobase

[0364] The present disclosure provides for modified nucleosides and nucleotides. As described herein “nucleoside” is defined as a compound containing a sugar molecule (e.g., a pentose or ribose) or a derivative thereof in combination with an organic base (e.g., a purine or pyrimidine) or a derivative thereof (also referred to herein as “nucleobase”). As described herein, “nucleotide” is defined as a nucleoside including a phosphate group. The modified nucleotides may by synthesized by any useful method, as described herein (e.g., chemically, enzymatically, or recombinantly to include one or more modified or non-natural nucleosides).

[0365] The modified nucleotide base pairing encompasses not only the standard adenosine-thymine, adenosine-uracil, or guanosine-cytosine base pairs, but also base pairs formed between nucleotides and/or modified nucleotides comprising non-standard or modified bases, wherein the arrangement of hydrogen bond donors and hydrogen bond acceptors permits hydrogen bonding between a non-standard base and a standard base or between two complementary non-standard base structures. One example of such non-standard base pairing is the base pairing between the modified nucleotide inosine and adenine, cytosine or uracil.

[0366] The modified nucleosides and nucleotides can include a modified nucleobase. Examples of nucleobases found in RNA include, but are not limited to, adenine, guanine, cytosine, and uracil. Examples of nucleobase found in DNA include, but are not limited to, adenine, guanine, cytosine, and thymine. These nucleobases can be modified or wholly replaced to provide polynucleotides, primary constructs, or mmRNA molecules having enhanced properties, e.g., resistance to nucleases through disruption of the binding of a major groove binding partner. Table 8 below identifies the chemical faces of each canonical nucleotide. Circles identify the atoms comprising the respective chemical regions.

TABLE 8

| | | | | Watson-Crick |
|---|---|---|---|---|
| | | Major Groove | Minor Groove | Base-pairing |
| | | Face | Face | Face |
| Pyrimi- dines | Cytidine: | [chemical structure] | [chemical structure] | [chemical structure] |
| | Uridine: | [chemical structure] | [chemical structure] | [chemical structure] |
| Purines | Adenosine: | [chemical structure] | [chemical structure] | [chemical structure] |
| | Guanosine: | [chemical structure] | [chemical structure] | [chemical structure] |

[0367] In some embodiments, B is a modified uracil. Exemplary modified uracils include those having Formula (b1)-(b5):

[chemical structure]

or a pharmaceutically acceptable salt or stereoisomer thereof,
[0368] wherein
[0369] [symbol] is a single or double bond;
[0370] each of T^{1′}, T^{1″}, T^{2′}, and T^{2″} is, independently, H, optionally substituted alkyl, optionally substituted alkoxy, or optionally substituted thioalkoxy, or the combination of T^{1′} and T^{1″} or the combination of T^{2′} and T^{2″} join together (e.g., as in T²) to form O (oxo), S (thio), or Se (seleno);
[0371] each of V¹ and V² is, independently, O, S, N(R^{Vb})ₙᵥ, or C(R^{Vb})ₙᵥ, wherein nv is an integer from 0 to 2 and each R^{Vb} is, independently, H, halo, optionally substituted amino acid, optionally substituted alkyl, optionally substituted haloalkyl, optionally substituted alkenyl, optionally substituted alkynyl, optionally substituted alkoxy, optionally substituted alkenyloxy, optionally substituted alkynyloxy, optionally substituted hydroxyalkyl, optionally substituted hydroxyalkenyl, optionally substituted hydroxyalkynyl, optionally substituted aminoalkyl (e.g., substituted with an N-protecting group, such as any described herein, e.g., trifluoroacetyl), optionally substituted aminoalkenyl, optionally substituted aminoalkynyl, optionally substituted acylaminoalkyl (e.g., substituted with an N-protecting group, such as any described herein, e.g., trifluoroacetyl), optionally substituted alkoxycarbonylalkyl, optionally substituted alkoxycarbonylalkenyl, optionally substituted alkoxycarbonylalkynyl, or optionally substituted alkynyloxy (e.g., optionally substituted with any substituent described herein, such as those selected from (1)-(21) for alkyl);
[0372] R¹⁰ is H, halo, optionally substituted amino acid, hydroxy, optionally substituted alkyl, optionally substituted alkenyl, optionally substituted alkynyl, optionally substituted aminoalkyl, optionally substituted hydroxyalkyl, optionally substituted hydroxyalkenyl, optionally substituted hydroxyalkynyl, optionally substituted aminoalkenyl, optionally substituted aminoalkynyl, optionally substituted alkoxy, optionally substituted alkoxycarbonylalkyl, optionally substituted alkoxycarbonylalkenyl, optionally substituted alkoxycarbonylalkynyl, optionally substituted alkoxycarbonylalkoxy, optionally substituted carboxyalkoxy, optionally substituted carboxyalkyl, or optionally substituted carbamoylalkyl;
[0373] R¹¹ is H or optionally substituted alkyl;
[0374] R^{12a} is H, optionally substituted alkyl, optionally substituted hydroxyalkyl, optionally substituted hydroxyalkenyl, optionally substituted hydroxyalkynyl, optionally substituted aminoalkyl, optionally substituted aminoalkenyl, or optionally substituted aminoalkynyl, optionally substituted carboxyalkyl (e.g., optionally substituted with hydroxy), optionally substituted carboxyalkoxy, optionally substituted carboxyaminoalkyl, or optionally substituted carbamoylalkyl; and
[0375] R^{12c} is H, halo, optionally substituted alkyl, optionally substituted alkoxy, optionally substituted thioalkoxy, optionally substituted amino, optionally substituted hydroxyalkyl, optionally substituted hydroxyalkenyl, optionally substituted hydroxyalkynyl, optionally substituted aminoalkyl, optionally substituted aminoalkenyl, or optionally substituted aminoalkynyl.

[0376] Other exemplary modified uracils include those having Formula (b6)-(b9):

[chemical structure]

or a pharmaceutically acceptable salt or stereoisomer thereof, wherein [symbol] is a single or double bond; each of T^{1′}, T^{1″}, T^{2′}, and T^{2″} is, independently, H, optionally substituted alkyl, optionally substituted alkoxy, or optionally substituted thioalkoxy, or the combination of T^{1′} and T^{1″} join together (e.g., as in T) or the combination of T^{2′} and T^{2″} join together (e.g., as in T²) to form O (oxo), S (thio), or Se (seleno), or each T¹ and T² is, independently, O (oxo), S (thio), or Se (seleno);
[0377] each of W¹ and W² is, independently, N(R^{Wa})_{nw} or C(R^{Wa})_{nw}, wherein nw is an integer from 0 to 2 and each R^{Wa} is, independently, H, optionally substituted alkyl, or optionally substituted alkoxy;
[0378] each V³ is, independently, O, S, N(R^{Va})ₙᵥ, or C(R^{Va})ₙᵥ, wherein nv is an integer from 0 to 2 and each R^{Va} is, independently, H, halo, optionally substituted amino acid, optionally substituted alkyl, optionally substituted hydroxyalkyl, optionally substituted hydroxyalkenyl, optionally substituted hydroxyalkynyl, optionally substituted alkenyl, optionally substituted alkynyl, optionally substituted heterocyclyl, optionally substituted alkheterocyclyl, optionally substituted alkoxy, optionally substituted alkenyloxy, or optionally substituted alkynyloxy, optionally substituted aminoalkyl (e.g., substituted with an N-protecting group, such as any described herein, e.g., trifluoroacetyl, or sulfoalkyl), optionally substituted aminoalkenyl, optionally substituted aminoalkynyl, optionally substituted acylaminoalkyl (e.g., substituted with an N-protecting group, such as any described herein, e.g., trifluoroacetyl), optionally substituted alkoxycarbonylalkyl, optionally substituted alkoxycarbonylalkenyl, optionally substituted alkoxycarbonylalkynyl, optionally substituted alkoxycarbonylacyl, optionally substituted alkoxycarbonylalkoxy, optionally substituted carboxyalkyl (e.g., optionally substituted with hydroxy and/or an O-protecting group), optionally substituted carboxyalkoxy, optionally substituted carboxyaminoalkyl, or optionally substituted carbamoylalkyl (e.g., optionally substituted with any substituent described herein, such as those selected from (1)-(21) for alkyl), and wherein R^{Va} and R^{12c} taken together with the carbon atoms to which they are attached can form optionally substituted cycloalkyl, optionally substituted aryl, or optionally substituted heterocyclyl (e.g., a 5- or 6-membered ring);
[0379] R^{12a} is H, optionally substituted alkyl, optionally substituted hydroxyalkyl, optionally substituted hydroxyalkenyl, optionally substituted hydroxyalkynyl, optionally substituted aminoalkyl, optionally substituted aminoalkenyl, optionally substituted aminoalkynyl, optionally substituted carboxyalkyl (e.g., optionally substituted with hydroxy and/or an O-protecting group), optionally substituted carboxyalkoxy, optionally substituted carboxyaminoalkyl, optionally substituted carbamoylalkyl, or absent;
[0380] R^{12b} is H, optionally substituted alkyl, optionally substituted alkenyl, optionally substituted alkynyl, optionally substituted hydroxyalkyl, optionally substituted hydroxyalkenyl, optionally substituted hydroxyalkynyl, optionally substituted aminoalkyl, optionally substituted aminoalkenyl, optionally substituted aminoalkynyl, optionally substituted alkaryl, optionally substituted heterocyclyl, optionally substituted alkheterocyclyl, optionally substituted amino acid, optionally substituted alkoxycarbonylacyl, optionally substituted alkoxycarbonylalkoxy, optionally substituted alkoxycarbonylalkyl, optionally substituted alkoxycarbonylalkenyl, optionally substituted alkoxycarbonylalkynyl, optionally substituted alkoxycarbonylalkoxy, optionally substituted carboxyalkyl (e.g., optionally substituted with hydroxy and/or an O-protecting group), optionally substituted carboxyalkoxy, optionally substituted carboxyaminoalkyl, or optionally substituted carbamoylalkyl,
[0381] wherein the combination of R^{12b} and T^{1′} or the combination of R^{12b} and R^{12c} can join together to form optionally substituted heterocyclyl; and
[0382] R^{12c} is H, halo, optionally substituted alkyl, optionally substituted alkoxy, optionally substituted thioalkoxy, optionally substituted amino, optionally substituted aminoalkyl, optionally substituted aminoalkenyl, or optionally substituted aminoalkynyl.

[0383] Further exemplary modified uracils include those having Formula (b28)-(b31):

[chemical structure]

or a pharmaceutically acceptable salt or stereoisomer thereof,
[0384] wherein
[0385] each of T¹ and T² is, independently, O (oxo), S (thio), or Se (seleno);
[0386] each R^{Vb′} and R^{Vb″} is, independently, H, halo, optionally substituted amino acid, optionally substituted alkyl, optionally substituted haloalkyl, optionally substituted hydroxyalkyl, optionally substituted hydroxyalkenyl, optionally substituted hydroxyalkynyl, optionally substituted alkenyl, optionally substituted alkynyl, optionally substituted alkoxy, optionally substituted alkenyloxy, optionally substituted alkynyloxy, optionally substituted aminoalkyl (e.g., substituted with an N-protecting group, such as any described herein, e.g., trifluoroacetyl, or sulfoalkyl), optionally substituted aminoalkenyl, optionally substituted aminoalkynyl, optionally substituted acylaminoalkyl (e.g., substituted with an N-protecting group, such as any described herein, e.g., trifluoroacetyl), optionally substituted alkoxycarbonylalkyl, optionally substituted alkoxycarbonylalkenyl, optionally substituted alkoxycarbonylalkynyl, optionally substituted alkoxycarbonylacyl, optionally substituted alkoxycarbonylalkoxy, optionally substituted carboxyalkyl (e.g., optionally substituted with hydroxy and/or an O-protecting group), optionally substituted carboxyalkoxy, optionally substituted carboxyaminoalkyl, or optionally substituted carbamoylalkyl (e.g., optionally substituted with any substituent described herein, such as those selected from (1)-(21) for alkyl) (e.g., R^{Vb′} is optionally substituted alkyl, optionally substituted alkenyl, or optionally substituted aminoalkyl, e.g., substituted with an N-protecting group, such as any described herein, e.g., trifluoroacetyl, or sulfoalkyl);
[0387] R^{12a} is H, optionally substituted alkyl, optionally substituted carboxyaminoalkyl, optionally substituted aminoalkyl (e.g., e.g., substituted with an N-protecting group, such as any described herein, e.g., trifluoroacetyl, or sulfoalkyl), optionally substituted aminoalkenyl, or optionally substituted aminoalkynyl; and
[0388] R^{12b} is H, optionally substituted alkyl, optionally substituted alkenyl, optionally substituted alkynyl, optionally substituted hydroxyalkyl, optionally substituted hydroxyalkenyl, optionally substituted hydroxyalkynyl, optionally substituted aminoalkyl, optionally substituted aminoalkenyl, optionally substituted aminoalkynyl (e.g., e.g., substituted with an N-protecting group, such as any described herein, e.g., trifluoroacetyl, or sulfoalkyl),
[0389] optionally substituted alkoxycarbonylacyl, optionally substituted alkoxycarbonylalkoxy, optionally substituted alkoxycarbonylalkyl, optionally substituted alkoxycarbonylalkenyl, optionally substituted alkoxycarbonylalkynyl, optionally substituted alkoxycarbonylalkoxy, optionally substituted carboxyalkoxy, optionally substituted carboxyalkyl, or optionally substituted carbamoylalkyl.

[0390] In particular embodiments, T¹ is O (oxo), and T² is S (thio) or Se (seleno). In other embodiments, T¹ is S (thio), and T² is O (oxo) or Se (seleno). In some embodiments, R^{Vb′} is H, optionally substituted alkyl, or optionally substituted alkoxy.

[0391] In other embodiments, each R^{12a} and R^{12b} is, independently, H, optionally substituted alkyl, optionally substituted alkenyl, optionally substituted alkynyl, or optionally substituted hydroxyalkyl. In particular embodiments, R^{12a} is H. In other embodiments, both R^{12a} and R^{12b} are H.

[0392] In some embodiments, each R^{Vb′} of R^{12b} is, independently, optionally substituted aminoalkyl (e.g., substituted with an N-protecting group, such as any described herein, e.g., trifluoroacetyl, or sulfoalkyl), optionally substituted aminoalkenyl, optionally substituted aminoalkynyl, or optionally substituted acylaminoalkyl (e.g., substituted with an N-protecting group, such as any described herein, e.g., trifluoroacetyl). In some embodiments, the amino and/or alkyl of the optionally substituted aminoalkyl is substituted with one or more of optionally substituted alkyl, optionally substituted alkenyl, optionally substituted sulfoalkyl, optionally substituted carboxy (e.g., substituted with an O-protecting group), optionally substituted hydroxy (e.g., substituted with an O-protecting group), optionally substituted carboxyalkyl (e.g., substituted with an O-protecting group), optionally substituted alkoxycarbonylalkyl (e.g., substituted with an O-protecting group), or N-protecting group. In some embodiments, optionally substituted aminoalkyl is substituted with an optionally substituted sulfoalkyl or optionally substituted alkenyl. In particular embodiments, R^{12a} and R^{Vb″} are both H. In particular embodiments, T¹ is O (oxo), and T² is S (thio) or Se (seleno).

[0393] In some embodiments, R^{Vb′} is optionally substituted alkoxycarbonylalkyl or optionally substituted carbamoylalkyl.

[0394] In particular embodiments, the optional substituent for R^{12a}, R^{12b}, R^{12c}, or R^{Va} is a polyethylene glycol group (e.g., —(CH₂)ₛ₂(OCH₂CH₂)ₛ₁(CH₂)ₛ₃OR′, wherein s1 is an integer from 1 to 10 (e.g., from 1 to 6 or from 1 to 4), each of s2 and s3, independently, is an integer from 0 to 10 (e.g., from 0 to 4, from 0 to 6, from 1 to 4, from 1 to 6, or from 1 to 10), and R′ is H or C₁₋₂₀ alkyl); or an amino-polyethylene glycol group (e.g., —NR^{N1}(CH₂)ₛ₂(CH₂CH₂O)ₛ₁(CH₂)ₛ₃NR^{N1}, wherein s1 is an integer from 1 to 10 (e.g., from 1 to 6 or from 1 to 4), each of s2 and s3, independently, is an integer from 0 to 10 (e.g., from 0 to 4, from 0 to 6, from 1 to 4, from 1 to 6, or from 1 to 10), and each R^{N1} is, independently, hydrogen or optionally substituted C₁₋₆ alkyl).

[0395] In some embodiments, B is a modified cytosine. Exemplary modified cytosines include compounds of Formula (b10)-(b14):

[chemical structure]

or a pharmaceutically acceptable salt or stereoisomer thereof,
[0396] wherein
[0397] each of T^{3′} and T^{3″} is, independently, H, optionally substituted alkyl, optionally substituted alkoxy, or optionally substituted thioalkoxy, or the combination of T^{3′} and T^{3″} join together (e.g., as in T³) to form O (oxo), S (thio), or Se (seleno);
[0398] each V⁴ is, independently, O, S, N(R^{Vc})ₙᵥ, or C(R^{Vc})ₙᵥ, wherein nv is an integer from 0 to 2 and each R^{V}C is, independently, H, halo, optionally substituted amino acid, optionally substituted alkyl, optionally substituted alkenyl, optionally substituted alkynyl, optionally substituted alkoxy, optionally substituted alkenyloxy, optionally substituted heterocyclyl, optionally substituted alkheterocyclyl, or optionally substituted alkynyloxy (e.g., optionally substituted with any substituent described herein, such as those selected from (1)-(21) for alkyl), wherein the combination of R^{13b} and R^{Vc} can be taken together to form optionally substituted heterocyclyl;
[0399] each V⁵ is, independently, N(R^{Vd})ₙᵥ, or C(R^{Vd})ₙᵥ, wherein nv is an integer from 0 to 2 and each R^{Vd} is, independently, H, halo, optionally substituted amino acid, optionally substituted alkyl, optionally substituted alkenyl, optionally substituted alkynyl, optionally substituted alkoxy, optionally substituted alkenyloxy, optionally substituted heterocyclyl, optionally substituted alkheterocyclyl, or optionally substituted alkynyloxy (e.g., optionally substituted with any substituent described herein, such as those selected from (1)-(21) for alkyl) (e.g., V⁵ is —CH or N);
[0400] each of R^{13a} and R^{13b} is, independently, H, optionally substituted acyl, optionally substituted acyloxyalkyl, optionally substituted alkyl, or optionally substituted alkoxy, wherein the combination of R^{13b} and R¹⁴ can be taken together to form optionally substituted heterocyclyl;
[0401] each R¹⁴ is, independently, H, halo, hydroxy, thiol, optionally substituted acyl, optionally substituted amino acid, optionally substituted alkyl, optionally substituted haloalkyl, optionally substituted alkenyl, optionally substituted alkynyl, optionally substituted hydroxyalkyl (e.g., substituted with an O-protecting group), optionally substituted hydroxyalkenyl, optionally substituted hydroxyalkynyl, optionally substituted alkoxy, optionally substituted alkenyloxy, optionally substituted alkynyloxy, optionally substituted aminoalkoxy, optionally substituted alkoxyalkoxy, optionally substituted acyloxyalkyl, optionally substituted amino (e.g., —NHR, wherein R is H, alkyl, aryl, or phosphoryl), azido, optionally substituted aryl, optionally substituted heterocyclyl, optionally substituted alkheterocyclyl, optionally substituted aminoalkyl, optionally substituted aminoalkenyl, or optionally substituted aminoalkyl; and
[0402] each of R¹⁵ and R¹⁶ is, independently, H, optionally substituted alkyl, optionally substituted alkenyl, or optionally substituted alkynyl.

[0403] Further exemplary modified cytosines include those having Formula (b32)-(b35):

[chemical structure]

or a pharmaceutically acceptable salt or stereoisomer thereof,
[0404] wherein
[0405] each of T¹ and T³ is, independently, O (oxo), S (thio), or Se (seleno);
[0406] each of R^{13a} and R^{13b} is, independently, H, optionally substituted acyl, optionally substituted acyloxyalkyl, optionally substituted alkyl, or optionally substituted alkoxy, wherein the combination of R^{13b} and R¹⁴ can be taken together to form optionally substituted heterocyclyl;
[0407] each R¹⁴ is, independently, H, halo, hydroxy, thiol, optionally substituted acyl, optionally substituted amino acid, optionally substituted alkyl, optionally substituted haloalkyl, optionally substituted alkenyl, optionally substituted alkynyl, optionally substituted hydroxyalkyl (e.g., substituted with an O-protecting group), optionally substituted hydroxyalkenyl, optionally substituted hydroxyalkynyl, optionally substituted alkoxy, optionally substituted alkenyloxy, optionally substituted alkynyloxy, optionally substituted aminoalkoxy, optionally substituted alkoxyalkoxy, optionally substituted acyloxyalkyl, optionally substituted amino (e.g., —NHR, wherein R is H, alkyl, aryl, or phosphoryl), azido, optionally substituted aryl, optionally substituted heterocyclyl, optionally substituted alkheterocyclyl, optionally substituted aminoalkyl (e.g., hydroxyalkyl, alkyl, alkenyl, or alkynyl), optionally substituted aminoalkenyl, or optionally substituted aminoalkynyl; and
[0408] each of R¹⁵ and R¹⁶ is, independently, H, optionally substituted alkyl, optionally substituted alkenyl, or optionally substituted alkynyl (e.g., R¹⁵ is H, and R¹⁶ is H or optionally substituted alkyl).

[0409] In some embodiments, R¹⁵ is H, and R¹⁶ is H or optionally substituted alkyl. In particular embodiments, R¹⁴ is H, acyl, or hydroxyalkyl. In some embodiments, R¹⁴ is halo. In some embodiments, both R¹⁴ and R¹⁵ are H. In some embodiments, both R¹⁵ and R¹⁶ are H. In some embodiments, each of R¹⁴ and R¹⁵ and R¹⁶ is H. In further embodiments, each of R^{13a} and R^{13b} is independently, H or optionally substituted alkyl.

[0410] Further non-limiting examples of modified cytosines include compounds of Formula (b36):

[chemical structure]

or a pharmaceutically acceptable salt or stereoisomer thereof,
[0411] wherein
[0412] each R^{13b} is, independently, H, optionally substituted acyl, optionally substituted acyloxyalkyl, optionally substituted alkyl, or optionally substituted alkoxy, wherein the combination of R^{13b} and R^{14b} can be taken together to form optionally substituted heterocyclyl;
[0413] each R^{14a} and R^{14b} is, independently, H, halo, hydroxy, thiol, optionally substituted acyl, optionally substituted amino acid, optionally substituted alkyl, optionally substituted haloalkyl, optionally substituted alkenyl, optionally substituted alkynyl, optionally substituted hydroxyalkyl (e.g., substituted with an O-protecting group), optionally substituted hydroxyalkenyl, optionally substituted alkoxy, optionally substituted alkenyloxy, optionally substituted alkynyloxy, optionally substituted aminoalkoxy, optionally substituted alkoxyalkoxy, optionally substituted acyloxyalkyl, optionally substituted amino (e.g., —NHR, wherein R is H, alkyl, aryl, phosphoryl, optionally substituted aminoalkyl, or optionally substituted carboxyaminoalkyl), azido, optionally substituted aryl, optionally substituted heterocyclyl, optionally substituted alkheterocyclyl, optionally substituted aminoalkyl, optionally substituted aminoalkenyl, or optionally substituted aminoalkynyl; and
[0414] each of R¹⁵ is, independently, H, optionally substituted alkyl, optionally substituted alkenyl, or optionally substituted alkynyl.

[0415] In particular embodiments, R^{14b} is an optionally substituted amino acid (e.g., optionally substituted lysine). In some embodiments, R^{14a} is H.

[0416] In some embodiments, B is a modified guanine. Exemplary modified guanines include compounds of Formula (b15)-(b17):

[chemical structure]

or a pharmaceutically acceptable salt or stereoisomer thereof,
[0417] wherein
[0418] each of T^{4′}, T^{4″}, T^{5′}, T^{5″}, T^{6′}, and T^{6″} is, independently, H, optionally substituted alkyl, or optionally substituted alkoxy, and wherein the combination of T^{4′} and T^{4″} (e.g., as in T⁴) or the combination of T^{5′} and T^{5″} (e.g., as in T⁵) or the combination of T^{6′} and T^{6″} (e.g., as in T⁶) join together form O (oxo), S (thio), or Se (seleno);
[0419] each of V⁵ and V⁶ is, independently, O, S, N(R^{Vd})ₙᵥ, or C(R^{Vd})ₙᵥ, wherein nv is an integer from 0 to 2 and each R^{Vd} is, independently, H, halo, thiol, optionally substituted amino acid, cyano, amidine, optionally substituted aminoalkyl, optionally substituted aminoalkenyl, optionally substituted aminoalkynyl, optionally substituted alkyl, optionally substituted alkenyl, optionally substituted alkynyl, optionally substituted alkoxy, optionally substituted alkenyloxy, or optionally substituted alkynyloxy (e.g., optionally substituted with any substituent described herein, such as those selected from (1)-(21) for alkyl), optionally substituted thioalkoxy, or optionally substituted amino; and
[0420] each of R¹⁷, R¹⁸, R^{19a}, R^{19b}, R²¹, R²², R²³, and R²⁴ is, independently, H, halo, thiol, optionally substituted alkyl, optionally substituted alkenyl, optionally substituted alkynyl, optionally substituted thioalkoxy, optionally substituted amino, or optionally substituted amino acid.

[0421] Exemplary modified guanosines include compounds of Formula (b37)-(b40):

[chemical structure]

or a pharmaceutically acceptable salt or stereoisomer thereof,
[0422] wherein
[0423] each of T^{4′} is, independently, H, optionally substituted alkyl, or optionally substituted alkoxy, and each T⁴ is, independently, O (oxo), S (thio), or Se (seleno);
[0424] each of R¹⁸, R^{19a}, R^{19b}, and R²¹ is, independently, H, halo, thiol, optionally substituted alkyl, optionally substituted alkenyl, optionally substituted alkynyl, optionally substituted thioalkoxy, optionally substituted amino, or optionally substituted amino acid.

[0425] In some embodiments, R¹⁸ is H or optionally substituted alkyl. In further embodiments, T⁴ is oxo. In some embodiments, each of R^{19a} and R^{19b} is, independently, H or optionally substituted alkyl.

[0426] In some embodiments, B is a modified adenine. Exemplary modified adenines include compounds of Formula (b18)-(b20):

[chemical structure]

or a pharmaceutically acceptable salt or stereoisomer thereof,
[0427] wherein
[0428] each V⁷ is, independently, O, S, N(R^{Ve})ₙᵥ, or C(R^{Ve})ₙᵥ, wherein nv is an integer from 0 to 2 and each R^{Ve} is, independently, H, halo, optionally substituted amino acid, optionally substituted alkyl, optionally substituted alkenyl, optionally substituted alkynyl, optionally substituted alkoxy, optionally substituted alkenyloxy, or optionally substituted alkynyloxy (e.g., optionally substituted with any substituent described herein, such as those selected from (1)-(21) for alkyl);
[0429] each R²⁵ is, independently, H, halo, thiol, optionally substituted alkyl, optionally substituted alkenyl, optionally substituted alkynyl, optionally substituted thioalkoxy, or optionally substituted amino;
[0430] each of R^{26a} and R^{26b} is, independently, H, optionally substituted acyl, optionally substituted amino acid, optionally substituted carbamoylalkyl, optionally substituted alkyl, optionally substituted alkenyl, optionally substituted alkynyl, optionally substituted hydroxyalkyl, optionally substituted hydroxyalkenyl, optionally substituted hydroxyalkynyl, optionally substituted alkoxy, or polyethylene glycol group (e.g., —(CH₂)ₛ₂(OCH₂CH₂)ₛ₁(CH₂)ₛ₃OR′, wherein s1 is an integer from 1 to 10 (e.g., from 1 to 6 or from 1 to 4), each of s2 and s3, independently, is an integer from 0 to 10 (e.g., from 0 to 4, from 0 to 6, from 1 to 4, from 1 to 6, or from 1 to 10), and R′ is H or C₁₋₂₀ alkyl); or an amino-polyethylene glycol group (e.g., —NR^{N1}(CH₂)ₛ₂(CH₂CH₂O)ₛ₁(CH₂)ₛ₃NR^{N1}, wherein s1 is an integer from 1 to 10 (e.g., from 1 to 6 or from 1 to 4), each of s2 and s3, independently, is an integer from 0 to 10 (e.g., from 0 to 4, from 0 to 6, from 1 to 4, from 1 to 6, or from 1 to 10), and each R^{N1} is, independently, hydrogen or optionally substituted C₁₋₆ alkyl);
[0431] each R²⁷ is, independently, H, optionally substituted alkyl, optionally substituted alkenyl, optionally substituted alkynyl, optionally substituted alkoxy, optionally substituted thioalkoxy or optionally substituted amino;
[0432] each R²⁸ is, independently, H, optionally substituted alkyl, optionally substituted alkenyl, or optionally substituted alkynyl; and
[0433] each R²⁹ is, independently, H, optionally substituted acyl, optionally substituted amino acid, optionally substituted carbamoylalkyl, optionally substituted alkyl, optionally substituted alkenyl, optionally substituted alkynyl, optionally substituted hydroxyalkyl, optionally substituted hydroxyalkenyl, optionally substituted alkoxy, or optionally substituted amino.

[0434] Exemplary modified adenines include compounds of Formula (b41)-(b43):

[chemical structure]

or a pharmaceutically acceptable salt or stereoisomer thereof,
[0435] wherein
[0436] each R²⁵ is, independently, H, halo, thiol, optionally substituted alkyl, optionally substituted alkenyl, optionally substituted alkynyl, optionally substituted thioalkoxy, or optionally substituted amino;
[0437] each of R^{26a} and R^{26b} is, independently, H, optionally substituted acyl, optionally substituted amino acid, optionally substituted carbamoylalkyl, optionally substituted alkyl, optionally substituted alkenyl, optionally substituted alkynyl, optionally substituted hydroxyalkyl, optionally substituted hydroxyalkenyl, optionally substituted hydroxyalkynyl, optionally substituted alkoxy, or polyethylene glycol group (e.g., —(CH₂)ₛ₂(OCH₂CH₂)ₛ₁(CH₂)ₛ₃OR′, wherein s1 is an integer from 1 to 10 (e.g., from 1 to 6 or from 1 to 4), each of s2 and s3, independently, is an integer from 0 to 10 (e.g., from 0 to 4, from 0 to 6, from 1 to 4, from 1 to 6, or from 1 to 10), and R′ is H or C₁₋₂₀ alkyl); or an amino-polyethylene glycol group (e.g., —NR^{N1}(CH₂)ₛ₂(CH₂CH₂O)ₛ₁(CH₂)ₛ₃NR^{N1}, wherein s1 is an integer from 1 to 10 (e.g., from 1 to 6 or from 1 to 4), each of s2 and s3, independently, is an integer from 0 to 10 (e.g., from 0 to 4, from 0 to 6, from 1 to 4, from 1 to 6, or from 1 to 10), and each R^{N1} is, independently, hydrogen or optionally substituted C₁₋₆ alkyl); and
[0438] each R²⁷ is, independently, H, optionally substituted alkyl, optionally substituted alkenyl, optionally substituted alkynyl, optionally substituted alkoxy, optionally substituted thioalkoxy, or optionally substituted amino.

[0439] In some embodiments, R^{26a} is H, and R^{26b} is optionally substituted alkyl. In some embodiments, each of R^{26a} and R^{26b} is, independently, optionally substituted alkyl. In particular embodiments, R²⁷ is optionally substituted alkyl, optionally substituted alkoxy, or optionally substituted thioalkoxy. In other embodiments, R²⁵ is optionally substituted alkyl, optionally substituted alkoxy, or optionally substituted thioalkoxy.

[0440] In particular embodiments, the optional substituent for R^{26a}, R^{26b}, or R²⁹ is a polyethylene glycol group (e.g., —(CH₂)ₛ₂(OCH₂CH₂)ₛ₁(CH₂)ₛ₃OR′, wherein s1 is an integer from 1 to 10 (e.g., from 1 to 6 or from 1 to 4), each of s2 and s3, independently, is an integer from 0 to 10 (e.g., from 0 to 4, from 0 to 6, from 1 to 4, from 1 to 6, or from 1 to 10), and R′ is H or C₁₋₂₀ alkyl); or an amino-polyethylene glycol group (e.g., —NR^{N1}(CH₂)ₛ₂(CH₂CH₂O)ₛ₁(CH₂)ₛ₃NR^{N1}, wherein s1 is an integer from 1 to 10 (e.g., from 1 to 6 or from 1 to 4), each of s2 and s3, independently, is an integer from 0 to 10 (e.g., from 0 to 4, from 0 to 6, from 1 to 4, from 1 to 6, or from 1 to 10), and each R^{N1} is, independently, hydrogen or optionally substituted C₁₋₆ alkyl).

[0441] In some embodiments, B may have Formula (b21):

[chemical structure]

wherein X¹² is, independently, O, S, optionally substituted alkylene (e.g., methylene), or optionally substituted heteroalkylene, xa is an integer from 0 to 3, and R^{12a} and T² are as described herein.

[0442] In some embodiments, B may have Formula (b22):

[chemical structure]

wherein R^{10′} is, independently, optionally substituted alkyl, optionally substituted alkenyl, optionally substituted alkynyl, optionally substituted aryl, optionally substituted heterocyclyl, optionally substituted aminoalkyl, optionally substituted aminoalkenyl, optionally substituted aminoalkynyl, optionally substituted alkoxy, optionally substituted alkoxycarbonylalkyl, optionally substituted alkoxycarbonylalkenyl, optionally substituted alkoxycarbonylalkynyl, optionally substituted alkoxycarbonylalkoxy, optionally substituted carboxyalkoxy, optionally substituted carboxyalkyl, or optionally substituted carbamoylalkyl, and R¹¹, R^{12a}, T¹, and T² are as described herein.

[0443] In some embodiments, B may have Formula (b23):

[chemical structure]

wherein R¹⁰ is optionally substituted heterocyclyl (e.g., optionally substituted furyl, optionally substituted thienyl, or optionally substituted pyrrolyl), optionally substituted aryl (e.g., optionally substituted phenyl or optionally substituted naphthyl), or any substituent described herein (e.g., for R¹⁰); and wherein R¹¹ (e.g., H or any substituent described herein), R^{12a} (e.g., H or any substituent described herein), T¹ (e.g., oxo or any substituent described herein), and T² (e.g., oxo or any substituent described herein) are as described herein. In some embodiments, B may have Formula (b24):

[chemical structure]

wherein R^{14′} is, independently, optionally substituted alkyl, optionally substituted alkenyl, optionally substituted alkynyl, optionally substituted aryl, optionally substituted heterocyclyl, optionally substituted alkaryl, optionally substituted alkheterocyclyl, optionally substituted aminoalkyl, optionally substituted aminoalkenyl, optionally substituted aminoalkynyl, optionally substituted alkoxy, optionally substituted alkoxycarbonylalkenyl, optionally substituted alkoxycarbonylalkynyl, optionally substituted alkoxycarbonylalkyl, optionally substituted alkoxycarbonylalkoxy, optionally substituted carboxyalkoxy, optionally substituted carboxyalkyl, or optionally substituted carbamoylalkyl, and R^{13a}, R^{13b}, R¹⁵, and T³ are as described herein.

[0444] In some embodiments, B may have Formula (b25):

[chemical structure]

wherein R^{14′} is optionally substituted heterocyclyl (e.g., optionally substituted furyl, optionally substituted thienyl, or optionally substituted pyrrolyl), optionally substituted aryl (e.g., optionally substituted phenyl or optionally substituted naphthyl), or any substituent described herein (e.g., for R¹⁴ or R^{14′}); and wherein R^{13a} (e.g., H or any substituent described herein), R^{13b} (e.g., H or any substituent described herein), R¹⁵ (e.g., H or any substituent described herein), and T³ (e.g., oxo or any substituent described herein) are as described herein.

[0445] In some embodiments, B is a nucleobase selected from the group consisting of cytosine, guanine, adenine, and uracil. In some embodiments, B may be:

[chemical structure]

[0446] In some embodiments, the modified nucleobase is a modified uracil. Exemplary nucleobases and nucleosides having a modified uracil include pseudouridine (ψ), pyridin-4-one ribonucleoside, 5-aza-uridine, 6-aza-uridine, 2-thio-5-aza-uridine, 2-thio-uridine (s²U), 4-thio-uridine (s⁴U), 4-thio-pseudouridine, 2-thio-pseudouridine, 5-hydroxy-uridine (ho⁵U), 5-aminoallyl-uridine, 5-halo-uridine (e.g., 5-iodo-uridine or 5-bromo-uridine), 3-methyl-uridine (m³U), 5-methoxy-uridine (mo⁵U), uridine 5-oxyacetic acid (cmo⁵U), uridine 5-oxyacetic acid methyl ester (mcmo⁵U), 5-carboxymethyl-uridine (cm⁵U), 1-carboxymethyl-pseudouridine, 5-carboxyhydroxymethyl-uridine (chm⁵U), 5-carboxyhydroxymethyl-uridine methyl ester (mchm⁵U), 5-methoxycarbonylmethyl-uridine (mcm⁵U), 5-methoxycarbonylmethyl-2-thio-uridine (mcm⁵s2U), 5-aminomethyl-2-thio-uridine (nm⁵s2U), 5-methylaminomethyl-uridine (mnm⁵U), 5-methylaminomethyl-2-thio-uridine (mnm⁵s2U), 5-methylaminomethyl-2-seleno-uridine (mnm⁵se²U), 5-carbamoylmethyl-uridine (ncm⁵U), 5-carboxymethylaminomethyl-uridine (cmnm⁵U), 5-carboxymethylaminomethyl-2-thio-uridine (cmnm⁵s2U), 5-propynyl-uridine, 1-propynyl-pseudouridine, 5-taurinomethyl-uridine (τm⁵U), 1-taurinomethyl-pseudouridine, 5-taurinomethyl-2-thio-uridine(m⁵s²U), 1-taurinomethyl-4-thio-pseudouridine, 5-methyl-uridine (m⁵U, i.e., having the nucleobase deoxythymine), 1-methylpseudouridine (m¹ψ), 5-methyl-2-thio-uridine (m⁵s²U), 1-methyl-4-thio-pseudouridine (m¹s⁴ψ), 4-thio-1-methyl-pseudouridine, 3-methyl-pseudouridine (m³ψ), 2-thio-1-methyl-pseudouridine, 1-methyl-1-deaza-pseudouridine, 2-thio-1-methyl-1-deaza-pseudouridine, dihydrouridine (D), dihydropseudouridine, 5,6-dihydrouridine, 5-methyl-dihydrouridine (m⁵D), 2-thio-dihydrouridine, 2-thio-dihydropseudouridine, 2-methoxy-uridine, 2-methoxy-4-thio-uridine, 4-methoxy-pseudouridine, 4-methoxy-2-thio-pseudouridine, N1-methyl-pseudouridine (also known as 1-methylpseudouridine (m¹ψ)), 3-(3-amino-3-carboxypropyl)uridine (acp³U), 1-methyl-3-(3-amino-3-carboxypropyl)pseudouridine (acp³ψ), 5-(isopentenylaminomethyl)uridine (inm⁵U), 5-(isopentenylaminomethyl)-2-thio-uridine (inm⁵s2U), α-thio-uridine, 2′-O-methyl-uridine (Urn), 5,2′-O-dimethyl-uridine (m⁵Um), 2′-O-methyl-pseudouridine (ψm), 2-thio-2′-O-methyl-uridine (s²Um), 5-methoxycarbonylmethyl-2′-O-methyl-uridine (mcm⁵Um), 5-carbamoylmethyl-2′-O-methyl-uridine (ncm⁵Um), 5-carboxymethylaminomethyl-2′-O-methyl-uridine (cmnm⁵Um), 3,2′-O-dimethyl-uridine (m³Um), 5-(isopentenylaminomethyl)-2′-O-methyl-uri dine (inm⁵Um), 1-thio-uridine, deoxythymidine, 2′-F-ara-uridine, 2′-F-uridine, 2′-OH-ara-uridine, 5-(2-carbomethoxyvinyl) uridine, and 5-[3-(1-E-propenylamino)uridine.

[0447] In some embodiments, the modified nucleobase is a modified cytosine. Exemplary nucleobases and nucleosides having a modified cytosine include 5-aza-cytidine, 6-aza-cytidine, pseudoisocytidine, 3-methyl-cytidine (m³C), N4-acetyl-cytidine (ac⁴C), 5-formyl-cytidine (f⁵C), N4-methyl-cytidine (m⁴C), 5-methyl-cytidine (m⁵C), 5-halo-cytidine (e.g., 5-iodo-cytidine), 5-hydroxymethyl-cytidine (hm⁵C), 1-methyl-pseudoisocytidine, pyrrolo-cytidine, pyrrolo-pseudoisocytidine, 2-thio-cytidine (s²C), 2-thio-5-methyl-cytidine, 4-thio-pseudoisocytidine, 4-thio-1-methyl-pseudoisocytidine, 4-thio-1-methyl-1-deaza-pseudoisocytidine, 1-methyl-1-deaza-pseudoisocytidine, zebularine, 5-aza-zebularine, 5-methyl-zebularine, 5-aza-2-thio-zebularine, 2-thio-zebularine, 2-methoxy-cytidine, 2-methoxy-5-methyl-cytidine, 4-methoxy-pseudoisocytidine, 4-methoxy-1-methyl-pseudoisocytidine, lysidine (k₂C), α-thio-cytidine, 2′-O-methyl-cytidine (Cm), 5,2′-O-dimethyl-cytidine (m⁵Cm), N4-acetyl-2′-O-methyl-cytidine (ac⁴Cm), N4,2′-O-dimethyl-cytidine (m⁴Cm), 5-formyl-2′-O-methyl-cytidine (f⁵Cm), N4,N4,2′-0-trimethyl-cytidine (m⁴²Cm), 1-thio-cytidine, 2′-F-ara-cytidine, 2′-F-cytidine, and 2′-OH-ara-cytidine.

[0448] In some embodiments, the modified nucleobase is a modified adenine. Exemplary nucleobases and nucleosides having a modified adenine include 2-amino-purine, 2,6-diaminopurine, 2-amino-6-halo-purine (e.g., 2-amino-6-chloro-purine), 6-halo-purine (e.g., 6-chloro-purine), 2-amino-6-methyl-purine, 8-azido-adenosine, 7-deaza-adenine, 7-deaza-8-aza-adenine, 7-deaza-2-amino-purine, 7-deaza-8-aza-2-amino-purine, 7-deaza-2,6-diaminopurine, 7-deaza-8-aza-2,6-diaminopurine, 1-methyl-adenosine (m¹A), 2-methyl-adenine (m²A), N6-methyl-adenosine (m⁶A), 2-methylthio-N6-methyl-adenosine (ms²m⁶A), N6-isopentenyl-adenosine (i⁶A), 2-methylthio-N6-isopentenyl-adenosine (ms²i⁶A), N6-(cis-hydroxyisopentenyl)adenosine (io⁶A), 2-methylthio-N6-(cis-hydroxyisopentenyl)adenosine (ms²io⁶A), N6-glycinylcarbamoyl-adenosine (g⁶A), N6-threonylcarbamoyl-adenosine (t⁶A), N6-methyl-N6-threonylcarbamoyl-adenosine (m⁶t⁶A), 2-methylthio-N6-threonylcarbamoyl-adenosine (ms²g⁶A), N6,N6-dimethyl-adenosine (m62A), N6-hydroxynorvalylcarbamoyl-adenosine (hn⁶A), 2-methylthio-N6-hydroxynorvalylcarbamoyl-adenosine (ms²hn⁶A), N6-acetyl-adenosine (ac⁶A), 7-methyl-adenine, 2-methylthio-adenine, 2-methoxy-adenine, α-thio-adenosine, 2′-O-methyl-adenosine (Am), N6,2′-O-dimethyl-adenosine (m⁶Am), N6,N6,2′-O-trimethyl-adenosine (m⁶2Am), 1,2′-O-dimethyl-adenosine (m¹Am), 2′-O-ribosyladenosine (phosphate) (Ar(p)), 2-amino-N6-methyl-purine, 1-thio-adenosine, 8-azido-adenosine, 2′-F-ara-adenosine, 2′-F-adenosine, 2′-OH-ara-adenosine, and N6-(19-amino-pentaoxanonadecyl)-adenosine.

[0449] In some embodiments, the modified nucleobase is a modified guanine. Exemplary nucleobases and nucleosides having a modified guanine include inosine (I), 1-methyl-inosine (m¹I), wyosine (imG), methylwyosine (mimG), 4-demethyl-wyosine (imG-14), isowyosine (imG2), wybutosine (yW), peroxywybutosine (o₂yW), hydroxywybutosine (OHyW), undermodified hydroxywybutosine (OHyW*), 7-deaza-guanosine, queuosine (Q), epoxyqueuosine (oQ), galactosyl-queuosine (galQ), mannosyl-queuosine (manQ), 7-cyano-7-deaza-guanosine (preQ₀), 7-aminomethyl-7-deaza-guanosine (preQ₁), archaeosine (G⁺), 7-deaza-8-aza-guanosine, 6-thio-guanosine, 6-thio-7-deaza-guanosine, 6-thio-7-deaza-8-aza-guanosine, 7-methyl-guanosine (m⁷G), 6-thio-7-methyl-guanosine, 7-methyl-inosine, 6-methoxy-guanosine, 1-methyl-guanosine (m¹G), N2-methyl-guanosine (m²G), N2,N2-dimethyl-guanosine (m²₂G), N2,7-dimethyl-guanosine (m^{2,7}G), N2,N2,7-dimethyl-guanosine (m^{2,2,7}G), 8-oxo-guanosine, 7-methyl-8-oxo-guanosine, 1-methyl-6-thio-guanosine, N2-methyl-6-thio-guanosine, N2,N2-dimethyl-6-thio-guanosine, α-thio-guanosine, 2′-O-methyl-guanosine (Gm), N2-methyl-2′-O-methyl-guanosine (m²Gm), N2,N2-dimethyl-2′-O-methyl-guanosine (m²²Gm), 1-methyl-2′-O-methyl-guanosine (m¹Gm), N2,7-dimethyl-2′-O-methyl-guanosine (m^{2,7}Gm), 2′-O-methyl-inosine (Im), 1,2′-O-dimethyl-inosine (m¹Im), and 2′-O-ribosylguanosine (phosphate) (Gr(p)).

[0450] The nucleobase of the nucleotide can be independently selected from a purine, a pyrimidine, a purine or pyrimidine analog. For example, the nucleobase can each be independently selected from adenine, cytosine, guanine, uracil, or hypoxanthine. In another embodiment, the nucleobase can also include, for example, naturally-occurring and synthetic derivatives of a base, including pyrazolo[3,4-d]pyrimidines, 5-methylcytosine (5-me-C), 5-hydroxymethyl cytosine, xanthine, hypoxanthine, 2-aminoadenine, 6-methyl and other alkyl derivatives of adenine and guanine, 2-propyl and other alkyl derivatives of adenine and guanine, 2-thiouracil, 2-thiothymine and 2-thiocytosine, 5-propynyl uracil and cytosine, 6-azo uracil, cytosine and thymine, 5-uracil (pseudouracil), 4-thiouracil, 8-halo (e.g., 8-bromo), 8-amino, 8-thiol, 8-thioalkyl, 8-hydroxyl and other 8-substituted adenines and guanines, 5-halo particularly 5-bromo, 5-trifluoromethyl and other 5-substituted uracils and cytosines, 7-methylguanine and 7-methyladenine, 8-azaguanine and 8-azaadenine, deazaguanine, 7-deazaguanine, 3-deazaguanine, deazaadenine, 7-deazaadenine, 3-deazaadenine, pyrazolo[3,4-d]pyrimidine, imidazo[1,5-a]1,3,5 triazinones, 9-deazapurines, imidazo[4,5-d]pyrazines, thiazolo[4,5-d]pyrimidines, pyrazin-2-ones, 1,2,4-triazine, pyridazine; and 1,3,5 triazine. When the nucleotides are depicted using the shorthand A, G, C, T or U, each letter refers to the representative base and/or derivatives thereof, e.g., A includes adenine or adenine analogs, e.g., 7-deaza adenine).

### Modifications on the Internucleoside Linkage

[0451] The modified nucleotides, which may be incorporated into a polynucleotide, primary construct, or mmRNA molecule, can be modified on the internucleoside linkage (e.g., phosphate backbone). Herein, in the context of the polynucleotide backbone, the phrases “phosphate” and “phosphodiester” are used interchangeably. Backbone phosphate groups can be modified by replacing one or more of the oxygen atoms with a different substituent. Further, the modified nucleosides and nucleotides can include the wholesale replacement of an unmodified phosphate moiety with another internucleoside linkage as described herein. Examples of modified phosphate groups include, but are not limited to, phosphorothioate, phosphoroselenates, boranophosphates, boranophosphate esters, hydrogen phosphonates, phosphoramidates, phosphorodiamidates, alkyl or aryl phosphonates, and phosphotriesters. Phosphorodithioates have both non-linking oxygens replaced by sulfur. The phosphate linker can also be modified by the replacement of a linking oxygen with nitrogen (bridged phosphoramidates), sulfur (bridged phosphorothioates), and carbon (bridged methylene-phosphonates).

[0452] The α-thio substituted phosphate moiety is provided to confer stability to RNA and DNA polymers through the unnatural phosphorothioate backbone linkages. Phosphorothioate DNA and RNA have increased nuclease resistance and subsequently a longer half-life in a cellular environment. Phosphorothioate linked polynucleotides, primary constructs, or mmRNA molecules are expected to also reduce the innate immune response through weaker binding/activation of cellular innate immune molecules.

[0453] In specific embodiments, a modified nucleoside includes an alpha-thio-nucleoside (e.g., 5′-O-(1-thiophosphate)-adenosine, 5′-O-(1-thiophosphate)-cytidine (α-thio-cytidine), 5′-O-(1-thiophosphate)-guanosine, 5′-O-(1-thiophosphate)-uridine, or 5′-O-(1-thiophosphate)-pseudouridine).

[0454] Other internucleoside linkages that may be employed according to the present invention, including internucleoside linkages which do not contain a phosphorous atom, are described herein below.

### Combinations of Modified Sugars, Nucleobases, and Internucleoside Linkages

[0455] The polynucleotides, primary constructs, and mmRNA of the invention can include a combination of modifications to the sugar, the nucleobase, and/or the internucleoside linkage. These combinations can include any one or more modifications described herein. For examples, any of the nucleotides described herein in Formulas (Ia), (Ia-1)-(Ia-3), (Ib)-(If), (IIa)-(IIp), (IIb-1), (IIb-2), (IIc-1)-(IIc-2), (IIn-1), (IIn-2), (IVa)-(IV1), and (IXa)-(IXr) can be combined with any of the nucleobases described herein (e.g., in Formulas (b1)-(b43) or any other described herein).

Synthesis of Polypeptides, Primary Constructs, and mmRNA Molecules

[0456] The polypeptides, primary constructs, and mmRNA molecules for use in accordance with the invention may be prepared according to any useful technique, as described herein. The modified nucleosides and nucleotides used in the synthesis of polynucleotides, primary constructs, and mmRNA molecules disclosed herein can be prepared from readily available starting materials using the following general methods and procedures. Where typical or preferred process conditions (e.g., reaction temperatures, times, mole ratios of reactants, solvents, pressures, etc.) are provided, a skilled artisan would be able to optimize and develop additional process conditions. Optimum reaction conditions may vary with the particular reactants or solvent used, but such conditions can be determined by one skilled in the art by routine optimization procedures.

[0457] The processes described herein can be monitored according to any suitable method known in the art. For example, product formation can be monitored by spectroscopic means, such as nuclear magnetic resonance spectroscopy (e.g., ¹H or ¹³C) infrared spectroscopy, spectrophotometry (e.g., UV-visible), or mass spectrometry, or by chromatography such as high performance liquid chromatography (HPLC) or thin layer chromatography.

[0458] Preparation of polypeptides, primary constructs, and mmRNA molecules of the present invention can involve the protection and deprotection of various chemical groups. The need for protection and deprotection, and the selection of appropriate protecting groups can be readily determined by one skilled in the art. The chemistry of protecting groups can be found, for example, in Greene, et al., Protective Groups in Organic Synthesis, 2d. Ed., Wiley & Sons, 1991, which is incorporated herein by reference in its entirety.

[0459] The reactions of the processes described herein can be carried out in suitable solvents, which can be readily selected by one of skill in the art of organic synthesis. Suitable solvents can be substantially nonreactive with the starting materials (reactants), the intermediates, or products at the temperatures at which the reactions are carried out, i.e., temperatures which can range from the solvent's freezing temperature to the solvent's boiling temperature. A given reaction can be carried out in one solvent or a mixture of more than one solvent. Depending on the particular reaction step, suitable solvents for a particular reaction step can be selected.

[0460] Resolution of racemic mixtures of modified nucleosides and nucleotides can be carried out by any of numerous methods known in the art. An example method includes fractional recrystallization using a “chiral resolving acid” which is an optically active, salt-forming organic acid. Suitable resolving agents for fractional recrystallization methods are, for example, optically active acids, such as the D and L forms of tartaric acid, diacetyltartaric acid, dibenzoyltartaric acid, mandelic acid, malic acid, lactic acid or the various optically active camphorsulfonic acids. Resolution of racemic mixtures can also be carried out by elution on a column packed with an optically active resolving agent (e.g., dinitrobenzoylphenylglycine). Suitable elution solvent composition can be determined by one skilled in the art. Modified nucleosides and nucleotides (e.g., building block molecules) can be prepared according to the synthetic methods described in Ogata et al., J. Org. Chem. 74:2585-2588 (2009); Purmal et al., Nucl. Acids Res. 22(1): 72-78, (1994); Fukuhara et al., Biochemistry, 1(4): 563-568 (1962); and Xu et al., Tetrahedron, 48(9): 1729-1740 (1992), each of which are incorporated by reference in their entirety.

[0461] The polypeptides, primary constructs, and mmRNA of the invention may or may not be uniformly modified along the entire length of the molecule. For example, one or more or all types of nucleotide (e.g., purine or pyrimidine, or any one or more or all of A, G, U, C) may or may not be uniformly modified in a polynucleotide of the invention, or in a given predetermined sequence region thereof (e.g. one or more of the sequence regions represented in FIG. 1). In some embodiments, all nucleotides X in a polynucleotide of the invention (or in a given sequence region thereof) are modified, wherein X may any one of nucleotides A, G, U, C, or any one of the combinations A+G, A+U, A+C, G+U, G+C, U+C, A+G+U, A+G+C, G+U+C or A+G+C.

[0462] Different sugar modifications, nucleotide modifications, and/or internucleoside linkages (e.g., backbone structures) may exist at various positions in the polynucleotide, primary construct, or mmRNA. One of ordinary skill in the art will appreciate that the nucleotide analogs or other modification(s) may be located at any position(s) of a polynucleotide, primary construct, or mmRNA such that the function of the polynucleotide, primary construct, or mmRNA is not substantially decreased. A modification may also be a 5′ or 3′ terminal modification. The polynucleotide, primary construct, or mmRNA may contain from about 1% to about 100% modified nucleotides (either in relation to overall nucleotide content, or in relation to one or more types of nucleotide, i.e. any one or more of A, G, U or C) or any intervening percentage (e.g., from 1% to 20%, from 1% to 25%, from 1% to 50%, from 1% to 60%, from 1% to 70%, from 1% to 80%, from 1% to 90%, from 1% to 95%, from 10% to 20%, from 10% to 25%, from 10% to 50%, from 10% to 60%, from 10% to 70%, from 10% to 80%, from 10% to 90%, from 10% to 95%, from 10% to 100%, from 20% to 25%, from 20% to 50%, from 20% to 60%, from 20% to 70%, from 20% to 80%, from 20% to 90%, from 20% to 95%, from 20% to 100%, from 50% to 60%, from 50% to 70%, from 50% to 80%, from 50% to 90%, from 50% to 95%, from 50% to 100%, from 70% to 80%, from 70% to 90%, from 70% to 95%, from 70% to 100%, from 80% to 90%, from 80% to 95%, from 80% to 100%, from 90% to 95%, from 90% to 100%, and from 95% to 100%).

[0463] In some embodiments, the polynucleotide, primary construct, or mmRNA includes a modified pyrimidine (e.g., a modified uracil/uridine/U or modified cytosine/cytidine/C). In some embodiments, the uracil or uridine (generally: U) in the polynucleotide, primary construct, or mmRNA molecule may be replaced with from about 1% to about 100% of a modified uracil or modified uridine (e.g., from 1% to 20%, from 1% to 25%, from 1% to 50%, from 1% to 60%, from 1% to 70%, from 1% to 80%, from 1% to 90%, from 1% to 95%, from 10% to 20%, from 10% to 25%, from 10% to 50%, from 10% to 60%, from 10% to 70%, from 10% to 80%, from 10% to 90%, from 10% to 95%, from 10% to 100%, from 20% to 25%, from 20% to 50%, from 20% to 60%, from 20% to 70%, from 20% to 80%, from 20% to 90%, from 20% to 95%, from 20% to 100%, from 50% to 60%, from 50% to 70%, from 50% to 80%, from 50% to 90%, from 50% to 95%, from 50% to 100%, from 70% to 80%, from 70% to 90%, from 70% to 95%, from 70% to 100%, from 80% to 90%, from 80% to 95%, from 80% to 100%, from 90% to 95%, from 90% to 100%, and from 95% to 100% of a modified uracil or modified uridine). The modified uracil or uridine can be replaced by a compound having a single unique structure or by a plurality of compounds having different structures (e.g., 2, 3, 4 or more unique structures, as described herein). In some embodiments, the cytosine or cytidine (generally: C) in the polynucleotide, primary construct, or mmRNA molecule may be replaced with from about 1% to about 100% of a modified cytosine or modified cytidine (e.g., from 1% to 20%, from 1% to 25%, from 1% to 50%, from 1% to 60%, from 1% to 70%, from 1% to 80%, from 1% to 90%, from 1% to 95%, from 10% to 20%, from 10% to 25%, from 10% to 50%, from 10% to 60%, from 10% to 70%, from 10% to 80%, from 10% to 90%, from 10% to 95%, from 10% to 100%, from 20% to 25%, from 20% to 50%, from 20% to 60%, from 20% to 70%, from 20% to 80%, from 20% to 90%, from 20% to 95%, from 20% to 100%, from 50% to 60%, from 50% to 70%, from 50% to 80%, from 50% to 90%, from 50% to 95%, from 50% to 100%, from 70% to 80%, from 70% to 90%, from 70% to 95%, from 70% to 100%, from 80% to 90%, from 80% to 95%, from 80% to 100%, from 90% to 95%, from 90% to 100%, and from 95% to 100% of a modified cytosine or modified cytidine). The modified cytosine or cytidine can be replaced by a compound having a single unique structure or by a plurality of compounds having different structures (e.g., 2, 3, 4 or more unique structures, as described herein). In some embodiments, the present disclosure provides methods of synthesizing a polynucleotide, primary construct, or mmRNA (e.g., the first region, first flanking region, or second flanking region) including n number of linked nucleosides having Formula (Ia-1):

[chemical structure]

comprising:
a) reacting a nucleotide of Formula (IV-1):

[chemical structure]

with a phosphoramidite compound of Formula (V-1):

[chemical structure]

wherein Y⁹ is H, hydroxy, phosphoryl, pyrophosphate, sulfate, amino, thiol, optionally substituted amino acid, or a peptide (e.g., including from 2 to 12 amino acids); and each P¹, P², and P³ is, independently, a suitable protecting group; and [symbol] denotes a solid support; to provide a polynucleotide, primary construct, or mmRNA of Formula (VI-1):

[chemical structure]

and b) oxidizing or sulfurizing the polynucleotide, primary construct, or mmRNA of Formula (V) to yield a polynucleotide, primary construct, or mmRNA of Formula (VII-1):

[chemical structure]

and c) removing the protecting groups to yield the polynucleotide, primary construct, or mmRNA of Formula (Ia).

[0464] In some embodiments, steps a) and b) are repeated from 1 to about 10,000 times. In some embodiments, the methods further comprise a nucleotide (e.g., mmRNA molecule) selected from the group consisting of A, C, G and U adenosine, cytosine, guanosine, and uracil. In some embodiments, the nucleobase may be a pyrimidine or derivative thereof. In some embodiments, the polynucleotide, primary construct, or mmRNA is translatable.

[0465] Other components of polynucleotides, primary constructs, and mmRNA are optional, and are beneficial in some embodiments. For example, a 5′ untranslated region (UTR) and/or a 3′UTR are provided, wherein either or both may independently contain one or more different nucleotide modifications. In such embodiments, nucleotide modifications may also be present in the translatable region. Also provided are polynucleotides, primary constructs, and mmRNA containing a Kozak sequence.

[0466] Exemplary syntheses of modified nucleotides, which are incorporated into a modified nucleic acid or mmRNA, e.g., RNA or mRNA, are provided below in Scheme 1 through Scheme 11. Scheme 1 provides a general method for phosphorylation of nucleosides, including modified nucleosides.

[chemical structure]

[0467] Various protecting groups may be used to control the reaction. For example, Scheme 2 provides the use of multiple protecting and deprotecting steps to promote phosphorylation at the 5′ position of the sugar, rather than the 2′ and 3′ hydroxyl groups.

[chemical structure]

[0468] Modified nucleotides can be synthesized in any useful manner. Schemes 3, 4, and 7 provide exemplary methods for synthesizing modified nucleotides having a modified purine nucleobase; and Schemes 5 and 6 provide exemplary methods for synthesizing modified nucleotides having a modified pseudouridine or pseudoisocytidine, respectively.

[chemical structure]

[chemical structure]

[chemical structure]

[chemical structure]

[chemical structure]

[0469] Schemes 8 and 9 provide exemplary syntheses of modified nucleotides. Scheme 10 provides a non-limiting biocatalytic method for producing nucleotides.

[chemical structure]

[chemical structure]

[chemical structure]

[0470] Scheme 11 provides an exemplary synthesis of a modified uracil, where the N1 position is modified with R^{12b}, as provided elsewhere, and the 5′-position of ribose is phosphorylated. T, T², R^{12a}, R^{12b}, and r are as provided herein. This synthesis, as well as optimized versions thereof, can be used to modify other pyrimidine nucleobases and purine nucleobases (see e.g., Formulas (b1)-(b43)) and/or to install one or more phosphate groups (e.g., at the 5′ position of the sugar). This alkylating reaction can also be used to include one or more optionally substituted alkyl group at any reactive group (e.g., amino group) in any nucleobase described herein (e.g., the amino groups in the Watson-Crick base-pairing face for cytosine, uracil, adenine, and guanine).

[chemical structure]

Combinations of Nucleotides in mmRNA

[0471] Further examples of modified nucleotides and modified nucleotide combinations are provided below in Table 9. These combinations of modified nucleotides can be used to form the polypeptides, primary constructs, or mmRNA of the invention. Unless otherwise noted, the modified nucleotides may be completely substituted for the natural nucleotides of the modified nucleic acids or mmRNA of the invention. As a non-limiting example, the natural nucleotide uridine may be substituted with a modified nucleoside described herein. In another non-limiting example, the natural nucleotide uridine may be partially substituted (e.g., about 0.1%, 1%, 5%, 10%, 15%, 20%, 25%, 30%, 35%, 40%, 45%, 50%, 55%, 60%, 65%, 70%, 75%, 80%, 85%, 90%, 95% or 99.9%) with at least one of the modified nucleoside disclosed herein.

TABLE 9

| Modified Nucleotide | Modified Nucleotide Combination |
|---|---|
| α-thio-cytidine | α-thio-cytidine/5-iodo-uridine |
| | α-thio-cytidine/N1-methyl-pseudouridine |
| | α-thio-cytidine/α-thio-uridine |
| | α-thio-cytidine/5-methyl-uridine |
| | α-thio-cytidine/pseudo-uridine |
| | about 50% of the cytosines are α-thio-cytidine |
| pseudoisocytidine | pseudoisocytidine/5-iodo-uridine |
| | pseudoisocytidine/N1-methyl-pseudouridine |
| | pseudoisocytidine/α-thio-uridine |
| | pseudoisocytidine/5-methyl-uridine |
| | pseudoisocytidine/pseudouridine |
| | about 25% of cytosines are pseudoisocytidine |
| | pseudoisocytidine/about 50% of uridines are |
| | N1-methyl-pseudouridine and about 50% of |
| | uridines are pseudouridine |
| | pseudoisocytidine/about 25% of uridines are |
| | N1-methyl-pseudouridine and about 25% of |
| | uridines are pseudouridine |
| pyrrolo-cytidine | pyrrolo-cytidine/5-iodo-uridine |
| | pyrrolo-cytidine/N1-methyl-pseudouridine |
| | pyrrolo-cytidine/α-thio-uridine |
| | pyrrolo-cytidine/5-methyl-uridine |
| | pyrrolo-cytidine/pseudouridine |
| | about 50% of the cytosines are pyrrolo-cytidine |
| 5-methyl-cytidine | 5-methyl-cytidine/5-iodo-uridine |
| | 5-methyl-cytidine/N1-methyl-pseudouridine |
| | 5-methyl-cytidine/α-thio-uridine |
| | 5-methyl-cytidine/5-methyl-uridine |
| | 5-methyl-cytidine/pseudouridine |
| | about 25% of cytosines are 5-methyl-cytidine |
| | about 50% of cytosines are 5-methyl-cytidine |
| | 5-methyl-cytidine/5-methoxy-uridine |
| | 5-methyl-cytidine/5-bromo-uridine |
| | 5-methyl-cytidine/2-thio-uridine |
| | 5-methyl-cytidine/about 50% of uridines are |
| | 2-thio-uridine |
| | about 50% of uridines are 5-methyl-cytidine/ |
| | about 50% of uridines are 2-thio-uridine |
| N4-acetyl-cytidine | N4-acetyl-cytidine/5-iodo-uridine |
| | N4-acetyl-cytidine/N1-methyl-pseudouridine |
| | N4-acetyl-cytidine/α-thio-uridine |
| | N4-acetyl-cytidine/5-methyl-uridine |
| | N4-acetyl-cytidine/pseudouridine |
| | about 50% of cytosines are N4-acetyl-cytidine |
| | about 25% of cytosines are N4-acetyl-cytidine |
| | N4-acetyl-cytidine/5-methoxy-uridine |
| | N4-acetyl-cytidine/5-bromo-uridine |
| | N4-acetyl-cytidine/2-thio-uridine |
| | about 50% of cytosines are N4-acetyl-cytidine/ |
| | about 50% of uridines are 2-thio-uridine |

[0472] Further examples of modified nucleotide combinations are provided below in Table 10. These combinations of modified nucleotides can be used to form the polypeptides, primary constructs, or mmRNA of the invention.

TABLE 10

| Modified Nucleotide | Modified Nucleotide Combination |
|---|---|
| modified cytidine | modified cytidine with (b10)/pseudouridine |
| having one or more | modified cytidine with (b10)/N1-methyl- |
| nucleobases of | pseudouridine |
| Formula (b10) | modified cytidine with (b10)/5-methoxy-uridine |
| | modified cytidine with (b10)/5-methyl-uridine |
| | modified cytidine with (b10)/5-bromo-uridine |
| | modified cytidine with (b10)/2-thio-uridine |
| | about 50% of cytidine substituted with modified |
| | cytidine (b10)/about 50% of uridines are |
| | 2-thio-uridine |
| modified cytidine | modified cytidine with (b32)/pseudouridine |
| having one or more | modified cytidine with (b32)/N1-methyl- |
| nucleobases of | pseudouridine |
| Formula (b32) | modified cytidine with (b32)/5-methoxy-uridine |
| | modified cytidine with (b32)/5-methyl-uridine |
| | modified cytidine with (b32)/5-bromo-uridine |
| | modified cytidine with (b32)/2-thio-uridine |
| | about 50% of cytidine substituted with modified |
| | cytidine (b32)/about 50% of uridines are |
| | 2-thio-uridine |
| modified uridine | modified uridine with (b1)/N4-acetyl-cytidine |
| having one or more | modified uridine with (b1)/5-methyl-cytidine |
| nucleobases of | |
| Formula (b1) | |
| modified uridine | modified uridine with (b8)/N4-acetyl-cytidine |
| having one or more | modified uridine with (b8)/5-methyl-cytidine |
| nucleobases of | |
| Formula (b8) | |
| modified uridine | modified uridine with (b28)/N4-acetyl-cytidine |
| having one or more | modified uridine with (b28)/5-methyl-cytidine |
| nucleobases of | |
| Formula (b28) | |
| modified uridine | modified uridine with (b29)/N4-acetyl-cytidine |
| having one or more | modified uridine with (b29)/5-methyl-cytidine |
| nucleobases of | |
| Formula (b29) | |
| modified uridine | modified uridine with (b30)/N4-acetyl-cytidine |
| having one or more | modified uridine with (b30)/5-methyl-cytidine |
| nucleobases of | |
| Formula (b30) | |

[0473] In some embodiments, at least 25% of the cytosines are replaced by a compound of Formula (b10)-(b14) (e.g., at least about 30%, at least about 35%, at least about 40%, at least about 450%, at least about 500%, at least about 550%, at least about 600%, at least about 650%, at least about 700%, at least about 7500 at least about 800%, at least about 850%, at least about 900%, at least about 95%, or about 100%).

[0474] In some embodiments, at least 250% of the uracils are replaced by a compound of Formula (b1)-(b9) (e.g., at least about 30%, at least about 35%, at least about 40%, at least about 45% at least about 50%, at least about 55% at least about 60%, at least about 65%, at least about 70%, at least about 75% at least about 80%, at least about 85%, at least about 900%, at least about 95%, or about 100%).

[0475] In some embodiments, at least 25% of the cytosines are replaced by a compound of Formula (b10)-(b14), and at least 25% of the uracils are replaced by a compound of Formula (b1)-(b9) (e.g., at least about 30%, at least about 35%, at least about 40%, at least about 45%, at least about 50%, at least about 55%, at least about 60%, at least about 65%, at least about 70%, at least about 75%, at least about 80%, at least about 85%, at least about 90%, at least about 95%, or about 100%).

### IV. Pharmaceutical Compositions

### Formulation, Administration, Delivery and Dosing

[0476] The present invention provides polynucleotides, primary constructs and mmRNA compositions and complexes in combination with one or more pharmaceutically acceptable excipients. Pharmaceutical compositions may optionally comprise one or more additional active substances, e.g. therapeutically and/or prophylactically active substances. General considerations in the formulation and/or manufacture of pharmaceutical agents may be found, for example, in Remington: The Science and Practice of Pharmacy 21^{st} ed., Lippincott Williams & Wilkins, 2005 (incorporated herein by reference).

[0477] In some embodiments, compositions are administered to humans, human patients or subjects. For the purposes of the present disclosure, the phrase “active ingredient” generally refers to polynucleotides, primary constructs and mmRNA to be delivered as described herein.

[0478] Although the descriptions of pharmaceutical compositions provided herein are principally directed to pharmaceutical compositions which are suitable for administration to humans, it will be understood by the skilled artisan that such compositions are generally suitable for administration to any other animal, e.g., to non-human animals, e.g. non-human mammals. Modification of pharmaceutical compositions suitable for administration to humans in order to render the compositions suitable for administration to various animals is well understood, and the ordinarily skilled veterinary pharmacologist can design and/or perform such modification with merely ordinary, if any, experimentation. Subjects to which administration of the pharmaceutical compositions is contemplated include, but are not limited to, humans and/or other primates; mammals, including commercially relevant mammals such as cattle, pigs, horses, sheep, cats, dogs, mice, and/or rats; and/or birds, including commercially relevant birds such as poultry, chickens, ducks, geese, and/or turkeys.

[0479] Formulations of the pharmaceutical compositions described herein may be prepared by any method known or hereafter developed in the art of pharmacology. In general, such preparatory methods include the step of bringing the active ingredient into association with an excipient and/or one or more other accessory ingredients, and then, if necessary and/or desirable, dividing, shaping and/or packaging the product into a desired single- or multi-dose unit.

[0480] A pharmaceutical composition in accordance with the invention may be prepared, packaged, and/or sold in bulk, as a single unit dose, and/or as a plurality of single unit doses. As used herein, a “unit dose” is discrete amount of the pharmaceutical composition comprising a predetermined amount of the active ingredient. The amount of the active ingredient is generally equal to the dosage of the active ingredient which would be administered to a subject and/or a convenient fraction of such a dosage such as, for example, one-half or one-third of such a dosage.

[0481] Relative amounts of the active ingredient, the pharmaceutically acceptable excipient, and/or any additional ingredients in a pharmaceutical composition in accordance with the invention will vary, depending upon the identity, size, and/or condition of the subject treated and further depending upon the route by which the composition is to be administered. By way of example, the composition may comprise between 0.1% and 100%, e.g., between 0.5 and 50%, between 1-30%, between 5-80%, at least 80% (w/w) active ingredient.

### Formulations

[0482] The polynucleotide, primary construct, and mmRNA of the invention can be formulated using one or more excipients to: (1) increase stability; (2) increase cell transfection; (3) permit the sustained or delayed release (e.g., from a depot formulation of the polynucleotide, primary construct, or mmRNA); (4) alter the biodistribution (e.g., target the polynucleotide, primary construct, or mmRNA to specific tissues or cell types); (5) increase the translation of encoded protein in vivo; and/or (6) alter the release profile of encoded protein in vivo. In addition to traditional excipients such as any and all solvents, dispersion media, diluents, or other liquid vehicles, dispersion or suspension aids, surface active agents, isotonic agents, thickening or emulsifying agents, preservatives, excipients of the present invention can include, without limitation, lipidoids, liposomes, lipid nanoparticles, polymers, lipoplexes, core-shell nanoparticles, peptides, proteins, cells transfected with polynucleotide, primary construct, or mmRNA (e.g., for transplantation into a subject), hyaluronidase, nanoparticle mimics and combinations thereof. Accordingly, the formulations of the invention can include one or more excipients, each in an amount that together increases the stability of the polynucleotide, primary construct, or mmRNA, increases cell transfection by the polynucleotide, primary construct, or mmRNA, increases the expression of polynucleotide, primary construct, or mmRNA encoded protein, and/or alters the release profile of polynucleotide, primary construct, or mmRNA encoded proteins. Further, the primary construct and mmRNA of the present invention may be formulated using self-assembled nucleic acid nanoparticles.

[0483] Formulations of the pharmaceutical compositions described herein may be prepared by any method known or hereafter developed in the art of pharmacology. In general, such preparatory methods include the step of associating the active ingredient with an excipient and/or one or more other accessory ingredients.

[0484] A pharmaceutical composition in accordance with the present disclosure may be prepared, packaged, and/or sold in bulk, as a single unit dose, and/or as a plurality of single unit doses. As used herein, a “unit dose” refers to a discrete amount of the pharmaceutical composition comprising a predetermined amount of the active ingredient. The amount of the active ingredient may generally be equal to the dosage of the active ingredient which would be administered to a subject and/or a convenient fraction of such a dosage including, but not limited to, one-half or one-third of such a dosage.

[0485] Relative amounts of the active ingredient, the pharmaceutically acceptable excipient, and/or any additional ingredients in a pharmaceutical composition in accordance with the present disclosure may vary, depending upon the identity, size, and/or condition of the subject being treated and further depending upon the route by which the composition is to be administered. For example, the composition may comprise between 0.1% and 99% (w/w) of the active ingredient.

[0486] In some embodiments, the formulations described herein may contain at least one mmRNA. As a non-limiting example, the formulations may contain 1, 2, 3, 4 or 5 mmRNA. In one embodiment the formulation may contain modified mRNA encoding proteins selected from categories such as, but not limited to, human proteins, veterinary proteins, bacterial proteins, biological proteins, antibodies, immunogenic proteins, therapeutic peptides and proteins, secreted proteins, plasma membrane proteins, cytoplasmic and cytoskeletal proteins, intrancellular membrane bound proteins, nuclear proteins, proteins associated with human disease and/or proteins associated with non-human diseases. In one embodiment, the formulation contains at least three modified mRNA encoding proteins. In one embodiment, the formulation contains at least five modified mRNA encoding proteins.

[0487] Pharmaceutical formulations may additionally comprise a pharmaceutically acceptable excipient, which, as used herein, includes, but is not limited to, any and all solvents, dispersion media, diluents, or other liquid vehicles, dispersion or suspension aids, surface active agents, isotonic agents, thickening or emulsifying agents, preservatives, and the like, as suited to the particular dosage form desired. Various excipients for formulating pharmaceutical compositions and techniques for preparing the composition are known in the art (see Remington: The Science and Practice of Pharmacy, 21^{st} Edition, A. R. Gennaro, Lippincott, Williams & Wilkins, Baltimore, MD, 2006; incorporated herein by reference in its entirety). The use of a conventional excipient medium may be contemplated within the scope of the present disclosure, except insofar as any conventional excipient medium may be incompatible with a substance or its derivatives, such as by producing any undesirable biological effect or otherwise interacting in a deleterious manner with any other component(s) of the pharmaceutical composition.

[0488] In some embodiments, the particle size of the lipid nanoparticle may be increased and/or decreased. The change in particle size may be able to help counter biological reaction such as, but not limited to, inflammation or may increase the biological effect of the modified mRNA delivered to mammals.

[0489] Pharmaceutically acceptable excipients used in the manufacture of pharmaceutical compositions include, but are not limited to, inert diluents, surface active agents and/or emulsifiers, preservatives, buffering agents, lubricating agents, and/or oils. Such excipients may optionally be included in the pharmaceutical formulations of the invention.

### Lipidoids

[0490] The synthesis of lipidoids has been extensively described and formulations containing these compounds are particularly suited for delivery of polynucleotides, primary constructs or mmRNA (see Mahon et al., Bioconjug Chem. 2010 21:1448-1454; Schroeder et al., J Intern Med. 2010 267:9-21; Akinc et al., Nat Biotechnol. 2008 26:561-569; Love et al., Proc Natl Acad Sci USA. 2010 107:1864-1869; Siegwart et al., Proc Natl Acad Sci USA. 2011 108:12996-3001; all of which are incorporated herein in their entireties).

[0491] While these lipidoids have been used to effectively deliver double stranded small interfering RNA molecules in rodents and non-human primates (see Akinc et al., Nat Biotechnol. 2008 26:561-569; Frank-Kamenetsky et al., Proc Natl Acad Sci USA. 2008 105:11915-11920; Akinc et al., Mol Ther. 2009 17:872-879; Love et al., Proc Natl Acad Sci USA. 2010 107:1864-1869; Leuschner et al., Nat Biotechnol. 2011 29:1005-1010; all of which is incorporated herein in their entirety), the present disclosure describes their formulation and use in delivering single stranded polynucleotides, primary constructs, or mmRNA. Complexes, micelles, liposomes or particles can be prepared containing these lipidoids and therefore, can result in an effective delivery of the polynucleotide, primary construct, or mmRNA, as judged by the production of an encoded protein, following the injection of a lipidoid formulation via localized and/or systemic routes of administration. Lipidoid complexes of polynucleotides, primary constructs, or mmRNA can be administered by various means including, but not limited to, intravenous, intramuscular, or subcutaneous routes.

[0492] In vivo delivery of nucleic acids may be affected by many parameters, including, but not limited to, the formulation composition, nature of particle PEGylation, degree of loading, oligonucleotide to lipid ratio, and biophysical parameters such as, but not limited to, particle size (Akinc et al., Mol Ther. 2009 17:872-879; herein incorporated by reference in its entirety). As an example, small changes in the anchor chain length of poly(ethylene glycol) (PEG) lipids may result in significant effects on in vivo efficacy. Formulations with the different lipidoids, including, but not limited to penta[3-(1-laurylaminopropionyl)]-triethylenetetramine hydrochloride (TETA-5LAP; aka 98N12-5, see Murugaiah et al., Analytical Biochemistry, 401:61 (2010); herein incorporated by reference in its entirety), C12-200 (including derivatives and variants), and MD1, can be tested for in vivo activity.

[0493] The lipidoid referred to herein as “98N12-5” is disclosed by Akinc et al., Mol Ther. 2009 17:872-879 and is incorporated by reference in its entirety. (See FIG. 2)

[0494] The lipidoid referred to herein as “C12-200” is disclosed by Love et al., Proc Natl Acad Sci USA. 2010 107:1864-1869 (see FIG. 2) and Liu and Huang, Molecular Therapy. 2010 669-670 (see FIG. 2); both of which are herein incorporated by reference in their entirety. The lipidoid formulations can include particles comprising either 3 or 4 or more components in addition to polynucleotide, primary construct, or mmRNA. As an example, formulations with certain lipidoids, include, but are not limited to, 98N12-5 and may contain 42% lipidoid, 48% cholesterol and 10% PEG (C14 alkyl chain length). As another example, formulations with certain lipidoids, include, but are not limited to, C12-200 and may contain 50% lipidoid, 10% disteroylphosphatidyl choline, 38.5% cholesterol, and 1.5% PEG-DMG.

[0495] In one embodiment, a polynucleotide, primary construct, or mmRNA formulated with a lipidoid for systemic intravenous administration can target the liver. For example, a final optimized intravenous formulation using polynucleotide, primary construct, or mmRNA, and comprising a lipid molar composition of 42% 98N12-5, 48% cholesterol, and 10% PEG-lipid with a final weight ratio of about 7.5 to 1 total lipid to polynucleotide, primary construct, or mmRNA, and a C14 alkyl chain length on the PEG lipid, with a mean particle size of roughly 50-60 nm, can result in the distribution of the formulation to be greater than 90% to the liver. (see, Akinc et al., Mol Ther. 2009 17:872-879; herein incorporated by reference in its entirety). In another example, an intravenous formulation using a C12-200 (see U.S. provisional application 61/175,770 and published international application WO2010129709, each of which is herein incorporated by reference in their entirety) lipidoid may have a molar ratio of 50/10/38.5/1.5 of C12-200/disteroylphosphatidyl choline/cholesterol/PEG-DMG, with a weight ratio of 7 to 1 total lipid to polynucleotide, primary construct, or mmRNA, and a mean particle size of 80 nm may be effective to deliver polynucleotide, primary construct, or mmRNA to hepatocytes (see, Love et al., Proc Natl Acad Sci USA. 2010 107:1864-1869 herein incorporated by reference in its entirety). In another embodiment, an MD1 lipidoid-containing formulation may be used to effectively deliver polynucleotide, primary construct, or mmRNA to hepatocytes in vivo. The characteristics of optimized lipidoid formulations for intramuscular or subcutaneous routes may vary significantly depending on the target cell type and the ability of formulations to diffuse through the extracellular matrix into the blood stream. While a particle size of less than 150 nm may be desired for effective hepatocyte delivery due to the size of the endothelial fenestrae (see, Akinc et al., Mol Ther. 2009 17:872-879 herein incorporated by reference in its entirety), use of a lipidoid-formulated polynucleotide, primary construct, or mmRNA to deliver the formulation to other cells types including, but not limited to, endothelial cells, myeloid cells, and muscle cells may not be similarly size-limited. Use of lipidoid formulations to deliver siRNA in vivo to other non-hepatocyte cells such as myeloid cells and endothelium has been reported (see Akinc et al., Nat Biotechnol. 2008 26:561-569; Leuschner et al., Nat Biotechnol. 2011 29:1005-1010; Cho et al. Adv. Funct. Mater. 2009 19:3112-3118; 8^{th} International Judah Folkman Conference, Cambridge, MA Oct. 8-9, 2010; each of which is herein incorporated by reference in its entirety). Effective delivery to myeloid cells, such as monocytes, lipidoid formulations may have a similar component molar ratio. Different ratios of lipidoids and other components including, but not limited to, disteroylphosphatidyl choline, cholesterol and PEG-DMG, may be used to optimize the formulation of the polynucleotide, primary construct, or mmRNA for delivery to different cell types including, but not limited to, hepatocytes, myeloid cells, muscle cells, etc. For example, the component molar ratio may include, but is not limited to, 50% C12-200, 10% disteroylphosphatidyl choline, 38.5% cholesterol, and % 1.5 PEG-DMG (see Leuschner et al., Nat Biotechnol 2011 29:1005-1010; herein incorporated by reference in its entirety). The use of lipidoid formulations for the localized delivery of nucleic acids to cells (such as, but not limited to, adipose cells and muscle cells) via either subcutaneous or intramuscular delivery, may not require all of the formulation components desired for systemic delivery, and as such may comprise only the lipidoid and the polynucleotide, primary construct, or mmRNA.

[0496] Combinations of different lipidoids may be used to improve the efficacy of polynucleotide, primary construct, or mmRNA directed protein production as the lipidoids may be able to increase cell transfection by the polynucleotide, primary construct, or mmRNA; and/or increase the translation of encoded protein (see Whitehead et al., Mol. Ther. 2011, 19:1688-1694, herein incorporated by reference in its entirety).

### Liposomes, Lipoplexes, and Lipid Nanoparticles

[0497] The polynucleotide, primary construct, and mmRNA of the invention can be formulated using one or more liposomes, lipoplexes, or lipid nanoparticles. In one embodiment, pharmaceutical compositions of polynucleotide, primary construct, or mmRNA include liposomes. Liposomes are artificially-prepared vesicles which may primarily be composed of a lipid bilayer and may be used as a delivery vehicle for the administration of nutrients and pharmaceutical formulations. Liposomes can be of different sizes such as, but not limited to, a multilamellar vesicle (MLV) which may be hundreds of nanometers in diameter and may contain a series of concentric bilayers separated by narrow aqueous compartments, a small unicellular vesicle (SUV) which may be smaller than 50 nm in diameter, and a large unilamellar vesicle (LUV) which may be between 50 and 500 nm in diameter. Liposome design may include, but is not limited to, opsonins or ligands in order to improve the attachment of liposomes to unhealthy tissue or to activate events such as, but not limited to, endocytosis. Liposomes may contain a low or a high pH in order to improve the delivery of the pharmaceutical formulations.

[0498] The formation of liposomes may depend on the physicochemical characteristics such as, but not limited to, the pharmaceutical formulation entrapped and the liposomal ingredients, the nature of the medium in which the lipid vesicles are dispersed, the effective concentration of the entrapped substance and its potential toxicity, any additional processes involved during the application and/or delivery of the vesicles, the optimization size, polydispersity and the shelf-life of the vesicles for the intended application, and the batch-to-batch reproducibility and possibility of large-scale production of safe and efficient liposomal products.

[0499] In one embodiment, pharmaceutical compositions described herein may include, without limitation, liposomes such as those formed from 1,2-dioleyloxy-N,N-dimethylaminopropane (DODMA) liposomes, DiLa2 liposomes from Marina Biotech (Bothell, WA), 1,2-dilinoleyloxy-3-dimethylaminopropane (DLin-DMA), 2,2-dilinoleyl-4-(2-dimethylaminoethyl)-[1,3]-dioxolane (DLin-KC2-DMA), and MC3 (US20100324120; herein incorporated by reference in its entirety) and liposomes which may deliver small molecule drugs such as, but not limited to, DOXIL® from Janssen Biotech, Inc. (Horsham, PA).

[0500] In one embodiment, pharmaceutical compositions described herein may include, without limitation, liposomes such as those formed from the synthesis of stabilized plasmid-lipid particles (SPLP) or stabilized nucleic acid lipid particle (SNALP) that have been previously described and shown to be suitable for oligonucleotide delivery in vitro and in vivo (see Wheeler et al. Gene Therapy. 1999 6:271-281; Zhang et al. Gene Therapy. 1999 6:1438-1447; Jeffs et al. Pharm Res. 2005 22:362-372; Morrissey et al., Nat Biotechnol. 2005 2:1002-1007; Zimmermann et al., Nature. 2006 441:111-114; Heyes et al. J Contr Rel. 2005 107:276-287; Semple et al. Nature Biotech. 2010 28:172-176; Judge et al. J Clin Invest. 2009 119:661-673; deFougerolles Hum Gene Ther. 2008 19:125-132; all of which are incorporated herein in their entireties). The original manufacture method by Wheeler et al. was a detergent dialysis method, which was later improved by Jeffs et al. and is referred to as the spontaneous vesicle formation method. The liposome formulations are composed of 3 to 4 lipid components in addition to the polynucleotide, primary construct, or mmRNA. As an example a liposome can contain, but is not limited to, 55% cholesterol, 20% disteroylphosphatidyl choline (DSPC), 10% PEG-S-DSG, and 15% 1,2-dioleyloxy-N,N-dimethylaminopropane (DODMA), as described by Jeffs et al. As another example, certain liposome formulations may contain, but are not limited to, 48% cholesterol, 20% DSPC, 2% PEG-c-DMA, and 30% cationic lipid, where the cationic lipid can be 1,2-distearloxy-N,N-dimethylaminopropane (DSDMA), DODMA, DLin-DMA, or 1,2-dilinolenyloxy-3-dimethylaminopropane (DLenDMA), as described by Heyes et al.

[0501] In one embodiment, pharmaceutical compositions may include liposomes which may be formed to deliver mmRNA which may encode at least one immunogen. The mmRNA may be encapsulated by the liposome and/or it may be contained in an aqueous core which may then be encapsulated by the liposome (see International Pub. Nos. WO2012031046, WO2012031043, WO2012030901 and WO2012006378; each of which is herein incorporated by reference in their entirety). In another embodiment, the mmRNA which may encode an immunogen may be formulated in a cationic oil-in-water emulsion where the emulsion particle comprises an oil core and a cationic lipid which can interact with the mmRNA anchoring the molecule to the emulsion particle (see International Pub. No. WO2012006380; herein incorporated by reference in its entirety). In yet another embodiment, the lipid formulation may include at least cationic lipid, a lipid which may enhance transfection and a least one lipid which contains a hydrophilic head group linked to a lipid moiety (International Pub. No. WO2011076807 and U.S. Pub. No. 20110200582; each of which is herein incorporated by reference in their entirety). In another embodiment, the polynucleotides, primary constructs and/or mmRNA encoding an immunogen may be formulated in a lipid vesicle which may have crosslinks between functionalized lipid bilayers (see U.S. Pub. No. 20120177724, herein incorporated by reference in its entirety).

[0502] In one embodiment, the polynucleotides, primary constructs and/or mmRNA may be formulated in a lipid vesicle which may have crosslinks between functionalized lipid bilayers.

[0503] In one embodiment, the polynucleotides, primary constructs and/or mmRNA may be formulated in a liposome comprising a cationic lipid. The liposome may have a molar ratio of nitrogen atoms in the cationic lipid to the phophates in the RNA (N:P ratio) of between 1:1 and 20:1 as described in International Publication No. WO2013006825, herein incorporated by reference in its entirety. In another embodiment, the liposome may have a N:P ratio of greater than 20:1 or less than 1:1.

[0504] In one embodiment, the polynucleotides, primary constructs and/or mmRNA may be formulated in a lipid-polycation complex. The formation of the lipid-polycation complex may be accomplished by methods known in the art and/or as described in U.S. Pub. No. 20120178702, herein incorporated by reference in its entirety. As a non-limiting example, the polycation may include a cationic peptide or a polypeptide such as, but not limited to, polylysine, polyornithine and/or polyarginine and the cationic peptides described in International Pub. No. WO2012013326; herein incorporated by reference in its entirety. In another embodiment, the polynucleotides, primary constructs and/or mmRNA may be formulated in a lipid-polycation complex which may further include a neutral lipid such as, but not limited to, cholesterol or dioleoyl phosphatidylethanolamine (DOPE).

[0505] The liposome formulation may be influenced by, but not limited to, the selection of the cationic lipid component, the degree of cationic lipid saturation, the nature of the PEGylation, ratio of all components and biophysical parameters such as size. In one example by Semple et al. (Semple et al. Nature Biotech. 2010 28:172-176; herein incorporated by reference in its entirety), the liposome formulation was composed of 57.1% cationic lipid, 7.1% dipalmitoylphosphatidylcholine, 34.3% cholesterol, and 1.4% PEG-c-DMA. As another example, changing the composition of the cationic lipid could more effectively deliver siRNA to various antigen presenting cells (Basha et al. Mol Ther. 2011 19:2186-2200; herein incorporated by reference in its entirety).

[0506] In some embodiments, the ratio of PEG in the lipid nanoparticle (LNP) formulations may be increased or decreased and/or the carbon chain length of the PEG lipid may be modified from C14 to C18 to alter the pharmacokinetics and/or biodistribution of the LNP formulations. As a non-limiting example, LNP formulations may contain 1-5% of the lipid molar ratio of PEG-c-DOMG as compared to the cationic lipid, DSPC and cholesterol. In another embodiment the PEG-c-DOMG may be replaced with a PEG lipid such as, but not limited to, PEG-DSG (1,2-Distearoyl-sn-glycerol, methoxypolyethylene glycol) or PEG-DPG (1,2-Dipalmitoyl-sn-glycerol, methoxypolyethylene glycol). The cationic lipid may be selected from any lipid known in the art such as, but not limited to, DLin-MC3-DMA, DLin-DMA, C12-200 and DLin-KC2-DMA.

[0507] In one embodiment, the polynucleotides, primary constructs or mmRNA may be formulated in a lipid nanoparticle such as those described in International Publication No. WO2012170930, herein incorporated by reference in its entirety.

[0508] In one embodiment, the cationic lipid may be selected from, but not limited to, a cationic lipid described in International Publication Nos. WO2012040184, WO2011153120, WO2011149733, WO2011090965, WO2011043913, WO2011022460, WO2012061259, WO2012054365, WO2012044638, WO2010080724, WO201021865 and WO2008103276, U.S. Pat. Nos. 7,893,302, 7,404,969 and 8,283,333 and US Patent Publication No. US20100036115 and US20120202871; each of which is herein incorporated by reference in their entirety. In another embodiment, the cationic lipid may be selected from, but not limited to, formula A described in International Publication Nos. WO2012040184, WO2011153120, WO2011149733, WO2011090965, WO2011043913, WO2011022460, WO2012061259, WO2012054365 and WO2012044638; each of which is herein incorporated by reference in their entirety. In yet another embodiment, the cationic lipid may be selected from, but not limited to, formula CLI-CLXXIX of International Publication No. WO2008103276, formula CLI-CLXXIX of U.S. Pat. No. 7,893,302, formula CLI-CLXXXXII of U.S. Pat. No. 7,404,969 and formula I-VI of US Patent Publication No. US20100036115; each of which is herein incorporated by reference in their entirety. As a non-limiting example, the cationic lipid may be selected from (20Z,23Z)—N,N-dimethylnonacosa-20,23-dien-10-amine, (17Z,20Z)—N,N-dimemylhexacosa-17,20-dien-9-amine, (1Z,19Z)—N5N-dimethylpentacosa-1 6,19-dien-8-amine, (13Z,16Z)—N,N-dimethyldocosa-13,16-dien-5-amine, (12Z,15Z)—N,N-dimethylhenicosa-12,15-dien-4-amine, (14Z,17Z)—N,N-dimethyltricosa-14,17-dien-6-amine, (15Z,18Z)—N,N-dimethyltetracosa-15,18-dien-7-amine, (18Z,21Z)—N,N-dimethylheptacosa-18,21-dien-10-amine, (15Z,18Z)—N,N-dimethyltetracosa-15,18-dien-5-amine, (14Z,17Z)—N,N-dimethyltricosa-14,17-dien-4-amine, (19Z,22Z)—N,N-dimeihyloctacosa-19,22-dien-9-amine, (18Z,21 Z)—N,N-dimethylheptacosa-18,21-dien-8-amine, (17Z,20Z)—N,N-dimethylhexacosa-17,20-dien-7-amine, (16Z,19Z)—N,N-dimethylpentacosa-16,19-dien-6-amine, (22Z,25Z)—N,N-dimethylhentriaconta-22,25-dien-10-amine, (21 Z,24Z)—N,N-dimethyltriaconta-21,24-dien-9-amine, (18Z)—N,N-dimetylheptacos-18-en-10-amine, (17Z)—N,N-dimethylhexacos-17-en-9-amine, (19Z,22Z)—N,N-dimethyloctacosa-19,22-dien-7-amine, N,N-dimethylheptacosan-10-amine, (20Z,23Z)—N-ethyl-N-methylnonacosa-20,23-dien-10-amine, 1-[(11Z,14Z)-1-nonylicosa-11,14-dien-1-yl]pyrrolidine, (20Z)—N,N-dimethylheptacos-20-en-1 O-amine, (15Z)—N,N-dimethyl eptacos-15-en-1 O-amine, (14Z)—N,N-dimethylnonacos-14-en-10-amine, (17Z)—N,N-dimethylnonacos-17-en-10-amine, (24Z)—N,N-dimethyltritriacont-24-en-10-amine, (20Z)—N,N-dimethylnonacos-20-en-1 O-amine, (22Z)—N,N-dimethylhentriacont-22-en-10-amine, (16Z)—N,N-dimethylpentacos-16-en-8-amine, (12Z,15Z)—N,N-dimethyl-2-nonylhenicosa-12,15-dien-1-amine, (13Z,16Z)—N,N-dimethyl-3-nonyldocosa-13,16-dien-1-amine, N,N-dimethyl-1-[(1S,2R)-2-octylcyclopropyl]eptadecan-8-amine, 1-[(1S,2R)-2-hexylcyclopropyl]-N,N-dimethylnonadecan-10-amine, N,N-dimethyl-1-[(1S,2R)-2-octylcyclopropyl]nonadecan-10-amine, N,N-dimethyl-21-[(1S,2R)-2-octylcyclopropyl]henicosan-10-amine,N,N-dimethyl-1-[(1S,2S)-2-{[(1R,2R)-2-pentylcycIopropyl]methyl}cyclopropyl]nonadecan-10-amine,N,N-dimethyl-1-[(1S,2R)-2-octylcyclopropyl]hexadecan-8-amine, N,N-dimethyl-[(1R,2S)-2-undecyIcyclopropyl]tetradecan-5-amine, N,N-dimethyl-3-{7-[(1S,2R)-2-octylcyclopropyl]heptyl}dodecan-1-amine, 1-[(1R,2S)-2-hepty lcyclopropyl]-N,N-dimethyloctadecan-9-amine, 1-[(1S,2R)-2-decylcyclopropyl]-N,N-dimethylpentadecan-6-amine, N,N-dimethyl-1-[(1S,2R)-2-octylcyclopropyl]pentadecan-8-amine, R—N,N-dimethyl-1-[(9Z,12Z)-octadeca-9,12-dien-1-yloxy]-3-(octyloxy)propan-2-amine, S—N,N-dimethyl-1-[(9Z,12Z)-octadeca-9,12-dien-1-yloxy]-3-(octyloxy)propan-2-amine, 1-{2-[(9Z,12Z)-octadeca-9,12-dien-1-yloxy]-1-[(octyloxy)methyl]ethyl}pyrrolidine, (2S)—N,N-dimethyl-1-[(9Z,12Z)-octadeca-9,12-dien-1-yloxy]-3-[(5Z)-oct-5-en-1-yloxy]propan-2-amine, 1-{2-[(9Z,12Z)-octadeca-9,12-dien-1-yloxy]-1-[(octyloxy)methyl]ethyl}azetidine, (2S)-1-(hexyloxy)-N,N-dimethyl-3-[(9Z,12Z)-octadeca-9,12-dien-1-yloxy]propan-2-amine, (2S)-1-(heptyloxy)-N,N-dimethyl-3-[(9Z,12Z)-octadeca-9,12-dien-1-yloxy]propan-2-amine, N,N-dimethyl-1-(nonyloxy)-3-[(9Z,12Z)-octadeca-9,12-dien-1-yloxy]propan-2-amine, N,N-dimethyl-1-[(9Z)-octadec-9-en-1-yloxy]-3-(octyloxy)propan-2-amine; (2S)—N,N-dimethyl-1-[(6Z,9Z,12Z)-octadeca-6,9,12-trien-1-yloxy]-3-(octyloxy)propan-2-amine, (2S)-1-[(11Z,14Z)-icosa-11,14-dien-1-yloxy]-N,N-dimethyl-3-(pentyloxy)propan-2-amine, (2S)-1-(hexyloxy)-3-[(11Z,14Z)-icosa-11,14-dien-1-yloxy]-N,N-dimethylpropan-2-amine, 1-[(11Z,14Z)-icosa-11,14-dien-1-yloxy]-N,N-dimethyl-3-(octyloxy)propan-2-amine, 1-[(13Z,16Z)-docosa-13,16-dien-1-yloxy]-N,N-dimethyl-3-(octyloxy)propan-2-amine, (2S)-1-[(13Z,16Z)-docosa-13,16-dien-1-yloxy]-3-(hexyloxy)-N,N-dimethylpropan-2-amine, (2S)-1-[(13Z)-docos-13-en-1-yloxy]-3-(hexyloxy)-N,N-dimethylpropan-2-amine, 1-[(13Z)-docos-13-en-1-yloxy]-N,N-dimethyl-3-(octyloxy)propan-2-amine, 1-[(9Z)-hexadec-9-en-1-yloxy]-N,N-dimethyl-3-(octyloxy)propan-2-amine, (2R)—N,N-dimethyl-H(1-metoylo ctyl)oxy]-3-[(9Z,12Z)-octadeca-9,12-dien-1-yloxy]propan-2-amine, (2R)-1-[(3,7-dimethyloctyl)oxy]-N,N-dimethyl-3-[(9Z,12Z)-octadeca-9,12-dien-1-yloxy]propan-2-amine, N,N-dimethyl-1-(octyloxy)-3-({8-[(1S,2S)-2-{[(1R,2R)-2-pentylcyclopropyl]methyl}cyclopropyl]octyl}oxy)propan-2-amine, N,N-dimethyl-1-{[8-(2-oclylcyclopropyl)octyl]oxy}-3-(octyloxy)propan-2-amine and (11E,20Z,23Z)—N,N-dimethylnonacosa-11,20,2-trien-10-amine or a pharmaceutically acceptable salt or stereoisomer thereof.

[0509] In one embodiment, the lipid may be a cleavable lipid such as those described in International Publication No. WO2012170889, herein incorporated by reference in its entirety.

[0510] In one embodiment, the cationic lipid may be synthesized by methods known in the art and/or as described in International Publication Nos. WO2012040184, WO2011153120, WO2011149733, WO2011090965, WO2011043913, WO2011022460, WO2012061259, WO2012054365, WO2012044638, WO2010080724 and WO201021865; each of which is herein incorporated by reference in their entirety.

[0511] In one embodiment, the LNP formulations of the polynucleotides, primary constructs and/or mmRNA may contain PEG-c-DOMG at 3% lipid molar ratio. In another embodiment, the LNP formulations polynucleotides, primary constructs and/or mmRNA may contain PEG-c-DOMG at 1.5% lipid molar ratio.

[0512] In one embodiment, the pharmaceutical compositions of the polynucleotides, primary constructs and/or mmRNA may include at least one of the PEGylated lipids described in International Publication No. 2012099755, herein incorporated by reference.

[0513] In one embodiment, the LNP formulation may contain PEG-DMG 2000 (1,2-dimyristoyl-sn-glycero-3-phophoethanolamine-N-[methoxy(polyethylene glycol)-2000). In one embodiment, the LNP formulation may contain PEG-DMG 2000, a cationic lipid known in the art and at least one other component. In another embodiment, the LNP formulation may contain PEG-DMG 2000, a cationic lipid known in the art, DSPC and cholesterol. As a non-limiting example, the LNP formulation may contain PEG-DMG 2000, DLin-DMA, DSPC and cholesterol. As another non-limiting example the LNP formulation may contain PEG-DMG 2000, DLin-DMA, DSPC and cholesterol in a molar ratio of 2:40:10:48 (see e.g., Geall et al., Nonviral delivery of self-amplifying RNA vaccines, PNAS 2012; PMID: 22908294; herein incorporated by reference in its entirety). As another non-limiting example, modified RNA described herein may be formulated in a nanoparticle to be delivered by a parenteral route as described in U.S. Pub. No. 20120207845; herein incorporated by reference in its entirety. In one embodiment, the LNP formulation may be formulated by the methods described in International Publication Nos. WO2011127255 or WO2008103276, each of which is herein incorporated by reference in their entirety. As a non-limiting example, modified RNA described herein may be encapsulated in LNP formulations as described in WO2011127255 and/or WO2008103276; each of which is herein incorporated by reference in their entirety. In one embodiment, LNP formulations described herein may comprise a polycationic composition. As a non-limiting example, the polycationic composition may be selected from formula 1-60 of US Patent Publication No. US20050222064; herein incorporated by reference in its entirety. In another embodiment, the LNP formulations comprising a polycationic composition may be used for the delivery of the modified RNA described herein in vivo and/or in vitro.

[0514] In one embodiment, the LNP formulations described herein may additionally comprise a permeability enhancer molecule. Non-limiting permeability enhancer molecules are described in US Patent Publication No. US20050222064; herein incorporated by reference in its entirety.

[0515] In one embodiment, the pharmaceutical compositions may be formulated in liposomes such as, but not limited to, DiLa2 liposomes (Marina Biotech, Bothell, WA), SMARTICLES® (Marina Biotech, Bothell, WA), neutral DOPC (1,2-dioleoyl-sn-glycero-3-phosphocholine) based liposomes (e.g., siRNA delivery for ovarian cancer (Landen et al. Cancer Biology & Therapy 2006 5(12)1708-1713); herein incorporated by reference in its entirety) and hyaluronan-coated liposomes (Quiet Therapeutics, Israel).

[0516] The nanoparticle formulations may be a carbohydrate nanoparticle comprising a carbohydrate carrier and a modified nucleic acid molecule (e.g., mmRNA). As a non-limiting example, the carbohydrate carrier may include, but is not limited to, an anhydride-modified phytoglycogen or glycogen-type material, phtoglycogen octenyl succinate, phytoglycogen beta-dextrin, anhydride-modified phytoglycogen beta-dextrin. (See e.g., International Publication No. WO2012109121; herein incorporated by reference in its entirety).

[0517] Lipid nanoparticle formulations may be improved by replacing the cationic lipid with a biodegradable cationic lipid which is known as a rapidly eliminated lipid nanoparticle (reLNP). Ionizable cationic lipids, such as, but not limited to, DLinDMA, DLin-KC2-DMA, and DLin-MC3-DMA, have been shown to accumulate in plasma and tissues over time and may be a potential source of toxicity. The rapid metabolism of the rapidly eliminated lipids can improve the tolerability and therapeutic index of the lipid nanoparticles by an order of magnitude from a 1 mg/kg dose to a 10 mg/kg dose in rat. Inclusion of an enzymatically degraded ester linkage can improve the degradation and metabolism profile of the cationic component, while still maintaining the activity of the reLNP formulation. The ester linkage can be internally located within the lipid chain or it may be terminally located at the terminal end of the lipid chain. The internal ester linkage may replace any carbon in the lipid chain.

[0518] In one embodiment, the internal ester linkage may be located on either side of the saturated carbon. Non-limiting examples of reLNPs include,

[chemical structure]

[0519] In one embodiment, an immune response may be elicited by delivering a lipid nanoparticle which may include a nanospecies, a polymer and an immunogen. (U.S. Publication No. 20120189700 and International Publication No. WO2012099805; each of which is herein incorporated by reference in their entirety). The polymer may encapsulate the nanospecies or partially encapsulate the nanospecies. The immunogen may be a recombinant protein, a modified RNA and/or a primary construct described herein. In one embodiment, the lipid nanoparticle may be formulated for use in a vaccine such as, but not limited to, against a pathogen.

[0520] Lipid nanoparticles may be engineered to alter the surface properties of particles so the lipid nanoparticles may penetrate the mucosal barrier. Mucus is located on mucosal tissue such as, but not limted to, oral (e.g., the buccal and esophageal membranes and tonsil tissue), ophthalmic, gastrointestinal (e.g., stomach, small intestine, large intestine, colon, rectum), nasal, respiratory (e.g., nasal, pharyngeal, tracheal and bronchial membranes), genital (e.g., vaginal, cervical and urethral membranes). Nanoparticles larger than 10-200 nm which are preferred for higher drug encapsulation efficiency and the ability to provide the sustained delivery of a wide array of drugs have been thought to be too large to rapidly diffuse through mucosal barriers. Mucus is continuously secreted, shed, discarded or digested and recycled so most of the trapped particles may be removed from the mucosla tissue within seconds or within a few hours. Large polymeric nanoparticles (200 nm-500 nm in diameter) which have been coated densely with a low molecular weight polyethylene glycol (PEG) diffused through mucus only 4 to 6-fold lower than the same particles diffusing in water (Lai et al. PNAS 2007 104(5):1482-487; Lai et al. Adv Drug Deliv Rev. 2009 61(2): 158-171; each of which is herein incorporated by reference in their entirety). The transport of nanoparticles may be determined using rates of permeation and/or fluorescent microscopy techniques including, but not limited to, fluorescence recovery after photobleaching (FRAP) and high resolution multiple particle tracking (MPT). As a non-limiting example, compositions which can penetrate a mucosal barrier may be made as described in U.S. Pat. No. 8,241,670, herein incorporated by reference in its entirety.

[0521] The lipid nanoparticle engineered to penetrate mucus may comprise a polymeric material (i.e. a polymeric core) and/or a polymer-vitamin conjugate and/or a tri-block co-polymer. The polymeric material may include, but is not limited to, polyamines, polyethers, polyamides, polyesters, polycarbamates, polyureas, polycarbonates, poly(styrenes), polyimides, polysulfones, polyurethanes, polyacetylenes, polyethylenes, polyethyeneimines, polyisocyanates, polyacrylates, polymethacrylates, polyacrylonitriles, and polyarylates. The polymeric material may be biodegradable and/or biocompatible. The polymeric material may additionally be irradiated. As a non-limiting example, the polymeric material may be gamma irradiated (See e.g., International App. No. WO201282165, herein incorporated by reference in its entirety). Non-limiting examples of specific polymers include poly(caprolactone) (PCL), ethylene vinyl acetate polymer (EVA), poly(lactic acid) (PLA), poly(L-lactic acid) (PLLA), poly(glycolic acid) (PGA), poly(lactic acid-co-glycolic acid) (PLGA), poly(L-lactic acid-co-glycolic acid) (PLLGA), poly(D,L-lactide) (PDLA), poly(L-lactide) (PLLA), poly(D,L-lactide-co-caprolactone), poly(D,L-lactide-co-caprolactone-co-glycolide), poly(D,L-lactide-co-PEO-co-D,L-lactide), poly(D,L-lactide-co-PPO-co-D,L-lactide), polyalkyl cyanoacralate, polyurethane, poly-L-lysine (PLL), hydroxypropyl methacrylate (HPMA), polyethyleneglycol, poly-L-glutamic acid, poly(hydroxy acids), polyanhydrides, polyorthoesters, poly(ester amides), polyamides, poly(ester ethers), polycarbonates, polyalkylenes such as polyethylene and polypropylene, polyalkylene glycols such as poly(ethylene glycol) (PEG), polyalkylene oxides (PEO), polyalkylene terephthalates such as poly(ethylene terephthalate), polyvinyl alcohols (PVA), polyvinyl ethers, polyvinyl esters such as poly(vinyl acetate), polyvinyl halides such as poly(vinyl chloride) (PVC), polyvinylpyrrolidone, polysiloxanes, polystyrene (PS), polyurethanes, derivatized celluloses such as alkyl celluloses, hydroxyalkyl celluloses, cellulose ethers, cellulose esters, nitro celluloses, hydroxypropylcellulose, carboxymethylcellulose, polymers of acrylic acids, such as poly(methyl(meth)acrylate) (PMMA), poly(ethyl(meth)acrylate), poly(butyl(meth)acrylate), poly(isobutyl(meth)acrylate), poly(hexyl(meth)acrylate), poly(isodecyl(meth)acrylate), poly(lauryl(meth)acrylate), poly(phenyl(meth)acrylate), poly(methyl acrylate), poly(isopropyl acrylate), poly(isobutyl acrylate), poly(octadecyl acrylate) and copolymers and mixtures thereof, polydioxanone and its copolymers, polyhydroxyalkanoates, polypropylene fumarate, polyoxymethylene, poloxamers, poly(ortho)esters, poly(butyric acid), poly(valeric acid), poly(lactide-co-caprolactone), and trimethylene carbonate, polyvinylpyrrolidone. The lipid nanoparticle may be coated or associated with a co-polymer such as, but not limited to, a block co-polymer (such as a branched polyether-polyamide block copolymer described in International Publication No. WO2013012476, herein incorporated by reference in its entirety), and (poly(ethylene glycol))-(poly(propylene oxide))-(poly(ethylene glycol)) triblock copolymer (see e.g., US Publication 20120121718 and US Publication 20100003337 and U.S. Pat. No. 8,263,665; each of which is herein incorporated by reference in their entirety). The co-polymer may be a polymer that is generally regarded as safe (GRAS) and the formation of the lipid nanoparticle may be in such a way that no new chemical entities are created. For example, the lipid nanoparticle may comprise poloxamers coating PLGA nanoparticles without forming new chemical entities which are still able to rapidly penetrate human mucus (Yang et al. Angew. Chem. Int. Ed. 2011 50:2597-2600; herein incorporated by reference in its entirety).

[0522] The vitamin of the polymer-vitamin conjugate may be vitamin E. The vitamin portion of the conjugate may be substituted with other suitable components such as, but not limited to, vitamin A, vitamin E, other vitamins, cholesterol, a hydrophobic moiety, or a hydrophobic component of other surfactants (e.g., sterol chains, fatty acids, hydrocarbon chains and alkylene oxide chains).

[0523] The lipid nanoparticle engineered to penetrate mucus may include surface altering agents such as, but not limited to, mmRNA, anionic proteins (e.g., bovine serum albumin), surfactants (e.g., cationic surfactants such as for example dimethyldioctadecyl-ammonium bromide), sugars or sugar derivatives (e.g., cyclodextrin), nucleic acids, polymers (e.g., heparin, polyethylene glycol and poloxamer), mucolytic agents (e.g., N-acetylcysteine, mugwort, bromelain, papain, clerodendrum, acetylcysteine, bromhexine, carbocisteine, eprazinone, mesna, ambroxol, sobrerol, domiodol, letosteine, stepronin, tiopronin, gelsolin, thymosin β4 dornase alfa, neltenexine, erdosteine) and various DNases including rhDNase. The surface altering agent may be embedded or enmeshed in the particle's surface or disposed (e.g., by coating, adsorption, covalent linkage, or other process) on the surface of the lipid nanoparticle. (see e.g., US Publication 20100215580 and US Publication 20080166414; each of which is herein incorporated by reference in their entirety).

[0524] The mucus penetrating lipid nanoparticles may comprise at least one mmRNA described herein. The mmRNA may be encapsulated in the lipid nanoparticle and/or disposed on the surface of the paricle. The mmRNA may be covalently coupled to the lipid nanoparticle. Formulations of mucus penetrating lipid nanoparticles may comprise a plurality of nanoparticles. Further, the formulations may contain particles which may interact with the mucus and alter the structural and/or adhesive properties of the surrounding mucus to decrease mucoadhesion which may increase the delivery of the mucus penetrating lipid nanoparticles to the mucosal tissue.

[0525] In one embodiment, the polynucleotide, primary construct, or mmRNA is formulated as a lipoplex, such as, without limitation, the ATUPLEX™ system, the DACC system, the DBTC system and other siRNA-lipoplex technology from Silence Therapeutics (London, United Kingdom), STEMFECT™ from STEMGENT® (Cambridge, MA), and polyethylenimine (PEI) or protamine-based targeted and non-targeted delivery of nucleic acids acids (Aleku et al. Cancer Res. 2008 68:9788-9798; Strumberg et al. Int J Clin Pharmacol Ther 2012 50:76-78; Santel et al., Gene Ther 2006 13:1222-1234; Santel et al., Gene Ther 2006 13:1360-1370; Gutbier et al., Pulm Pharmacol. Ther. 2010 23:334-344; Kaufmann et al. Microvasc Res 2010 80:286-293Weide et al. J Immunother. 2009 32:498-507; Weide et al. J Immunother. 2008 31:180-188; Pascolo Expert Opin. Biol. Ther. 4:1285-1294; Fotin-Mleczek et al., 2011 J. Immunother. 34:1-15; Song et al., Nature Biotechnol. 2005, 23:709-717; Peer et al., Proc Natl Acad Sci USA. 2007 6; 104:4095-4100; deFougerolles Hum Gene Ther. 2008 19:125-132; all of which are incorporated herein by reference in its entirety).

[0526] In one embodiment such formulations may also be constructed or compositions altered such that they passively or actively are directed to different cell types in vivo, including but not limited to hepatocytes, immune cells, tumor cells, endothelial cells, antigen presenting cells, and leukocytes (Akinc et al. Mol Ther. 2010 18:1357-1364; Song et al., Nat Biotechnol. 2005 23:709-717; Judge et al., J Clin Invest. 2009 119:661-673; Kaufmann et al., Microvasc Res 2010 80:286-293; Santel et al., Gene Ther 2006 13:1222-1234; Santel et al., Gene Ther 2006 13:1360-1370; Gutbier et al., Pulm Pharmacol. Ther. 2010 23:334-344; Basha et al., Mol. Ther. 2011 19:2186-2200; Fenske and Cullis, Expert Opin Drug Deliv. 2008 5:25-44; Peer et al., Science. 2008 319:627-630; Peer and Lieberman, Gene Ther. 2011 18:1127-1133; all of which are incorporated herein by reference in its entirety). One example of passive targeting of formulations to liver cells includes the DLin-DMA, DLin-KC2-DMA and DLin-MC3-DMA-based lipid nanoparticle formulations which have been shown to bind to apolipoprotein E and promote binding and uptake of these formulations into hepatocytes in vivo (Akinc et al. Mol Ther. 2010 18:1357-1364; herein incorporated by reference in its entirety). Formulations can also be selectively targeted through expression of different ligands on their surface as exemplified by, but not limited by, folate, transferrin, N-acetylgalactosamine (GalNAc), and antibody targeted approaches (Kolhatkar et al., Curr Drug Discov Technol. 2011 8:197-206; Musacchio and Torchilin, Front Biosci. 2011 16:1388-1412; Yu et al., Mol Membr Biol. 2010 27:286-298; Patil et al., Crit Rev Ther Drug Carrier Syst. 2008 25:1-61; Benoit et al., Biomacromolecules. 2011 12:2708-2714; Zhao et al., Expert Opin Drug Deliv. 2008 5:309-319; Akinc et al., Mol Ther. 2010 18:1357-1364; Srinivasan et al., Methods Mol Biol. 2012 820:105-116; Ben-Arie et al., Methods Mol Biol. 2012 757:497-507; Peer 2010 J Control Release. 20:63-68; Peer et al., Proc Natl Acad Sci USA. 2007 104:4095-4100; Kim et al., Methods Mol Biol. 2011 721:339-353; Subramanya et al., Mol Ther. 2010 18:2028-2037; Song et al., Nat Biotechnol. 2005 23:709-717; Peer et al., Science. 2008 319:627-630; Peer and Lieberman, Gene Ther. 2011 18:1127-1133; all of which are incorporated herein by reference in its entirety).

[0527] In one embodiment, the polynucleotide, primary construct, or mmRNA is formulated as a solid lipid nanoparticle. A solid lipid nanoparticle (SLN) may be spherical with an average diameter between 10 to 1000 nm. SLN possess a solid lipid core matrix that can solubilize lipophilic molecules and may be stabilized with surfactants and/or emulsifiers. In a further embodiment, the lipid nanoparticle may be a self-assembly lipid-polymer nanoparticle (see Zhang et al., ACS Nano, 2008, 2 (8), pp 1696-1702; herein incorporated by reference in its entirety).

[0528] Liposomes, lipoplexes, or lipid nanoparticles may be used to improve the efficacy of polynucleotide, primary construct, or mmRNA directed protein production as these formulations may be able to increase cell transfection by the polynucleotide, primary construct, or mmRNA; and/or increase the translation of encoded protein. One such example involves the use of lipid encapsulation to enable the effective systemic delivery of polyplex plasmid DNA (Heyes et al., Mol Ther. 2007 15:713-720; herein incorporated by reference in its entirety). The liposomes, lipoplexes, or lipid nanoparticles may also be used to increase the stability of the polynucleotide, primary construct, or mmRNA.

[0529] In one embodiment, the polynucleotides, primary constructs, and/or the mmRNA of the present invention can be formulated for controlled release and/or targeted delivery. As used herein, “controlled release” refers to a pharmaceutical composition or compound release profile that conforms to a particular pattern of release to effect a therapeutic outcome. In one embodiment, the polynucleotides, primary constructs or the mmRNA may be encapsulated into a delivery agent described herein and/or known in the art for controlled release and/or targeted delivery. As used herein, the term “encapsulate” means to enclose, surround or encase. As it relates to the formulation of the compounds of the invention, encapsulation may be substantial, complete or partial. The term “substitantially encapsulated” means that at least greater than 50, 60, 70, 80, 85, 90, 95, 96, 97, 98, 99, 99.9, 99.9 or greater than 99.999% of the pharmaceutical composition or compound of the invention may be enclosed, surrounded or encased within the delivery agent. “Partially encapsulation” means that less than 10, 10, 20, 30, 40 50 or less of the pharmaceutical composition or compound of the invention may be enclosed, surrounded or encased within the delivery agent. Advantageously, encapsulation may be determined by measuring the escape or the activity of the pharmaceutical composition or compound of the invention using fluorescence and/or electron micrograph. For example, at least 1, 5, 10, 20, 30, 40, 50, 60, 70, 80, 85, 90, 95, 96, 97, 98, 99, 99.9, 99.99 or greater than 99.99% of the pharmaceutical composition or compound of the invention are encapsulated in the delivery agent.

[0530] In one embodiment, the controlled release formulation may include, but is not limited to, tri-block co-polymers. As a non-limiting example, the formulation may include two different types of tri-block co-polymers (International Pub. No. WO2012131104 and WO2012131106; each of which is herein incorporated by reference in its entirety).

[0531] In another embodiment, the polynucleotides, primary constructs, or the mmRNA may be encapsulated into a lipid nanoparticle or a rapidly eliminated lipid nanoparticle and the lipid nanoparticles or a rapidly eliminated lipid nanoparticle may then be encapsulated into a polymer, hydrogel and/or surgical sealant described herein and/or known in the art. As a non-limiting example, the polymer, hydrogel or surgical sealant may be PLGA, ethylene vinyl acetate (EVAc), poloxamer, GELSITE® (Nanotherapeutics, Inc. Alachua, FL), HYLENEX® (Halozyme Therapeutics, San Diego CA), surgical sealants such as fibrinogen polymers (Ethicon Inc. Cornelia, GA), TISSELL® (Baxter International, Inc Deerfield, IL), PEG-based sealants, and COSEAL® (Baxter International, Inc Deerfield, IL).

[0532] In another embodiment, the lipid nanoparticle may be encapsulated into any polymer known in the art which may form a gel when injected into a subject. As another non-limiting example, the lipid nanoparticle may be encapsulated into a polymer matrix which may be biodegradable.

[0533] In one embodiment, the polynucleotide, primary construct, or mmRNA formulation for controlled release and/or targeted delivery may also include at least one controlled release coating. Controlled release coatings include, but are not limited to, OPADRY®, polyvinylpyrrolidone/vinyl acetate copolymer, polyvinylpyrrolidone, hydroxypropyl methylcellulose, hydroxypropyl cellulose, hydroxyethyl cellulose, EUDRAGIT RL®, EUDRAGIT RS® and cellulose derivatives such as ethylcellulose aqueous dispersions (AQUACOAT® and SURELEASE®).

[0534] In one embodiment, the controlled release and/or targeted delivery formulation may comprise at least one degradable polyester which may contain polycationic side chains. Degradeable polyesters include, but are not limited to, poly(serine ester), poly(L-lactide-co-L-lysine), poly(4-hydroxy-L-proline ester), and combinations thereof. In another embodiment, the degradable polyesters may include a PEG conjugation to form a PEGylated polymer.

[0535] In one embodiment, the polynucleotides, primary constructs, and/or the mmRNA of the present invention may be encapsulated in a therapeutic nanoparticle. Therapeutic nanoparticles may be formulated by methods described herein and known in the art such as, but not limited to, International Pub Nos. WO2010005740, WO2010030763, WO2010005721, WO2010005723, WO2012054923, US Pub. Nos. US20110262491, US20100104645, US20100087337, US20100068285, US20110274759, US20100068286 and US20120288541 and U.S. Pat. Nos. 8,206,747, 8,293,276, 8,318,208 and 8,318,211 each of which is herein incorporated by reference in their entirety. In another embodiment, therapeutic polymer nanoparticles may be identified by the methods described in US Pub No. US20120140790, herein incorporated by reference in its entirety.

[0536] In one embodiment, the therapeutic nanoparticle may be formulated for sustained release. As used herein, “sustained release” refers to a pharmaceutical composition or compound that conforms to a release rate over a specific period of time. The period of time may include, but is not limited to, hours, days, weeks, months and years. As a non-limiting example, the sustained release nanoparticle may comprise a polymer and a therapeutic agent such as, but not limited to, the polynucleotides, primary constructs, and mmRNA of the present invention (see International Pub No. 2010075072 and US Pub No. US20100216804, US20110217377 and US20120201859, each of which is herein incorporated by reference in their entirety).

[0537] In one embodiment, the therapeutic nanoparticles may be formulated to be target specific. As a non-limiting example, the thereapeutic nanoparticles may include a corticosteroid (see International Pub. No. WO2011084518; herein incorporated by reference in its entirety). In one embodiment, the therapeutic nanoparticles may be formulated to be cancer specific. As a non-limiting example, the therapeutic nanoparticles may be formulated in nanoparticles described in International Pub No. WO2008121949, WO2010005726, WO2010005725, WO2011084521 and US Pub No. US20100069426, US20120004293 and US20100104655, each of which is herein incorporated by reference in their entirety.

[0538] In one embodiment, the nanoparticles of the present invention may comprise a polymeric matrix. As a non-limiting example, the nanoparticle may comprise two or more polymers such as, but not limited to, polyethylenes, polycarbonates, polyanhydrides, polyhydroxyacids, polypropylfumerates, polycaprolactones, polyamides, polyacetals, polyethers, polyesters, poly(orthoesters), polycyanoacrylates, polyvinyl alcohols, polyurethanes, polyphosphazenes, polyacrylates, polymethacrylates, polycyanoacrylates, polyureas, polystyrenes, polyamines, polylysine, poly(ethylene imine), poly(serine ester), poly(L-lactide-co-L-lysine), poly(4-hydroxy-L-proline ester) or combinations thereof.

[0539] In one embodiment, the therapeutic nanoparticle comprises a diblock copolymer. In one embodiment, the diblock copolymer may include PEG in combination with a polymer such as, but not limited to, polyethylenes, polycarbonates, polyanhydrides, polyhydroxyacids, polypropylfumerates, polycaprolactones, polyamides, polyacetals, polyethers, polyesters, poly(orthoesters), polycyanoacrylates, polyvinyl alcohols, polyurethanes, polyphosphazenes, polyacrylates, polymethacrylates, polycyanoacrylates, polyureas, polystyrenes, polyamines, polylysine, poly(ethylene imine), poly(serine ester), poly(L-lactide-co-L-lysine), poly(4-hydroxy-L-proline ester) or combinations thereof.

[0540] As a non-limiting example the therapeutic nanoparticle comprises a PLGA-PEG block copolymer (see US Pub. No. US20120004293 and U.S. Pat. No. 8,236,330, each of which is herein incorporated by reference in their entirety). In another non-limiting example, the therapeutic nanoparticle is a stealth nanoparticle comprising a diblock copolymer of PEG and PLA or PEG and PLGA (see U.S. Pat. No. 8,246,968 and International Publication No. WO2012166923, each of which is herein incorporated by reference in its entirety).

[0541] In one embodiment, the therapeutic nanoparticle may comprise a multiblock copolymer (See e.g., U.S. Pat. Nos. 8,263,665 and 8,287,910; each of which is herein incorporated by reference in its entirety).

[0542] In one embodiment, the block copolymers described herein may be included in a polyion complex comprising a non-polymeric micelle and the block copolymer. (See e.g., U.S. Pub. No. 20120076836; herein incorporated by reference in its entirety).

[0543] In one embodiment, the therapeutic nanoparticle may comprise at least one acrylic polymer. Acrylic polymers include but are not limited to, acrylic acid, methacrylic acid, acrylic acid and methacrylic acid copolymers, methyl methacrylate copolymers, ethoxyethyl methacrylates, cyanoethyl methacrylate, amino alkyl methacrylate copolymer, poly(acrylic acid), poly(methacrylic acid), polycyanoacrylates and combinations thereof.

[0544] In one embodiment, the therapeutic nanoparticles may comprise at least one cationic polymer described herein and/or known in the art.

[0545] In one embodiment, the therapeutic nanoparticles may comprise at least one amine-containing polymer such as, but not limited to polylysine, polyethylene imine, poly(amidoamine) dendrimers, poly(beta-amino esters) (See e.g., U.S. Pat. No. 8,287,849; herein incorporated by reference in its entirety) and combinations thereof.

[0546] In one embodiment, the therapeutic nanoparticles may comprise at least one degradable polyester which may contain polycationic side chains. Degradeable polyesters include, but are not limited to, poly(serine ester), poly(L-lactide-co-L-lysine), poly(4-hydroxy-L-proline ester), and combinations thereof. In another embodiment, the degradable polyesters may include a PEG conjugation to form a PEGylated polymer.

[0547] In another embodiment, the therapeutic nanoparticle may include a conjugation of at least one targeting ligand. The targeting ligand may be any ligand known in the art such as, but not limited to, a monoclonal antibody. (Kirpotin et al, Cancer Res. 2006 66:6732-6740; herein incorporated by reference in its entirety).

[0548] In one embodiment, the therapeutic nanoparticle may be formulated in an aqueous solution which may be used to target cancer (see International Pub No. WO2011084513 and US Pub No. US20110294717, each of which is herein incorporated by reference in their entirety).

[0549] In one embodiment, the polynucleotides, primary constructs, or mmRNA may be encapsulated in, linked to and/or associated with synthetic nanocarriers. Synthetic nanocarriers include, but are not limited to, those described in International Pub. Nos. WO2010005740, WO2010030763, WO201213501, WO2012149252, WO2012149255, WO2012149259, WO2012149265, WO2012149268, WO2012149282, WO2012149301, WO2012149393, WO2012149405, WO2012149411, WO2012149454 and WO2013019669, and US Pub. Nos. US20110262491, US20100104645, US20100087337 and US20120244222, each of which is herein incorporated by reference in their entirety. The synthetic nanocarriers may be formulated using methods known in the art and/or described herein. As a non-limiting example, the synthetic nanocarriers may be formulated by the methods described in International Pub Nos. WO2010005740, WO2010030763 and WO201213501 and US Pub. Nos. US20110262491, US20100104645, US20100087337 and US2012024422, each of which is herein incorporated by reference in their entirety. In another embodiment, the synthetic nanocarrier formulations may be lyophilized by methods described in International Pub. No. WO2011072218 and U.S. Pat. No. 8,211,473; each of which is herein incorporated by reference in their entirety.

[0550] In one embodiment, the synthetic nanocarriers may contain reactive groups to release the polynucleotides, primary constructs and/or mmRNA described herein (see International Pub. No. WO20120952552 and US Pub No. US20120171229, each of which is herein incorporated by reference in their entirety).

[0551] In one embodiment, the synthetic nanocarriers may contain an immunostimulatory agent to enhance the immune response from delivery of the synthetic nanocarrier. As a non-limiting example, the synthetic nanocarrier may comprise a Th1 immunostimulatory agent which may enhance a Th1-based response of the immune system (see International Pub No. WO2010123569 and US Pub. No. US20110223201, each of which is herein incorporated by reference in its entirety).

[0552] In one embodiment, the synthetic nanocarriers may be formulated for targeted release. In one embodiment, the synthetic nanocarrier is formulated to release the polynucleotides, primary constructs and/or mmRNA at a specified pH and/or after a desired time interval. As a non-limiting example, the synthetic nanoparticle may be formulated to release the polynucleotides, primary constructs and/or mmRNA after 24 hours and/or at a pH of 4.5 (see International Pub. Nos. WO2010138193 and WO2010138194 and US Pub Nos. US20110020388 and US20110027217, each of which is herein incorporated by reference in their entireties).

[0553] In one embodiment, the synthetic nanocarriers may be formulated for controlled and/or sustained release of the polynucleotides, primary constructs and/or mmRNA described herein. As a non-limiting example, the synthetic nanocarriers for sustained release may be formulated by methods known in the art, described herein and/or as described in International Pub No. WO2010138192 and US Pub No. 20100303850, each of which is herein incorporated by reference in their entirety.

[0554] In one embodiment, the synthetic nanocarrier may be formulated for use as a vaccine. In one embodiment, the synthetic nanocarrier may encapsulate at least one polynucleotide, primary construct and/or mmRNA which encode at least one antigen. As a non-limiting example, the synthetic nanocarrier may include at least one antigen and an excipient for a vaccine dosage form (see International Pub No. WO2011150264 and US Pub No. US20110293723, each of which is herein incorporated by reference in their entirety). As another non-limiting example, a vaccine dosage form may include at least two synthetic nanocarriers with the same or different antigens and an excipient (see International Pub No. WO2011150249 and US Pub No. US20110293701, each of which is herein incorporated by reference in their entirety). The vaccine dosage form may be selected by methods described herein, known in the art and/or described in International Pub No. WO2011150258 and US Pub No. US20120027806, each of which is herein incorporated by reference in their entirety).

[0555] In one embodiment, the synthetic nanocarrier may comprise at least one polynucleotide, primary construct and/or mmRNA which encodes at least one adjuvant. As non-limiting example, the adjuvant may comprise dimethyldioctadecylammonium-bromide, dimethyldioctadecylammonium-chloride, dimethyldioctadecylammonium-phosphate or dimethyldioctadecylammonium-acetate (DDA) and an apolar fraction or part of said apolar fraction of a total lipid extract of a mycobacterium (See e.g, U.S. Pat. No. 8,241,610; herein incorporated by reference in its entirety). In another embodiment, the synthetic nanocarrier may comprise at least one polynucleotide, primary construct and/or mmRNA and an adjuvant. As a non-limiting example, the synthetic nanocarrier comprising and adjuvant may be formulated by the methods described in International Pub No. WO2011150240 and US Pub No. US20110293700, each of which is herein incorporated by reference in its entirety.

[0556] In one embodiment, the synthetic nanocarrier may encapsulate at least one polynucleotide, primary construct and/or mmRNA which encodes a peptide, fragment or region from a virus. As a non-limiting example, the synthetic nanocarrier may include, but is not limited to, the nanocarriers described in International Pub No. WO2012024621, WO201202629, WO2012024632 and US Pub No. US20120064110, US20120058153 and US20120058154, each of which is herein incorporated by reference in their entirety.

[0557] In one embodiment, the synthetic nanocarrier may be coupled to a polynucleotide, primary construct or mmRNA which may be able to trigger a humoral and/or cytotoxic T lymphocyte (CTL) response (See e.g., International Publication No. WO2013019669, herein incorporated by reference in its entirety).

[0558] In one embodiment, the nanoparticle may be optimized for oral administration. The nanoparticle may comprise at least one cationic biopolymer such as, but not limited to, chitosan or a derivative thereof. As a non-limiting example, the nanoparticle may be formulated by the methods described in U.S. Pub. No. 20120282343; herein incorporated by reference in its entirety.

### Polymers, Biodegradable Nanoparticles, and Core-Shell Nanoparticles

[0559] The polynucleotide, primary construct, and mmRNA of the invention can be formulated using natural and/or synthetic polymers. Non-limiting examples of polymers which may be used for delivery include, but are not limited to, DYNAMIC POLYCONJUGATE® (Arrowhead Reasearch Corp., Pasadena, CA) formulations from MIRUS® Bio (Madison, WI) and Roche Madison (Madison, WI), PHASERX™ polymer formulations such as, without limitation, SMARTT POLYMER TECHNOLOGY™ (PHASERX®, Seattle, WA), DMRI/DOPE, poloxamer, VAXFECTIN® adjuvant from Vical (San Diego, CA), chitosan, cyclodextrin from Calando Pharmaceuticals (Pasadena, CA), dendrimers and poly(lactic-co-glycolic acid) (PLGA) polymers. RONDEL™ (RNAi/Oligonucleotide Nanoparticle Delivery) polymers (Arrowhead Research Corporation, Pasadena, CA) and pH responsive co-block polymers such as, but not limited to, PHASERX® (Seattle, WA).

[0560] A non-limiting example of chitosan formulation includes a core of positively charged chitosan and an outer portion of negatively charged substrate (U.S. Pub. No. 20120258176; herein incorporated by reference in its entirety). Chitosan includes, but is not limited to N-trimethyl chitosan, mono-N-carboxymethyl chitosan (MCC), N-palmitoyl chitosan (NPCS), EDTA-chitosan, low molecular weight chitosan, chitosan derivatives, or combinations thereof.

[0561] In one embodiment, the polymers used in the present invention have undergone processing to reduce and/or inhibit the attachment of unwanted substances such as, but not limited to, bacteria, to the surface of the polymer. The polymer may be processed by methods known and/or described in the art and/or described in International Pub. No. WO2012150467, herein incorporated by reference in its entirety.

[0562] A non-limiting example of PLGA formulations include, but are not limited to, PLGA injectable depots (e.g., ELIGARD® which is formed by dissolving PLGA in 66% N-methyl-2-pyrrolidone (NMP) and the remainder being aqueous solvent and leuprolide. Once injected, the PLGA and leuprolide peptide precipitates into the subcutaneous space).

[0563] Many of these polymer approaches have demonstrated efficacy in delivering oligonucleotides in vivo into the cell cytoplasm (reviewed in deFougerolles Hum Gene Ther. 2008 19:125-132; herein incorporated by reference in its entirety). Two polymer approaches that have yielded robust in vivo delivery of nucleic acids, in this case with small interfering RNA (siRNA), are dynamic polyconjugates and cyclodextrin-based nanoparticles. The first of these delivery approaches uses dynamic polyconjugates and has been shown in vivo in mice to effectively deliver siRNA and silence endogenous target mRNA in hepatocytes (Rozema et al., Proc Natl Acad Sci USA. 2007 104:12982-12887; herein incorporated by reference in its entirety). This particular approach is a multicomponent polymer system whose key features include a membrane-active polymer to which nucleic acid, in this case siRNA, is covalently coupled via a disulfide bond and where both PEG (for charge masking) and N-acetylgalactosamine (for hepatocyte targeting) groups are linked via pH-sensitive bonds (Rozema et al., Proc Natl Acad Sci USA. 2007 104:12982-12887; herein incorporated by reference in its entirety). On binding to the hepatocyte and entry into the endosome, the polymer complex disassembles in the low-pH environment, with the polymer exposing its positive charge, leading to endosomal escape and cytoplasmic release of the siRNA from the polymer. Through replacement of the N-acetylgalactosamine group with a mannose group, it was shown one could alter targeting from asialoglycoprotein receptor-expressing hepatocytes to sinusoidal endothelium and Kupffer cells. Another polymer approach involves using transferrin-targeted cyclodextrin-containing polycation nanoparticles. These nanoparticles have demonstrated targeted silencing of the EWS-FLI1 gene product in transferrin receptor-expressing Ewing's sarcoma tumor cells (Hu-Lieskovan et al., Cancer Res. 2005 65: 8984-8982; herein incorporated by reference in its entirety) and siRNA formulated in these nanoparticles was well tolerated in non-human primates (Heidel et al., Proc Natl Acad Sci USA 2007 104:5715-21; herein incorporated by reference in its entirety). Both of these delivery strategies incorporate rational approaches using both targeted delivery and endosomal escape mechanisms.

[0564] The polymer formulation can permit the sustained or delayed release of polynucleotide, primary construct, or mmRNA (e.g., following intramuscular or subcutaneous injection). The altered release profile for the polynucleotide, primary construct, or mmRNA can result in, for example, translation of an encoded protein over an extended period of time. The polymer formulation may also be used to increase the stability of the polynucleotide, primary construct, or mmRNA. Biodegradable polymers have been previously used to protect nucleic acids other than mmRNA from degradation and been shown to result in sustained release of payloads in vivo (Rozema et al., Proc Natl Acad Sci USA. 2007 104:12982-12887; Sullivan et al., Expert Opin Drug Deliv. 2010 7:1433-1446; Convertine et al., Biomacromolecules. 2010 Oct. 1; Chu et al., Acc Chem Res. 2012 Jan. 13; Manganiello et al., Biomaterials. 2012 33:2301-2309; Benoit et al., Biomacromolecules. 2011 12:2708-2714; Singha et al., Nucleic Acid Ther. 2011 2:133-147; deFougerolles Hum Gene Ther. 2008 19:125-132; Schaffert and Wagner, Gene Ther. 2008 16:1131-1138; Chaturvedi et al., Expert Opin Drug Deliv. 2011 8:1455-1468; Davis, Mol Pharm. 2009 6:659-668; Davis, Nature 2010 464:1067-1070; each of which is herein incorporated by reference in its entirety).

[0565] In one embodiment, the pharmaceutical compositions may be sustained release formulations. In a further embodiment, the sustained release formulations may be for subcutaneous delivery. Sustained release formulations may include, but are not limited to, PLGA microspheres, ethylene vinyl acetate (EVAc), poloxamer, GELSITE® (Nanotherapeutics, Inc. Alachua, FL), HYLENEX® (Halozyme Therapeutics, San Diego CA), surgical sealants such as fibrinogen polymers (Ethicon Inc. Cornelia, GA), TISSELL® (Baxter International, Inc Deerfield, TL), PEG-based sealants, and COSEAL® (Baxter International, Inc Deerfield, TL).

[0566] As a non-limiting example modified mRNA may be formulated in PLGA microspheres by preparing the PLGA microspheres with tunable release rates (e.g., days and weeks) and encapsulating the modified mRNA in the PLGA microspheres while maintaining the integrity of the modified mRNA during the encapsulation process. EVAc are non-biodegradeable, biocompatible polymers which are used extensively in pre-clinical sustained release implant applications (e.g., extended release products Ocusert a pilocarpine ophthalmic insert for glaucoma or progestasert a sustained release progesterone intrauterine deivce; transdermal delivery systems Testoderm, Duragesic and Selegiline; catheters). Poloxamer F-407 NF is a hydrophilic, non-ionic surfactant triblock copolymer of polyoxyethylene-polyoxypropylene-polyoxyethylene having a low viscosity at temperatures less than 5° C. and forms a solid gel at temperatures greater than 15° C. PEG-based surgical sealants comprise two synthetic PEG components mixed in a delivery device which can be prepared in one minute, seals in 3 minutes and is reabsorbed within 30 days. GELSITE® and natural polymers are capable of in-situ gelation at the site of administration. They have been shown to interact with protein and peptide therapeutic candidates through ionic ineraction to provide a stabilizing effect.

[0567] Polymer formulations can also be selectively targeted through expression of different ligands as exemplified by, but not limited by, folate, transferrin, and N-acetylgalactosamine (GalNAc) (Benoit et al., Biomacromolecules. 2011 12:2708-2714; Rozema et al., Proc Natl Acad Sci USA. 2007 104:12982-12887; Davis, Mol Pharm. 2009 6:659-668; Davis, Nature 2010 464:1067-1070; each of which is herein incorporated by reference in its entirety).

[0568] The modified nucleic acid, and mmRNA of the invention may be formulated with or in a polymeric compound. The polymer may include at least one polymer such as, but not limited to, polyethenes, polyethylene glycol (PEG), poly(l-lysine)(PLL), PEG grafted to PLL, cationic lipopolymer, biodegradable cationic lipopolymer, polyethyleneimine (PEI), cross-linked branched poly(alkylene imines), a polyamine derivative, a modified poloxamer, a biodegradable polymer, elastic biodegradable polymer, biodegradable block copolymer, biodegradable random copolymer, biodegradable polyester copolymer, biodegradable polyester block copolymer, biodegradable polyester block random copolymer, multiblock copolymers, linear biodegradable copolymer, poly[α-(4-aminobutyl)-L-glycolic acid) (PAGA), biodegradable cross-linked cationic multi-block copolymers, polycarbonates, polyanhydrides, polyhydroxyacids, polypropylfumerates, polycaprolactones, polyamides, polyacetals, polyethers, polyesters, poly(orthoesters), polycyanoacrylates, polyvinyl alcohols, polyurethanes, polyphosphazenes, polyacrylates, polymethacrylates, polycyanoacrylates, polyureas, polystyrenes, polyamines, polylysine, poly(ethylene imine), poly(serine ester), poly(L-lactide-co-L-lysine), poly(4-hydroxy-L-proline ester), acrylic polymers, amine-containing polymers, dextran polymers, dextran polymer derivatives or combinations thereof.

[0569] As a non-limiting example, the modified nucleic acid or mmRNA of the invention may be formulated with the polymeric compound of PEG grafted with PLL as described in U.S. Pat. No. 6,177,274; herein incorporated by reference in its entirety. The formulation may be used for transfecting cells in vitro or for in vivo delivery of the modified nucleic acid and mmRNA. In another example, the modified nucleic acid and mmRNA may be suspended in a solution or medium with a cationic polymer, in a dry pharmaceutical composition or in a solution that is capable of being dried as described in U.S. Pub. Nos. 20090042829 and 20090042825; each of which are herein incorporated by reference in their entireties.

[0570] As another non-limiting example the polynucleotides, primary constructs or mmRNA of the invention may be formulated with a PLGA-PEG block copolymer (see US Pub. No. US20120004293 and U.S. Pat. No. 8,236,330, herein incorporated by reference in their entireties) or PLGA-PEG-PLGA block copolymers (See U.S. Pat. No. 6,004,573, herein incorporated by reference in its entirety). As a non-limiting example, the polynucleotides, primary constructs or mmRNA of the invention may be formulated with a diblock copolymer of PEG and PLA or PEG and PLGA (see U.S. Pat. No. 8,246,968, herein incorporated by reference in its entirety).

[0571] A polyamine derivative may be used to deliver nucleic acids or to treat and/or prevent a disease or to be included in an implantable or injectable device (U.S. Pub. No. 20100260817 herein incorporated by reference in its entirety). As a non-limiting example, a pharmaceutical composition may include the modified nucleic acids and mmRNA and the polyamine derivative described in U.S. Pub. No. 20100260817 (the contents of which are incorporated herein by reference in its entirety. As a non-limiting example the polynucleotides, primary constructs and mmRNA of the present invention may be delivered using a polyaminde polymer such as, but not limited to, a polymer comprising a 1,3-dipolar addition polymer prepared by combining a carbohydrate diazide monomer with a dilkyne unite comprising oligoamines (U.S. Pat. No. 8,236,280; herein incorporated by reference in its entirety).

[0572] In one embodiment, the polynucleotides, primary constructs or mmRNA of the present invention may be formulated with at least one polymer and/or derivatives thereof described in International Publication Nos. WO2011115862, WO2012082574 and WO2012068187 and U.S. Pub. No. 20120283427, each of which are herein incorporated by reference in their entireties. In another embodiment, the modified nucleic acid or mmRNA of the present invention may be formulated with a polymer of formula Z as described in WO2011115862, herein incorporated by reference in its entirety. In yet another embodiment, the modified nucleic acid or mmRNA may be formulated with a polymer of formula Z, Z′ or Z″ as described in International Pub. Nos. WO2012082574 or WO2012068187 and U.S. Pub. No. 2012028342, each of which are herein incorporated by reference in their entireties. The polymers formulated with the modified RNA of the present invention may be synthesized by the methods described in International Pub. Nos. WO2012082574 or WO2012068187, each of which are herein incorporated by reference in their entireties.

[0573] The polynucleotides, primary constructs or mmRNA of the invention may be formulated with at least one acrylic polymer. Acrylic polymers include but are not limited to, acrylic acid, methacrylic acid, acrylic acid and methacrylic acid copolymers, methyl methacrylate copolymers, ethoxyethyl methacrylates, cyanoethyl methacrylate, amino alkyl methacrylate copolymer, poly(acrylic acid), poly(methacrylic acid), polycyanoacrylates and combinations thereof.

[0574] Formulations of polynucleotides, primary constructs or mmRNA of the invention may include at least one amine-containing polymer such as, but not limited to polylysine, polyethylene imine, poly(amidoamine) dendrimers or combinations thereof.

[0575] For example, the modified nucleic acid or mmRNA of the invention may be formulated in a pharmaceutical compound including a poly(alkylene imine), a biodegradable cationic lipopolymer, a biodegradable block copolymer, a biodegradable polymer, or a biodegradable random copolymer, a biodegradable polyester block copolymer, a biodegradable polyester polymer, a biodegradable polyester random copolymer, a linear biodegradable copolymer, PAGA, a biodegradable cross-linked cationic multi-block copolymer or combinations thereof. The biodegradable cationic lipopolymer may be made by methods known in the art and/or described in U.S. Pat. No. 6,696,038, U.S. App. Nos. 20030073619 and 20040142474 each of which is herein incorporated by reference in their entireties. The poly(alkylene imine) may be made using methods known in the art and/or as described in U.S. Pub. No. 20100004315, herein incorporated by reference in its entirety. The biodegradabale polymer, biodegradable block copolymer, the biodegradable random copolymer, biodegradable polyester block copolymer, biodegradable polyester polymer, or biodegradable polyester random copolymer may be made using methods known in the art and/or as described in U.S. Pat. Nos. 6,517,869 and 6,267,987, the contents of which are each incorporated herein by reference in their entirety. The linear biodegradable copolymer may be made using methods known in the art and/or as described in U.S. Pat. No. 6,652,886. The PAGA polymer may be made using methods known in the art and/or as described in U.S. Pat. No. 6,217,912 herein incorporated by reference in its entirety. The PAGA polymer may be copolymerized to form a copolymer or block copolymer with polymers such as but not limited to, poly-L-lysine, polyargine, polyornithine, histones, avidin, protamines, polylactides and poly(lactide-co-glycolides). The biodegradable cross-linked cationic multi-block copolymers may be made my methods known in the art and/or as described in U.S. Pat. No. 8,057,821 or U.S. Pub. No. 2012009145 each of which are herein incorporated by reference in their entireties. For example, the multi-block copolymers may be synthesized using linear polyethyleneimine (LPEI) blocks which have distinct patterns as compared to branched polyethyleneimines. Further, the composition or pharmaceutical composition may be made by the methods known in the art, described herein, or as described in U.S. Pub. No. 20100004315 or U.S. Pat. Nos. 6,267,987 and 6,217,912 each of which are herein incorporated by reference in their entireties.

[0576] The polynucleotides, primary constructs, and mmRNA of the invention may be formulated with at least one degradable polyester which may contain polycationic side chains. Degradeable polyesters include, but are not limited to, poly(serine ester), poly(L-lactide-co-L-lysine), poly(4-hydroxy-L-proline ester), and combinations thereof. In another embodiment, the degradable polyesters may include a PEG conjugation to form a PEGylated polymer.

[0577] The polynucleotides, primary construct, mmRNA of the invention may be formulated with at least one crosslinkable polyester. Crosslinkable polyesters include those known in the art and described in US Pub. No. 20120269761, herein incorporated by reference in its entirety.

[0578] In one embodiment, the polymers described herein may be conjugated to a lipid-terminating PEG. As a non-limiting example, PLGA may be conjugated to a lipid-terminating PEG forming PLGA-DSPE-PEG. As another non-limiting example, PEG conjugates for use with the present invention are described in International Publication No. WO2008103276, herein incorporated by reference in its entirety. The polymers may be conjugated using a ligand conjugate such as, but not limited to, the conjugates described in U.S. Pat. No. 8,273,363, herein incorporated by reference in its entirety.

[0579] In one embodiment, the modified RNA described herein may be conjugated with another compound. Non-limiting examples of conjugates are described in U.S. Pat. Nos. 7,964,578 and 7,833,992, each of which are herein incorporated by reference in their entireties. In another embodiment, modified RNA of the present invention may be conjugated with conjugates of formula 1-122 as described in U.S. Pat. Nos. 7,964,578 and 7,833,992, each of which are herein incorporated by reference in their entireties. The polynucleotides, primary constructs and/or mmRNA described herein may be conjugated with a metal such as, but not limited to, gold. (See e.g., Giljohann et al. Journ. Amer. Chem. Soc. 2009 131(6): 2072-2073; herein incorporated by reference in its entirety). In another embodiment, the polynucleotides, primary constructs and/or mmRNA described herein may be conjugated and/or encapsulated in gold-nanoparticles. (Interantional Pub. No. WO201216269 and U.S. Pub. No. 20120302940; each of which is herein incorporated by reference in its entirety).

[0580] As described in U.S. Pub. No. 20100004313, herein incorporated by reference in its entirety, a gene delivery composition may include a nucleotide sequence and a poloxamer. For example, the modified nucleic acid and mmRNA of the present invention may be used in a gene delivery composition with the poloxamer described in U.S. Pub. No. 20100004313.

[0581] In one embodiment, the polymer formulation of the present invention may be stabilized by contacting the polymer formulation, which may include a cationic carrier, with a cationic lipopolymer which may be covalently linked to cholesterol and polyethylene glycol groups. The polymer formulation may be contacted with a cationic lipopolymer using the methods described in U.S. Pub. No. 20090042829 herein incorporated by reference in its entirety. The cationic carrier may include, but is not limited to, polyethylenimine, poly(trimethylenimine), poly(tetramethylenimine), polypropylenimine, aminoglycoside-polyamine, dideoxy-diamino-b-cyclodextrin, spermine, spermidine, poly(2-dimethylamino)ethyl methacrylate, poly(lysine), poly(histidine), poly(arginine), cationized gelatin, dendrimers, chitosan, 1,2-Dioleoyl-3-Trimethylammonium-Propane(DOTAP), N-[1-(2,3-dioleoyloxy)propyl]-N,N,N-trimethylammonium chloride (DOTMA), 1-[2-(oleoyloxy)ethyl]-2-oleyl-3-(2-hydroxyethyl)imidazolinium chloride (DOTIM), 2,3-dioleyloxy-N-[2(sperminecarboxamido)ethyl]-N,N-dimethyl-1-propanaminium trifluoroacetate (DOSPA), 3B-[N—(N′,N′-Dimethylaminoethane)-carbamoyl]Cholesterol Hydrochloride (DC-Cholesterol HCl) diheptadecylamidoglycyl spermidine (DOGS), N,N-distearyl-N,N-dimethylammonium bromide (DDAB), N-(1,2-dimyristyloxyprop-3-yl)-N,N-dimethyl-N-hydroxyethyl ammonium bromide (DMRIE), N,N-dioleyl-N,N-dimethylammonium chloride DODAC) and combinations thereof.

[0582] The polynucleotides, primary constructs and/or mmRNA of the invention may be formulated in a polyplex of one or more polymers (U.S. Pub. No. 20120237565 and 20120270927; each of which is herein incorporated by reference in its entirety). In one embodiment, the polyplex comprises two or more cationic polymers. The catioinic polymer may comprise a poly(ethylene imine) (PEI) such as linear PEI.

[0583] The polynucleotide, primary construct, and mmRNA of the invention can also be formulated as a nanoparticle using a combination of polymers, lipids, and/or other biodegradable agents, such as, but not limited to, calcium phosphate. Components may be combined in a core-shell, hybrid, and/or layer-by-layer architecture, to allow for fine-tuning of the nanoparticle so to delivery of the polynucleotide, primary construct and mmRNA may be enhanced (Wang et al., Nat Mater. 2006 5:791-796; Fuller et al., Biomaterials. 2008 29:1526-1532; DeKoker et al., Adv Drug Deliv Rev. 2011 63:748-761; Endres et al., Biomaterials. 2011 32:7721-7731; Su et al., Mol Pharm. 2011 Jun. 6; 8(3):774-87; herein incorporated by reference in its entirety). As a non-limiting example, the nanoparticle may comprise a plurality of polymers such as, but not limited to hydrophilic-hydrophobic polymers (e.g., PEG-PLGA), hydrophobic polymers (e.g., PEG) and/or hydrophilic polymers (International Pub. No. WO20120225129; herein incorporated by reference in its entirety).

[0584] Biodegradable calcium phosphate nanoparticles in combination with lipids and/or polymers have been shown to deliver polynucleotides, primary constructs and mmRNA in vivo. In one embodiment, a lipid coated calcium phosphate nanoparticle, which may also contain a targeting ligand such as anisamide, may be used to deliver the polynucleotide, primary construct and mmRNA of the present invention. For example, to effectively deliver siRNA in a mouse metastatic lung model a lipid coated calcium phosphate nanoparticle was used (Li et al., J Contr Rel. 2010 142: 416-421; Li et al., J Contr Rel. 2012 158:108-114; Yang et al., Mol Ther. 2012 20:609-615; herein incorporated by reference in its entirety). This delivery system combines both a targeted nanoparticle and a component to enhance the endosomal escape, calcium phosphate, in order to improve delivery of the siRNA.

[0585] In one embodiment, calcium phosphate with a PEG-polyanion block copolymer may be used to delivery polynucleotides, primary constructs and mmRNA (Kazikawa et al., J Contr Rel. 2004 97:345-356; Kazikawa et al., J Contr Rel. 2006 111:368-370; herein incorporated by reference in its entirety).

[0586] In one embodiment, a PEG-charge-conversional polymer (Pitella et al., Biomaterials. 2011 32:3106-3114) may be used to form a nanoparticle to deliver the polynucleotides, primary constructs and mmRNA of the present invention. The PEG-charge-conversional polymer may improve upon the PEG-polyanion block copolymers by being cleaved into a polycation at acidic pH, thus enhancing endosomal escape.

[0587] The use of core-shell nanoparticles has additionally focused on a high-throughput approach to synthesize cationic cross-linked nanogel cores and various shells (Siegwart et al., Proc Natl Acad Sci USA. 2011 108:12996-13001). The complexation, delivery, and internalization of the polymeric nanoparticles can be precisely controlled by altering the chemical composition in both the core and shell components of the nanoparticle. For example, the core-shell nanoparticles may efficiently deliver siRNA to mouse hepatocytes after they covalently attach cholesterol to the nanoparticle.

[0588] In one embodiment, a hollow lipid core comprising a middle PLGA layer and an outer neutral lipid layer containg PEG may be used to delivery of the polynucleotide, primary construct and mmRNA of the present invention. As a non-limiting example, in mice bearing a luciferease-expressing tumor, it was determined that the lipid-polymer-lipid hybrid nanoparticle significantly suppressed luciferase expression, as compared to a conventional lipoplex (Shi et al, Angew Chem Int Ed. 2011 50:7027-7031; herein incorporated by reference in its entirety).

[0589] In one embodiment, the lipid nanoparticles may comprise a core of the modified nucleic acid molecules disclosed herein and a polymer shell. The polymer shell may be any of the polymers described herein and are known in the art. In an additional embodiment, the polymer shell may be used to protect the modified nucleic acids in the core.

[0590] Core-shell nanoparticles for use with the modified nucleic acid molecules of the present invention are described and may be formed by the methods described in U.S. Pat. No. 8,313,777 herein incorporated by reference in its entirety.

[0591] In one embodiment, the core-shell nanoparticles may comprise a core of the modified nucleic acid molecules disclosed herein and a polymer shell. The polymer shell may be any of the polymers described herein and are known in the art. In an additional embodiment, the polymer shell may be used to protect the modified nucleic acid molecules in the core. As a non-limiting example, the core-shell nanoparticle may be used to treat an eye disease or disorder (See e.g. US Publication No. 20120321719, herein incorporated by reference in its entirety).

[0592] In one embodiment, the polymer used with the formulations described herein may be a modified polymer (such as, but not limited to, a modified polyacetal) as described in International Publication No. WO2011120053, herein incorporated by reference in its entirety.

### Peptides and Proteins

[0593] The polynucleotide, primary construct, and mmRNA of the invention can be formulated with peptides and/or proteins in order to increase transfection of cells by the polynucleotide, primary construct, or mmRNA. In one embodiment, peptides such as, but not limited to, cell penetrating peptides and proteins and peptides that enable intracellular delivery may be used to deliver pharmaceutical formulations. A non-limiting example of a cell penetrating peptide which may be used with the pharmaceutical formulations of the present invention includes a cell-penetrating peptide sequence attached to polycations that facilitates delivery to the intracellular space, e.g., HIV-derived TAT peptide, penetratins, transportans, or hCT derived cell-penetrating peptides (see, e.g., Caron et al., Mol. Ther. 3(3):310-8 (2001); Langel, Cell-Penetrating Peptides: Processes and Applications (CRC Press, Boca Raton FL, 2002); El-Andaloussi et al., Curr. Pharm. Des. 11(28):3597-611 (2003); and Deshayes et al., Cell. Mol. Life Sci. 62(16):1839-49 (2005), all of which are incorporated herein by reference in their entirety). The compositions can also be formulated to include a cell penetrating agent, e.g., liposomes, which enhance delivery of the compositions to the intracellular space. Polynucleotides, primary constructs, and mmRNA of the invention may be complexed to peptides and/or proteins such as, but not limited to, peptides and/or proteins from Aileron Therapeutics (Cambridge, MA) and Permeon Biologics (Cambridge, MA) in order to enable intracellular delivery (Cronican et al., ACS Chem. Biol. 2010 5:747-752; McNaughton et al., Proc. Natl. Acad. Sci. USA 2009 106:6111-6116; Sawyer, Chem Biol Drug Des. 2009 73:3-6; Verdine and Hilinski, Methods Enzymol. 2012; 503:3-33; all of which are herein incorporated by reference in its entirety).

[0594] In one embodiment, the cell-penetrating polypeptide may comprise a first domain and a second domain. The first domain may comprise a supercharged polypeptide. The second domain may comprise a protein-binding partner. As used herein, “protein-binding partner” includes, but are not limited to, antibodies and functional fragments thereof, scaffold proteins, or peptides. The cell-penetrating polypeptide may further comprise an intracellular binding partner for the protein-binding partner. The cell-penetrating polypeptide may be capable of being secreted from a cell where the polynucleotide, primary construct, or mmRNA may be introduced.

[0595] Formulations of the including peptides or proteins may be used to increase cell transfection by the polynucleotide, primary construct, or mmRNA, alter the biodistribution of the polynucleotide, primary construct, or mmRNA (e.g., by targeting specific tissues or cell types), and/or increase the translation of encoded protein. (See e.g., International Pub. No. WO2012110636; herein incorporated by reference in its entirety).

### Cells

[0596] The polynucleotide, primary construct, and mmRNA of the invention can be transfected ex vivo into cells, which are subsequently transplanted into a subject. As non-limiting examples, the pharmaceutical compositions may include red blood cells to deliver modified RNA to liver and myeloid cells, virosomes to deliver modified RNA in virus-like particles (VLPs), and electroporated cells such as, but not limited to, from MAXCYTE® (Gaithersburg, MD) and from ERYTECH® (Lyon, France) to deliver modified RNA. Examples of use of red blood cells, viral particles and electroporated cells to deliver payloads other than mmRNA have been documented (Godfrin et al., Expert Opin Biol Ther. 2012 12:127-133; Fang et al., Expert Opin Biol Ther. 2012 12:385-389; Hu et al., Proc Natl Acad Sci USA. 2011 108:10980-10985; Lund et al., Pharm Res. 2010 27:400-420; Huckriede et al., J Liposome Res. 2007; 17:39-47; Cusi, Hum Vaccin. 2006 2:1-7; de Jonge et al., Gene Ther. 2006 13:400-411; all of which are herein incorporated by reference in its entirety).

[0597] The polynucleotides, primary constructs and mmRNA may be delivered in synthetic VLPs synthesized by the methods described in International Pub No. WO2011085231 and US Pub No. 20110171248, each of which are herein incorporated by reference in their entireties.

[0598] Cell-based formulations of the polynucleotide, primary construct, and mmRNA of the invention may be used to ensure cell transfection (e.g., in the cellular carrier), alter the biodistribution of the polynucleotide, primary construct, or mmRNA (e.g., by targeting the cell carrier to specific tissues or cell types), and/or increase the translation of encoded protein.

[0599] A variety of methods are known in the art and suitable for introduction of nucleic acid into a cell, including viral and non-viral mediated techniques. Examples of typical non-viral mediated techniques include, but are not limited to, electroporation, calcium phosphate mediated transfer, nucleofection, sonoporation, heat shock, magnetofection, liposome mediated transfer, microinjection, microprojectile mediated transfer (nanoparticles), cationic polymer mediated transfer (DEAE-dextran, polyethylenimine, polyethylene glycol (PEG) and the like) or cell fusion.

[0600] The technique of sonoporation, or cellular sonication, is the use of sound (e.g., ultrasonic frequencies) for modifying the permeability of the cell plasma membrane. Sonoporation methods are known to those in the art and are used to deliver nucleic acids in vivo (Yoon and Park, Expert Opin Drug Deliv. 2010 7:321-330; Postema and Gilja, Curr Pharm Biotechnol. 2007 8:355-361; Newman and Bettinger, Gene Ther. 2007 14:465-475; all herein incorporated by reference in their entirety). Sonoporation methods are known in the art and are also taught for example as it relates to bacteria in US Patent Publication 20100196983 and as it relates to other cell types in, for example, US Patent Publication 20100009424, each of which are incorporated herein by reference in their entirety.

[0601] Electroporation techniques are also well known in the art and are used to deliver nucleic acids in vivo and clinically (Andre et al., Curr Gene Ther. 2010 10:267-280; Chiarella et al., Curr Gene Ther. 2010 10:281-286; Hojman, Curr Gene Ther. 2010 10:128-138; all herein incorporated by reference in their entirety). In one embodiment, polynucleotides, primary constructs or mmRNA may be delivered by electroporation as described in Example 8.

### Hyaluronidase

[0602] The intramuscular or subcutaneous localized injection of polynucleotide, primary construct, or mmRNA of the invention can include hyaluronidase, which catalyzes the hydrolysis of hyaluronan. By catalyzing the hydrolysis of hyaluronan, a constituent of the interstitial barrier, hyaluronidase lowers the viscosity of hyaluronan, thereby increasing tissue permeability (Frost, Expert Opin. Drug Deliv. (2007) 4:427-440; herein incorporated by reference in its entirety). It is useful to speed their dispersion and systemic distribution of encoded proteins produced by transfected cells. Alternatively, the hyaluronidase can be used to increase the number of cells exposed to a polynucleotide, primary construct, or mmRNA of the invention administered intramuscularly or subcutaneously.

### Nanoparticle Mimics

[0603] The polynucleotide, primary construct or mmRNA of the invention may be encapsulated within and/or absorbed to a nanoparticle mimic. A nanoparticle mimic can mimic the delivery function organisms or particles such as, but not limited to, pathogens, viruses, bacteria, fungus, parasites, prions and cells. As a non-limiting example the polynucleotide, primary construct or mmRNA of the invention may be encapsulated in a non-viron particle which can mimic the delivery function of a virus (see International Pub. No. WO2012006376 herein incorporated by reference in its entirety).

### Nanotubes

[0604] The polynucleotides, primary constructs or mmRNA of the invention can be attached or otherwise bound to at least one nanotube such as, but not limited to, rosette nanotubes, rosette nanotubes having twin bases with a linker, carbon nanotubes and/or single-walled carbon nanotubes, The polynucleotides, primary constructs or mmRNA may be bound to the nanotubes through forces such as, but not limited to, steric, ionic, covalent and/or other forces.

[0605] In one embodiment, the nanotube can release one or more polynucleotides, primary constructs or mmRNA into cells. The size and/or the surface structure of at least one nanotube may be altered so as to govern the interaction of the nanotubes within the body and/or to attach or bind to the polynucleotides, primary constructs or mmRNA disclosed herein. In one embodiment, the building block and/or the functional groups attached to the building block of the at least one nanotube may be altered to adjust the dimensions and/or properties of the nanotube. As a non-limiting example, the length of the nanotubes may be altered to hinder the nanotubes from passing through the holes in the walls of normal blood vessels but still small enough to pass through the larger holes in the blood vessels of tumor tissue.

[0606] In one embodiment, at least one nanotube may also be coated with delivery enhancing compounds including polymers, such as, but not limited to, polyethylene glycol. In another embodiment, at least one nanotube and/or the polynucleotides, primary constructs or mmRNA may be mixed with pharmaceutically acceptable excipients and/or delivery vehicles.

[0607] In one embodiment, the polynucleotides, primary constructs or mmRNA are attached and/or otherwise bound to at least one rosette nanotube. The rosette nanotubes may be formed by a process known in the art and/or by the process described in International Publication No. WO2012094304, herein incorporated by reference in its entirety. At least one polynucleotide, primary construct and/or mmRNA may be attached and/or otherwise bound to at least one rosette nanotube by a process as described in International Publication No. WO2012094304, herein incorporated by reference in its entirety, where rosette nanotubes or modules forming rosette nanotubes are mixed in aqueous media with at least one polynucleotide, primary construct and/or mmRNA under conditions which may cause at least one polynucleotide, primary construct or mmRNA to attach or otherwise bind to the rosette nanotubes.

[0608] In one embodiment, the polynucleotides, primary constructs or mmRNA may be attached to and/or otherwise bound to at least one carbon nanotube. As a non-limiting example, the polynucleotides, primary constructs or mmRNA may be bound to a linking agent and the linked agent may be bound to the carbon nanotube (See e.g., U.S. Pat. No. 8,246,995; herein incorporated by reference in its entirety). The carbon nanotube may be a single-walled nanotube (See e.g., U.S. Pat. No. 8,246,995; herein incorporated by reference in its entirety).

### Conjugates

[0609] The polynucleotides, primary constructs, and mmRNA of the invention include conjugates, such as a polynucleotide, primary construct, or mmRNA covalently linked to a carrier or targeting group, or including two encoding regions that together produce a fusion protein (e.g., bearing a targeting group and therapeutic protein or peptide).

[0610] The conjugates of the invention include a naturally occurring substance, such as a protein (e.g., human serum albumin (HSA), low-density lipoprotein (LDL), high-density lipoprotein (HDL), or globulin); an carbohydrate (e.g., a dextran, pullulan, chitin, chitosan, inulin, cyclodextrin or hyaluronic acid); or a lipid. The ligand may also be a recombinant or synthetic molecule, such as a synthetic polymer, e.g., a synthetic polyamino acid, an oligonucleotide (e.g. an aptamer). Examples of polyamino acids include polyamino acid is a polylysine (PLL), poly L-aspartic acid, poly L-glutamic acid, styrene-maleic acid anhydride copolymer, poly(L-lactide-co-glycolied) copolymer, divinyl ether-maleic anhydride copolymer, N-(2-hydroxypropyl)methacrylamide copolymer (HMPA), polyethylene glycol (PEG), polyvinyl alcohol (PVA), polyurethane, poly(2-ethylacryllic acid), N-isopropylacrylamide polymers, or polyphosphazine. Example of polyamines include: polyethylenimine, polylysine (PLL), spermine, spermidine, polyamine, pseudopeptide-polyamine, peptidomimetic polyamine, dendrimer polyamine, arginine, amidine, protamine, cationic lipid, cationic porphyrin, quaternary salt of a polyamine, or an alpha helical peptide.

[0611] Representative U.S. patents that teach the preparation of polynucleotide conjugates, particularly to RNA, include, but are not limited to, U.S. Pat. Nos. 4,828,979; 4,948,882; 5,218,105; 5,525,465; 5,541,313; 5,545,730; 5,552,538; 5,578,717, 5,580,731; 5,591,584; 5,109,124; 5,118,802; 5,138,045; 5,414,077; 5,486,603; 5,512,439; 5,578,718; 5,608,046; 4,587,044; 4,605,735; 4,667,025; 4,762,779; 4,789,737; 4,824,941; 4,835,263; 4,876,335; 4,904,582; 4,958,013; 5,082,830; 5,112,963; 5,214,136; 5,082,830; 5,112,963; 5,214,136; 5,245,022; 5,254,469; 5,258,506; 5,262,536; 5,272,250; 5,292,873; 5,317,098; 5,371,241, 5,391,723; 5,416,203, 5,451,463; 5,510,475; 5,512,667; 5,514,785; 5,565,552; 5,567,810; 5,574,142; 5,585,481; 5,587,371; 5,595,726; 5,597,696; 5,599,923; 5,599,928 and 5,688,941; 6,294,664; 6,320,017; 6,576,752; 6,783,931; 6,900,297; 7,037,646; each of which is herein incorporated by reference in their entireties.

[0612] In one embodiment, the conjugate of the present invention may function as a carrier for the modified nucleic acids and mmRNA of the present invention. The conjugate may comprise a cationic polymer such as, but not limited to, polyamine, polylysine, polyalkylenimine, and polyethylenimine which may be grafted to with poly(ethylene glycol). As a non-limiting example, the conjugate may be similar to the polymeric conjugate and the method of synthesizing the polymeric conjugate described in U.S. Pat. No. 6,586,524 herein incorporated by reference in its entirety.

[0613] The conjugates can also include targeting groups, e.g., a cell or tissue targeting agent, e.g., a lectin, glycoprotein, lipid or protein, e.g., an antibody, that binds to a specified cell type such as a kidney cell. A targeting group can be a thyrotropin, melanotropin, lectin, glycoprotein, surfactant protein A, Mucin carbohydrate, multivalent lactose, multivalent galactose, N-acetyl-galactosamine, N-acetyl-gulucosamine multivalent mannose, multivalent fucose, glycosylated polyaminoacids, multivalent galactose, transferrin, bisphosphonate, polyglutamate, polyaspartate, a lipid, cholesterol, a steroid, bile acid, folate, vitamin B12, biotin, an RGD peptide, an RGD peptide mimetic or an aptamer.

[0614] Targeting groups can be proteins, e.g., glycoproteins, or peptides, e.g., molecules having a specific affinity for a co-ligand, or antibodies e.g., an antibody, that binds to a specified cell type such as a cancer cell, endothelial cell, or bone cell. Targeting groups may also include hormones and hormone receptors. They can also include non-peptidic species, such as lipids, lectins, carbohydrates, vitamins, cofactors, multivalent lactose, multivalent galactose, N-acetyl-galactosamine, N-acetyl-gulucosamine multivalent mannose, multivalent fucose, or aptamers. The ligand can be, for example, a lipopolysaccharide, or an activator of p38 MAP kinase.

[0615] The targeting group can be any ligand that is capable of targeting a specific receptor. Examples include, without limitation, folate, GalNAc, galactose, mannose, mannose-6P, apatamers, integrin receptor ligands, chemokine receptor ligands, transferrin, biotin, serotonin receptor ligands, PSMA, endothelin, GCPII, somatostatin, LDL, and HDL ligands. In particular embodiments, the targeting group is an aptamer. The aptamer can be unmodified or have any combination of modifications disclosed herein.

[0616] In one embodiment, pharmaceutical compositions of the present invention may include chemical modifications such as, but not limited to, modifications similar to locked nucleic acids.

[0617] Representative U.S. patents that teach the preparation of locked nucleic acid (LNA) such as those from Santaris, include, but are not limited to, the following: U.S. Pat. Nos. 6,268,490; 6,670,461; 6,794,499; 6,998,484; 7,053,207; 7,084,125; and 7,399,845, each of which is herein incorporated by reference in its entirety.

[0618] Representative U.S. patents that teach the preparation of PNA compounds include, but are not limited to, U.S. Pat. Nos. 5,539,082; 5,714,331; and 5,719,262, each of which is herein incorporated by reference. Further teaching of PNA compounds can be found, for example, in Nielsen et al., Science, 1991, 254, 1497-1500.

[0619] Some embodiments featured in the invention include polynucleotides, primary constructs or mmRNA with phosphorothioate backbones and oligonucleosides with other modified backbones, and in particular —CH₂—NH—CH₂—, —CH₂—N(CH₃)—O—CH₂—[known as a methylene (methylimino) or MMI backbone], —CH₂—O—N(CH₃)—CH₂—, —CH₂—N(CH₃)—N(CH₃)—CH₂—and —N(CH₃)—CH₂—CH₂—[wherein the native phosphodiester backbone is represented as —O—P(O)₂—O—CH₂—] of the above-referenced U.S. Pat. No. 5,489,677, and the amide backbones of the above-referenced U.S. Pat. No. 5,602,240. In some embodiments, the polynucletotides featured herein have morpholino backbone structures of the above-referenced U.S. Pat. No. 5,034,506.

[0620] Modifications at the 2′ position may also aid in delivery. Preferably, modifications at the 2′ position are not located in a polypeptide-coding sequence, i.e., not in a translatable region. Modifications at the 2′ position may be located in a 5′UTR, a 3′UTR and/or a tailing region. Modifications at the 2′ position can include one of the following at the 2′ position: H (i.e., 2′-deoxy); F; O—, S-, or N-alkyl; O—, S-, or N-alkenyl; O—, S- or N-alkynyl; or O-alkyl-O-alkyl, wherein the alkyl, alkenyl and alkynyl may be substituted or unsubstituted C₁ to C₁₀ alkyl or C₂ to C₁₀ alkenyl and alkynyl. Exemplary suitable modifications include O[(CH₂)ₙO]ₘCH₃, O(CH₂)ₙOCH₃, O(CH₂)ₙNH₂, O(CH₂) CH₃, O(CH₂)ₙONH₂, and O(CH₂)ₙON[(CH₂)ₙCH₃)]₂, where n and m are from 1 to about 10. In other embodiments, the polynucleotides, primary constructs or mmRNA include one of the following at the 2′ position: C₁ to C₁₀ lower alkyl, substituted lower alkyl, alkaryl, aralkyl, O-alkaryl or O-aralkyl, SH, SCH₃, OCN, Cl, Br, CN, CF₃, OCF₃, SOCH₃, SO₂CH₃, ONO₂, NO₂, N₃, NH₂, heterocycloalkyl, heterocycloalkaryl, aminoalkylamino, polyalkylamino, substituted silyl, an RNA cleaving group, a reporter group, an intercalator, a group for improving the pharmacokinetic properties, or a group for improving the pharmacodynamic properties, and other substituents having similar properties. In some embodiments, the modification includes a 2′-methoxyethoxy (2′-O—CH₂CH₂OCH₃, also known as 2′-O-(2-methoxyethyl) or 2′-MOE) (Martin et al., Helv. Chim. Acta, 1995, 78:486-504) i.e., an alkoxy-alkoxy group. Another exemplary modification is 2′-dimethylaminooxyethoxy, i.e., a O(CH₂)₂ON(CH₃)₂ group, also known as 2′-DMAOE, as described in examples herein below, and 2′-dimethylaminoethoxyethoxy (also known in the art as 2′-O-dimethylaminoethoxyethyl or 2′-DMAEOE), i.e., 2′-O—CH₂—O—CH₂—N(CH₂)₂, also described in examples herein below. Other modifications include 2′-methoxy (2′-OCH₃), 2′-aminopropoxy (2′-OCH₂CH₂CH₂NH₂) and 2′-fluoro (2′-F). Similar modifications may also be made at other positions, particularly the 3′ position of the sugar on the 3′ terminal nucleotide or in 2′-5′ linked dsRNAs and the 5′ position of 5′ terminal nucleotide. Polynucleotides of the invention may also have sugar mimetics such as cyclobutyl moieties in place of the pentofuranosyl sugar. Representative U.S. patents that teach the preparation of such modified sugar structures include, but are not limited to, U.S. Pat. Nos. 4,981,957; 5,118,800; 5,319,080; 5,359,044; 5,393,878; 5,446,137; 5,466,786; 5,514,785; 5,519,134; 5,567,811; 5,576,427; 5,591,722; 5,597,909; 5,610,300; 5,627,053; 5,639,873; 5,646,265; 5,658,873; 5,670,633; and 5,700,920 and each of which is herein incorporated by reference.

[0621] In still other embodiments, the polynucleotide, primary construct, or mmRNA is covalently conjugated to a cell penetrating polypeptide. The cell-penetrating peptide may also include a signal sequence. The conjugates of the invention can be designed to have increased stability; increased cell transfection; and/or altered the biodistribution (e.g., targeted to specific tissues or cell types).

[0622] In one embodiment, the polynucleotides, primary constructs or mmRNA may be conjugated to an agent to enhance delivery. As a non-limiting example, the agent may be a monomer or polymer such as a targeting monomer or a polymer having targeting blocks as described in International Publication No. WO2011062965, herein incorporated by reference in its entirety. In another non-limiting example, the agent may be a transport agent covalently coupled to the polynucleotides, primary constructs or mmRNA of the present invention (See e.g., U.S. Pat. Nos. 6,835,393 and 7,374,778, each of which is herein incorporated by reference in its entirety). In yet another non-limiting example, the agent may be a membrane barrier transport enhancing agent such as those described in U.S. Pat. Nos. 7,737,108 and 8,003,129, each of which is herein incorporated by reference in its entirety.

[0623] In another embodiment, polynucleotides, primary constructs or mmRNA may be conjugated to SMARTT POLYMER TECHNOLOGY® (PHASERX®, Inc. Seattle, WA).

### Self-Assembled Nanoparticles

### Nucleic Acid Self-Assembled Nanoparticles

[0624] Self-assembled nanoparticles have a well-defined size which may be precisely controlled as the nucleic acid strands may be easily reprogrammable. For example, the optimal particle size for a cancer-targeting nanodelivery carrier is 20-100 nm as a diameter greater than 20 nm avoids renal clearance and enhances delivery to certain tumors through enhanced permeability and retention effect. Using self-assembled nucleic acid nanoparticles a single uniform population in size and shape having a precisely controlled spatial orientation and density of cancer-targeting ligands for enhanced delivery. As a non-limiting example, oligonucleotide nanoparticles were prepared using programmable self-assembly of short DNA fragments and therapeutic siRNAs. These nanoparticles are molecularly identical with controllable particle size and target ligand location and density. The DNA fragments and siRNAs self-assembled into a one-step reaction to generate DNA/siRNA tetrahedral nanoparticles for targeted in vivo delivery. (Lee et al., Nature Nanotechnology 2012 7:389-393; herein incorporated by reference in its entirety).

[0625] In one embodiment, the polynucleotides, primary constructs and/or mmRNA disclosed herein may be formulated as self-assembled nanoparticles. As a non-limiting example, nucleic acids may be used to make nanoparticles which may be used in a delivery system for the polynucleotides, primary constructs and/or mmRNA of the present invention (See e.g., International Pub. No. WO2012125987; herein incorporated by reference in its entirety).

[0626] In one embodiment, the nucleic acid self-assembled nanoparticles may comprise a core of the polynucleotides, primary constructs or mmRNA disclosed herein and a polymer shell. The polymer shell may be any of the polymers described herein and are known in the art. In an additional embodiment, the polymer shell may be used to protect the polynucleotides, primary contructs and mmRNA in the core.

### Polymer-Based Self-Assembled Nanoparticles

[0627] Polymers may be used to form sheets which self-assembled into nanoparticles. These nanoparticles may be used to deliver the polynucleotides, primary constructs and mmRNA of the present invention. In one embodiment, these self-assembled nanoparticles may be microsponges formed of long polymers of RNA hairpins which form into crystalline ‘pleated’ sheets before self-assembling into microsponges. These microsponges are densely-packed sponge like microparticles which may function as an efficient carrier and may be able to deliver cargo to a cell. The microsponges may be from 1 um to 300 nm in diameter. The microsponges may be complexed with other agents known in the art to form larger microsponges. As a non-limiting example, the microsponge may be complexed with an agent to form an outer layer to promote cellular uptake such as polycation polyethyleneime (PEI). This complex can form a 250-nm diameter particle that can remain stable at high temperatures (150° C.) (Grabow and Jaegar, Nature Materials 2012, 11:269-269; herein incorporated by reference in its entirety). Additionally these microsponges may be able to exhibit an extraordinary degree of protection from degradation by ribonucleases.

[0628] In another embodiment, the polymer-based self-assembled nanoparticles such as, but not limited to, microsponges, may be fully programmable nanoparticles. The geometry, size and stoichiometry of the nanoparticle may be precisely controlled to create the optimal nanoparticle for delivery of cargo such as, but not limited to, polynucleotides, primary constructs and/or mmRNA.

[0629] In one embodiment, the polymer based nanoparticles may comprise a core of the polynucleotides, primary constructs and/or mmRNA disclosed herein and a polymer shell. The polymer shell may be any of the polymers described herein and are known in the art. In an additional embodiment, the polymer shell may be used to protect the polynucleotides, primary construct and/or mmRNA in the core.

[0630] In yet another embodiment, the polymer based nanoparticle may comprise a non-nucleic acid polymer comprising a plurality of heterogenous monomers such as those described in International Publication No. WO2013009736, herein incorporated by reference in its entirety.

### Inorganic Nanoparticles

[0631] The polynucleotides, primary constructs and/or mmRNAs of the present invention may be formulated in inorganic nanoparticles (U.S. Pat. No. 8,257,745, herein incorporated by reference in its entirety). The inorganic nanoparticles may include, but are not limited to, clay substances that are water swellable. As a non-limiting example, the inorganic nanoparticle may include synthetic smectite clays which are made from simple silicates (See e.g., U.S. Pat. Nos. 5,585,108 and 8,257,745 each of which are herein incorporated by reference in their entirety).

[0632] In one embodiment, the inorganic nanoparticles may comprise a core of the modified nucleic acids disclosed herein and a polymer shell. The polymer shell may be any of the polymers described herein and are known in the art. In an additional embodiment, the polymer shell may be used to protect the modified nucleic acids in the core.

### Semi-Conductive and Metallic Nanoparticles

[0633] The polynucleotides, primary constructs and/or mmRNAs of the present invention may be formulated in water-dispersible nanoparticle comprising a semiconductive or metallic material (U.S. Pub. No. 20120228565; herein incorporated by reference in its entirety) or formed in a magnetic nanoparticle (U.S. Pub. No. 20120265001 and 20120283503; each of which is herein incorporated by reference in its entirety). The water-dispersible nanoparticles may be hydrophobic nanoparticles or hydrophilic nanoparticles.

[0634] In one embodiment, the semi-conductive and/or metallic nanoparticles may comprise a core of the polynucleotides, primary constructs and/or mmRNA disclosed herein and a polymer shell. The polymer shell may be any of the polymers described herein and are known in the art. In an additional embodiment, the polymer shell may be used to protect the polynucleotides, primary constructs and/or mmRNA in the core.

### Gels and Hydrogels

[0635] In one embodiment, the polynucleotides, primary constructs and/or mmRNA disclosed herein may be encapsulated into any hydrogel known in the art which may form a gel when injected into a subject. Hydrogels are a network of polymer chains that are hydrophilic, and are sometimes found as a colloidal gel in which water is the dispersion medium. Hydrogels are highly absorbent (they can contain over 99% water) natural or synthetic polymers. Hydrogels also possess a degree of flexibility very similar to natural tissue, due to their significant water content. The hydrogel described herein may used to encapsulate lipid nanoparticles which are biocompatible, biodegradable and/or porous.

[0636] As a non-limiting example, the hydrogel may be an aptamer-functionalized hydrogel. The aptamer-functionalized hydrogel may be programmed to release one or more polynucleotides, primary constructs and/or mmRNA using nucleic acid hybridization. (Battig et al., J. Am. Chem. Society. 2012 134:12410-12413; herein incorporated by reference in its entirety).

[0637] As another non-limiting example, the hydrogel may be a shaped as an inverted opal. The opal hydrogels exhibit higher swelling ratios and the swelling kinetics is an order of magnitude faster as well. Methods of producing opal hydrogels and description of opal hydrogels are described in International Pub. No. WO2012148684, herein incorporated by reference in its entirety.

[0638] In yet another non-limiting example, the hydrogel may be an antibacterial hydrogel. The antibacterial hydrogel may comprise a pharmaceutical acceptable salt or organic material such as, but not limited to pharmaceutical grade and/or medical grade silver salt and aloe vera gel or extract. (International Pub. No. WO2012151438, herein incorporated by reference in its entirety).

[0639] In one embodiment, the modified mRNA may be encapsulated in a lipid nanoparticle and then the lipid nanoparticle may be encapsulated into a hyrdogel.

[0640] In one embodiment, the polynucleotides, primary constructs and/or mmRNA disclosed herein may be encapsulated into any gel known in the art. As a non-limiting example the gel may be a fluorouracil injectable gel or a fluorouracil injectable gel containing a chemical compound and/or drug known in the art. As another example, the polynucleotides, primary constructs and/or mmRNA may be encapsulated in a fluorouracil gel containing epinephrine (See e.g., Smith et al. Cancer Chemotherapty and Pharmacology, 1999 44(4):267-274; herein incorporated by reference in its entirety).

[0641] In one embodiment, the polynucleotides, primary constructs and/or mmRNA disclosed herein may be encapsulated into a fibrin gel, fibrin hydrogel or fibrin glue. In another embodiment, the polynucleotides, primary constructs and/or mmRNA may be formulated in a lipid nanoparticle or a rapidly eliminated lipid nanoparticle prior to being encapsulated into a fibrin gel, fibrin hydrogel or a fibrin glue. In yet another embodiment, the polynucleotides, primary constructs and/or mmRNA may be formulated as a lipoplex prior to being encapsulated into a fibrin gel, hydrogel or a fibrin glue. Fibrin gels, hydrogels and glues comprise two components, a fibrinogen solution and a thrombin solution which is rich in calcium (See e.g., Spicer and Mikos, Journal of Controlled Release 2010. 148: 49-55; Kidd et al. Journal of Controlled Release 2012. 157:80-85; each of which is herein incorporated by reference in its entirety). The concentration of the components of the fibrin gel, hydrogel and/or glue can be altered to change the characteristics, the network mesh size, and/or the degradation characteristics of the gel, hydrogel and/or glue such as, but not limited to changing the release characteristics of the fibrin gel, hydrogel and/or glue. (See e.g., Spicer and Mikos, Journal of Controlled Release 2010. 148: 49-55; Kidd et al. Journal of Controlled Release 2012. 157:80-85; Catelas et al. Tissue Engineering 2008. 14:119-128; each of which is herein incorporated by reference in its entirety). This feature may be advantageous when used to deliver the modified mRNA disclosed herein. (See e.g., Kidd et al. Journal of Controlled Release 2012. 157:80-85; Catelas et al. Tissue Engineering 2008. 14:119-128; each of which is herein incorporated by reference in its entirety).

### Cations and Anions

[0642] Formulations of polynucleotides, primary constructs and/or mmRNA disclosed herein may include cations or anions. In one embodiment, the formulations include metal cations such as, but not limited to, Zn2+, Ca2+, Cu2+, Mg+ and combinations thereof. As a non-limiting example, formulations may include polymers and a polynucleotides, primary constructs and/or mmRNA complexed with a metal cation (See e.g., U.S. Pat. Nos. 6,265,389 and 6,555,525, each of which is herein incorporated by reference in its entirety).

### Molded Nanoparticles and Microparticles

[0643] The polynucleotides, primary constructs and/or mmRNA disclosed herein may be formulated in nanoparticles and/or microparticles. These nanoparticles and/or microparticles may be molded into any size shape and chemistry. As an example, the nanoparticles and/or microparticles may be made using the PRINT® technology by LIQUIDA TECHNOLOGIES® (Morrisville, NC) (See e.g., International Pub. No. WO2007024323; herein incorporated by reference in its entirety).

[0644] In one embodiment, the molded nanoparticles may comprise a core of the polynucleotides, primary constructs and/or mmRNA disclosed herein and a polymer shell. The polymer shell may be any of the polymers described herein and are known in the art. In an additional embodiment, the polymer shell may be used to protect the polynucleotides, primary construct and/or mmRNA in the core.

### NanoJackets and NanoLiposomes

[0645] The polynucleotides, primary constructs and/or mmRNA disclosed herein may be formulated in NanoJackets and NanoLiposomes by Keystone Nano (State College, PA). NanoJackets are made of compounds that are naturally found in the body including calcium, phosphate and may also include a small amount of silicates. Nanojackets may range in size from 5 to 50 nm and may be used to deliver hydrophilic and hydrophobic compounds such as, but not limited to, polynucleotides, primary constructs and/or mmRNA.

[0646] NanoLiposomes are made of lipids such as, but not limited to, lipids which naturally occur in the body. NanoLiposomes may range in size from 60-80 nm and may be used to deliver hydrophilic and hydrophobic compounds such as, but not limited to, polynucleotides, primary constructs and/or mmRNA. In one aspect, the polynucleotides, primary constructs and/or mmRNA disclosed herein are formulated in a NanoLiposome such as, but not limited to, Ceramide NanoLiposomes.

### Excipients

[0647] Pharmaceutical formulations may additionally comprise a pharmaceutically acceptable excipient, which, as used herein, includes any and all solvents, dispersion media, diluents, or other liquid vehicles, dispersion or suspension aids, surface active agents, isotonic agents, thickening or emulsifying agents, preservatives, solid binders, lubricants and the like, as suited to the particular dosage form desired. Remington's The Science and Practice of Pharmacy, 21^{st} Edition, A. R. Gennaro (Lippincott, Williams & Wilkins, Baltimore, MD, 2006; incorporated herein by reference in its entirety) discloses various excipients used in formulating pharmaceutical compositions and known techniques for the preparation thereof. Except insofar as any conventional excipient medium is incompatible with a substance or its derivatives, such as by producing any undesirable biological effect or otherwise interacting in a deleterious manner with any other component(s) of the pharmaceutical composition, its use is contemplated to be within the scope of this invention.

[0648] In some embodiments, a pharmaceutically acceptable excipient is at least 95%, at least 96%, at least 97%, at least 98%, at least 99%, or 100% pure. In some embodiments, an excipient is approved for use in humans and for veterinary use. In some embodiments, an excipient is approved by United States Food and Drug Administration. In some embodiments, an excipient is pharmaceutical grade. In some embodiments, an excipient meets the standards of the United States Pharmacopoeia (USP), the European Pharmacopoeia (EP), the British Pharmacopoeia, and/or the International Pharmacopoeia.

[0649] Pharmaceutically acceptable excipients used in the manufacture of pharmaceutical compositions include, but are not limited to, inert diluents, dispersing and/or granulating agents, surface active agents and/or emulsifiers, disintegrating agents, binding agents, preservatives, buffering agents, lubricating agents, and/or oils. Such excipients may optionally be included in pharmaceutical compositions.

[0650] Exemplary diluents include, but are not limited to, calcium carbonate, sodium carbonate, calcium phosphate, dicalcium phosphate, calcium sulfate, calcium hydrogen phosphate, sodium phosphate lactose, sucrose, cellulose, microcrystalline cellulose, kaolin, mannitol, sorbitol, inositol, sodium chloride, dry starch, cornstarch, powdered sugar, etc., and/or combinations thereof.

[0651] Exemplary granulating and/or dispersing agents include, but are not limited to, potato starch, corn starch, tapioca starch, sodium starch glycolate, clays, alginic acid, guar gum, citrus pulp, agar, bentonite, cellulose and wood products, natural sponge, cation-exchange resins, calcium carbonate, silicates, sodium carbonate, cross-linked poly(vinyl-pyrrolidone) (crospovidone), sodium carboxymethyl starch (sodium starch glycolate), carboxymethyl cellulose, cross-linked sodium carboxymethyl cellulose (croscarmellose), methylcellulose, pregelatinized starch (starch 1500), microcrystalline starch, water insoluble starch, calcium carboxymethyl cellulose, magnesium aluminum silicate (VEEGUM®), sodium lauryl sulfate, quaternary ammonium compounds, etc., and/or combinations thereof.

[0652] Exemplary surface active agents and/or emulsifiers include, but are not limited to, natural emulsifiers (e.g. acacia, agar, alginic acid, sodium alginate, tragacanth, chondrux, cholesterol, xanthan, pectin, gelatin, egg yolk, casein, wool fat, cholesterol, wax, and lecithin), colloidal clays (e.g. bentonite [aluminum silicate] and VEEGUM® [magnesium aluminum silicate]), long chain amino acid derivatives, high molecular weight alcohols (e.g. stearyl alcohol, cetyl alcohol, oleyl alcohol, triacetin monostearate, ethylene glycol distearate, glyceryl monostearate, and propylene glycol monostearate, polyvinyl alcohol), carbomers (e.g. carboxy polymethylene, polyacrylic acid, acrylic acid polymer, and carboxyvinyl polymer), carrageenan, cellulosic derivatives (e.g. carboxymethylcellulose sodium, powdered cellulose, hydroxymethyl cellulose, hydroxypropyl cellulose, hydroxypropyl methylcellulose, methylcellulose), sorbitan fatty acid esters (e.g. polyoxyethylene sorbitan monolaurate [TWEEN®20], polyoxyethylene sorbitan [TWEENn®60], polyoxyethylene sorbitan monooleate [TWEEN®80], sorbitan monopalmitate [SPAN®40], sorbitan monostearate [SPAN®60], sorbitan tristearate [SPAN®65], glyceryl monooleate, sorbitan monooleate [SPAN®80]), polyoxyethylene esters (e.g. polyoxyethylene monostearate [MYRJ®45], polyoxyethylene hydrogenated castor oil, polyethoxylated castor oil, polyoxymethylene stearate, and SOLUTOL®), sucrose fatty acid esters, polyethylene glycol fatty acid esters (e.g. CREMOPHOR®), polyoxyethylene ethers, (e.g. polyoxyethylene lauryl ether [BRIJ®30]), poly(vinyl-pyrrolidone), diethylene glycol monolaurate, triethanolamine oleate, sodium oleate, potassium oleate, ethyl oleate, oleic acid, ethyl laurate, sodium lauryl sulfate, PLUORINC®F 68, POLOXAMER®188, cetrimonium bromide, cetylpyridinium chloride, benzalkonium chloride, docusate sodium, etc. and/or combinations thereof.

[0653] Exemplary binding agents include, but are not limited to, starch (e.g. cornstarch and starch paste); gelatin; sugars (e.g. sucrose, glucose, dextrose, dextrin, molasses, lactose, lactitol, mannitol); natural and synthetic gums (e.g. acacia, sodium alginate, extract of Irish moss, panwar gum, ghatti gum, mucilage of isapol husks, carboxymethylcellulose, methylcellulose, ethylcellulose, hydroxyethylcellulose, hydroxypropyl cellulose, hydroxypropyl methylcellulose, microcrystalline cellulose, cellulose acetate, poly(vinyl-pyrrolidone), magnesium aluminum silicate (Veegum®), and larch arabogalactan); alginates; polyethylene oxide; polyethylene glycol; inorganic calcium salts; silicic acid; polymethacrylates; waxes; water; alcohol; etc.; and combinations thereof.

[0654] Exemplary preservatives may include, but are not limited to, antioxidants, chelating agents, antimicrobial preservatives, antifungal preservatives, alcohol preservatives, acidic preservatives, and/or other preservatives. Exemplary antioxidants include, but are not limited to, alpha tocopherol, ascorbic acid, acorbyl palmitate, butylated hydroxyanisole, butylated hydroxytoluene, monothioglycerol, potassium metabisulfite, propionic acid, propyl gallate, sodium ascorbate, sodium bisulfite, sodium metabisulfite, and/or sodium sulfite. Exemplary chelating agents include ethylenediaminetetraacetic acid (EDTA), citric acid monohydrate, disodium edetate, dipotassium edetate, edetic acid, fumaric acid, malic acid, phosphoric acid, sodium edetate, tartaric acid, and/or trisodium edetate. Exemplary antimicrobial preservatives include, but are not limited to, benzalkonium chloride, benzethonium chloride, benzyl alcohol, bronopol, cetrimide, cetylpyridinium chloride, chlorhexidine, chlorobutanol, chlorocresol, chloroxylenol, cresol, ethyl alcohol, glycerin, hexetidine, imidurea, phenol, phenoxyethanol, phenylethyl alcohol, phenylmercuric nitrate, propylene glycol, and/or thimerosal. Exemplary antifungal preservatives include, but are not limited to, butyl paraben, methyl paraben, ethyl paraben, propyl paraben, benzoic acid, hydroxybenzoic acid, potassium benzoate, potassium sorbate, sodium benzoate, sodium propionate, and/or sorbic acid. Exemplary alcohol preservatives include, but are not limited to, ethanol, polyethylene glycol, phenol, phenolic compounds, bisphenol, chlorobutanol, hydroxybenzoate, and/or phenylethyl alcohol. Exemplary acidic preservatives include, but are not limited to, vitamin A, vitamin C, vitamin E, beta-carotene, citric acid, acetic acid, dehydroacetic acid, ascorbic acid, sorbic acid, and/or phytic acid. Other preservatives include, but are not limited to, tocopherol, tocopherol acetate, deteroxime mesylate, cetrimide, butylated hydroxyanisol (BHA), butylated hydroxytoluened (BHT), ethylenediamine, sodium lauryl sulfate (SLS), sodium lauryl ether sulfate (SLES), sodium bisulfite, sodium metabisulfite, potassium sulfite, potassium metabisulfite, GLYDANT PLUS®, PHENONIP®, methylparaben, GERMALL®115, GERMABEN®II, NEOLONE™, KATHON™, and/or EUXYL®.

[0655] Exemplary buffering agents include, but are not limited to, citrate buffer solutions, acetate buffer solutions, phosphate buffer solutions, ammonium chloride, calcium carbonate, calcium chloride, calcium citrate, calcium glubionate, calcium gluceptate, calcium gluconate, D-gluconic acid, calcium glycerophosphate, calcium lactate, propanoic acid, calcium levulinate, pentanoic acid, dibasic calcium phosphate, phosphoric acid, tribasic calcium phosphate, calcium hydroxide phosphate, potassium acetate, potassium chloride, potassium gluconate, potassium mixtures, dibasic potassium phosphate, monobasic potassium phosphate, potassium phosphate mixtures, sodium acetate, sodium bicarbonate, sodium chloride, sodium citrate, sodium lactate, dibasic sodium phosphate, monobasic sodium phosphate, sodium phosphate mixtures, tromethamine, magnesium hydroxide, aluminum hydroxide, alginic acid, pyrogen-free water, isotonic saline, Ringer's solution, ethyl alcohol, etc., and/or combinations thereof.

[0656] Exemplary lubricating agents include, but are not limited to, magnesium stearate, calcium stearate, stearic acid, silica, talc, malt, glyceryl behanate, hydrogenated vegetable oils, polyethylene glycol, sodium benzoate, sodium acetate, sodium chloride, leucine, magnesium lauryl sulfate, sodium lauryl sulfate, etc., and combinations thereof.

[0657] Exemplary oils include, but are not limited to, almond, apricot kernel, avocado, babassu, bergamot, black current seed, borage, cade, camomile, canola, caraway, carnauba, castor, cinnamon, cocoa butter, coconut, cod liver, coffee, corn, cotton seed, emu, eucalyptus, evening primrose, fish, flaxseed, geraniol, gourd, grape seed, hazel nut, hyssop, isopropyl myristate, jojoba, kukui nut, lavandin, lavender, lemon, litsea cubeba, macademia nut, mallow, mango seed, meadowfoam seed, mink, nutmeg, olive, orange, orange roughy, palm, palm kernel, peach kernel, peanut, poppy seed, pumpkin seed, rapeseed, rice bran, rosemary, safflower, sandalwood, sasquana, savoury, sea buckthorn, sesame, shea butter, silicone, soybean, sunflower, tea tree, thistle, tsubaki, vetiver, walnut, and wheat germ oils. Exemplary oils include, but are not limited to, butyl stearate, caprylic triglyceride, capric triglyceride, cyclomethicone, diethyl sebacate, dimethicone 360, isopropyl myristate, mineral oil, octyldodecanol, oleyl alcohol, silicone oil, and/or combinations thereof.

[0658] Excipients such as cocoa butter and suppository waxes, coloring agents, coating agents, sweetening, flavoring, and/or perfuming agents can be present in the composition, according to the judgment of the formulator.

### Delivery

[0659] The present disclosure encompasses the delivery of polynucleotides, primary constructs or mmRNA for any of therapeutic, pharmaceutical, diagnostic or imaging by any appropriate route taking into consideration likely advances in the sciences of drug delivery. Delivery may be naked or formulated.

### Naked Delivery

[0660] The polynucleotides, primary constructs or mmRNA of the present invention may be delivered to a cell naked. As used herein in, “naked” refers to delivering polynucleotides, primary constructs or mmRNA free from agents which promote transfection. For example, the polynucleotides, primary constructs or mmRNA delivered to the cell may contain no modifications. The naked polynucleotides, primary constructs or mmRNA may be delivered to the cell using routes of administration known in the art and described herein.

### Formulated Delivery

[0661] The polynucleotides, primary constructs or mmRNA of the present invention may be formulated, using the methods described herein. The formulations may contain polynucleotides, primary constructs or mmRNA which may be modified and/or unmodified. The formulations may further include, but are not limited to, cell penetration agents, a pharmaceutically acceptable carrier, a delivery agent, a bioerodible or biocompatible polymer, a solvent, and a sustained-release delivery depot. The formulated polynucleotides, primary constructs or mmRNA may be delivered to the cell using routes of administration known in the art and described herein.

[0662] The compositions may also be formulated for direct delivery to an organ or tissue in any of several ways in the art including, but not limited to, direct soaking or bathing, via a catheter, by gels, powder, ointments, creams, gels, lotions, and/or drops, by using substrates such as fabric or biodegradable materials coated or impregnated with the compositions, and the like.

### Administration

[0663] The polynucleotides, primary constructs or mmRNA of the present invention may be administered by any route which results in a therapeutically effective outcome. These include, but are not limited to enteral, gastroenteral, epidural, oral, transdermal, epidural (peridural), intracerebral (into the cerebrum), intracerebroventricular (into the cerebral ventricles), epicutaneous (application onto the skin), intradermal, (into the skin itself), subcutaneous (under the skin), nasal administration (through the nose), intravenous (into a vein), intraarterial (into an artery), intramuscular (into a muscle), intracardiac (into the heart), intraosseous infusion (into the bone marrow), intrathecal (into the spinal canal), intraperitoneal, (infusion or injection into the peritoneum), intravesical infusion, intravitreal, (through the eye), intracavernous injection, (into the base of the penis), intravaginal administration, intrauterine, extra-amniotic administration, transdermal (diffusion through the intact skin for systemic distribution), transmucosal (diffusion through a mucous membrane), insufflation (snorting), sublingual, sublabial, enema, eye drops (onto the conjunctiva), or in ear drops. In specific embodiments, compositions may be administered in a way which allows them cross the blood-brain barrier, vascular barrier, or other epithelial barrier. Non-limiting routes of administration for the polynucleotides, primary constructs or mmRNA of the present invention are described below.

### Parenteral and Injectible Administration

[0664] Liquid dosage forms for parenteral administration include, but are not limited to, pharmaceutically acceptable emulsions, microemulsions, solutions, suspensions, syrups, and/or elixirs. In addition to active ingredients, liquid dosage forms may comprise inert diluents commonly used in the art such as, for example, water or other solvents, solubilizing agents and emulsifiers such as ethyl alcohol, isopropyl alcohol, ethyl carbonate, ethyl acetate, benzyl alcohol, benzyl benzoate, propylene glycol, 1,3-butylene glycol, dimethylformamide, oils (in particular, cottonseed, groundnut, corn, germ, olive, castor, and sesame oils), glycerol, tetrahydrofurfuryl alcohol, polyethylene glycols and fatty acid esters of sorbitan, and mixtures thereof. Besides inert diluents, oral compositions can include adjuvants such as wetting agents, emulsifying and suspending agents, sweetening, flavoring, and/or perfuming agents. In certain embodiments for parenteral administration, compositions are mixed with solubilizing agents such as CREMOPHOR®, alcohols, oils, modified oils, glycols, polysorbates, cyclodextrins, polymers, and/or combinations thereof.

[0665] Injectable preparations, for example, sterile injectable aqueous or oleaginous suspensions may be formulated according to the known art using suitable dispersing agents, wetting agents, and/or suspending agents. Sterile injectable preparations may be sterile injectable solutions, suspensions, and/or emulsions in nontoxic parenterally acceptable diluents and/or solvents, for example, as a solution in 1,3-butanediol. Among the acceptable vehicles and solvents that may be employed are water, Ringer's solution, U.S.P., and isotonic sodium chloride solution. Sterile, fixed oils are conventionally employed as a solvent or suspending medium. For this purpose any bland fixed oil can be employed including synthetic mono- or diglycerides. Fatty acids such as oleic acid can be used in the preparation of injectables.

[0666] Injectable formulations can be sterilized, for example, by filtration through a bacterial-retaining filter, and/or by incorporating sterilizing agents in the form of sterile solid compositions which can be dissolved or dispersed in sterile water or other sterile injectable medium prior to use.

[0667] In order to prolong the effect of an active ingredient, it is often desirable to slow the absorption of the active ingredient from subcutaneous or intramuscular injection. This may be accomplished by the use of a liquid suspension of crystalline or amorphous material with poor water solubility. The rate of absorption of the drug then depends upon its rate of dissolution which, in turn, may depend upon crystal size and crystalline form. Alternatively, delayed absorption of a parenterally administered drug form is accomplished by dissolving or suspending the drug in an oil vehicle. Injectable depot forms are made by forming microencapsule matrices of the drug in biodegradable polymers such as polylactide-polyglycolide. Depending upon the ratio of drug to polymer and the nature of the particular polymer employed, the rate of drug release can be controlled. Examples of other biodegradable polymers include poly(orthoesters) and poly(anhydrides). Depot injectable formulations are prepared by entrapping the drug in liposomes or microemulsions which are compatible with body tissues.

### Rectal and Vaginal Administration

[0668] Compositions for rectal or vaginal administration are typically suppositories which can be prepared by mixing compositions with suitable non-irritating excipients such as cocoa butter, polyethylene glycol or a suppository wax which are solid at ambient temperature but liquid at body temperature and therefore melt in the rectum or vaginal cavity and release the active ingredient.

### Oral Administration

[0669] Liquid dosage forms for oral administration include, but are not limited to, pharmaceutically acceptable emulsions, microemulsions, solutions, suspensions, syrups, and/or elixirs. In addition to active ingredients, liquid dosage forms may comprise inert diluents commonly used in the art such as, for example, water or other solvents, solubilizing agents and emulsifiers such as ethyl alcohol, isopropyl alcohol, ethyl carbonate, ethyl acetate, benzyl alcohol, benzyl benzoate, propylene glycol, 1,3-butylene glycol, dimethylformamide, oils (in particular, cottonseed, groundnut, corn, germ, olive, castor, and sesame oils), glycerol, tetrahydrofurfuryl alcohol, polyethylene glycols and fatty acid esters of sorbitan, and mixtures thereof. Besides inert diluents, oral compositions can include adjuvants such as wetting agents, emulsifying and suspending agents, sweetening, flavoring, and/or perfuming agents. In certain embodiments for parenteral administration, compositions are mixed with solubilizing agents such as CREMOPHOR®, alcohols, oils, modified oils, glycols, polysorbates, cyclodextrins, polymers, and/or combinations thereof.

[0670] Solid dosage forms for oral administration include capsules, tablets, pills, powders, and granules. In such solid dosage forms, an active ingredient is mixed with at least one inert, pharmaceutically acceptable excipient such as sodium citrate or dicalcium phosphate and/or fillers or extenders (e.g. starches, lactose, sucrose, glucose, mannitol, and silicic acid), binders (e.g. carboxymethylcellulose, alginates, gelatin, polyvinylpyrrolidinone, sucrose, and acacia), humectants (e.g. glycerol), disintegrating agents (e.g. agar, calcium carbonate, potato or tapioca starch, alginic acid, certain silicates, and sodium carbonate), solution retarding agents (e.g. paraffin), absorption accelerators (e.g. quaternary ammonium compounds), wetting agents (e.g. cetyl alcohol and glycerol monostearate), absorbents (e.g. kaolin and bentonite clay), and lubricants (e.g. talc, calcium stearate, magnesium stearate, solid polyethylene glycols, sodium lauryl sulfate), and mixtures thereof. In the case of capsules, tablets and pills, the dosage form may comprise buffering agents.

### Topical or Transdermal Administration

[0671] As described herein, compositions containing the polynucleotides, primary constructs or mmRNA of the invention may be formulated for administration topically. The skin may be an ideal target site for delivery as it is readily accessible. Gene expression may be restricted not only to the skin, potentially avoiding nonspecific toxicity, but also to specific layers and cell types within the skin.

[0672] The site of cutaneous expression of the delivered compositions will depend on the route of nucleic acid delivery. Three routes are commonly considered to deliver polynucleotides, primary constructs or mmRNA to the skin: (i) topical application (e.g. for local/regional treatment and/or cosmetic applications); (ii) intradermal injection (e.g. for local/regional treatment and/or cosmetic applications); and (iii) systemic delivery (e.g. for treatment of dermatologic diseases that affect both cutaneous and extracutaneous regions). Polynucleotides, primary constructs or mmRNA can be delivered to the skin by several different approaches known in the art. Most topical delivery approaches have been shown to work for delivery of DNA, such as but not limited to, topical application of non-cationic liposome-DNA complex, cationic liposome-DNA complex, particle-mediated (gene gun), puncture-mediated gene transfections, and viral delivery approaches. After delivery of the nucleic acid, gene products have been detected in a number of different skin cell types, including, but not limited to, basal keratinocytes, sebaceous gland cells, dermal fibroblasts and dermal macrophages.

[0673] In one embodiment, the invention provides for a variety of dressings (e.g., wound dressings) or bandages (e.g., adhesive bandages) for conveniently and/or effectively carrying out methods of the present invention. Typically dressing or bandages may comprise sufficient amounts of pharmaceutical compositions and/or polynucleotides, primary constructs or mmRNA described herein to allow a user to perform multiple treatments of a subject(s).

[0674] In one embodiment, the invention provides for the polynucleotides, primary constructs or mmRNA compositions to be delivered in more than one injection.

[0675] In one embodiment, before topical and/or transdermal administration at least one area of tissue, such as skin, may be subjected to a device and/or solution which may increase permeability. In one embodiment, the tissue may be subjected to an abrasion device to increase the permeability of the skin (see U.S. Patent Publication No. 20080275468, herein incorporated by reference in its entirety). In another embodiment, the tissue may be subjected to an ultrasound enhancement device. An ultrasound enhancement device may include, but is not limited to, the devices described in U.S. Publication No. 20040236268 and U.S. Pat. Nos. 6,491,657 and 6,234,990; each of which are herein incorporated by reference in their entireties. Methods of enhancing the permeability of tissue are described in U.S. Publication Nos. 20040171980 and 20040236268 and U.S. Pat. No. 6,190,315; each of which are herein incorporated by reference in their entireties.

[0676] In one embodiment, a device may be used to increase permeability of tissue before delivering formulations of modified mRNA described herein. The permeability of skin may be measured by methods known in the art and/or described in U.S. Pat. No. 6,190,315, herein incorporated by reference in its entirety. As a non-limiting example, a modified mRNA formulation may be delivered by the drug delivery methods described in U.S. Pat. No. 6,190,315, herein incorporated by reference in its entirety.

[0677] In another non-limiting example tissue may be treated with a eutectic mixture of local anesthetics (EMLA) cream before, during and/or after the tissue may be subjected to a device which may increase permeability. Katz et al. (Anesth Analg (2004); 98:371-76; herein incorporated by reference in its entirety) showed that using the EMLA cream in combination with a low energy, an onset of superficial cutaneous analgesia was seen as fast as 5 minutes after a pretreatment with a low energy ultrasound.

[0678] In one embodiment, enhancers may be applied to the tissue before, during, and/or after the tissue has been treated to increase permeability. Enhancers include, but are not limited to, transport enhancers, physical enhancers, and cavitation enhancers. Non-limiting examples of enhancers are described in U.S. Pat. No. 6,190,315, herein incorporated by reference in its entirety.

[0679] In one embodiment, a device may be used to increase permeability of tissue before delivering formulations of modified mRNA described herein, which may further contain a substance that invokes an immune response. In another non-limiting example, a formulation containing a substance to invoke an immune response may be delivered by the methods described in U.S. Publication Nos. 20040171980 and 20040236268; each of which are herein incorporated by reference in their entireties.

[0680] Dosage forms for topical and/or transdermal administration of a composition may include ointments, pastes, creams, lotions, gels, powders, solutions, sprays, inhalants and/or patches. Generally, an active ingredient is admixed under sterile conditions with a pharmaceutically acceptable excipient and/or any needed preservatives and/or buffers as may be required.

[0681] Additionally, the present invention contemplates the use of transdermal patches, which often have the added advantage of providing controlled delivery of a compound to the body. Such dosage forms may be prepared, for example, by dissolving and/or dispensing the compound in the proper medium. Alternatively or additionally, rate may be controlled by either providing a rate controlling membrane and/or by dispersing the compound in a polymer matrix and/or gel.

[0682] Formulations suitable for topical administration include, but are not limited to, liquid and/or semi liquid preparations such as liniments, lotions, oil in water and/or water in oil emulsions such as creams, ointments and/or pastes, and/or solutions and/or suspensions.

[0683] Topically-administrable formulations may, for example, comprise from about 0.1% to about 10% (w/w) active ingredient, although the concentration of active ingredient may be as high as the solubility limit of the active ingredient in the solvent. Formulations for topical administration may further comprise one or more of the additional ingredients described herein.

### Depot Administration

[0684] As described herein, in some embodiments, the composition is formulated in depots for extended release. Generally, a specific organ or tissue (a “target tissue”) is targeted for administration.

[0685] In some aspects of the invention, the polynucleotides, primary constructs or mmRNA are spatially retained within or proximal to a target tissue. Provided are method of providing a composition to a target tissue of a mammalian subject by contacting the target tissue (which contains one or more target cells) with the composition under conditions such that the composition, in particular the nucleic acid component(s) of the composition, is substantially retained in the target tissue, meaning that at least 10, 20, 30, 40, 50, 60, 70, 80, 85, 90, 95, 96, 97, 98, 99, 99.9, 99.99 or greater than 99.99% of the composition is retained in the target tissue. Advantageously, retention is determined by measuring the amount of the nucleic acid present in the composition that enters one or more target cells. For example, at least 1, 5, 10, 20, 30, 40, 50, 60, 70, 80, 85, 90, 95, 96, 97, 98, 99, 99.9, 99.99 or greater than 99.99% of the nucleic acids administered to the subject are present intracellularly at a period of time following administration. For example, intramuscular injection to a mammalian subject is performed using an aqueous composition containing a ribonucleic acid and a transfection reagent, and retention of the composition is determined by measuring the amount of the ribonucleic acid present in the muscle cells.

[0686] Aspects of the invention are directed to methods of providing a composition to a target tissue of a mammalian subject, by contacting the target tissue (containing one or more target cells) with the composition under conditions such that the composition is substantially retained in the target tissue. The composition contains an effective amount of a polynucleotides, primary constructs or mmRNA such that the polypeptide of interest is produced in at least one target cell. The compositions generally contain a cell penetration agent, although “naked” nucleic acid (such as nucleic acids without a cell penetration agent or other agent) is also contemplated, and a pharmaceutically acceptable carrier.

[0687] In some circumstances, the amount of a protein produced by cells in a tissue is desirably increased. Preferably, this increase in protein production is spatially restricted to cells within the target tissue. Thus, provided are methods of increasing production of a protein of interest in a tissue of a mammalian subject. A composition is provided that contains polynucleotides, primary constructs or mmRNA characterized in that a unit quantity of composition has been determined to produce the polypeptide of interest in a substantial percentage of cells contained within a predetermined volume of the target tissue.

[0688] In some embodiments, the composition includes a plurality of different polynucleotides, primary constructs or mmRNA, where one or more than one of the polynucleotides, primary constructs or mmRNA encodes a polypeptide of interest. Optionally, the composition also contains a cell penetration agent to assist in the intracellular delivery of the composition. A determination is made of the dose of the composition required to produce the polypeptide of interest in a substantial percentage of cells contained within the predetermined volume of the target tissue (generally, without inducing significant production of the polypeptide of interest in tissue adjacent to the predetermined volume, or distally to the target tissue). Subsequent to this determination, the determined dose is introduced directly into the tissue of the mammalian subject.

[0689] In one embodiment, the invention provides for the polynucleotides, primary constructs or mmRNA to be delivered in more than one injection or by split dose injections.

[0690] In one embodiment, the invention may be retained near target tissue using a small disposable drug reservoir, patch pump or osmotic pump. Non-limiting examples of patch pumps include those manufactured and/or sold by BD® (Franklin Lakes, NJ), Insulet Corporation (Bedford, MA), SteadyMed Therapeutics (San Francisco, CA), Medtronic (Minneapolis, MN) (e.g., MiniMed), UniLife (York, PA), Valeritas (Bridgewater, NJ), and SpringLeaf Therapeutics (Boston, MA). A non-limiting example of an osmotic pump include those manufactured by DURECT® (Cupertino, CA) (e.g., DUROS® and ALZET®).

### Pulmonary Administration

[0691] A pharmaceutical composition may be prepared, packaged, and/or sold in a formulation suitable for pulmonary administration via the buccal cavity. Such a formulation may comprise dry particles which comprise the active ingredient and which have a diameter in the range from about 0.5 nm to about 7 nm or from about 1 nm to about 6 nm. Such compositions are suitably in the form of dry powders for administration using a device comprising a dry powder reservoir to which a stream of propellant may be directed to disperse the powder and/or using a self propelling solvent/powder dispensing container such as a device comprising the active ingredient dissolved and/or suspended in a low-boiling propellant in a sealed container. Such powders comprise particles wherein at least 98% of the particles by weight have a diameter greater than 0.5 nm and at least 95% of the particles by number have a diameter less than 7 nm. Alternatively, at least 95% of the particles by weight have a diameter greater than 1 nm and at least 90% of the particles by number have a diameter less than 6 nm. Dry powder compositions may include a solid fine powder diluent such as sugar and are conveniently provided in a unit dose form.

[0692] Low boiling propellants generally include liquid propellants having a boiling point of below 65° F. at atmospheric pressure. Generally the propellant may constitute 50% to 99.9% (w/w) of the composition, and active ingredient may constitute 0.1% to 20% (w/w) of the composition. A propellant may further comprise additional ingredients such as a liquid non-ionic and/or solid anionic surfactant and/or a solid diluent (which may have a particle size of the same order as particles comprising the active ingredient).

[0693] As a non-limiting example, the polynucleotides, primary constructs and/or mmRNA described herein may be formulated for pulmonary delivery by the methods described in U.S. Pat. No. 8,257,685; herein incorporated by reference in its entirety.

[0694] Pharmaceutical compositions formulated for pulmonary delivery may provide an active ingredient in the form of droplets of a solution and/or suspension. Such formulations may be prepared, packaged, and/or sold as aqueous and/or dilute alcoholic solutions and/or suspensions, optionally sterile, comprising active ingredient, and may conveniently be administered using any nebulization and/or atomization device. Such formulations may further comprise one or more additional ingredients including, but not limited to, a flavoring agent such as saccharin sodium, a volatile oil, a buffering agent, a surface active agent, and/or a preservative such as methylhydroxybenzoate. Droplets provided by this route of administration may have an average diameter in the range from about 0.1 nm to about 200 nm.

### Intranasal, Nasal and Buccal Administration

[0695] Formulations described herein as being useful for pulmonary delivery are useful for intranasal delivery of a pharmaceutical composition. Another formulation suitable for intranasal administration is a coarse powder comprising the active ingredient and having an average particle from about 0.2 μm to 500 μm. Such a formulation is administered in the manner in which snuff is taken, i.e. by rapid inhalation through the nasal passage from a container of the powder held close to the nose.

[0696] Formulations suitable for nasal administration may, for example, comprise from about as little as 0.1% (w/w) and as much as 100% (w/w) of active ingredient, and may comprise one or more of the additional ingredients described herein. A pharmaceutical composition may be prepared, packaged, and/or sold in a formulation suitable for buccal administration. Such formulations may, for example, be in the form of tablets and/or lozenges made using conventional methods, and may, for example, 0.1% to 20% (w/w) active ingredient, the balance comprising an orally dissolvable and/or degradable composition and, optionally, one or more of the additional ingredients described herein. Alternately, formulations suitable for buccal administration may comprise a powder and/or an aerosolized and/or atomized solution and/or suspension comprising active ingredient. Such powdered, aerosolized, and/or aerosolized formulations, when dispersed, may have an average particle and/or droplet size in the range from about 0.1 nm to about 200 nm, and may further comprise one or more of any additional ingredients described herein.

### Ophthalmic Administration

[0697] A pharmaceutical composition may be prepared, packaged, and/or sold in a formulation suitable for ophthalmic administration. Such formulations may, for example, be in the form of eye drops including, for example, a 0.1/1.0% (w/w) solution and/or suspension of the active ingredient in an aqueous or oily liquid excipient. Such drops may further comprise buffering agents, salts, and/or one or more other of any additional ingredients described herein. Other ophthalmically-administrable formulations which are useful include those which comprise the active ingredient in microcrystalline form and/or in a liposomal preparation. Ear drops and/or eye drops are contemplated as being within the scope of this invention. A multilayer thin film device may be prepared to contain a pharmaceutical composition for delivery to the eye and/or surrounding tissue.

### Payload Administration: Detectable Agents and Therapeutic Agents

[0698] The polynucleotides, primary constructs or mmRNA described herein can be used in a number of different scenarios in which delivery of a substance (the “payload”) to a biological target is desired, for example delivery of detectable substances for detection of the target, or delivery of a therapeutic agent. Detection methods can include, but are not limited to, both imaging in vitro and in vivo imaging methods, e.g., immunohistochemistry, bioluminescence imaging (BLI), Magnetic Resonance Imaging (MRI), positron emission tomography (PET), electron microscopy, X-ray computed tomography, Raman imaging, optical coherence tomography, absorption imaging, thermal imaging, fluorescence reflectance imaging, fluorescence microscopy, fluorescence molecular tomographic imaging, nuclear magnetic resonance imaging, X-ray imaging, ultrasound imaging, photoacoustic imaging, lab assays, or in any situation where tagging/staining/imaging is required.

[0699] The polynucleotides, primary constructs or mmRNA can be designed to include both a linker and a payload in any useful orientation. For example, a linker having two ends is used to attach one end to the payload and the other end to the nucleobase, such as at the C-7 or C-8 positions of the deaza-adenosine or deaza-guanosine or to the N-3 or C-5 positions of cytosine or uracil. The polynucleotide of the invention can include more than one payload (e.g., a label and a transcription inhibitor), as well as a cleavable linker. In one embodiment, the modified nucleotide is a modified 7-deaza-adenosine triphosphate, where one end of a cleavable linker is attached to the C7 position of 7-deaza-adenine, the other end of the linker is attached to an inhibitor (e.g., to the C5 position of the nucleobase on a cytidine), and a label (e.g., Cy5) is attached to the center of the linker (see, e.g., compound 1 of A*pCp C5 Parg Capless in FIG. 5 and columns 9 and 10 of U.S. Pat. No. 7,994,304, incorporated herein by reference). Upon incorporation of the modified 7-deaza-adenosine triphosphate to an encoding region, the resulting polynucleotide having a cleavable linker attached to a label and an inhibitor (e.g., a polymerase inhibitor). Upon cleavage of the linker (e.g., with reductive conditions to reduce a linker having a cleavable disulfide moiety), the label and inhibitor are released. Additional linkers and payloads (e.g., therapeutic agents, detectable labels, and cell penetrating payloads) are described herein.

[0700] Scheme 12 below depicts an exemplary modified nucleotide wherein the nucleobase, adenine, is attached to a linker at the C-7 carbon of 7-deaza adenine. In addition, Scheme 12 depicts the modified nucleotide with the linker and payload, e.g., a detectable agent, incorporated onto the 3′ end of the mRNA. Disulfide cleavage and 1,2-addition of the thiol group onto the propargyl ester releases the detectable agent. The remaining structure (depicted, for example, as pApC5Parg in Scheme 12) is the inhibitor. The rationale for the structure of the modified nucleotides is that the tethered inhibitor sterically interferes with the ability of the polymerase to incorporate a second base. Thus, it is critical that the tether be long enough to affect this function and that the inhibiter be in a stereochemical orientation that inhibits or prohibits second and follow on nucleotides into the growing polynucleotide strand.

[chemical structure]

[0701] For example, the polynucleotides, primary constructs or mmRNA described herein can be used in reprogramming induced pluripotent stem cells (iPS cells), which can directly track cells that are transfected compared to total cells in the cluster. In another example, a drug that may be attached to the polynucleotides, primary constructs or mmRNA via a linker and may be fluorescently labeled can be used to track the drug in vivo, e.g. intracellularly. Other examples include, but are not limited to, the use of a polynucleotides, primary constructs or mmRNA in reversible drug delivery into cells.

[0702] The polynucleotides, primary constructs or mmRNA described herein can be used in intracellular targeting of a payload, e.g., detectable or therapeutic agent, to specific organelle. Exemplary intracellular targets can include, but are not limited to, the nuclear localization for advanced mRNA processing, or a nuclear localization sequence (NLS) linked to the mRNA containing an inhibitor.

[0703] In addition, the polynucleotides, primary constructs or mmRNA described herein can be used to deliver therapeutic agents to cells or tissues, e.g., in living animals. For example, the polynucleotides, primary constructs or mmRNA described herein can be used to deliver highly polar chemotherapeutics agents to kill cancer cells. The polynucleotides, primary constructs or mmRNA attached to the therapeutic agent through a linker can facilitate member permeation allowing the therapeutic agent to travel into a cell to reach an intracellular target.

[0704] In one example, the linker is attached at the 2′-position of the ribose ring and/or at the 3′ and/or 5′ position of the polynucleotides, primary constructs mmRNA (See e.g., International Pub. No. WO2012030683, herein incorporated by reference in its entirety). The linker may be any linker disclosed herein, known in the art and/or disclosed in International Pub. No. WO2012030683, herein incorporated by reference in its entirety.

[0705] In another example, the polynucleotides, primary constructs or mmRNA can be attached to the polynucleotides, primary constructs or mmRNA a viral inhibitory peptide (VIP) through a cleavable linker. The cleavable linker can release the VIP and dye into the cell. In another example, the polynucleotides, primary constructs or mmRNA can be attached through the linker to an ADP-ribosylate, which is responsible for the actions of some bacterial toxins, such as cholera toxin, diphtheria toxin, and pertussis toxin. These toxin proteins are ADP-ribosyltransferases that modify target proteins in human cells. For example, cholera toxin ADP-ribosylates G proteins modifies human cells by causing massive fluid secretion from the lining of the small intestine, which results in life-threatening diarrhea.

[0706] In some embodiments, the payload may be a therapeutic agent such as a cytotoxin, radioactive ion, chemotherapeutic, or other therapeutic agent. A cytotoxin or cytotoxic agent includes any agent that may be detrimental to cells. Examples include, but are not limited to, taxol, cytochalasin B, gramicidin D, ethidium bromide, emetine, mitomycin, etoposide, teniposide, vincristine, vinblastine, colchicine, doxorubicin, daunorubicin, dihydroxyanthracinedione, mitoxantrone, mithramycin, actinomycin D, 1-dehydrotestosterone, glucocorticoids, procaine, tetracaine, lidocaine, propranolol, puromycin, maytansinoids, e.g., maytansinol (see U.S. Pat. No. 5,208,020 incorporated herein in its entirety), rachelmycin (CC-1065, see U.S. Pat. Nos. 5,475,092, 5,585,499, and 5,846,545, all of which are incorporated herein by reference), and analogs or homologs thereof. Radioactive ions include, but are not limited to iodine (e.g., iodine 125 or iodine 131), strontium 89, phosphorous, palladium, cesium, iridium, phosphate, cobalt, yttrium 90, samarium 153, and praseodymium. Other therapeutic agents include, but are not limited to, antimetabolites (e.g., methotrexate, 6-mercaptopurine, 6-thioguanine, cytarabine, 5-fluorouracil decarbazine), alkylating agents (e.g., mechlorethamine, thiotepa chlorambucil, rachelmycin (CC-1065), melphalan, carmustine (BSNU), lomustine (CCNU), cyclophosphamide, busulfan, dibromomannitol, streptozotocin, mitomycin C, and cis-dichlorodiamine platinum (II) (DDP) cisplatin), anthracyclines (e.g., daunorubicin (formerly daunomycin) and doxorubicin), antibiotics (e.g., dactinomycin (formerly actinomycin), bleomycin, mithramycin, and anthramycin (AMC)), and anti-mitotic agents (e.g., vincristine, vinblastine, taxol and maytansinoids).

[0707] In some embodiments, the payload may be a detectable agent, such as various organic small molecules, inorganic compounds, nanoparticles, enzymes or enzyme substrates, fluorescent materials, luminescent materials (e.g., luminol), bioluminescent materials (e.g., luciferase, luciferin, and aequorin), chemiluminescent materials, radioactive materials (e.g., ¹⁸F, ⁶⁷Ga, ^{81m}Kr, ⁸²Rb, ¹¹¹In, ¹²³I, ¹³³Xe, ²⁰¹Tl, ¹²⁵I, ³⁵S, ¹⁴C, ³H, or ^{99m}Tc (e.g., as pertechnetate (technetate(VII), TcO₄⁻)), and contrast agents (e.g., gold (e.g., gold nanoparticles), gadolinium (e.g., chelated Gd), iron oxides (e.g., superparamagnetic iron oxide (SPIO), monocrystalline iron oxide nanoparticles (MIONs), and ultrasmall superparamagnetic iron oxide (USPIO)), manganese chelates (e.g., Mn-DPDP), barium sulfate, iodinated contrast media (iohexol), microbubbles, or perfluorocarbons). Such optically-detectable labels include for example, without limitation, 4-acetamido-4′-isothiocyanatostilbene-2,2′disulfonic acid; acridine and derivatives (e.g., acridine and acridine isothiocyanate); 5-(2′-aminoethyl)aminonaphthalene-1-sulfonic acid (EDANS); 4-amino-N-[3-vinylsulfonyl)phenyl]naphthalimide-3,5 disulfonate; N-(4-anilino-1-naphthyl)maleimide; anthranilamide; BODIPY; Brilliant Yellow; coumarin and derivatives (e.g., coumarin, 7-amino-4-methylcoumarin (AMC, Coumarin 120), and 7-amino-4-trifluoromethylcoumarin (Coumarin 151)); cyanine dyes; cyanosine; 4′,6-diaminidino-2-phenylindole (DAPI); 5′ 5″-dibromopyrogallol-sulfonaphthalein (Bromopyrogallol Red); 7-diethylamino-3-(4′-isothiocyanatophenyl)-4-methylcoumarin; diethylenetriamine pentaacetate; 4,4′-diisothiocyanatodihydro-stilbene-2,2′-disulfonic acid; 4,4′-diisothiocyanatostilbene-2,2′-disulfonic acid; 5-[dimethylamino]-naphthalene-1-sulfonyl chloride (DNS, dansylchloride); 4-dimethylaminophenylazophenyl-4′-isothiocyanate (DABITC); eosin and derivatives (e.g., eosin and eosin isothiocyanate); erythrosin and derivatives (e.g., erythrosin B and erythrosin isothiocyanate); ethidium; fluorescein and derivatives (e.g., 5-carboxyfluorescein (FAM), 5-(4,6-dichlorotriazin-2-yl)aminofluorescein (DTAF), 2′,7′-dimethoxy-4′5′-dichloro-6-carboxyfluorescein, fluorescein, fluorescein isothiocyanate, X-rhodamine-5-(and -6)-isothiocyanate (QFITC or XRITC), and fluorescamine); 2-[2-[3-[[1,3-dihydro-1,1-dimethyl-3-(3-sulfopropyl)-2H-benz[e]indol-2-ylidene]ethylidene]-2-[4-(ethoxycarbonyl)-1-piperazinyl]-1-cyclopenten-1-yl]ethenyl]-1,1-dimethyl-3-(3-sulforpropyl)-1H-benz[e]indolium hydroxide, inner salt, compound with n,n-diethylethanamine(1:1) (IR144); 5-chloro-2-[2-[3-[(5-chloro-3-ethyl-2(3H)-benzothiazol-ylidene)ethylidene]-2-(diphenylamino)-1-cyclopenten-1-yl]ethenyl]-3-ethyl benzothiazolium perchlorate (IR140); Malachite Green isothiocyanate; 4-methylumbelliferone orthocresolphthalein; nitrotyrosine; pararosaniline; Phenol Red; B-phycoerythrin; o-phthaldialdehyde; pyrene and derivatives (e.g., pyrene, pyrene butyrate, and succinimidyl 1-pyrene); butyrate quantum dots; Reactive Red 4 (CIBACRON™ Brilliant Red 3B-A); rhodamine and derivatives (e.g., 6-carboxy-X-rhodamine (ROX), 6-carboxyrhodamine (R6G), lissamine rhodamine B sulfonyl chloride rhodarnine (Rhod), rhodamine B, rhodamine 123, rhodamine X isothiocyanate, sulforhodamine B, sulforhodamine 101, sulfonyl chloride derivative of sulforhodamine 101 (Texas Red), N,N,N′,N′tetramethyl-6-carboxyrhodamine (TAMRA) tetramethyl rhodamine, and tetramethyl rhodamine isothiocyanate (TRITC)); riboflavin; rosolic acid; terbium chelate derivatives; Cyanine-3 (Cy3); Cyanine-5 (Cy5); cyanine-5.5 (Cy5.5), Cyanine-7 (Cy7); IRD 700; IRD 800; Alexa 647; La Jolta Blue; phthalo cyanine; and naphthalo cyanine.

[0708] In some embodiments, the detectable agent may be a non-detectable pre-cursor that becomes detectable upon activation (e.g., fluorogenic tetrazine-fluorophore constructs (e.g., tetrazine-BODIPY FL, tetrazine-Oregon Green 488, or tetrazine-BODIPY TMR-X) or enzyme activatable fluorogenic agents (e.g., PROSENSE® (VisEn Medical))). In vitro assays in which the enzyme labeled compositions can be used include, but are not limited to, enzyme linked immunosorbent assays (ELISAs), immunoprecipitation assays, immunofluorescence, enzyme immunoassays (EIA), radioimmunoassays (RIA), and Western blot analysis.

### Combinations

[0709] The polynucleotides, primary constructs or mmRNA may be used in combination with one or more other therapeutic, prophylactic, diagnostic, or imaging agents. By “in combination with,” it is not intended to imply that the agents must be administered at the same time and/or formulated for delivery together, although these methods of delivery are within the scope of the present disclosure. Compositions can be administered concurrently with, prior to, or subsequent to, one or more other desired therapeutics or medical procedures. In general, each agent will be administered at a dose and/or on a time schedule determined for that agent. In some embodiments, the present disclosure encompasses the delivery of pharmaceutical, prophylactic, diagnostic, or imaging compositions in combination with agents that may improve their bioavailability, reduce and/or modify their metabolism, inhibit their excretion, and/or modify their distribution within the body. As a non-limiting example, the nucleic acids or mmRNA may be used in combination with a pharmaceutical agent for the treatment of cancer or to control hyperproliferative cells. In U.S. Pat. No. 7,964,571, herein incorporated by reference in its entirety, a combination therapy for the treatment of solid primary or metastasized tumor is described using a pharmaceutical composition including a DNA plasmid encoding for interleukin-12 with a lipopolymer and also administering at least one anticancer agent or chemotherapeutic. Further, the nucleic acids and mmRNA of the present invention that encodes anti-proliferative molecules may be in a pharmaceutical composition with a lipopolymer (see e.g., U.S. Pub. No. 20110218231, herein incorporated by reference in its entirety, claiming a pharmaceutical composition comprising a DNA plasmid encoding an anti-proliferative molecule and a lipopolymer) which may be administered with at least one chemotherapeutic or anticancer agent.

[0710] It will further be appreciated that therapeutically, prophylactically, diagnostically, or imaging active agents utilized in combination may be administered together in a single composition or administered separately in different compositions. In general, it is expected that agents utilized in combination with be utilized at levels that do not exceed the levels at which they are utilized individually. In some embodiments, the levels utilized in combination will be lower than those utilized individually. In one embodiment, the combinations, each or together may be administered according to the split dosing regimens described herein.

### Dosing

[0711] The present invention provides methods comprising administering modified mRNAs and their encoded proteins or complexes in accordance with the invention to a subject in need thereof. Nucleic acids, proteins or complexes, or pharmaceutical, imaging, diagnostic, or prophylactic compositions thereof, may be administered to a subject using any amount and any route of administration effective for preventing, treating, diagnosing, or imaging a disease, disorder, and/or condition (e.g., a disease, disorder, and/or condition relating to working memory deficits). The exact amount required will vary from subject to subject, depending on the species, age, and general condition of the subject, the severity of the disease, the particular composition, its mode of administration, its mode of activity, and the like. Compositions in accordance with the invention are typically formulated in dosage unit form for ease of administration and uniformity of dosage. It will be understood, however, that the total daily usage of the compositions of the present invention may be decided by the attending physician within the scope of sound medical judgment. The specific therapeutically effective, prophylactically effective, or appropriate imaging dose level for any particular patient will depend upon a variety of factors including the disorder being treated and the severity of the disorder; the activity of the specific compound employed; the specific composition employed; the age, body weight, general health, sex and diet of the patient; the time of administration, route of administration, and rate of excretion of the specific compound employed; the duration of the treatment; drugs used in combination or coincidental with the specific compound employed; and like factors well known in the medical arts.

[0712] In certain embodiments, compositions in accordance with the present invention may be administered at dosage levels sufficient to deliver from about 0.0001 mg/kg to about 100 mg/kg, from about 0.001 mg/kg to about 0.05 mg/kg, from about 0.005 mg/kg to about 0.05 mg/kg, from about 0.001 mg/kg to about 0.005 mg/kg, from about 0.05 mg/kg to about 0.5 mg/kg, from about 0.01 mg/kg to about 50 mg/kg, from about 0.1 mg/kg to about 40 mg/kg, from about 0.5 mg/kg to about 30 mg/kg, from about 0.01 mg/kg to about 10 mg/kg, from about 0.1 mg/kg to about 10 mg/kg, or from about 1 mg/kg to about 25 mg/kg, of subject body weight per day, one or more times a day, to obtain the desired therapeutic, diagnostic, prophylactic, or imaging effect. The desired dosage may be delivered three times a day, two times a day, once a day, every other day, every third day, every week, every two weeks, every three weeks, or every four weeks. In certain embodiments, the desired dosage may be delivered using multiple administrations (e.g., two, three, four, five, six, seven, eight, nine, ten, eleven, twelve, thirteen, fourteen, or more administrations). When multiple administrations are employed, split dosing regimens such as those described herein may be used.

[0713] According to the present invention, it has been discovered that administration of mmRNA in split-dose regimens produce higher levels of proteins in mammalian subjects. As used herein, a “split dose” is the division of single unit dose or total daily dose into two or more doses, e.g, two or more administrations of the single unit dose. As used herein, a “single unit dose” is a dose of any therapeutic administed in one dose/at one time/single route/single point of contact, i.e., single administration event. As used herein, a “total daily dose” is an amount given or prescribed in 24 hr period. It may be administered as a single unit dose. In one embodiment, the mmRNA of the present invention are administed to a subject in split doses. The mmRNA may be formulated in buffer only or in a formulation described herein.

### Dosage Forms

[0714] A pharmaceutical composition described herein can be formulated into a dosage form described herein, such as a topical, intranasal, intratracheal, or injectable (e.g., intravenous, intraocular, intravitreal, intramuscular, intracardiac, intraperitoneal, subcutaneous).

### Liquid Dosage Forms

[0715] Liquid dosage forms for parenteral administration include, but are not limited to, pharmaceutically acceptable emulsions, microemulsions, solutions, suspensions, syrups, and/or elixirs. In addition to active ingredients, liquid dosage forms may comprise inert diluents commonly used in the art including, but not limited to, water or other solvents, solubilizing agents and emulsifiers such as ethyl alcohol, isopropyl alcohol, ethyl carbonate, ethyl acetate, benzyl alcohol, benzyl benzoate, propylene glycol, 1,3-butylene glycol, dimethylformamide, oils (in particular, cottonseed, groundnut, corn, germ, olive, castor, and sesame oils), glycerol, tetrahydrofurfuryl alcohol, polyethylene glycols and fatty acid esters of sorbitan, and mixtures thereof. In certain embodiments for parenteral administration, compositions may be mixed with solubilizing agents such as CREMOPHOR®, alcohols, oils, modified oils, glycols, polysorbates, cyclodextrins, polymers, and/or combinations thereof.

### Injectable

[0716] Injectable preparations, for example, sterile injectable aqueous or oleaginous suspensions may be formulated according to the known art and may include suitable dispersing agents, wetting agents, and/or suspending agents. Sterile injectable preparations may be sterile injectable solutions, suspensions, and/or emulsions in nontoxic parenterally acceptable diluents and/or solvents, for example, a solution in 1,3-butanediol. Among the acceptable vehicles and solvents that may be employed include, but are not limited to, water, Ringer's solution, U.S.P., and isotonic sodium chloride solution. Sterile, fixed oils are conventionally employed as a solvent or suspending medium. For this purpose any bland fixed oil can be employed including synthetic mono- or diglycerides. Fatty acids such as oleic acid can be used in the preparation of injectables.

[0717] Injectable formulations can be sterilized, for example, by filtration through a bacterial-retaining filter, and/or by incorporating sterilizing agents in the form of sterile solid compositions which can be dissolved or dispersed in sterile water or other sterile injectable medium prior to use. In order to prolong the effect of an active ingredient, it may be desirable to slow the absorption of the active ingredient from subcutaneous or intramuscular injection. This may be accomplished by the use of a liquid suspension of crystalline or amorphous material with poor water solubility. The rate of absorption of the polynucleotide, primary construct or mmRNA then depends upon its rate of dissolution which, in turn, may depend upon crystal size and crystalline form. Alternatively, delayed absorption of a parenterally administered polynucleotide, primary construct or mmRNA may be accomplished by dissolving or suspending the polynucleotide, primary construct or mmRNA in an oil vehicle. Injectable depot forms are made by forming microencapsule matrices of the polynucleotide, primary construct or mmRNA in biodegradable polymers such as polylactide-polyglycolide. Depending upon the ratio of polynucleotide, primary construct or mmRNA to polymer and the nature of the particular polymer employed, the rate of polynucleotide, primary construct or mmRNA release can be controlled. Examples of other biodegradable polymers include, but are not limited to, poly(orthoesters) and poly(anhydrides). Depot injectable formulations may be prepared by entrapping the polynucleotide, primary construct or mmRNA in liposomes or microemulsions which are compatible with body tissues.

### Pulmonary

[0718] Formulations described herein as being useful for pulmonary delivery may also be used for intranasal delivery of a pharmaceutical composition. Another formulation suitable for intranasal administration may be a coarse powder comprising the active ingredient and having an average particle from about 0.2 μm to 500 μm. Such a formulation may be administered in the manner in which snuff is taken, i.e. by rapid inhalation through the nasal passage from a container of the powder held close to the nose.

[0719] Formulations suitable for nasal administration may, for example, comprise from about as little as 0.1% (w/w) and as much as 100% (w/w) of active ingredient, and may comprise one or more of the additional ingredients described herein. A pharmaceutical composition may be prepared, packaged, and/or sold in a formulation suitable for buccal administration. Such formulations may, for example, be in the form of tablets and/or lozenges made using conventional methods, and may, for example, contain about 0.1% to 20% (w/w) active ingredient, where the balance may comprise an orally dissolvable and/or degradable composition and, optionally, one or more of the additional ingredients described herein. Alternately, formulations suitable for buccal administration may comprise a powder and/or an aerosolized and/or atomized solution and/or suspension comprising active ingredient. Such powdered, aerosolized, and/or aerosolized formulations, when dispersed, may have an average particle and/or droplet size in the range from about 0.1 nm to about 200 nm, and may further comprise one or more of any additional ingredients described herein.

[0720] General considerations in the formulation and/or manufacture of pharmaceutical agents may be found, for example, in Remington: The Science and Practice of Pharmacy 21^{st} ed., Lippincott Williams & Wilkins, 2005 (incorporated herein by reference in its entirety).

### Coatings or Shells

[0721] Solid dosage forms of tablets, dragees, capsules, pills, and granules can be prepared with coatings and shells such as enteric coatings and other coatings well known in the pharmaceutical formulating art. They may optionally comprise opacifying agents and can be of a composition that they release the active ingredient(s) only, or preferentially, in a certain part of the intestinal tract, optionally, in a delayed manner. Examples of embedding compositions which can be used include polymeric substances and waxes. Solid compositions of a similar type may be employed as fillers in soft and hard-filled gelatin capsules using such excipients as lactose or milk sugar as well as high molecular weight polyethylene glycols and the like.

### Properties of Pharmaceutical Compositions

[0722] The pharmaceutical compositions described herein can be characterized by one or more of bioavailability, therapeutic window and/or volume of distribution.

### Bioavailability

[0723] The polynucleotides, primary constructs or mmRNA, when formulated into a composition with a delivery agent as described herein, can exhibit an increase in bioavailability as compared to a composition lacking a delivery agent as described herein. As used herein, the term “bioavailability” refers to the systemic availability of a given amount of polynucleotides, primary constructs or mmRNA administered to a mammal. Bioavailability can be assessed by measuring the area under the curve (AUC) or the maximum serum or plasma concentration (Cₘₐₓ) of the unchanged form of a compound following administration of the compound to a mammal. AUC is a determination of the area under the curve plotting the serum or plasma concentration of a compound along the ordinate (Y-axis) against time along the abscissa (X-axis). Generally, the AUC for a particular compound can be calculated using methods known to those of ordinary skill in the art and as described in G. S. Banker, Modern Pharmaceutics, Drugs and the Pharmaceutical Sciences, v. 72, Marcel Dekker, New York, Inc., 1996, herein incorporated by reference in its entirety.

[0724] The Cₘₐₓ value is the maximum concentration of the compound achieved in the serum or plasma of a mammal following administration of the compound to the mammal. The Cₘₐₓ value of a particular compound can be measured using methods known to those of ordinary skill in the art. The phrases “increasing bioavailability” or “improving the pharmacokinetics,” as used herein mean that the systemic availability of a first polynucleotide, primary construct or mmRNA, measured as AUC, Cₘₐₓ, or Cₘᵢₙ in a mammal is greater, when co-administered with a delivery agent as described herein, than when such co-administration does not take place. In some embodiments, the bioavailability of the polynucleotide, primary construct or mmRNA can increase by at least about 2%, at least about 5%, at least about 10%, at least about 15%, at least about 20%, at least about 25%, at least about 30%, at least about 35%, at least about 40%, at least about 45%, at least about 50%, at least about 55%, at least about 60%, at least about 65%, at least about 70%, at least about 75%, at least about 80%, at least about 85%, at least about 90%, at least about 95%, or about 100%.

### Therapeutic Window

[0725] The polynucleotides, primary constructs or mmRNA, when formulated into a composition with a delivery agent as described herein, can exhibit an increase in the therapeutic window of the administered polynucleotide, primary construct or mmRNA composition as compared to the therapeutic window of the administered polynucleotide, primary construct or mmRNA composition lacking a delivery agent as described herein. As used herein “therapeutic window” refers to the range of plasma concentrations, or the range of levels of therapeutically active substance at the site of action, with a high probability of eliciting a therapeutic effect. In some embodiments, the therapeutic window of the polynucleotide, primary construct or mmRNA when co-administered with a delivery agent as described herein can increase by at least about 2%, at least about 5%, at least about 10%, at least about 15%, at least about 20%, at least about 25%, at least about 30%, at least about 35%, at least about 40%, at least about 45%, at least about 50%, at least about 55%, at least about 60%, at least about 65%, at least about 70%, at least about 75%, at least about 80%, at least about 85%, at least about 90%, at least about 95%, or about 100%.

### Volume of Distribution

[0726] The polynucleotides, primary constructs or mmRNA, when formulated into a composition with a delivery agent as described herein, can exhibit an improved volume of distribution (V_{dist}), e.g., reduced or targeted, relative to a composition lacking a delivery agent as described herein. The volume of distribution (Vdist) relates the amount of the drug in the body to the concentration of the drug in the blood or plasma. As used herein, the term “volume of distribution” refers to the fluid volume that would be required to contain the total amount of the drug in the body at the same concentration as in the blood or plasma: Vdist equals the amount of drug in the body/concentration of drug in blood or plasma. For example, for a 10 mg dose and a plasma concentration of 10 mg/L, the volume of distribution would be 1 liter. The volume of distribution reflects the extent to which the drug is present in the extravascular tissue. A large volume of distribution reflects the tendency of a compound to bind to the tissue components compared with plasma protein binding. In a clinical setting, Vdist can be used to determine a loading dose to achieve a steady state concentration. In some embodiments, the volume of distribution of the polynucleotide, primary construct or mmRNA when co-administered with a delivery agent as described herein can decrease at least about 2%, at least about 5%, at least about 10%, at least about 15%, at least about 20%, at least about 25%, at least about 30%, at least about 35%, at least about 40%, at least about 45%, at least about 50%, at least about 55%, at least about 60%, at least about 65%, at least about 70%.

### Biological Effect

[0727] In one embodiment, the biological effect of the modified mRNA delivered to the animals may be categorized by analyzing the protein expression in the animals. The protein expression may be determined from analyzing a biological sample collected from a mammal administered the modified mRNA of the present invention. In one embodiment, the expression protein encoded by the modified mRNA administered to the mammal of at least 50 pg/ml may be preferred. For example, a protein expression of 50-200 pg/ml for the protein encoded by the modified mRNA delivered to the mammal may be seen as a therapeutically effective amount of protein in the mammal.

### Detection of Modified Nucleic Acids by Mass Spectrometry

[0728] Mass spectrometry (MS) is an analytical technique that can provide structural and molecular mass/concentration information on molecules after their conversion to ions. The molecules are first ionized to acquire positive or negative charges and then they travel through the mass analyzer to arrive at different areas of the detector according to their mass/charge (m/z) ratio.

[0729] Mass spectrometry is performed using a mass spectrometer which includes an ion source for ionizing the fractionated sample and creating charged molecules for further analysis. For example ionization of the sample may be performed by electrospray ionization (ESI), atmospheric pressure chemical ionization (APCI), photoionization, electron ionization, fast atom bombardment (FAB)/liquid secondary ionization (LSIMS), matrix assisted laser desorption/ionization (MALDI), field ionization, field desorption, thermospray/plasmaspray ionization, and particle beam ionization. The skilled artisan will understand that the choice of ionization method can be determined based on the analyte to be measured, type of sample, the type of detector, the choice of positive versus negative mode, etc.

[0730] After the sample has been ionized, the positively charged or negatively charged ions thereby created may be analyzed to determine a mass-to-charge ratio (i.e., m/z). Suitable analyzers for determining mass-to-charge ratios include quadropole analyzers, ion traps analyzers, and time-of-flight analyzers. The ions may be detected using several detection modes. For example, selected ions may be detected (i.e., using a selective ion monitoring mode (SIM)), or alternatively, ions may be detected using a scanning mode, e.g., multiple reaction monitoring (MRM) or selected reaction monitoring (SRM).

[0731] Liquid chromatography-multiple reaction monitoring (LC-MS/MRM) coupled with stable isotope labeled dilution of peptide standards has been shown to be an effective method for protein verification (e.g., Keshishian et al., Mol Cell Proteomics 2009 8: 2339-2349; Kuhn et al., Clin Chem 2009 55:1108-1117; Lopez et al., Clin Chem 2010 56:281-290; each of which are herein incorporated by reference in its entirety). Unlike untargeted mass spectrometry frequently used in biomarker discovery studies, targeted MS methods are peptide sequence-based modes of MS that focus the full analytical capacity of the instrument on tens to hundreds of selected peptides in a complex mixture. By restricting detection and fragmentation to only those peptides derived from proteins of interest, sensitivity and reproducibility are improved dramatically compared to discovery-mode MS methods. This method of mass spectrometry-based multiple reaction monitoring (MRM) quantitation of proteins can dramatically impact the discovery and quantitation of biomarkers via rapid, targeted, multiplexed protein expression profiling of clinical samples.

[0732] In one embodiment, a biological sample which may contain at least one protein encoded by at least one modified mRNA of the present invention may be analyzed by the method of MRM-MS. The quantification of the biological sample may further include, but is not limited to, isotopically labeled peptides or proteins as internal standards.

[0733] According to the present invention, the biological sample, once obtained from the subject, may be subjected to enzyme digestion. As used herein, the term “digest” means to break apart into shorter peptides. As used herein, the phrase “treating a sample to digest proteins” means manipulating a sample in such a way as to break down proteins in a sample. These enzymes include, but are not limited to, trypsin, endoproteinase Glu-C and chymotrypsin. In one embodiment, a biological sample which may contain at least one protein encoded by at least one modified mRNA of the present invention may be digested using enzymes.

[0734] In one embodiment, a biological sample which may contain protein encoded by modified mRNA of the present invention may be analyzed for protein using electrospray ionization. Electrospray ionization (ESI) mass spectrometry (ESIMS) uses electrical energy to aid in the transfer of ions from the solution to the gaseous phase before they are analyzed by mass spectrometry. Samples may be analyzed using methods known in the art (e.g., Ho et al., Clin Biochem Rev. 2003 24(1):3-12; herein incorporated by reference in its entirety). The ionic species contained in solution may be transferred into the gas phase by dispersing a fine spray of charge droplets, evaporating the solvent and ejecting the ions from the charged droplets to generate a mist of highly charged droplets. The mist of highly charged droplets may be analyzed using at least 1, at least 2, at least 3 or at least 4 mass analyzers such as, but not limited to, a quadropole mass analyzer. Further, the mass spectrometry method may include a purification step. As a non-limiting example, the first quadrapole may be set to select a single m/z ratio so it may filter out other molecular ions having a different m/z ratio which may eliminate complicated and time-consuming sample purification procedures prior to MS analysis.

[0735] In one embodiment, a biological sample which may contain protein encoded by modified mRNA of the present invention may be analyzed for protein in a tandem ESIMS system (e.g., MS/MS). As non-limiting examples, the droplets may be analyzed using a product scan (or daughter scan) a precursor scan (parent scan) a neutral loss or a multiple reaction monitoring.

[0736] In one embodiment, a biological sample which may contain protein encoded by modified mRNA of the present invention may be analyzed using matrix-assisted laser desorption/ionization (MALDI) mass spectrometry (MALDIMS). MALDI provides for the nondestructive vaporization and ionization of both large and small molecules, such as proteins. In MALDI analysis, the analyte is first co-crystallized with a large molar excess of a matrix compound, which may also include, but is not limited to, an ultraviolet absorbing weak organic acid. Non-limiting examples of matrices used in MALDI are α-cyano-4-hydroxycinnamic acid, 3,5-dimethoxy-4-hydroxycinnamic acid and 2,5-dihydroxybenzoic acid. Laser radiation of the analyte-matrix mixture may result in the vaporization of the matrix and the analyte. The laser induced desorption provides high ion yields of the intact analyte and allows for measurement of compounds with high accuracy. Samples may be analyzed using methods known in the art (e.g., Lewis, Wei and Siuzdak, Encyclopedia of Analytical Chemistry 2000:5880-5894; herein incorporated by reference in its entirety). As non-limiting examples, mass analyzers used in the MALDI analysis may include a linear time-of-flight (TOF), a TOF reflectron or a Fourier transform mass analyzer.

[0737] In one embodiment, the analyte-matrix mixture may be formed using the dried-droplet method. A biologic sample is mixed with a matrix to create a saturated matrix solution where the matrix-to-sample ratio is approximately 5000:1. An aliquot (approximately 0.5-2.0 uL) of the saturated matrix solution is then allowed to dry to form the analyte-matrix mixture.

[0738] In one embodiment, the analyte-matrix mixture may be formed using the thin-layer method. A matrix homogeneous film is first formed and then the sample is then applied and may be absorbed by the matrix to form the analyte-matrix mixture.

[0739] In one embodiment, the analyte-matrix mixture may be formed using the thick-layer method. A matrix homogeneous film is formed with a nitro-cellulose matrix additive. Once the uniform nitro-cellulose matrix layer is obtained the sample is applied and absorbed into the matrix to form the analyte-matrix mixture.

[0740] In one embodiment, the analyte-matrix mixture may be formed using the sandwich method. A thin layer of matrix crystals is prepared as in the thin-layer method followed by the addition of droplets of aqueous trifluoroacetic acid, the sample and matrix. The sample is then absorbed into the matrix to form the analyte-matrix mixture.

### V. Uses of Polynucleotides, Primary Constructs and mmRNA of the Invention

[0741] The polynucleotides, primary constructs and mmRNA of the present invention are designed, in preferred embodiments, to provide for avoidance or evasion of deleterious bio-responses such as the immune response and/or degradation pathways, overcoming the threshold of expression and/or improving protein production capacity, improved expression rates or translation efficiency, improved drug or protein half life and/or protein concentrations, optimized protein localization, to improve one or more of the stability and/or clearance in tissues, receptor uptake and/or kinetics, cellular access by the compositions, engagement with translational machinery, secretion efficiency (when applicable), accessibility to circulation, and/or modulation of a cell's status, function and/or activity.

### Therapeutics

### Therapeutic Agents

[0742] The polynucleotides, primary constructs or mmRNA of the present invention, such as modified nucleic acids and modified RNAs, and the proteins translated from them described herein can be used as therapeutic or prophylactic agents. They are provided for use in medicine. For example, a polynucleotide, primary construct or mmRNA described herein can be administered to a subject, wherein the polynucleotide, primary construct or mmRNA is translated in vivo to produce a therapeutic or prophylactic polypeptide in the subject. Provided are compositions, methods, kits, and reagents for diagnosis, treatment or prevention of a disease or condition in humans and other mammals. The active therapeutic agents of the invention include polynucleotides, primary constructs or mmRNA, cells containing polynucleotides, primary constructs or mmRNA or polypeptides translated from the polynucleotides, primary constructs or mmRNA.

[0743] In certain embodiments, provided herein are combination therapeutics containing one or more polynucleotide, primary construct or mmRNA containing translatable regions that encode for a protein or proteins that boost a mammalian subject's immunity along with a protein that induces antibody-dependent cellular toxicity. For example, provided herein are therapeutics containing one or more nucleic acids that encode trastuzumab and granulocyte-colony stimulating factor (G-CSF). In particular, such combination therapeutics are useful in Her2+ breast cancer patients who develop induced resistance to trastuzumab. (See, e.g., Albrecht, Immunotherapy. 2(6):795-8 (2010)).

[0744] Provided herein are methods of inducing translation of a recombinant polypeptide in a cell population using the polynucleotide, primary construct or mmRNA described herein. Such translation can be in vivo, ex vivo, in culture, or in vitro. The cell population is contacted with an effective amount of a composition containing a nucleic acid that has at least one nucleoside modification, and a translatable region encoding the recombinant polypeptide. The population is contacted under conditions such that the nucleic acid is localized into one or more cells of the cell population and the recombinant polypeptide is translated in the cell from the nucleic acid.

[0745] An “effective amount” of the composition is provided based, at least in part, on the target tissue, target cell type, means of administration, physical characteristics of the nucleic acid (e.g., size, and extent of modified nucleosides), and other determinants. In general, an effective amount of the composition provides efficient protein production in the cell, preferably more efficient than a composition containing a corresponding unmodified nucleic acid. Increased efficiency may be demonstrated by increased cell transfection (i.e., the percentage of cells transfected with the nucleic acid), increased protein translation from the nucleic acid, decreased nucleic acid degradation (as demonstrated, e.g., by increased duration of protein translation from a modified nucleic acid), or reduced innate immune response of the host cell.

[0746] Aspects of the invention are directed to methods of inducing in vivo translation of a recombinant polypeptide in a mammalian subject in need thereof. Therein, an effective amount of a composition containing a nucleic acid that has at least one structural or chemical modification and a translatable region encoding the recombinant polypeptide is administered to the subject using the delivery methods described herein. The nucleic acid is provided in an amount and under other conditions such that the nucleic acid is localized into a cell of the subject and the recombinant polypeptide is translated in the cell from the nucleic acid. The cell in which the nucleic acid is localized, or the tissue in which the cell is present, may be targeted with one or more than one rounds of nucleic acid administration.

[0747] In certain embodiments, the administered polynucleotide, primary construct or mmRNA directs production of one or more recombinant polypeptides that provide a functional activity which is substantially absent in the cell, tissue or organism in which the recombinant polypeptide is translated. For example, the missing functional activity may be enzymatic, structural, or gene regulatory in nature. In related embodiments, the administered polynucleotide, primary construct or mmRNA directs production of one or more recombinant polypeptides that increases (e.g., synergistically) a functional activity which is present but substantially deficient in the cell in which the recombinant polypeptide is translated.

[0748] In other embodiments, the administered polynucleotide, primary construct or mmRNA directs production of one or more recombinant polypeptides that replace a polypeptide (or multiple polypeptides) that is substantially absent in the cell in which the recombinant polypeptide is translated. Such absence may be due to genetic mutation of the encoding gene or regulatory pathway thereof. In some embodiments, the recombinant polypeptide increases the level of an endogenous protein in the cell to a desirable level; such an increase may bring the level of the endogenous protein from a subnormal level to a normal level or from a normal level to a super-normal level.

[0749] Alternatively, the recombinant polypeptide functions to antagonize the activity of an endogenous protein present in, on the surface of, or secreted from the cell. Usually, the activity of the endogenous protein is deleterious to the subject; for example, due to mutation of the endogenous protein resulting in altered activity or localization. Additionally, the recombinant polypeptide antagonizes, directly or indirectly, the activity of a biological moiety present in, on the surface of, or secreted from the cell. Examples of antagonized biological moieties include lipids (e.g., cholesterol), a lipoprotein (e.g., low density lipoprotein), a nucleic acid, a carbohydrate, a protein toxin such as shiga and tetanus toxins, or a small molecule toxin such as botulinum, cholera, and diphtheria toxins. Additionally, the antagonized biological molecule may be an endogenous protein that exhibits an undesirable activity, such as a cytotoxic or cytostatic activity.

[0750] The recombinant proteins described herein may be engineered for localization within the cell, potentially within a specific compartment such as the nucleus, or are engineered for secretion from the cell or translocation to the plasma membrane of the cell.

[0751] In some embodiments, modified mRNAs and their encoded polypeptides in accordance with the present invention may be used for treatment of any of a variety of diseases, disorders, and/or conditions, including but not limited to one or more of the following: autoimmune disorders (e.g. diabetes, lupus, multiple sclerosis, psoriasis, rheumatoid arthritis); inflammatory disorders (e.g. arthritis, pelvic inflammatory disease); infectious diseases (e.g. viral infections (e.g., HIV, HCV, RSV), bacterial infections, fungal infections, sepsis); neurological disorders (e.g. Alzheimer's disease, Huntington's disease; autism; Duchenne muscular dystrophy); cardiovascular disorders (e.g. atherosclerosis, hypercholesterolemia, thrombosis, clotting disorders, angiogenic disorders such as macular degeneration); proliferative disorders (e.g. cancer, benign neoplasms); respiratory disorders (e.g. chronic obstructive pulmonary disease); digestive disorders (e.g. inflammatory bowel disease, ulcers); musculoskeletal disorders (e.g. fibromyalgia, arthritis); endocrine, metabolic, and nutritional disorders (e.g. diabetes, osteoporosis); urological disorders (e.g. renal disease); psychological disorders (e.g. depression, schizophrenia); skin disorders (e.g. wounds, eczema); blood and lymphatic disorders (e.g. anemia, hemophilia); etc.

[0752] Diseases characterized by dysfunctional or aberrant protein activity include cystic fibrosis, sickle cell anemia, epidermolysis bullosa, amyotrophic lateral sclerosis, and glucose-6-phosphate dehydrogenase deficiency. The present invention provides a method for treating such conditions or diseases in a subject by introducing nucleic acid or cell-based therapeutics containing the polynucleotide, primary construct or mmRNA provided herein, wherein the polynucleotide, primary construct or mmRNA encode for a protein that antagonizes or otherwise overcomes the aberrant protein activity present in the cell of the subject. Specific examples of a dysfunctional protein are the missense mutation variants of the cystic fibrosis transmembrane conductance regulator (CFTR) gene, which produce a dysfunctional protein variant of CFTR protein, which causes cystic fibrosis.

[0753] Diseases characterized by missing (or substantially diminished such that proper (normal or physiological protein function does not occur) protein activity include cystic fibrosis, Niemann-Pick type C, R thalassemia major, Duchenne muscular dystrophy, Hurler Syndrome, Hunter Syndrome, and Hemophilia A. Such proteins may not be present, or are essentially non-functional. The present invention provides a method for treating such conditions or diseases in a subject by introducing nucleic acid or cell-based therapeutics containing the polynucleotide, primary construct or mmRNA provided herein, wherein the polynucleotide, primary construct or mmRNA encode for a protein that replaces the protein activity missing from the target cells of the subject. Specific examples of a dysfunctional protein are the nonsense mutation variants of the cystic fibrosis transmembrane conductance regulator (CFTR) gene, which produce a nonfunctional protein variant of CFTR protein, which causes cystic fibrosis.

[0754] Thus, provided are methods of treating cystic fibrosis in a mammalian subject by contacting a cell of the subject with a polynucleotide, primary construct or mmRNA having a translatable region that encodes a functional CFTR polypeptide, under conditions such that an effective amount of the CTFR polypeptide is present in the cell. Preferred target cells are epithelial, endothelial and mesothelial cells, such as the lung, and methods of administration are determined in view of the target tissue; i.e., for lung delivery, the RNA molecules are formulated for administration by inhalation.

[0755] In another embodiment, the present invention provides a method for treating hyperlipidemia in a subject, by introducing into a cell population of the subject with a modified mRNA molecule encoding Sortilin, a protein recently characterized by genomic studies, thereby ameliorating the hyperlipidemia in a subject. The SORT1 gene encodes a trans-Golgi network (TGN) transmembrane protein called Sortilin. Genetic studies have shown that one of five individuals has a single nucleotide polymorphism, rs12740374, in the 1p13 locus of the SORT1 gene that predisposes them to having low levels of low-density lipoprotein (LDL) and very-low-density lipoprotein (VLDL). Each copy of the minor allele, present in about 30% of people, alters LDL cholesterol by 8 mg/dL, while two copies of the minor allele, present in about 5% of the population, lowers LDL cholesterol 16 mg/dL. Carriers of the minor allele have also been shown to have a 40% decreased risk of myocardial infarction. Functional in vivo studies in mice describes that overexpression of SORT1 in mouse liver tissue led to significantly lower LDL-cholesterol levels, as much as 80% lower, and that silencing SORT1 increased LDL cholesterol approximately 200% (Musunuru K et al. From noncoding variant to phenotype via SORT1 at the 1p13 cholesterol locus. Nature 2010; 466: 714-721).

[0756] In another embodiment, the present invention provides a method for treating hematopoietic disorders, cardiovascular disease, oncology, diabetes, cystic fibrosis, neurological diseases, inborn errors of metabolism, skin and systemic disorders, and blindness. The identity of molecular targets to treat these specific diseases has been described (Templeton ed., Gene and Cell Therapy: Therapeutic Mechanisms and Strategies, 3^{rd} Edition, Bota Raton, FL:CRC Press; herein incorporated by reference in its entirety).

[0757] Provided herein, are methods to prevent infection and/or sepsis in a subject at risk of developing infection and/or sepsis, the method comprising administering to a subject in need of such prevention a composition comprising a polynucleotide, primary construct or mmRNA precursor encoding an anti-microbial polypeptide (e.g., an anti-bacterial polypeptide), or a partially or fully processed form thereof in an amount sufficient to prevent infection and/or sepsis. In certain embodiments, the subject at risk of developing infection and/or sepsis may be a cancer patient. In certain embodiments, the cancer patient may have undergone a conditioning regimen. In some embodiments, the conditioning regiment may include, but is not limited to, chemotherapy, radiation therapy, or both. As a non-limiting example, a polynucleotide, primary construct or mmRNA can encode Protein C, its zymogen or prepro-protein, the activated form of Protein C (APC) or variants of Protein C which are known in the art. The polynucleotides, primary constructs or mmRNA may be chemically modified and delivered to cells. Non-limiting examples of polypeptides which may be encoded within the chemically modified mRNAs of the present invention include those taught in U.S. Pat. Nos. 7,226,999; 7,498,305; 6,630,138 each of which is incorporated herein by reference in its entirety. These patents teach Protein C like molecules, variants and derivatives, any of which may be encoded within the chemically modified molecules of the present invention.

[0758] Further provided herein, are methods to treat infection and/or sepsis in a subject, the method comprising administering to a subject in need of such treatment a composition comprising a polynucleotide, primary construct or mmRNA precursor encoding an anti-microbial polypeptide (e.g., an anti-bacterial polypeptide), e.g., an anti-microbial polypeptide described herein, or a partially or fully processed form thereof in an amount sufficient to treat an infection and/or sepsis. In certain embodiments, the subject in need of treatment is a cancer patient. In certain embodiments, the cancer patient has undergone a conditioning regimen. In some embodiments, the conditioning regiment may include, but is not limited to, chemotherapy, radiation therapy, or both.

[0759] In certain embodiments, the subject may exhibits acute or chronic microbial infections (e.g., bacterial infections). In certain embodiments, the subject may have received or may be receiving a therapy. In certain embodiments, the therapy may include, but is not limited to, radiotherapy, chemotherapy, steroids, ultraviolet radiation, or a combination thereof. In certain embodiments, the patient may suffer from a microvascular disorder. In some embodiments, the microvascular disorder may be diabetes. In certain embodiments, the patient may have a wound. In some embodiments, the wound may be an ulcer. In a specific embodiment, the wound may be a diabetic foot ulcer. In certain embodiments, the subject may have one or more burn wounds. In certain embodiments, the administration may be local or systemic. In certain embodiments, the administration may be subcutaneous. In certain embodiments, the administration may be intravenous. In certain embodiments, the administration may be oral. In certain embodiments, the administration may be topical. In certain embodiments, the administration may be by inhalation. In certain embodiments, the administration may be rectal. In certain embodiments, the administration may be vaginal.

[0760] Other aspects of the present disclosure relate to transplantation of cells containing polynucleotide, primary construct, or mmRNA to a mammalian subject. Administration of cells to mammalian subjects is known to those of ordinary skill in the art, and include, but is not limited to, local implantation (e.g., topical or subcutaneous administration), organ delivery or systemic injection (e.g., intravenous injection or inhalation), and the formulation of cells in pharmaceutically acceptable carrier. Such compositions containing polynucleotide, primary construct, or mmRNA can be formulated for administration intramuscularly, transarterially, intraperitoneally, intravenously, intranasally, subcutaneously, endoscopically, transdermally, or intrathecally. In some embodiments, the composition may be formulated for extended release.

[0761] The subject to whom the therapeutic agent may be administered suffers from or may be at risk of developing a disease, disorder, or deleterious condition. Provided are methods of identifying, diagnosing, and classifying subjects on these bases, which may include clinical diagnosis, biomarker levels, genome-wide association studies (GWAS), and other methods known in the art.

### Wound Management

[0762] The polynucleotides, primary constructs or mmRNA of the present invention may be used for wound treatment, e.g. of wounds exhibiting delayed healing. Provided herein are methods comprising the administration of polynucleotide, primary construct or mmRNA in order to manage the treatment of wounds. The methods herein may further comprise steps carried out either prior to, concurrent with or post administration of the polynucleotide, primary construct or mmRNA. For example, the wound bed may need to be cleaned and prepared in order to facilitate wound healing and hopefully obtain closure of the wound. Several strategies may be used in order to promote wound healing and achieve wound closure including, but not limited to: (i) debridement, optionally repeated, sharp debridement (surgical removal of dead or infected tissue from a wound), optionally including chemical debriding agents, such as enzymes, to remove necrotic tissue; (ii) wound dressings to provide the wound with a moist, warm environment and to promote tissue repair and healing.

[0763] Examples of materials that are used in formulating wound dressings include, but are not limited to: hydrogels (e.g., AQUASORB®; DUODERM®), hydrocolloids (e.g., AQUACEL®; COMFEEL®), foams (e.g., LYOFOAM®; SPYROSORB®), and alginates (e.g., ALGISITE®; CURASORB®); (iii) additional growth factors to stimulate cell division and proliferation and to promote wound healing e.g. becaplermin (REGRANEX GEL®), a human recombinant platelet-derived growth factor that is approved by the FDA for the treatment of neuropathic foot ulcers; (iv) soft-tissue wound coverage, a skin graft may be necessary to obtain coverage of clean, non-healing wounds. Examples of skin grafts that may be used for soft-tissue coverage include, but are not limited to: autologous skin grafts, cadaveric skin graft, bioengineered skin substitutes (e.g., APLIGRAF®; DERMAGRAFT®).

[0764] In certain embodiments, the polynucleotide, primary construct or mmRNA of the present invention may further include hydrogels (e.g., AQUASORB®; DUODERM®), hydrocolloids (e.g., AQUACEL®; COMFEEL®), foams (e.g., LYOFOAM®; SPYROSORB®), and/or alginates (e.g., ALGISITE®; CURASORB®). In certain embodiments, the polynucleotide, primary construct or mmRNA of the present invention may be used with skin grafts including, but not limited to, autologous skin grafts, cadaveric skin graft, or bioengineered skin substitutes (e.g., APLIGRAF®; DERMAGRAFT®). In some embodiments, the polynucleotide, primary construct or mmRNA may be applied with would dressing formulations and/or skin grafts or they may be applied separately but methods such as, but not limited to, soaking or spraying.

[0765] In some embodiments, compositions for wound management may comprise a polynucleotide, primary construct or mmRNA encoding for an anti-microbial polypeptide (e.g., an anti-bacterial polypeptide) and/or an anti-viral polypeptide. A precursor or a partially or fully processed form of the anti-microbial polypeptide may be encoded. The composition may be formulated for administration using a bandage (e.g., an adhesive bandage). The anti-microbial polypeptide and/or the anti-viral polypeptide may be intermixed with the dressing compositions or may be applied separately, e.g., by soaking or spraying.

### Production of Antibodies

[0766] In one embodiment of the invention, the polynucleotides, primary constructs or mmRNA may encode antibodies and fragments of such antibodies. These may be produced by any one of the methods described herein. The antibodies may be of any of the different subclasses or isotypes of immunoglobulin such as, but not limited to, IgA, IgG, or IgM, or any of the other subclasses. Exemplary antibody molecules and fragments that may be prepared according to the invention include, but are not limited to, immunoglobulin molecules, substantially intact immunoglobulin molecules and those portions of an immunoglobulin molecule that may contain the paratope. Such portion of antibodies that contain the paratope include, but are not limited to Fab, Fab′, F(ab′)₂, F(v) and those portions known in the art.

[0767] The polynucleotides of the invention may encode variant antibody polypeptides which may have a certain identity with a reference polypeptide sequence, or have a similar or dissimilar binding characteristic with the reference polypeptide sequence.

[0768] Antibodies obtained by the methods of the present invention may be chimeric antibodies comprising non-human antibody-derived variable region(s) sequences, derived from the immunized animals, and human antibody-derived constant region(s) sequences. In addition, they can also be humanized antibodies comprising complementary determining regions (CDRs) of non-human antibodies derived from the immunized animals and the framework regions (FRs) and constant regions derived from human antibodies. In another embodiment, the methods provided herein may be useful for enhancing antibody protein product yield in a cell culture process.

### Managing Infection

[0769] In one embodiment, provided are methods for treating or preventing a microbial infection (e.g., a bacterial infection) and/or a disease, disorder, or condition associated with a microbial or viral infection, or a symptom thereof, in a subject, by administering a polynucleotide, primary construct or mmRNA encoding an anti-microbial polypeptide. Said administration may be in combination with an anti-microbial agent (e.g., an anti-bacterial agent), e.g., an anti-microbial polypeptide or a small molecule anti-microbial compound described herein. The anti-microbial agents include, but are not limited to, anti-bacterial agents, anti-viral agents, anti-fungal agents, anti-protozoal agents, anti-parasitic agents, and anti-prion agents.

[0770] The agents can be administered simultaneously, for example in a combined unit dose (e.g., providing simultaneous delivery of both agents). The agents can also be administered at a specified time interval, such as, but not limited to, an interval of minutes, hours, days or weeks. Generally, the agents may be concurrently bioavailable, e.g., detectable, in the subject. In some embodiments, the agents may be administered essentially simultaneously, for example two unit dosages administered at the same time, or a combined unit dosage of the two agents. In other embodiments, the agents may be delivered in separate unit dosages. The agents may be administered in any order, or as one or more preparations that includes two or more agents. In a preferred embodiment, at least one administration of one of the agents, e.g., the first agent, may be made within minutes, one, two, three, or four hours, or even within one or two days of the other agent, e.g., the second agent. In some embodiments, combinations can achieve synergistic results, e.g., greater than additive results, e.g., at least 25, 50, 75, 100, 200, 300, 400, or 500% greater than additive results.

Conditions Associated with Bacterial Infection

[0771] Diseases, disorders, or conditions which may be associated with bacterial infections include, but are not limited to one or more of the following: abscesses, actinomycosis, acute prostatitis, Aeromonas hydrophila, annual ryegrass toxicity, anthrax, bacillary peliosis, bacteremia, bacterial gastroenteritis, bacterial meningitis, bacterial pneumonia, bacterial vaginosis, bacterium-related cutaneous conditions, bartonellosis, BCG-oma, botryomycosis, botulism, Brazilian purpuric fever, Brodie abscess, brucellosis, Buruli ulcer, campylobacteriosis, caries, Carrion's disease, cat scratch disease, cellulitis, chlamydia infection, cholera, chronic bacterial prostatitis, chronic recurrent multifocal osteomyelitis, clostridial necrotizing enteritis, combined periodontic-endodontic lesions, contagious bovine pleuropneumonia, diphtheria, diphtheritic stomatitis, ehrlichiosis, erysipelas, piglottitis, erysipelas, Fitz-Hugh-Curtis syndrome, flea-borne spotted fever, foot rot (infectious pododermatitis), Garre's sclerosing osteomyelitis, Gonorrhea, Granuloma inguinale, human granulocytic anaplasmosis, human monocytotropic ehrlichiosis, hundred days' cough, impetigo, late congenital syphilitic oculopathy, legionellosis, Lemierre's syndrome, leprosy (Hansen's Disease), leptospirosis, listeriosis, Lyme disease, lymphadenitis, melioidosis, meningococcal disease, meningococcal septicaemia, methicillin-resistant Staphylococcus aureus (MRSA) infection, Mycobacterium avium-intracellulare (MAI), mycoplasma pneumonia, necrotizing fasciitis, nocardiosis, noma (cancrum oris or gangrenous stomatitis), omphalitis, orbital cellulitis, osteomyelitis, overwhelming post-splenectomy infection (OPSI), ovine brucellosis, pasteurellosis, periorbital cellulitis, pertussis (whooping cough), plague, pneumococcal pneumonia, Pott disease, proctitis, pseudomonas infection, psittacosis, pyaemia, pyomyositis, Q fever, relapsing fever (typhinia), rheumatic fever, Rocky Mountain spotted fever (RMSF), rickettsiosis, salmonellosis, scarlet fever, sepsis, serratia infection, shigellosis, southern tick-associated rash illness, staphylococcal scalded skin syndrome, streptococcal pharyngitis, swimming pool granuloma, swine brucellosis, syphilis, syphilitic aortitis, tetanus, toxic shock syndrome (TSS), trachoma, trench fever, tropical ulcer, tuberculosis, tularemia, typhoid fever, typhus, urogenital tuberculosis, urinary tract infections, vancomycin-resistant Staphylococcus aureus infection, Waterhouse-Friderichsen syndrome, pseudotuberculosis (Yersinia) disease, and yersiniosis. Other diseases, disorders, and/or conditions associated with bacterial infections can include, for example, Alzheimer's disease, anorexia nervosa, asthma, atherosclerosis, attention deficit hyperactivity disorder, autism, autoimmune diseases, bipolar disorder, cancer (e.g., colorectal cancer, gallbladder cancer, lung cancer, pancreatic cancer, and stomach cancer), chronic fatigue syndrome, chronic obstructive pulmonary disease, Crohn's disease, coronary heart disease, dementia, depression, Guillain-Barre syndrome, metabolic syndrome, multiple sclerosis, myocardial infarction, obesity, obsessive-compulsive disorder, panic disorder, psoriasis, rheumatoid arthritis, sarcoidosis, schizophrenia, stroke, thromboangiitis obliterans (Buerger's disease), and Tourette syndrome.

### Bacterial Pathogens

[0772] The bacterium described herein can be a Gram-positive bacterium or a Gram-negative bacterium. Bacterial pathogens include, but are not limited to, Acinetobacter baumannii, Bacillus anthracis, Bacillus subtilis, Bordetella pertussis, Borrelia burgdorferi, Brucella abortus, Brucella canis, Brucella melitensis, Brucella suis, Campylobacter jejuni, Chlamydia pneumoniae, Chlamydia trachomatis, Chlamydophila psittaci, Clostridium botulinum, Clostridium difficile, Clostridium perfringens, Clostridium tetani, coagulase Negative Staphylococcus, Corynebacterium diphtheria, Enterococcus faecalis, Enterococcus faecium, Escherichia coli, enterotoxigenic Escherichia coli (ETEC), enteropathogenic E. coli, E. coli O157:H7, Enterobacter sp., Francisella tularensis, Haemophilus influenzae, Helicobacter pylori, Klebsiella pneumoniae, Legionella pneumophila, Leptospira interrogans, Listeria monocytogenes, Moraxella catarralis, Mycobacterium leprae, Mycobacterium tuberculosis, Mycoplasma pneumoniae, Neisseria gonorrhoeae, Neisseria meningitides, Preteus mirabilis, Proteus sps., Pseudomonas aeruginosa, Rickettsia rickettsii, Salmonella typhi, Salmonella typhimurium, Serratia marcesens, Shigella flexneri, Shigella sonnei, Staphylococcus aureus, Staphylococcus epidermidis, Staphylococcus saprophyticus, Streptococcus agalactiae, Streptococcus mutans, Streptococcus pneumoniae, Streptococcus pyogenes, Treponema pallidum, Vibrio cholerae, and Yersinia pestis. Bacterial pathogens may also include bacteria that cause resistant bacterial infections, for example, clindamycin-resistant Clostridium difficile, fluoroquinolon-resistant Clostridium difficile, methicillin-resistant Staphylococcus aureus (MRSA), multidrug-resistantEnterococcusfaecalis, multidrug-resistantEnterococcusfaecium, multidrug-resistance Pseudomonas aeruginosa, multidrug-resistant Acinetobacter baumannii, and vancomycin-resistant Staphylococcus aureus (VRSA).

### Antibiotic Combinations

[0773] In one embodiment, the modified mRNA of the present invention may be administered in conjunction with one or more antibiotics. These include, but are not limited to Aknilox, Ambisome, Amoxycillin, Ampicillin, Augmentin, Avelox, Azithromycin, Bactroban, Betadine, Betnovate, Blephamide, Cefaclor, Cefadroxil, Cefdinir, Cefepime, Cefix, Cefixime, Cefoxitin, Cefpodoxime, Cefprozil, Cefuroxime, Cefzil, Cephalexin, Cephazolin, Ceptaz, Chloramphenicol, Chlorhexidine, Chloromycetin, Chlorsig, Ciprofloxacin, Clarithromycin, Clindagel, Clindamycin, Clindatech, Cloxacillin, Colistin, Co-trimoxazole, Demeclocycline, Diclocil, Dicloxacillin, Doxycycline, Duricef, Erythromycin, Flamazine, Floxin, Framycetin, Fucidin, Furadantin, Fusidic, Gatifloxacin, Gemifloxacin, Gemifloxacin, Ilosone, Iodine, Levaquin, Levofloxacin, Lomefloxacin, Maxaquin, Mefoxin, Meronem, Minocycline, Moxifloxacin, Myambutol, Mycostatin, Neosporin, Netromycin, Nitrofurantoin, Norfloxacin, Norilet, Ofloxacin, Omnicef, Ospamox, Oxytetracycline, Paraxin, Penicillin, Pneumovax, Polyfax, Povidone, Rifadin, Rifampin, Rifaximin, Rifinah, Rimactane, Rocephin, Roxithromycin, Seromycin, Soframycin, Sparfloxacin, Staphlex, Targocid, Tetracycline, Tetradox, Tetralysal, tobramycin, Tobramycin, Trecator, Tygacil, Vancocin, Velosef, Vibramycin, Xifaxan, Zagam, Zitrotek, Zoderm, Zymar, and Zyvox.

### Antibacterial Agents

[0774] Exemplary anti-bacterial agents include, but are not limited to, aminoglycosides (e.g., amikacin (AMIKIN®), gentamicin (GARAMYCIN®), kanamycin (KANTREX®), neomycin (MYCIFRADIN®), netilmicin (NETROMYCIN®), tobramycin (NEBCIN®), Paromomycin (HUMATIN®)), ansamycins (e.g., geldanamycin, herbimycin), carbacephem (e.g., loracarbef (LORABID®), Carbapenems (e.g., ertapenem (INVANZ®), doripenem (DORIBAX®), imipenem/cilastatin (PRIMAXIN®), meropenem (MERREM®), cephalosporins (first generation) (e.g., cefadroxil (DURICEF®), cefazolin (ANCEF®), cefalotin or cefalothin (KEFLIN®), cefalexin (KEFLEX®), cephalosporins (second generation) (e.g., cefaclor (CECLOR®), cefamandole (MANDOL®), cefoxitin (MEFOXIN®), cefprozil (CEFZIL®), cefuroxime (CEFTIN®, ZINNAT®)), cephalosporins (third generation) (e.g., cefixime (SUPRAX®), cefdinir (OMNICEF®, CEFDIEL®), cefditoren (SPECTRACEF®), cefoperazone (CEFOBID®), cefotaxime (CLAFORAN®), cefpodoxime (VANTIN®), ceftazidime (FORTAZ®), ceftibuten (CEDAX®), ceftizoxime (CEFIZOX®), ceftriaxone (ROCEPHIN®)), cephalosporins (fourth generation) (e.g., cefepime (MAXIPIME®)), cephalosporins (fifth generation) (e.g., ceftobiprole (ZEFTERA®)), glycopeptides (e.g., teicoplanin (TARGOCID®), vancomycin (VANCOCIN®), telavancin (VIBATIV®)), lincosamides (e.g., clindamycin (CLEOCIN®), lincomycin (LINCOCIN®)), lipopeptide (e.g., daptomycin (CUBICIN®)), macrolides (e.g., azithromycin (ZITHROMAX®, SUMAMED®, ZITROCIN®), clarithromycin (BIAXIN®), dirithromycin (DYNABAC®), erythromycin (ERYTHOCIN®, ERYTHROPED®), roxithromycin, troleandomycin (TAO®), telithromycin (KETEK®), spectinomycin (TROBICIN®)), monobactams (e.g., aztreonam (AZACTAM®)), nitrofurans (e.g., furazolidone (FUROXONE®), nitrofurantoin (MACRODANTIN®, MACROBID®)), penicillins (e.g., amoxicillin (NOVAMOX®, AMOXIL®), ampicillin (PRINCIPEN®), azlocillin, carbenicillin (GEOCILLIN®), cloxacillin (TEGOPEN®), dicloxacillin (DYNAPEN®), flucloxacillin (FLOXAPEN®), mezlocillin (MEZLIN®), methicillin (STAPHCILLIN®), nafcillin (UNIPEN®), oxacillin (PROSTAPHLIN®), penicillin G (PENTIDS®), penicillin V (PEN-VEE-K®), piperacillin (PIPRACIL®), temocillin (NEGABAN®), ticarcillin (TICAR®)), penicillin combinations (e.g., amoxicillin/clavulanate (AUGMENTIN®), ampicillin/sulbactam (UNASYN®), piperacillin/tazobactam (ZOSYN®), ticarcillin/clavulanate (TIMENTIN®)), polypeptides (e.g., bacitracin, colistin (COLY-MYCIN-S®), polymyxin B, quinolones (e.g., ciprofloxacin (CIPRO®, CIPROXIN®, CIPROBAY®), enoxacin (PENETREX®), gatifloxacin (TEQUIN®), levofloxacin (LEVAQUIN®), lomefloxacin (MAXAQUIN®), moxifloxacin (AVELOX®), nalidixic acid (NEGGRAM®), norfloxacin (NOROXIN®), ofloxacin (FLOXIN®, OCUFLOX®), trovafloxacin (TROVAN®), grepafloxacin (RAXAR®), sparfloxacin (ZAGAM®), temafloxacin (OMNIFLOX®)), sulfonamides (e.g., mafenide (SULFAMYLON®), sulfonamidochrysoidine (PRONTOSIL®), sulfacetamide (SULAMYD®, BLEPH-10®), sulfadiazine (MICRO-SULFON®), silver sulfadiazine (SILVADENE®), sulfamethizole (THIOSULFIL FORTE®), sulfamethoxazole (GANTANOL®), sulfanilimide, sulfasalazine (AZULFIDINE®), sulfisoxazole (GANTRISIN®), trimethoprim (PROLOPRIM®), TRIMPEX®), trimethoprim-sulfamethoxazole (co-trimoxazole) (TMP-SMX) (BACTRIM®, SEPTRA®)), tetracyclines (e.g., demeclocycline (DECLOMYCIN®), doxycycline (VIBRAMYCIN®), minocycline (MINOCIN®), oxytetracycline (TERRAMYCIN®), tetracycline (SUMYCIN®, ACHROMYCIN® V, STECLIN®)), drugs against mycobacteria (e.g., clofazimine (LAMPRENE®), dapsone (AVLOSULFON®), capreomycin (CAPASTAT®), cycloserine (SEROMYCIN®), ethambutol (MYAMBUTOL®), ethionamide (TRECATOR®), isoniazid (I.N.H.®), pyrazinamide (ALDINAMIDE®), rifampin (RIFADIN®, RIMACTANE®), rifabutin (MYCOBUTIN®), rifapentine (PRIFTIN®), streptomycin), and others (e.g., arsphenamine (SALVARSAN®), chloramphenicol (CHLOROMYCETIN®), fosfomycin (MONUROL®), fusidic acid (FUCIDIN®), linezolid (ZYVOX®), metronidazole (FLAGYL®), mupirocin (BACTROBAN®), platensimycin, quinupristin/dalfopristin (SYNERCID®), rifaximin (XIFAXAN®), thiamphenicol, tigecycline (TIGACYL®), tinidazole (TINDAMAX®, FASIGYN®)).

Conditions Associated with Viral Infection

[0775] In another embodiment, provided are methods for treating or preventing a viral infection and/or a disease, disorder, or condition associated with a viral infection, or a symptom thereof, in a subject, by administering a polynucleotide, primary construct or mmRNA encoding an anti-viral polypeptide, e.g., an anti-viral polypeptide described herein in combination with an anti-viral agent, e.g., an anti-viral polypeptide or a small molecule anti-viral agent described herein.

[0776] Diseases, disorders, or conditions associated with viral infections include, but are not limited to, acute febrile pharyngitis, pharyngoconjunctival fever, epidemic keratoconjunctivitis, infantile gastroenteritis, Coxsackie infections, infectious mononucleosis, Burkitt lymphoma, acute hepatitis, chronic hepatitis, hepatic cirrhosis, hepatocellular carcinoma, primary HSV-1 infection (e.g., gingivostomatitis in children, tonsillitis and pharyngitis in adults, keratoconjunctivitis), latent HSV-1 infection (e.g., herpes labialis and cold sores), primary HSV-2 infection, latent HSV-2 infection, aseptic meningitis, infectious mononucleosis, Cytomegalic inclusion disease, Kaposi sarcoma, multicentric Castleman disease, primary effusion lymphoma, AIDS, influenza, Reye syndrome, measles, postinfectious encephalomyelitis, Mumps, hyperplastic epithelial lesions (e.g., common, flat, plantar and anogenital warts, laryngeal papillomas, epidermodysplasia verruciformis), cervical carcinoma, squamous cell carcinomas, croup, pneumonia, bronchiolitis, common cold, Poliomyelitis, Rabies, bronchiolitis, pneumonia, influenza-like syndrome, severe bronchiolitis with pneumonia, German measles, congenital rubella, Varicella, and herpes zoster.

### Viral Pathogens

[0777] Viral pathogens include, but are not limited to, adenovirus, coxsackievirus, dengue virus, encephalitis virus, Epstein-Barr virus, hepatitis A virus, hepatitis B virus, hepatitis C virus, herpes simplex virus type 1, herpes simplex virus type 2, cytomegalovirus, human herpesvirus type 8, human immunodeficiency virus, influenza virus, measles virus, mumps virus, human papillomavirus, parainfluenza virus, poliovirus, rabies virus, respiratory syncytial virus, rubella virus, varicella-zoster virus, West Nile virus, and yellow fever virus. Viral pathogens may also include viruses that cause resistant viral infections.

### Antiviral Agents

[0778] Exemplary anti-viral agents include, but are not limited to, abacavir (ZIAGEN®), abacavir/lamivudine/zidovudine (Trizivir®), aciclovir or acyclovir (CYCLOVIR®, HERPEX®, ACIVIR®, ACIVIRAX®, ZOVIRAX®, ZOVIR®), adefovir (Preveon®, Hepsera®), amantadine (SYMMETREL®), amprenavir (AGENERASE®), ampligen, arbidol, atazanavir (REYATAZ®), boceprevir, cidofovir, darunavir (PREZISTA®), delavirdine (RESCRIPTOR®), didanosine (VIDEX®), docosanol (ABREVA®), edoxudine, efavirenz (SUSTIVA®, STOCRIN®), emtricitabine (EMTRIVA®), emtricitabine/tenofovir/efavirenz (ATRIPLA®), enfuvirtide (FUZEON®), entecavir (BARACLUDE®, ENTAVIR®), famciclovir (FAMVIR®), fomivirsen (VITRAVENE®), fosamprenavir (LEXIVA®, TELZIR®), foscarnet (FOSCAVIR®), fosfonet, ganciclovir (CYTOVENE®, CYMEVENE®, VITRASERT®), GS 9137 (ELVITEGRAVIR®), imiquimod (ALDARA®, ZYCLARA®, BESELNA®), indinavir (CRIXIVAN®), inosine, inosine pranobex (IMUNOVIR®), interferon type I, interferon type II, interferon type III, kutapressin (NEXAVIR®), lamivudine (ZEFFIX®, HEPTOVIR®, EPIVIR®), lamivudine/zidovudine (COMBIVIR®), lopinavir, loviride, maraviroc (SELZENTRY®, CELSENTRI®), methisazone, MK-2048, moroxydine, nelfinavir (VIRACEPT®), nevirapine (VIRAMUNE®), oseltamivir (TAMIFLU®), peginterferon alfa-2a (PEGASYS®), penciclovir (DENAVIR®), peramivir, pleconaril, podophyllotoxin (CONDYLOX®), raltegravir (ISENIRESS®), ribavirin (COPEGUs®, REBETOL®, RIBASPHERE®, VILONA® AND VIRAZOLE®), rimantadine (FLUMADINE®), ritonavir (NORVIR®), pyramidine, saquinavir (INVIRASE®, FORTOVASE®), stavudine, tea tree oil (melaleuca oil), tenofovir (VTREAD®), tenofovir/emtricitabine (TRUVADA®), tipranavir (APTIVUS®), trifluridine (VIROPTIC®), tromantadine (VIRU-MERZ®), valaciclovir (VALTREX®), valganciclovir (VALCYTE®), vicriviroc, vidarabine, viramidine, zalcitabine, zanamivir (RELENZA®), and zidovudine (azidothymidine (AZT), RETROVIR®, RETROVIS®).

Conditions Associated with Fungal Infections

[0779] Diseases, disorders, or conditions associated with fungal infections include, but are not limited to, aspergilloses, blastomycosis, candidasis, coccidioidomycosis, cryptococcosis, histoplasmosis, mycetomas, paracoccidioidomycosis, and tinea pedis. Furthermore, persons with immuno-deficiencies are particularly susceptible to disease by fungal genera such as Aspergillus, Candida, Cryptoccocus, Histoplasma, and Pneumocystis. Other fungi can attack eyes, nails, hair, and especially skin, the so-called dermatophytic fungi and keratinophilic fungi, and cause a variety of conditions, of which ringworms such as athlete's foot are common. Fungal spores are also a major cause of allergies, and a wide range of fungi from different taxonomic groups can evoke allergic reactions in some people.

### Fungal Pathogens

[0780] Fungal pathogens include, but are not limited to, Ascomycota (e.g., Fusarium oxysporum, Pneumocystis jirovecii, Aspergillus spp., Coccidioides immitis/posadasii, Candida albicans), Basidiomycota (e.g., Filobasidiella neoformans, Trichosporon), Microsporidia (e.g., Encephalitozoon cuniculi, Enterocytozoon bieneusi), and Mucoromycotina (e.g., Mucor circinelloides, Rhizopus oryzae, Lichtheimia corymbifera).

### Anti-Fungal Agents

[0781] Exemplary anti-fungal agents include, but are not limited to, polyene antifungals (e.g., natamycin, rimocidin, filipin, nystatin, amphotericin B, candicin, hamycin), imidazole antifungals (e.g., miconazole (MICATIN®, DAKTARIN®), ketoconazole (NIZORAL®, FUNGORAL®, SEBIZOLE®), clotrimazole (LOTRIMIN®, LOTRIMIN® AF, CANESTEN®), econazole, omoconazole, bifonazole, butoconazole, fenticonazole, isoconazole, oxiconazole, sertaconazole (ERTACZO®), sulconazole, tioconazole), triazole antifungals (e.g., albaconazole fluconazole, itraconazole, isavuconazole, ravuconazole, posaconazole, voriconazole, terconazole), thiazole antifungals (e.g., abafungin), allylamines (e.g., terbinafine (LAMISIL®), naftifine (NAFTIN®), butenafine (LOTRIMIN® Ultra)), echinocandins (e.g., anidulafungin, caspofungin, micafungin), and others (e.g., polygodial, benzoic acid, ciclopirox, tolnaftate (TINACTIN®, DESENEX®, AFTATE®), undecylenic acid, flucytosine or 5-fluorocytosine, griseofulvin, haloprogin, sodium bicarbonate, allicin).

Conditions Associated with Protozoal Infection

[0782] Diseases, disorders, or conditions associated with protozoal infections include, but are not limited to, amoebiasis, giardiasis, trichomoniasis, African Sleeping Sickness, American Sleeping Sickness, leishmaniasis (Kala-Azar), balantidiasis, toxoplasmosis, malaria, acanthamoeba keratitis, and babesiosis.

### Protozoan Pathogens

[0783] Protozoal pathogens include, but are not limited to, Entamoeba histolytica, Giardia lambila, Trichomonas vaginalis, Trypanosoma brucei, T. cruzi, Leishmania donovani, Balantidium coli, Toxoplasma gondii, Plasmodium spp., and Babesia microti.

### Anti-Protozoan Agents

[0784] Exemplary anti-protozoal agents include, but are not limited to, eflornithine, furazolidone (FUROXONE®, DEPENDAL-M®), melarsoprol, metronidazole (FLAGYL®), ornidazole, paromomycin sulfate (HUMATIN®), pentamidine, pyrimethamine (DARAPRIM®), and tinidazole (TINDAMAX®, FASIGYN®).

Conditions Associated with Parasitic Infection

[0785] Diseases, disorders, or conditions associated with parasitic infections include, but are not limited to, acanthamoeba keratitis, amoebiasis, ascariasis, babesiosis, balantidiasis, baylisascariasis, chagas disease, clonorchiasis, cochliomyia, cryptosporidiosis, diphyllobothriasis, dracunculiasis, echinococcosis, elephantiasis, enterobiasis, fascioliasis, fasciolopsiasis, filariasis, giardiasis, gnathostomiasis, hymenolepiasis, isosporiasis, katayama fever, leishmaniasis, lyme disease, malaria, metagonimiasis, myiasis, onchocerciasis, pediculosis, scabies, schistosomiasis, sleeping sickness, strongyloidiasis, taeniasis, toxocariasis, toxoplasmosis, trichinosis, and trichuriasis.

### Parasitic Pathogens

[0786] Parasitic pathogens include, but are not limited to, Acanthamoeba, Anisakis, Ascaris lumbricoides, botfly, Balantidium coli, bedbug, Cestoda, chiggers, Cochliomyia hominivorax, Entamoeba histolytica, Fasciola hepatica, Giardia lamblia, hookworm, Leishmania, Linguatula serrata, liver fluke, Loa loa, Paragonimus, pinworm, Plasmodium falciparum, Schistosoma, Strongyloides stercoralis, mite, tapeworm, Toxoplasma gondii, Trypanosoma, whipworm, Wuchereria bancrofti.

### Anti-Parasitic Agents

[0787] Exemplary anti-parasitic agents include, but are not limited to, antinematodes (e.g., mebendazole, pyrantel pamoate, thiabendazole, diethylcarbamazine, ivermectin), anticestodes (e.g., niclosamide, praziquantel, albendazole), antitrematodes (e.g., praziquantel), antiamoebics (e.g., rifampin, amphotericin B), and antiprotozoals (e.g., melarsoprol, eflornithine, metronidazole, tinidazole).

Conditions Associated with Prion Infection

[0788] Diseases, disorders, or conditions associated with prion infections include, but are not limited to Creutzfeldt-Jakob disease (CJD), iatrogenic Creutzfeldt-Jakob disease (iCJD), variant Creutzfeldt-Jakob disease (vCJD), familial Creutzfeldt-Jakob disease (fCJD), sporadic Creutzfeldt-Jakob disease (sCJD), Gerstmann-Straussler-Scheinker syndrome (GSS), fatal familial insomnia (FFI), Kuru, Scrapie, bovine spongiform encephalopathy (BSE), mad cow disease, transmissible mink encephalopathy (TME), chronic wasting disease (CWD), feline spongiform encephalopathy (FSE), exotic ungulate encephalopathy (EUE), and spongiform encephalopathy.

### Anti-Prion Agents

[0789] Exemplary anti-prion agents include, but are not limited to, flupirtine, pentosan polysuphate, quinacrine, and tetracyclic compounds.

### Modulation of the Immune Response

### Avoidance of the Immune Response

[0790] As described herein, a useful feature of the polynucleotides, primary constructs or mmRNA of the invention is the capacity to reduce, evade or avoid the innate immune response of a cell. In one aspect, provided herein are polynucleotides, primary constructs or mmRNA encoding a polypeptide of interest which when delivered to cells, results in a reduced immune response from the host as compared to the response triggered by a reference compound, e.g. an unmodified polynucleotide corresponding to a polynucleotide, primary construct or mmRNA of the invention, or a different polynucleotide, primary construct or mmRNA of the invention. As used herein, a “reference compound” is any molecule or substance which when administered to a mammal, results in an innate immune response having a known degree, level or amount of immune stimmulation. A reference compound need not be a nucleic acid molecule and it need not be any of the polynucleotides, primary constructs or mmRNA of the invention. Hence, the measure of a polynucleotides, primary constructs or mmRNA avoidance, evasion or failure to trigger an immune response can be expressed in terms relative to any compound or substance which is known to trigger such a response.

[0791] The term “innate immune response” includes a cellular response to exogenous single stranded nucleic acids, generally of viral or bacterial origin, which involves the induction of cytokine expression and release, particularly the interferons, and cell death. As used herein, the innate immune response or interferon response operates at the single cell level causing cytokine expression, cytokine release, global inhibition of protein synthesis, global destruction of cellular RNA, upregulation of major histocompatibility molecules, and/or induction of apoptotic death, induction of gene transcription of genes involved in apoptosis, anti-growth, and innate and adaptive immune cell activation. Some of the genes induced by type I IFNs include PKR, ADAR (adenosine deaminase acting on RNA), OAS (2′,5′-oligoadenylate synthetase), RNase L, and Mx proteins. PKR and ADAR lead to inhibition of translation initiation and RNA editing, respectively. OAS is a dsRNA-dependent synthetase that activates the endoribonuclease RNase L to degrade ssRNA.

[0792] In some embodiments, the innate immune response comprises expression of a Type I or Type II interferon, and the expression of the Type I or Type II interferon is not increased more than two-fold compared to a reference from a cell which has not been contacted with a polynucleotide, primary construct or mmRNA of the invention.

[0793] In some embodiments, the innate immune response comprises expression of one or more IFN signature genes and where the expression of the one of more IFN signature genes is not increased more than three-fold compared to a reference from a cell which has not been contacted with the polynucleotide, primary construct or mmRNA of the invention.

[0794] While in some circumstances, it might be advantageous to eliminate the innate immune response in a cell, the invention provides polynucleotides, primary constructs and mmRNA that upon administration result in a substantially reduced (significantly less) the immune response, including interferon signaling, without entirely eliminating such a response.

[0795] In some embodiments, the immune response is lower by 10%, 20%, 30%, 40%, 50%, 60%, 70%, 80%, 90%, 95%, 99%, 99.9%, or greater than 99.9% as compared to the immune response induced by a reference compound. The immune response itself may be measured by determining the expression or activity level of Type 1 interferons or the expression of interferon-regulated genes such as the toll-like receptors (e.g., TLR7 and TLR8). Reduction of innate immune response can also be measured by measuring the level of decreased cell death following one or more administrations to a cell population; e.g., cell death is 10%, 25%, 50%, 75%, 85%, 90%, 95%, or over 95% less than the cell death frequency observed with a reference compound. Moreover, cell death may affect fewer than 50%, 40%, 30%, 20%, 10%, 5%, 1%, 0.1%, 0.01% or fewer than 0.01% of cells contacted with the polynucleotide, primary construct or mmRNA.

[0796] In another embodiment, the polynucleotide, primary construct or mmRNA of the present invention is significantly less immunogenic than an unmodified in vitro-synthesized RNA molecule polynucleotide, or primary construct with the same sequence or a reference compound. As used herein, “significantly less immunogenic” refers to a detectable decrease in immunogenicity. In another embodiment, the term refers to a fold decrease in immunogenicity. In another embodiment, the term refers to a decrease such that an effective amount of the polynucleotide, primary construct or mmRNA can be administered without triggering a detectable immune response. In another embodiment, the term refers to a decrease such that the polynucleotide, primary construct or mmRNA can be repeatedly administered without eliciting an immune response sufficient to detectably reduce expression of the recombinant protein. In another embodiment, the decrease is such that the polynucleotide, primary construct or mmRNA can be repeatedly administered without eliciting an immune response sufficient to eliminate detectable expression of the recombinant protein.

[0797] In another embodiment, the polynucleotide, primary construct or mmRNA is 2-fold less immunogenic than its unmodified counterpart or reference compound. In another embodiment, immunogenicity is reduced by a 3-fold factor. In another embodiment, immunogenicity is reduced by a 5-fold factor. In another embodiment, immunogenicity is reduced by a 7-fold factor. In another embodiment, immunogenicity is reduced by a 10-fold factor. In another embodiment, immunogenicity is reduced by a 15-fold factor. In another embodiment, immunogenicity is reduced by a fold factor. In another embodiment, immunogenicity is reduced by a 50-fold factor. In another embodiment, immunogenicity is reduced by a 100-fold factor. In another embodiment, immunogenicity is reduced by a 200-fold factor. In another embodiment, immunogenicity is reduced by a 500-fold factor. In another embodiment, immunogenicity is reduced by a 1000-fold factor. In another embodiment, immunogenicity is reduced by a 2000-fold factor. In another embodiment, immunogenicity is reduced by another fold difference.

[0798] Methods of determining immunogenicity are well known in the art, and include, e.g. measuring secretion of cytokines (e.g. IL-12, IFNalpha, TNF-alpha, RANTES, MIP-lalpha or beta, IL-6, IFN-beta, or IL-8), measuring expression of DC activation markers (e.g. CD83, HLA-DR, CD80 and CD86), or measuring ability to act as an adjuvant for an adaptive immune response.

[0799] The the polynucleotide, primary construct or mmRNA of the invention, including the combination of modifications taught herein may have superior properties making them more suitable as therapeutic modalities.

[0800] It has been determined that the “all or none” model in the art is sorely insufficient to describe the biological phenomena associated with the therapeutic utility of modified mRNA. The present inventors have determined that to improve protein production, one may consider the nature of the modification, or combination of modifications, the percent modification and survey more than one cytokine or metric to determine the efficacy and risk profile of a particular modified mRNA.

[0801] In one aspect of the invention, methods of determining the effectiveness of a modified mRNA as compared to unmodified involves the measure and analysis of one or more cytokines whose expression is triggered by the administration of the exogenous nucleic acid of the invention. These values are compared to administration of an umodified nucleic acid or to a standard metric such as cytokine response, PolyIC, R-848 or other standard known in the art.

[0802] One example of a standard metric developed herein is the measure of the ratio of the level or amount of encoded polypeptide (protein) produced in the cell, tissue or organism to the level or amount of one or more (or a panel) of cytokines whose expression is triggered in the cell, tissue or organism as a result of administration or contact with the modified nucleic acid. Such ratios are referred to herein as the Protein:Cytokine Ratio or “PC” Ratio. The higher the PC ratio, the more efficacioius the modified nucleic acid (polynucleotide encoding the protein measured). Preferred PC Ratios, by cytokine, of the present invention may be greater than 1, greater than 10, greater than 100, greater than 1000, greater than 10,000 or more. Modified nucleic acids having higher PC Ratios than a modified nucleic acid of a different or unmodified construct are preferred.

[0803] The PC ratio may be further qualified by the percent modification present in the polynucleotide. For example, normalized to a 100% modified nucleic acid, the protein production as a function of cytokine (or risk) or cytokine profile can be determined.

[0804] In one embodiment, the present invention provides a method for determining, across chemistries, cytokines or percent modification, the relative efficacy of any particular modified the polynucleotide, primary construct or mmRNA by comparing the PC Ratio of the modified nucleic acid (polynucleotide, primary construct or mmRNA).

[0805] mmRNA containing varying levels of nucleobase subsitutions could be produced that maintain increased protein production and decreased immunostimulatory potential. The relative percentage of any modified nucleotide to its naturally occurring nucleotide counterpart can be varied during the IVT reaction (for instance, 100, 50, 25, 10, 5, 2.5, 1, 0.1, 0.01% 5 methyl cytidine usage versus cytidine; 100, 50, 25, 10, 5, 2.5, 1, 0.1, 0.01% pseudouridine or N1-methyl-pseudouridine usage versus uridine). mmRNA can also be made that utilize different ratios using 2 or more different nucleotides to the same base (for instance, different ratios of pseudouridine and N1-methyl-pseudouridine). mmRNA can also be made with mixed ratios at more than 1 “base” position, such as ratios of 5 methyl cytidine/cytidine and pseudouridine/N1-methyl-pseudouridine/uridine at the same time. Use of modified mRNA with altered ratios of modified nucleotides can be beneficial in reducing potential exposure to chemically modified nucleotides. Lastly, positional introduction of modified nucleotides into the mmRNA which modulate either protein production or immunostimulatory potential or both is also possible. The ability of such mmRNA to demonstrate these improved properties can be assessed in vitro (using assays such as the PBMC assay described herein), and can also be assessed in vivo through measurement of both mmRNA-encoded protein production and mediators of innate immune recognition such as cytokines.

[0806] In another embodiment, the relative immunogenicity of the polynucleotide, primary construct or mmRNA and its unmodified counterpart are determined by determining the quantity of the polynucleotide, primary construct or mmRNA required to elicit one of the above responses to the same degree as a given quantity of the unmodified nucleotide or reference compound. For example, if twice as much polynucleotide, primary construct or mmRNA is required to elicit the same response, than the polynucleotide, primary construct or mmRNA is two-fold less immunogenic than the unmodified nucleotide or the reference compound.

[0807] In another embodiment, the relative immunogenicity of the polynucleotide, primary construct or mmRNA and its unmodified counterpart are determined by determining the quantity of cytokine (e.g. IL-12, IFNalpha, TNF-alpha, RANTES, MIP-lalpha or beta, IL-6, IFN-beta, or IL-8) secreted in response to administration of the polynucleotide, primary construct or mmRNA, relative to the same quantity of the unmodified nucleotide or reference compound. For example, if one-half as much cytokine is secreted, than the polynucleotide, primary construct or mmRNA is two-fold less immunogenic than the unmodified nucleotide. In another embodiment, background levels of stimulation are subtracted before calculating the immunogenicity in the above methods.

[0808] Provided herein are also methods for performing the titration, reduction or elimination of the immune response in a cell or a population of cells. In some embodiments, the cell is contacted with varied doses of the same polynucleotides, primary constructs or mmRNA and dose response is evaluated. In some embodiments, a cell is contacted with a number of different polynucleotides, primary constructs or mmRNA at the same or different doses to determine the optimal composition for producing the desired effect. Regarding the immune response, the desired effect may be to avoid, evade or reduce the immune response of the cell. The desired effect may also be to alter the efficiency of protein production.

[0809] The polynucleotides, primary constructs and/or mmRNA of the present invention may be used to reduce the immune response using the method described in International Publication No. WO2013003475, herein incorporated by reference in its entirety.

### Activation of the Immune Response: Vaccines

[0810] Additionally, certain modified nucleosides, or combinations thereof, when introduced into the polynucleotides, primary constructs or mmRNA of the invention will activate the innate immune response. Such activating molecules are useful as adjuvants when combined with polypeptides and/or other vaccines. In certain embodiments, the activating molecules contain a translatable region which encodes for a polypeptide sequence useful as a vaccine, thus providing the ability to be a self-adjuvant.

[0811] In one embodiment, the polynucleotides, primary constructs and/or mmRNA of the invention may encode an immunogen. The delivery of the polynucleotides, primary constructs and/or mmRNA encoding an immunogen may activate the immune response. As a non-limiting example, the polynucleotides, primary constructs and/or mmRNA encoding an immunogen may be delivered to cells to trigger multiple innate response pathways (see International Pub. No. WO2012006377; herein incorporated by reference in its entirety). As another non-limiting example, the polynucleotides, primary constructs and mmRNA of the present invention encoding an immunogen may be delivered to a vertebrate in a dose amount large enough to be immunogenic to the vertebrate (see International Pub. No. WO2012006372 and WO2012006369; each of which is herein incorporated by reference in their entirety).

[0812] The polynucleotides, primary constructs or mmRNA of invention may encode a polypeptide sequence for a vaccine and may further comprise an inhibitor. The inhibitor may impair antigen presentation and/or inhibit various pathways known in the art. As a non-limiting example, the polynucleotides, primary constructs or mmRNA of the invention may be used for a vaccine in combination with an inhibitor which can impair antigen presentation (see International Pub. No. WO2012089225 and WO2012089338; each of which is herein incorporated by reference in their entirety).

[0813] In one embodiment, the polynucleotides, primary constructs or mmRNA of the invention may be self-replicating RNA. Self-replicating RNA molecules can enhance efficiency of RNA delivery and expression of the enclosed gene product. In one embodiment, the polynucleotides, primary constructs or mmRNA may comprise at least one modification described herein and/or known in the art. In one embodiment, the self-replicating RNA can be designed so that the self-replicating RNA does not induce production of infectious viral particles. As a non-limiting example the self-replicating RNA may be designed by the methods described in US Pub. No. US20110300205 and International Pub. No. WO2011005799, each of which is herein incorporated by reference in their entirety.

[0814] In one embodiment, the self-replicating polynucleotides, primary constructs or mmRNA of the invention may encode a protein which may raise the immune response. As a non-limiting example, the polynucleotides, primary constructs or mmRNA may be self-replicating mRNA may encode at least one antigen (see US Pub. No. US20110300205 and International Pub. Nos. WO2011005799, WO2013006838 and WO2013006842; each of which is herein incorporated by reference in their entirety).

[0815] In one embodiment, the self-replicating polynucleotides, primary constructs or mmRNA of the invention may be formulated using methods described herein or known in the art. As a non-limiting example, the self-replicating RNA may be formulated for delivery by the methods described in Geall et al (Nonviral delivery of self-amplifying RNA vaccines, PNAS 2012; PMID: 22908294).

[0816] In one embodiment, the polynucleotides, primary constructs or mmRNA of the present invention may encode amphipathic and/or immunogenic amphipathic peptides.

[0817] In on embodiment, a formulation of the polynucleotides, primary constructs or mmRNA of the present invention may further comprise an amphipathic and/or immunogenic amphipathic peptide. As a non-limiting example, the polynucleotides, primary constructs or mmRNA comprising an amphipathic and/or immunogenic amphipathic peptide may be formulated as described in US. Pub. No. US20110250237 and International Pub. Nos. WO2010009277 and WO2010009065; each of which is herein incorporated by reference in their entirety.

[0818] In one embodiment, the polynucleotides, primary constructs or mmRNA of the present invention may be immunostimultory. As a non-limiting example, the polynucleotides, primary constructs or mmRNA may encode all or a part of a positive-sense or a negative-sense stranded RNA virus genome (see International Pub No. WO2012092569 and US Pub No. US20120177701, each of which is herein incorporated by reference in their entirety). In another non-limiting example, the immunostimultory polynucleotides, primary constructs or mmRNA of the present invention may be formulated with an excipient for administration as described herein and/or known in the art (see International Pub No. WO2012068295 and US Pub No. US20120213812, each of which is herein incorporated by reference in their entirety).

[0819] In one embodiment, the response of the vaccine formulated by the methods described herein may be enhanced by the addition of various compounds to induce the therapeutic effect. As a non-limiting example, the vaccine formulation may include a MHC II binding peptide or a peptide having a similar sequence to a MHC II binding peptide (see International Pub Nos. WO2012027365, WO2011031298 and US Pub No. US20120070493, US20110110965, each of which is herein incorporated by reference in their entirety). As another example, the vaccine formulations may comprise modified nicotinic compounds which may generate an antibody response to nicotine residue in a subject (see International Pub No. WO2012061717 and US Pub No. US20120114677, each of which is herein incorporated by reference in their entirety).

### Naturally Occurring Mutants

[0820] In another embodiment, the polynucleotides, primary construct and/or mmRNA can be utilized to express variants of naturally occurring proteins that have an improved disease modifying activity, including increased biological activity, improved patient outcomes, or a protective function, etc. Many such modifier genes have been described in mammals (Nadeau, Current Opinion in Genetics & Development 2003 13:290-295; Hamilton and Yu, PLoS Genet. 2012; 8:e1002644; Corder et al., Nature Genetics 1994 7:180-184; all herein incorporated by reference in their entireties). Examples in humans include Apo E2 protein, Apo A-I variant proteins (Apo A-I Milano, Apo A-I Paris), hyperactive Factor IX protein (Factor IX Padua Arg338Lys), transthyretin mutants (TTR Thr1 l9Met). Expression of ApoE2 (cys112, cys158) has been shown to confer protection relative to other ApoE isoforms (ApoE3 (cys112, arg158), and ApoE4 (arg112, arg158)) by reducing susceptibility to Alzheimer's disease and possibly other conditions such as cardiovascular disease (Corder et al., Nature Genetics 1994 7:180-184; Seripa et al., Rejuvenation Res. 2011 14:491-500; Liu et al. Nat Rev Neurol. 2013 9:106-118; all herein incorporated by reference in their entireties). Expression of Apo A-I variants has been associated with reduced cholesterol (deGoma and Rader, 2011 Nature Rev Cardiol 8:266-271; Nissen et al., 2003 JAMA 290:2292-2300; all herein incorporated by reference in its entirety). The amino acid sequence of ApoA-I in certain populations has been changed to cysteine in Apo A-I Milano (Arg 173 changed to Cys) and in Apo A-I Paris (Arg 151 changed to Cys). Factor IX mutation at position R338 L (FIX Padua) results in a Factor IX protein that has ˜10-fold increased activity (Simioni et al., N Engl J Med. 2009 361:1671-1675; Finn et al., Blood. 2012 120:4521-4523; Cantore et al., Blood. 2012 120:4517-20; all herein incorporated by reference in their entireties). Mutation of transthyretin at positions 104 or 119 (Arg104 His, Thr 119Met) has been shown to provide protection to patients also harboring the disease causing Val30Met mutations (Saraiva, Hum Mutat. 2001 17:493-503; DATA BASE ON TRANSTHYRETIN MUTATIONS www.ibmc.up.pt/mjsaraiva/ttrmut.html; all herein incorporated by reference in its entirety). Differences in clinical presentation and severity of symptoms among Portuguese and Japanese Met 30 patients carrying respectively the Met 119 and the His104 mutations are observed with a clear protective effect exerted by the non pathogenic mutant (Coelho et al. 1996 Neuromuscular Disorders (Suppl) 6: S20; Terazaki et al. 1999. Biochem Biophys Res Commun 264: 365-370; all herein incorporated by reference in its entirety), which confer more stability to the molecule. A modified mRNA encoding these protective TTR alleles can be expressed in TTR amyloidosis patients, thereby reducing the effect of the pathogenic mutant TTR protein.

### Major Groove Interacting Partners

[0821] As described herein, the phrase “major groove interacting partner” refers to RNA recognition receptors that detect and respond to RNA ligands through interactions, e.g. binding, with the major groove face of a nucleotide or nucleic acid. As such, RNA ligands comprising modified nucleotides or nucleic acids such as the polynucleotide, primary construct or mmRNA as described herein decrease interactions with major groove binding partners, and therefore decrease an innate immune response.

[0822] Example major groove interacting, e.g. binding, partners include, but are not limited to the following nucleases and helicases. Within membranes, TLRs (Toll-like Receptors) 3, 7, and 8 can respond to single- and double-stranded RNAs. Within the cytoplasm, members of the superfamily 2 class of DEX(D/H) helicases and ATPases can sense RNAs to initiate antiviral responses. These helicases include the RIG-I (retinoic acid-inducible gene I) and MDA5 (melanoma differentiation-associated gene 5). Other examples include laboratory of genetics and physiology 2 (LGP2), HIN-200 domain containing proteins, or Helicase-domain containing proteins.

### Targeting of Pathogenic Organisms or Diseased Cells

[0823] Provided herein are methods for targeting pathogenic microorganisms, such as bacteria, yeast, protozoa, helminthes and the like, or diseased cells such as cancer cells using polynucleotides, primary constructs or mmRNA that encode cytostatic or cytotoxic polypeptides. Preferably the mRNA introduced contains modified nucleosides or other nucleic acid sequence modifications that are translated exclusively, or preferentially, in the target pathogenic organism, to reduce possible off-target effects of the therapeutic. Such methods are useful for removing pathogenic organisms or killing diseased cells found in any biological material, including blood, semen, eggs, and transplant materials including embryos, tissues, and organs.

### Bioprocessing

[0824] The methods provided herein may be useful for enhancing protein product yield in a cell culture process. In a cell culture containing a plurality of host cells, introduction of a polynucleotide, primary construct or mmRNA described herein results in increased protein production efficiency relative to a corresponding unmodified nucleic acid. Such increased protein production efficiency can be demonstrated, e.g., by showing increased cell transfection, increased protein translation from the polynucleotide, primary construct or mmRNA, decreased nucleic acid degradation, and/or reduced innate immune response of the host cell. Protein production can be measured by enzyme-linked immunosorbent assay (ELISA), and protein activity can be measured by various functional assays known in the art. The protein production may be generated in a continuous or a batch-fed mammalian process.

[0825] Additionally, it is useful to optimize the expression of a specific polypeptide in a cell line or collection of cell lines of potential interest, particularly a polypeptide of interest such as a protein variant of a reference protein having a known activity. In one embodiment, provided is a method of optimizing expression of a polypeptide of interest in a target cell, by providing a plurality of target cell types, and independently contacting with each of the plurality of target cell types a polynucleotide, primary construct or mmRNA encoding a polypeptide of interest. The cells may be transfected with two or more polynucleotide, primary construct or mmRNA simultaneously or sequentially.

[0826] In certain embodiments, multiple rounds of the methods described herein may be used to obtain cells with increased expression of one or more nucleic acids or proteins of interest. For example, cells may be transfected with one or more polynucleotide, primary construct or mmRNA that encode a nucleic acid or protein of interest. The cells may be isolated according to methods described herein before being subjected to further rounds of transfections with one or more other nucleic acids which encode a nucleic acid or protein of interest before being isolated again. This method may be useful for generating cells with increased expression of a complex of proteins, nucleic acids or proteins in the same or related biological pathway, nucleic acids or proteins that act upstream or downstream of each other, nucleic acids or proteins that have a modulating, activating or repressing function to each other, nucleic acids or proteins that are dependent on each other for function or activity, or nucleic acids or proteins that share homology.

[0827] Additionally, culture conditions may be altered to increase protein production efficiency. Subsequently, the presence and/or level of the polypeptide of interest in the plurality of target cell types is detected and/or quantitated, allowing for the optimization of a polypeptide's expression by selection of an efficient target cell and cell culture conditions relating thereto. Such methods are particularly useful when the polypeptide contains one or more post-translational modifications or has substantial tertiary structure, situations which often complicate efficient protein production.

[0828] In one embodiment, the cells used in the methods of the present invention may be cultured. The cells may be cultured in suspension or as adherent cultures. The cells may be cultured in a varied of vessels including, but not limited to, bioreactors, cell bags, wave bags, culture plates, flasks and other vessels well known to those of ordinary skill in the art. Cells may be cultured in IMDM (Invitrogen, Catalog number 12440-53) or any other suitable media including, but not limited to, chemically defined media formulations. The ambient conditions which may be suitable for cell culture, such as temperature and atmospheric composition, are well known to those skilled in the art. The methods of the invention may be used with any cell that is suitable for use in protein production.

[0829] The invention provides for the repeated introduction (e.g., transfection) of modified nucleic acids into a target cell population, e.g., in vitro, ex vivo, in situ, or in vivo. For example, contacting the same cell population may be repeated one or more times (such as two, three, four, five or more than five times). In some embodiments, the step of contacting the cell population with the polynucleotides, primary constructs or mmRNA is repeated a number of times sufficient such that a predetermined efficiency of protein translation in the cell population is achieved. Given the often reduced cytotoxicity of the target cell population provided by the nucleic acid modifications, repeated transfections are achievable in a diverse array of cell types and within a variety of tissues, as provided herein.

[0830] In one embodiment, the bioprocessing methods of the present invention may be used to produce antibodies or functional fragments thereof. The functional fragments may comprise a Fab, Fab′, F(ab′)₂, an Fv domain, an scFv, or a diabody. They may be variable in any region including the complement determining region (CDR). In one embodiment, there is complete diversity in the CDR3 region. In another embodiment, the antibody is substantially conserved except in the CDR3 region.

[0831] Antibodies may be made which bind or associate with any biomolecule, whether human, pathogenic or non-human in origin. The pathogen may be present in a non-human mammal, a clinical specimen or from a commercial product such as a cosmetic or pharmaceutical material. They may also bind to any specimen or sample including clinical specimens or tissue samples from any organism.

[0832] In some embodiments, the contacting step is repeated multiple times at a frequency selected from the group consisting of: 6 hour, 12 hour, 24 hour, 36 hour, 48 hour, 72 hour, 84 hour, 96 hour, and 108 hour and at concentrations of less than 20 nM, less than 50 nM, less than 80 nM or less than 100 nM. Compositions may also be administered at less than 1 mM, less than 5 mM, less than 10 mM, less than 100 mM or less than 500 mM.

[0833] In some embodiments, the polynucleotides, primary constructs or mmRNA are added at an amount of 50 molecules per cell, 100 molecules/cell, 200 molecules/cell, 300 molecules/cell, 400 molecules/cell, 500 molecules/cell, 600 molecules/cell, 700 molecules/cell, 800 molecules/cell, 900 molecules/cell, 1000 molecules/cell, 2000 molecules/cell, or 5000 molecules/cell.

[0834] In other embodiments, the polynucleotides, primary constructs or mmRNA are added at a concentration selected from the group consisting of: 0.01 fmol/106 cells, 0.1 fmol/106 cells, 0.5 fmol/106 cells, 0.75 fmol/106 cells, 1 fmol/106 cells, 2 fmol/106 cells, 5 fmol/106 cells, 10 fmol/106 cells, 20 fmol/106 cells, 30 fmol/106 cells, 40 fmol/106 cells, 50 fmol/106 cells, 60 fmol/106 cells, 100 fmol/106 cells, 200 fmol/106 cells, 300 fmol/106 cells, 400 fmol/106 cells, 500 fmol/106 cells, 700 fmol/106 cells, 800 fmol/106 cells, 900 fmol/106 cells, and 1 pmol/106 cells.

[0835] In some embodiments, the production of a biological product upon is detected by monitoring one or more measurable bioprocess parameters, such as a parameter selected from the group consisting of: cell density, pH, oxygen levels, glucose levels, lactic acid levels, temperature, and protein production. Protein production can be measured as specific productivity (SP) (the concentration of a product, such as a heterologously expressed polypeptide, in solution) and can be expressed as mg/L or g/L; in the alternative, specific productivity can be expressed as pg/cell/day. An increase in SP can refer to an absolute or relative increase in the concentration of a product produced under two defined set of conditions (e.g., when compared with controls not treated with modified mRNA(s)).

### Cells

[0836] In one embodiment, the cells are selected from the group consisting of mammalian cells, bacterial cells, plant, microbial, algal and fungal cells. In some embodiments, the cells are mammalian cells, such as, but not limited to, human, mouse, rat, goat, horse, rabbit, hamster or cow cells. In a further embodiment, the cells may be from an established cell line, including, but not limited to, HeLa, NS0, SP2/0, KEK 293T, Vero, Caco, Caco-2, MDCK, COS-1, COS-7, K562, Jurkat, CHO-K1, DG44, CHOK1SV, CHO—S, Huvec, CV-1, Huh-7, NIH3T3, HEK293, 293, A549, HepG2, EIR-90, MCF-7, U-20S, Per.C6, SF9, SF21 or Chinese Hamster Ovary (CHO) cells.

[0837] In certain embodiments, the cells are fungal cells, such as, but not limited to, Chrysosporium cells, Aspergillus cells, Trichoderma cells, Dictyostelium cells, Candida cells, Saccharomyces cells, Schizosaccharomyces cells, and Penicillium cells.

[0838] In certain embodiments, the cells are bacterial cells such as, but not limited to, E. coli, B. subtilis, or BL21 cells. Primary and secondary cells to be transfected by the methods of the invention can be obtained from a variety of tissues and include, but are not limited to, all cell types which can be maintained in culture. For examples, primary and secondary cells which can be transfected by the methods of the invention include, but are not limited to, fibroblasts, keratinocytes, epithelial cells (e.g., mammary epithelial cells, intestinal epithelial cells), endothelial cells, glial cells, neural cells, formed elements of the blood (e.g., lymphocytes, bone marrow cells), muscle cells and precursors of these somatic cell types. Primary cells may also be obtained from a donor of the same species or from another species (e.g., mouse, rat, rabbit, cat, dog, pig, cow, bird, sheep, goat, horse).

### Purification and Isolation

[0839] Those of ordinary skill in the art should be able to make a determination of the methods to use to purify or isolate of a protein of interest from cultured cells. Generally, this is done through a capture method using affinity binding or non-affinity purification. If the protein of interest is not secreted by the cultured cells, then a lysis of the cultured cells should be performed prior to purification or isolation. One may use unclarified cell culture fluid containing the protein of interest along with cell culture media components as well as cell culture additives, such as anti-foam compounds and other nutrients and supplements, cells, cellular debris, host cell proteins, DNA, viruses and the like in the present invention. The process may be conducted in the bioreactor itself. The fluid may either be preconditioned to a desired stimulus such as pH, temperature or other stimulus characteristic or the fluid can be conditioned upon the addition of polymer(s) or the polymer(s) can be added to a carrier liquid that is properly conditioned to the required parameter for the stimulus condition required for that polymer to be solubilized in the fluid. The polymer may be allowed to circulate thoroughly with the fluid and then the stimulus may be applied (change in pH, temperature, salt concentration, etc) and the desired protein and polymer(s) precipitate can out of the solution. The polymer and the desired protein(s) can be separated from the rest of the fluid and optionally washed one or more times to remove any trapped or loosely bound contaminants. The desired protein may then be recovered from the polymer(s) by, for example, elution and the like. Preferably, the elution may be done under a set of conditions such that the polymer remains in its precipitated form and retains any impurities to it during the selected elution of the desired protein. The polymer and protein as well as any impurities may be solubilized in a new fluid such as water or a buffered solution and the protein may be recovered by a means such as affinity, ion exchanged, hydrophobic, or some other type of chromatography that has a preference and selectivity for the protein over that of the polymer or impurities. The eluted protein may then be recovered and may be subjected to additional processing steps, either batch like steps or continuous flow through steps if appropriate.

[0840] In another embodiment, it may be useful to optimize the expression of a specific polypeptide in a cell line or collection of cell lines of potential interest, particularly a polypeptide of interest such as a protein variant of a reference protein having a known activity. In one embodiment, provided is a method of optimizing expression of a polypeptide of interest in a target cell, by providing a plurality of target cell types, and independently contacting with each of the plurality of target cell types a modified mRNA encoding a polypeptide. Additionally, culture conditions may be altered to increase protein production efficiency. Subsequently, the presence and/or level of the polypeptide of interest in the plurality of target cell types is detected and/or quantitated, allowing for the optimization of a polypeptide of interest's expression by selection of an efficient target cell and cell culture conditions relating thereto. Such methods may be useful when the polypeptide of interest contains one or more post-translational modifications or has substantial tertiary structure, which often complicate efficient protein production.

### Protein Recovery

[0841] The protein of interest may be preferably recovered from the culture medium as a secreted polypeptide, or it can be recovered from host cell lysates if expressed without a secretory signal. It may be necessary to purify the protein of interest from other recombinant proteins and host cell proteins in a way that substantially homogenous preparations of the protein of interest are obtained. The cells and/or particulate cell debris may be removed from the culture medium or lysate. The product of interest may then be purified from contaminant soluble proteins, polypeptides and nucleic acids by, for example, fractionation on immunoaffinity or ion-exchange columns, ethanol precipitation, reverse phase HPLC (RP-HPLC), SEPHADEX® chromatography, chromatography on silica or on a cation exchange resin such as DEAE. Methods of purifying a protein heterologous expressed by a host cell are well known in the art.

[0842] Methods and compositions described herein may be used to produce proteins which are capable of attenuating or blocking the endogenous agonist biological response and/or antagonizing a receptor or signaling molecule in a mammalian subject. For example, IL-12 and IL-23 receptor signaling may be enhanced in chronic autoimmune disorders such as multiple sclerosis and inflammatory diseases such as rheumatoid arthritis, psoriasis, lupus erythematosus, ankylosing spondylitis and Chron's disease (Kikly K, Liu L, Na S, Sedgwich J D (2006) Cur. Opin. Immunol. 18(6): 670-5). In another embodiment, a nucleic acid encodes an antagonist for chemokine receptors. Chemokine receptors CXCR-4 and CCR-5 are required for HIV enry into host cells (Arenzana-Seisdedos F et al, (1996) Nature. October 3; 383 (6599):400).

### Gene Silencing

[0843] The polynucleotides, primary constructs and mmRNA described herein are useful to silence (i.e., prevent or substantially reduce) expression of one or more target genes in a cell population. A polynucleotide, primary construct or mmRNA encoding a polypeptide of interest capable of directing sequence-specific histone H3 methylation is introduced into the cells in the population under conditions such that the polypeptide is translated and reduces gene transcription of a target gene via histone H3 methylation and subsequent heterochromatin formation. In some embodiments, the silencing mechanism is performed on a cell population present in a mammalian subject. By way of non-limiting example, a useful target gene is a mutated Janus Kinase-2 family member, wherein the mammalian subject expresses the mutant target gene suffers from a myeloproliferative disease resulting from aberrant kinase activity.

[0844] Co-administration of polynucleotides, primary constructs and mmRNA and RNAi agents are also provided herein.

### Modulation of Biological Pathways

[0845] The rapid translation polynucleotides, primary constructs and mmRNA introduced into cells provides a desirable mechanism of modulating target biological pathways. Such modulation includes antagonism or agonism of a given pathway. In one embodiment, a method is provided for antagonizing a biological pathway in a cell by contacting the cell with an effective amount of a composition comprising a polynucleotide, primary construct or mmRNA encoding a polypeptide of interest, under conditions such that the polynucleotides, primary constructs and mmRNA is localized into the cell and the polypeptide is capable of being translated in the cell from the polynucleotides, primary constructs and mmRNA, wherein the polypeptide inhibits the activity of a polypeptide functional in the biological pathway. Exemplary biological pathways are those defective in an autoimmune or inflammatory disorder such as multiple sclerosis, rheumatoid arthritis, psoriasis, lupus erythematosus, ankylosing spondylitis colitis, or Crohn's disease; in particular, antagonism of the IL-12 and IL-23 signaling pathways are of particular utility. (See Kikly K, Liu L, Na S, Sedgwick J D (2006) Curr. Opin. Immunol. 18 (6): 670-5).

[0846] Further, provided are polynucleotide, primary construct or mmRNA encoding an antagonist for chemokine receptors; chemokine receptors CXCR-4 and CCR-5 are required for, e.g., HIV entry into host cells (Arenzana-Seisdedos F et al, (1996) Nature. October 3; 383(6599):400).

[0847] Alternatively, provided are methods of agonizing a biological pathway in a cell by contacting the cell with an effective amount of a polynucleotide, primary construct or mmRNA encoding a recombinant polypeptide under conditions such that the nucleic acid is localized into the cell and the recombinant polypeptide is capable of being translated in the cell from the nucleic acid, and the recombinant polypeptide induces the activity of a polypeptide functional in the biological pathway. Exemplary agonized biological pathways include pathways that modulate cell fate determination. Such agonization is reversible or, alternatively, irreversible.

### Expression of Ligand or Receptor on Cell Surface

[0848] In some aspects and embodiments of the aspects described herein, the polynucleotides, primary constructs or mmRNA described herein can be used to express a ligand or ligand receptor on the surface of a cell (e.g., a homing moiety). A ligand or ligand receptor moiety attached to a cell surface can permit the cell to have a desired biological interaction with a tissue or an agent in vivo. A ligand can be an antibody, an antibody fragment, an aptamer, a peptide, a vitamin, a carbohydrate, a protein or polypeptide, a receptor, e.g., cell-surface receptor, an adhesion molecule, a glycoprotein, a sugar residue, a therapeutic agent, a drug, a glycosaminoglycan, or any combination thereof. For example, a ligand can be an antibody that recognizes a cancer-cell specific antigen, rendering the cell capable of preferentially interacting with tumor cells to permit tumor-specific localization of a modified cell. A ligand can confer the ability of a cell composition to accumulate in a tissue to be treated, since a preferred ligand may be capable of interacting with a target molecule on the external face of a tissue to be treated. Ligands having limited cross-reactivity to other tissues are generally preferred.

[0849] In some cases, a ligand can act as a homing moiety which permits the cell to target to a specific tissue or interact with a specific ligand. Such homing moieties can include, but are not limited to, any member of a specific binding pair, antibodies, monoclonal antibodies, or derivatives or analogs thereof, including without limitation: Fv fragments, single chain Fv (scFv) fragments, Fab′ fragments, F(ab′)2 fragments, single domain antibodies, camelized antibodies and antibody fragments, humanized antibodies and antibody fragments, and multivalent versions of the foregoing; multivalent binding reagents including without limitation: monospecific or bispecific antibodies, such as disulfide stabilized Fv fragments, scFv tandems ((SCFV)2 fragments), diabodies, tribodies or tetrabodies, which typically are covalently linked or otherwise stabilized (i.e., leucine zipper or helix stabilized) scFv fragments; and other homing moieties include for example, aptamers, receptors, and fusion proteins.

[0850] In some embodiments, the homing moiety may be a surface-bound antibody, which can permit tuning of cell targeting specificity. This is especially useful since highly specific antibodies can be raised against an epitope of interest for the desired targeting site. In one embodiment, multiple antibodies are expressed on the surface of a cell, and each antibody can have a different specificity for a desired target. Such approaches can increase the avidity and specificity of homing interactions.

[0851] A skilled artisan can select any homing moiety based on the desired localization or function of the cell, for example an estrogen receptor ligand, such as tamoxifen, can target cells to estrogen-dependent breast cancer cells that have an increased number of estrogen receptors on the cell surface. Other non-limiting examples of ligand/receptor interactions include CCRI (e.g., for treatment of inflamed joint tissues or brain in rheumatoid arthritis, and/or multiple sclerosis), CCR7, CCR8 (e.g., targeting to lymph node tissue), CCR6, CCR9, CCR10 (e.g., to target to intestinal tissue), CCR4, CCR10 (e.g., for targeting to skin), CXCR4 (e.g., for general enhanced transmigration), HCELL (e.g., for treatment of inflammation and inflammatory disorders, bone marrow), Alpha4beta7 (e.g., for intestinal mucosa targeting), VLA-4/VCAM-1 (e.g., targeting to endothelium). In general, any receptor involved in targeting (e.g., cancer metastasis) can be harnessed for use in the methods and compositions described herein.

### Modulation of Cell Lineage

[0852] Provided are methods of inducing an alteration in cell fate in a target mammalian cell. The target mammalian cell may be a precursor cell and the alteration may involve driving differentiation into a lineage, or blocking such differentiation. Alternatively, the target mammalian cell may be a differentiated cell, and the cell fate alteration includes driving de-differentiation into a pluripotent precursor cell, or blocking such de-differentiation, such as the dedifferentiation of cancer cells into cancer stem cells. In situations where a change in cell fate is desired, effective amounts of mRNAs encoding a cell fate inductive polypeptide is introduced into a target cell under conditions such that an alteration in cell fate is induced. In some embodiments, the modified mRNAs are useful to reprogram a subpopulation of cells from a first phenotype to a second phenotype. Such a reprogramming may be temporary or permanent.

[0853] Optionally, the reprogramming induces a target cell to adopt an intermediate phenotype.

[0854] Additionally, the methods of the present invention are particularly useful to generate induced pluripotent stem cells (iPS cells) because of the high efficiency of transfection, the ability to re-transfect cells, and the tenability of the amount of recombinant polypeptides produced in the target cells. Further, the use of iPS cells generated using the methods described herein is expected to have a reduced incidence of teratoma formation.

[0855] Also provided are methods of reducing cellular differentiation in a target cell population. For example, a target cell population containing one or more precursor cell types is contacted with a composition having an effective amount of a polynucleotides, primary constructs and mmRNA encoding a polypeptide, under conditions such that the polypeptide is translated and reduces the differentiation of the precursor cell. In non-limiting embodiments, the target cell population contains injured tissue in a mammalian subject or tissue affected by a surgical procedure. The precursor cell is, e.g., a stromal precursor cell, a neural precursor cell, or a mesenchymal precursor cell.

[0856] In a specific embodiment, provided are polynucleotide, primary construct or mmRNA that encode one or more differentiation factors Gata4, Mef2c and Tbx4. These mRNA-generated factors are introduced into fibroblasts and drive the reprogramming into cardiomyocytes. Such a reprogramming can be performed in vivo, by contacting an mRNA-containing patch or other material to damaged cardiac tissue to facilitate cardiac regeneration. Such a process promotes cardiomyocyte genesis as opposed to fibrosis.

### Mediation of Cell Death

[0857] In one embodiment, polynucleotides, primary constructs or mmRNA compositions can be used to induce apoptosis in a cell (e.g., a cancer cell) by increasing the expression of a death receptor, a death receptor ligand or a combination thereof. This method can be used to induce cell death in any desired cell and has particular usefulness in the treatment of cancer where cells escape natural apoptotic signals.

[0858] Apoptosis can be induced by multiple independent signaling pathways that converge upon a final effector mechanism consisting of multiple interactions between several “death receptors” and their ligands, which belong to the tumor necrosis factor (TNF) receptor/ligand superfamily. The best-characterized death receptors are CD95 (“Fas”), TNFRI (p55), death receptor 3 (DR3 or Apo3/TRAMO), DR4 and DR5 (apo2-TRAIL-R2). The final effector mechanism of apoptosis may be the activation of a series of proteinases designated as caspases. The activation of these caspases results in the cleavage of a series of vital cellular proteins and cell death. The molecular mechanism of death receptors/ligands-induced apoptosis is well known in the art. For example, Fas/FasL-mediated apoptosis is induced by binding of three FasL molecules which induces trimerization of Fas receptor via C-terminus death domains (DDs), which in turn recruits an adapter protein FADD (Fas-associated protein with death domain) and Caspase-8. The oligomerization of this trimolecular complex, Fas/FAIDD/caspase-8, results in proteolytic cleavage of proenzyme caspase-8 into active caspase-8 that, in turn, initiates the apoptosis process by activating other downstream caspases through proteolysis, including caspase-3. Death ligands in general are apoptotic when formed into trimers or higher order of structures. As monomers, they may serve as antiapoptotic agents by competing with the trimers for binding to the death receptors.

[0859] In one embodiment, the polynucleotides, primary constructs or mmRNA composition encodes for a death receptor (e.g., Fas, TRAIL, TRAMO, TNFR, TLR etc). Cells made to express a death receptor by transfection of polynucleotides, primary constructs and mmRNA become susceptible to death induced by the ligand that activates that receptor. Similarly, cells made to express a death ligand, e.g., on their surface, will induce death of cells with the receptor when the transfected cell contacts the target cell. In another embodiment, the polynucleotides, primary constructs and mmRNA composition encodes for a death receptor ligand (e.g., FasL, TNF, etc). In another embodiment, the polynucleotides, primary constructs and mmRNA composition encodes a caspase (e.g., caspase 3, caspase 8, caspase 9 etc). Where cancer cells often exhibit a failure to properly differentiate to a non-proliferative or controlled proliferative form, in another embodiment, the synthetic, polynucleotides, primary constructs and mmRNA composition encodes for both a death receptor and its appropriate activating ligand. In another embodiment, the synthetic, polynucleotides, primary constructs and mmRNA composition encodes for a differentiation factor that when expressed in the cancer cell, such as a cancer stem cell, will induce the cell to differentiate to a non-pathogenic or nonself-renewing phenotype (e.g., reduced cell growth rate, reduced cell division etc) or to induce the cell to enter a dormant cell phase (e.g., Go resting phase).

[0860] One of skill in the art will appreciate that the use of apoptosis-inducing techniques may require that the polynucleotides, primary constructs or mmRNA are appropriately targeted to e.g., tumor cells to prevent unwanted wide-spread cell death. Thus, one can use a delivery mechanism (e.g., attached ligand or antibody, targeted liposome etc) that recognizes a cancer antigen such that the polynucleotides, primary constructs or mmRNA are expressed only in cancer cells.

### Cosmetic Applications

[0861] In one embodiment, the polynucleotides, primary constructs and/or mmRNA may be used in the treatment, amelioration or prophylaxis of cosmetic conditions. Such conditions include acne, rosacea, scarring, wrinkles, eczema, shingles, psoriasis, age spots, birth marks, dry skin, calluses, rash (e.g., diaper, heat), scabies, hives, warts, insect bites, vitiligo, dandruff, freckles, and general signs of aging.

### VI. Kits and Devices

### Kits

[0862] The invention provides a variety of kits for conveniently and/or effectively carrying out methods of the present invention. Typically kits will comprise sufficient amounts and/or numbers of components to allow a user to perform multiple treatments of a subject(s) and/or to perform multiple experiments.

[0863] In one aspect, the present invention provides kits comprising the molecules (polynucleotides, primary constructs or mmRNA) of the invention. In one embodiment, the kit comprises one or more functional antibodies or function fragments thereof.

[0864] Said kits can be for protein production, comprising a first polynucleotide, primary construct or mmRNA comprising a translatable region. The kit may further comprise packaging and instructions and/or a delivery agent to form a formulation composition. The delivery agent may comprise a saline, a buffered solution, a lipidoid or any delivery agent disclosed herein.

[0865] In one embodiment, the buffer solution may include sodium chloride, calcium chloride, phosphate and/or EDTA. In another embodiment, the buffer solution may include, but is not limited to, saline, saline with 2 mM calcium, 5% sucrose, 5% sucrose with 2 mM calcium, 5% Mannitol, 5% Mannitol with 2 mM calcium, Ringer's lactate, sodium chloride, sodium chloride with 2 mM calcium and mannose (See e.g., U.S. Pub. No. 20120258046; herein incorporated by reference in its entirety). In a further embodiment, the buffer solutions may be precipitated or it may be lyophilized. The amount of each component may be varied to enable consistent, reproducible higher concentration saline or simple buffer formulations. The components may also be varied in order to increase the stability of modified RNA in the buffer solution over a period of time and/or under a variety of conditions. In one aspect, the present invention provides kits for protein production, comprising: a polynucleotide, primary construct or mmRNA comprising a translatable region, provided in an amount effective to produce a desired amount of a protein encoded by the translatable region when introduced into a target cell; a second polynucleotide comprising an inhibitory nucleic acid, provided in an amount effective to substantially inhibit the innate immune response of the cell; and packaging and instructions.

[0866] In one aspect, the present invention provides kits for protein production, comprising a polynucleotide, primary construct or mmRNA comprising a translatable region, wherein the polynucleotide exhibits reduced degradation by a cellular nuclease, and packaging and instructions.

[0867] In one aspect, the present invention provides kits for protein production, comprising a polynucleotide, primary construct or mmRNA comprising a translatable region, wherein the polynucleotide exhibits reduced degradation by a cellular nuclease, and a mammalian cell suitable for translation of the translatable region of the first nucleic acid.

[0868] In one embodiment, the levels of Protein C may be measured by immunoassay. The assay may be purchased and is available from any number of suppliers including BioMerieux, Inc. (Durham, NC), Abbott Laboratories (Abbott Park, IL), Siemens Medical Solutions USA, Inc. (Malvern, PA), BIOPORTO® Diagnostics A/S (Gentofte, Denmark), USCN® Life Science Inc. (Houston, TX) or Roche Diagnostic Corporation (Indianapolis, IN). In this embodiment, the assay may be used to assess levels of Protein C or its activated form or a variant delivered as or in response to administration of a modified mRNA molecule.

### Devices

[0869] The present invention provides for devices which may incorporate polynucleotides, primary constructs or mmRNA that encode polypeptides of interest. These devices contain in a stable formulation the reagents to synthesize a polynucleotide in a formulation available to be immediately delivered to a subject in need thereof, such as a human patient. Non-limiting examples of such a polypeptide of interest include a growth factor and/or angiogenesis stimulator for wound healing, a peptide antibiotic to facilitate infection control, and an antigen to rapidly stimulate an immune response to a newly identified virus.

[0870] Devices may also be used in conjunction with the present invention. In one embodiment, a device is used to assess levels of a protein which has been administered in the form of a modified mRNA. The device may comprise a blood, urine or other biofluidic test. It may be as large as to include an automated central lab platform or a small decentralized bench top device. It may be point of care or a handheld device. In this embodiment, for example, Protein C or APC may be quatitated before, during or after treatment with a modified mRNA encoding Protein C (its zymogen), APC or any variants thereof. Protein C, also known as autoprothrombin IIA and blood coagulation factor XIV is a zymogen, or precursor, of a serine protease which plays an important role in the regulation of blood coagulation and generation of fibrinolytic activity in vivo. It is synthesized in the liver as a single-chain polypeptide but undergoes posttranslational processing to give rise to a two-chain intermediate. The intermediate form of Protein C is converted via thrombin-mediated cleavage of a 12-residue peptide from the amino-terminus of the heavy chain to of the molecule to the active form, known as “activated protein C” (APC). The device may be useful in drug discovery efforts as a companion diagnostic test associated with Protein C, or APC treatment such as for sepsis or severe sepsis. In early studies it was suggested that APC had the ability to reduce mortality in severe sepsis. Following this line of work, clinical studies lead to the FDA approval of one compound, activated drotrecogin alfa (recombinant protein C). However, in late 2011, the drug was withdrawn from sale in all markets following results of the PROWESS-SHOCK study, which showed the study did not meet the primary endpoint of a statistically significant reduction in 28-day all-cause mortality in patients with septic shock. The present invention provides modified mRNA molecules which may be used in the diagnosis and treatment of sepsis, severe sepsis and septicemia which overcome prior issues or problems associated with increasing protein expression efficiencies in mammals.

[0871] In some embodiments the device is self-contained, and is optionally capable of wireless remote access to obtain instructions for synthesis and/or analysis of the generated polynucleotide, primary construct or mmRNA. The device is capable of mobile synthesis of at least one polynucleotide, primary construct or mmRNA and preferably an unlimited number of different polynucleotides, primary constructs or mmRNA. In certain embodiments, the device is capable of being transported by one or a small number of individuals. In other embodiments, the device is scaled to fit on a benchtop or desk. In other embodiments, the device is scaled to fit into a suitcase, backpack or similarly sized object. In another embodiment, the device may be a point of care or handheld device. In further embodiments, the device is scaled to fit into a vehicle, such as a car, truck or ambulance, or a military vehicle such as a tank or personnel carrier. The information necessary to generate a modified mRNA encoding polypeptide of interest is present within a computer readable medium present in the device.

[0872] In one embodiment, a device may be used to assess levels of a protein which has been administered in the form of a polynucleotide, primary construct or mmRNA. The device may comprise a blood, urine or other biofluidic test.

[0873] In some embodiments, the device is capable of communication (e.g., wireless communication) with a database of nucleic acid and polypeptide sequences. The device contains at least one sample block for insertion of one or more sample vessels. Such sample vessels are capable of accepting in liquid or other form any number of materials such as template DNA, nucleotides, enzymes, buffers, and other reagents. The sample vessels are also capable of being heated and cooled by contact with the sample block. The sample block is generally in communication with a device base with one or more electronic control units for the at least one sample block. The sample block preferably contains a heating module, such heating molecule capable of heating and/or cooling the sample vessels and contents thereof to temperatures between about −20 C and above +100 C. The device base is in communication with a voltage supply such as a battery or external voltage supply. The device also contains means for storing and distributing the materials for RNA synthesis.

[0874] Optionally, the sample block contains a module for separating the synthesized nucleic acids. Alternatively, the device contains a separation module operably linked to the sample block. Preferably the device contains a means for analysis of the synthesized nucleic acid. Such analysis includes sequence identity (demonstrated such as by hybridization), absence of non-desired sequences, measurement of integrity of synthesized mRNA (such has by microfluidic viscometry combined with spectrophotometry), and concentration and/or potency of modified RNA (such as by spectrophotometry).

[0875] In certain embodiments, the device is combined with a means for detection of pathogens present in a biological material obtained from a subject, e.g., the IBIS PLEX-ID system (Abbott, Abbott Park, TL) for microbial identification.

[0876] Suitable devices for use in delivering intradermal pharmaceutical compositions described herein include short needle devices such as those described in U.S. Pat. Nos. 4,886,499; 5,190,521; 5,328,483; 5,527,288; 4,270,537; 5,015,235; 5,141,496; and 5,417,662; each of which is herein incorporated by reference in their entirety. Intradermal compositions may be administered by devices which limit the effective penetration length of a needle into the skin, such as those described in PCT publication WO 99/34850 (herein incorporated by reference in its entirety) and functional equivalents thereof. Jet injection devices which deliver liquid compositions to the dermis via a liquid jet injector and/or via a needle which pierces the stratum corneum and produces a jet which reaches the dermis are suitable. Jet injection devices are described, for example, in U.S. Pat. Nos. 5,480,381; 5,599,302; 5,334,144; 5,993,412; 5,649,912; 5,569,189; 5,704,911; 5,383,851; 5,893,397; 5,466,220; 5,339,163; 5,312,335; 5,503,627; 5,064,413; 5,520,639; 4,596,556; 4,790,824; 4,941,880; 4,940,460; and PCT publications WO 97/37705 and WO 97/13537; each of which are herein incorporated by reference in their entirety. Ballistic powder/particle delivery devices which use compressed gas to accelerate vaccine in powder form through the outer layers of the skin to the dermis are suitable. Alternatively or additionally, conventional syringes may be used in the classical mantoux method of intradermal administration.

[0877] In some embodiments, the device may be a pump or comprise a catheter for administration of compounds or compositions of the invention across the blood brain barrier. Such devices include but are not limited to a pressurized olfactory delivery device, iontophoresis devices, multi-layered microfluidic devices, and the like. Such devices may be portable or stationary. They may be implantable or externally tethered to the body or combinations thereof.

[0878] Devices for administration may be employed to deliver the polynucleotides, primary constructs or mmRNA of the present invention according to single, multi- or split-dosing regimens taught herein. Such devices are described below.

[0879] Method and devices known in the art for multi-administration to cells, organs and tissues are contemplated for use in conjunction with the methods and compositions disclosed herein as embodiments of the present invention. These include, for example, those methods and devices having multiple needles, hybrid devices employing for example lumens or catheters as well as devices utilizing heat, electric current or radiation driven mechanisms.

[0880] According to the present invention, these multi-administration devices may be utilized to deliver the single, multi- or split doses contemplated herein.

[0881] A method for delivering therapeutic agents to a solid tissue has been described by Bahrami et al. and is taught for example in US Patent Publication 20110230839, the contents of which are incorporated herein by reference in their entirety. According to Bahrami, an array of needles is incorporated into a device which delivers a substantially equal amount of fluid at any location in said solid tissue along each needle's length.

[0882] A device for delivery of biological material across the biological tissue has been described by Kodgule et al. and is taught for example in US Patent Publication 20110172610, the contents of which are incorporated herein by reference in their entirety. According to Kodgule, multiple hollow micro-needles made of one or more metals and having outer diameters from about 200 microns to about 350 microns and lengths of at least 100 microns are incorporated into the device which delivers peptides, proteins, carbohydrates, nucleic acid molecules, lipids and other pharmaceutically active ingredients or combinations thereof.

[0883] A delivery probe for delivering a therapeutic agent to a tissue has been described by Gunday et al. and is taught for example in US Patent Publication 20110270184, the contents of each of which are incorporated herein by reference in their entirety. According to Gunday, multiple needles are incorporated into the device which moves the attached capsules between an activated position and an inactivated position to force the agent out of the capsules through the needles.

[0884] A multiple-injection medical apparatus has been described by Assaf and is taught for example in US Patent Publication 20110218497, the contents of which are incorporated herein by reference in their entirety. According to Assaf, multiple needles are incorporated into the device which has a chamber connected to one or more of said needles and a means for continuously refilling the chamber with the medical fluid after each injection.

[0885] In one embodiment, the polynucleotide, primary construct, or mmRNA is administered subcutaneously or intramuscularly via at least 3 needles to three different, optionally adjacent, sites simultaneously, or within a 60 minutes period (e.g., administration to 4,5, 6, 7, 8, 9, or 10 sites simultaneously or within a 60 minute period). The split doses can be administered simultaneously to adjacent tissue using the devices described in U.S. Patent Publication Nos. 20110230839 and 20110218497, each of which is incorporated herein by reference in their entirety.

[0886] An at least partially implantable system for injecting a substance into a patient's body, in particular a penis erection stimulation system has been described by Forsell and is taught for example in US Patent Publication 20110196198, the contents of which are incorporated herein by reference in their entirety. According to Forsell, multiple needles are incorporated into the device which is implanted along with one or more housings adjacent the patient's left and right corpora cavernosa. A reservoir and a pump are also implanted to supply drugs through the needles.

[0887] A method for the transdermal delivery of a therapeutic effective amount of iron has been described by Berenson and is taught for example in US Patent Publication 20100130910, the contents of which are incorporated herein by reference in their entirety. According to Berenson, multiple needles may be used to create multiple micro channels in stratum corneum to enhance transdermal delivery of the ionic iron on an iontophoretic patch.

[0888] A method for delivery of biological material across the biological tissue has been described by Kodgule et al and is taught for example in US Patent Publication 20110196308, the contents of which are incorporated herein by reference in their entirety. According to Kodgule, multiple biodegradable microneedles containing a therapeutic active ingredient are incorporated in a device which delivers proteins, carbohydrates, nucleic acid molecules, lipids and other pharmaceutically active ingredients or combinations thereof.

[0889] A transdermal patch comprising a botulinum toxin composition has been described by Donovan and is taught for example in US Patent Publication 20080220020, the contents of which are incorporated herein by reference in their entirety. According to Donovan, multiple needles are incorporated into the patch which delivers botulinum toxin under stratum corneum through said needles which project through the stratum corneum of the skin without rupturing a blood vessel.

[0890] A small, disposable drug reservoir, or patch pump, which can hold approximately 0.2 to 15 mL of liquid formulations can be placed on the skin and deliver the formulation continuously subcutaneously using a small bore needed (e.g., 26 to 34 gauge). As non-limiting examples, the patch pump may be 50 mm by 76 mm by 20 mm spring loaded having a 30 to 34 gauge needle (BD™ Microinfuser, Franklin Lakes NJ), 41 mm by 62 mm by 17 mm with a 2 mL reservoir used for drug delivery such as insulin (OMNIPOD®, Insulet Corporation Bedford, MA), or 43-60 mm diameter, 10 mm thick with a 0.5 to 10 mL reservoir (PATCHPUMP®, SteadyMed Therapeutics, San Francisco, CA). Further, the patch pump may be battery powered and/or rechargeable.

[0891] A cryoprobe for administration of an active agent to a location of cryogenic treatment has been described by Toubia and is taught for example in US Patent Publication 20080140061, the contents of which are incorporated herein by reference in their entirety. According to Toubia, multiple needles are incorporated into the probe which receives the active agent into a chamber and administers the agent to the tissue.

[0892] A method for treating or preventing inflammation or promoting healthy joints has been described by Stock et al and is taught for example in US Patent Publication 20090155186, the contents of which are incorporated herein by reference in their entirety. According to Stock, multiple needles are incorporated in a device which administers compositions containing signal transduction modulator compounds.

[0893] A multi-site injection system has been described by Kimmell et al. and is taught for example in US Patent Publication 20100256594, the contents of which are incorporated herein by reference in their entirety. According to Kimmell, multiple needles are incorporated into a device which delivers a medication into a stratum corneum through the needles.

[0894] A method for delivering interferons to the intradermal compartment has been described by Dekker et al. and is taught for example in US Patent Publication 20050181033, the contents of which are incorporated herein by reference in their entirety. According to Dekker, multiple needles having an outlet with an exposed height between 0 and 1 mm are incorporated into a device which improves pharmacokinetics and bioavailability by delivering the substance at a depth between 0.3 mm and 2 mm.

[0895] A method for delivering genes, enzymes and biological agents to tissue cells has described by Desai and is taught for example in US Patent Publication 20030073908, the contents of which are incorporated herein by reference in their entirety. According to Desai, multiple needles are incorporated into a device which is inserted into a body and delivers a medication fluid through said needles.

[0896] A method for treating cardiac arrhythmias with fibroblast cells has been described by Lee et al and is taught for example in US Patent Publication 20040005295, the contents of which are incorporated herein by reference in their entirety. According to Lee, multiple needles are incorporated into the device which delivers fibroblast cells into the local region of the tissue.

[0897] A method using a magnetically controlled pump for treating a brain tumor has been described by Shachar et al. and is taught for example in U.S. Pat. Nos. 7,799,012 (method) and 7,799,016 (device), the contents of which are incorporated herein by reference in their entirety. According Shachar, multiple needles were incorporated into the pump which pushes a medicating agent through the needles at a controlled rate.

[0898] Methods of treating functional disorders of the bladder in mammalian females have been described by Versi et al. and are taught for example in U.S. Pat. No. 8,029,496, the contents of which are incorporated herein by reference in their entirety. According to Versi, an array of micro-needles is incorporated into a device which delivers a therapeutic agent through the needles directly into the trigone of the bladder.

[0899] A micro-needle transdermal transport device has been described by Angel et al and is taught for example in U.S. Pat. No. 7,364,568, the contents of which are incorporated herein by reference in their entirety. According to Angel, multiple needles are incorporated into the device which transports a substance into a body surface through the needles which are inserted into the surface from different directions. The micro-needle transdermal transport device may be a solid micro-needle system or a hollow micro-needle system. As a non-limiting example, the solid micro-needle system may have up to a 0.5 mg capacity, with 300-1500 solid micro-needles per cm² about 150-700 μm tall coated with a drug. The micro-needles penetrate the stratum corneum and remain in the skin for short duration (e.g., 20 seconds to 15 minutes). In another example, the hollow micro-needle system has up to a 3 mL capacity to deliver liquid formulations using 15-20 microneedles per cm2 being approximately 950 μm tall. The micro-needles penetrate the skin to allow the liquid formulations to flow from the device into the skin. The hollow micro-needle system may be worn from 1 to 30 minutes depending on the formulation volume and viscosity.

[0900] A device for subcutaneous infusion has been described by Dalton et al and is taught for example in U.S. Pat. No. 7,150,726, the contents of which are incorporated herein by reference in their entirety. According to Dalton, multiple needles are incorporated into the device which delivers fluid through the needles into a subcutaneous tissue.

[0901] A device and a method for intradermal delivery of vaccines and gene therapeutic agents through microcannula have been described by Mikszta et al. and are taught for example in U.S. Pat. No. 7,473,247, the contents of which are incorporated herein by reference in their entirety. According to Mitszta, at least one hollow micro-needle is incorporated into the device which delivers the vaccines to the subject's skin to a depth of between 0.025 mm and 2 mm.

[0902] A method of delivering insulin has been described by Pettis et al and is taught for example in U.S. Pat. No. 7,722,595, the contents of which are incorporated herein by reference in their entirety. According to Pettis, two needles are incorporated into a device wherein both needles insert essentially simultaneously into the skin with the first at a depth of less than 2.5 mm to deliver insulin to intradermal compartment and the second at a depth of greater than 2.5 mm and less than 5.0 mm to deliver insulin to subcutaneous compartment.

[0903] Cutaneous injection delivery under suction has been described by Kochamba et al. and is taught for example in U.S. Pat. No. 6,896,666, the contents of which are incorporated herein by reference in their entirety. According to Kochamba, multiple needles in relative adjacency with each other are incorporated into a device which injects a fluid below the cutaneous layer.

[0904] A device for withdrawing or delivering a substance through the skin has been described by Down et al and is taught for example in U.S. Pat. No. 6,607,513, the contents of which are incorporated herein by reference in their entirety. According to Down, multiple skin penetrating members which are incorporated into the device have lengths of about 100 microns to about 2000 microns and are about 30 to 50 gauge.

[0905] A device for delivering a substance to the skin has been described by Palmer et al and is taught for example in U.S. Pat. No. 6,537,242, the contents of which are incorporated herein by reference in their entirety. According to Palmer, an array of micro-needles is incorporated into the device which uses a stretching assembly to enhance the contact of the needles with the skin and provides a more uniform delivery of the substance.

[0906] A perfusion device for localized drug delivery has been described by Zamoyski and is taught for example in U.S. Pat. No. 6,468,247, the contents of which are incorporated herein by reference in their entirety. According to Zamoyski, multiple hypodermic needles are incorporated into the device which injects the contents of the hypodermics into a tissue as said hypodermics are being retracted.

[0907] A method for enhanced transport of drugs and biological molecules across tissue by improving the interaction between micro-needles and human skin has been described by Prausnitz et al. and is taught for example in U.S. Pat. No. 6,743,211, the contents of which are incorporated herein by reference in their entirety. According to Prausnitz, multiple micro-needles are incorporated into a device which is able to present a more rigid and less deformable surface to which the micro-needles are applied.

[0908] A device for intraorgan administration of medicinal agents has been described by Ting et al and is taught for example in U.S. Pat. No. 6,077,251, the contents of which are incorporated herein by reference in their entirety. According to Ting, multiple needles having side openings for enhanced administration are incorporated into a device which by extending and retracting said needles from and into the needle chamber forces a medicinal agent from a reservoir into said needles and injects said medicinal agent into a target organ.

[0909] A multiple needle holder and a subcutaneous multiple channel infusion port has been described by Brown and is taught for example in U.S. Pat. No. 4,695,273, the contents of which are incorporated herein by reference in their entirety. According to Brown, multiple needles on the needle holder are inserted through the septum of the infusion port and communicate with isolated chambers in said infusion port.

[0910] A dual hypodermic syringe has been described by Horn and is taught for example in U.S. Pat. No. 3,552,394, the contents of which are incorporated herein by reference in their entirety. According to Horn, two needles incorporated into the device are spaced apart less than 68 mm and may be of different styles and lengths, thus enabling injections to be made to different depths.

[0911] A syringe with multiple needles and multiple fluid compartments has been described by Hershberg and is taught for example in U.S. Pat. No. 3,572,336, the contents of which are incorporated herein by reference in their entirety. According to Hershberg, multiple needles are incorporated into the syringe which has multiple fluid compartments and is capable of simultaneously administering incompatible drugs which are not able to be mixed for one injection.

[0912] A surgical instrument for intradermal injection of fluids has been described by Eliscu et al. and is taught for example in U.S. Pat. No. 2,588,623, the contents of which are incorporated herein by reference in their entirety. According to Eliscu, multiple needles are incorporated into the instrument which injects fluids intradermally with a wider disperse.

[0913] An apparatus for simultaneous delivery of a substance to multiple breast milk ducts has been described by Hung and is taught for example in EP 1818017, the contents of which are incorporated herein by reference in their entirety. According to Hung, multiple lumens are incorporated into the device which inserts though the orifices of the ductal networks and delivers a fluid to the ductal networks.

[0914] A catheter for introduction of medications to the tissue of a heart or other organs has been described by Tkebuchava and is taught for example in WO2006138109, the contents of which are incorporated herein by reference in their entirety. According to Tkebuchava, two curved needles are incorporated which enter the organ wall in a flattened trajectory.

[0915] Devices for delivering medical agents have been described by Mckay et al. and are taught for example in WO2006118804, the content of which are incorporated herein by reference in their entirety. According to Mckay, multiple needles with multiple orifices on each needle are incorporated into the devices to facilitate regional delivery to a tissue, such as the interior disc space of a spinal disc.

[0916] A method for directly delivering an immunomodulatory substance into an intradermal space within a mammalian skin has been described by Pettis and is taught for example in WO2004020014, the contents of which are incorporated herein by reference in their entirety. According to Pettis, multiple needles are incorporated into a device which delivers the substance through the needles to a depth between 0.3 mm and 2 mm.

[0917] Methods and devices for administration of substances into at least two compartments in skin for systemic absorption and improved pharmacokinetics have been described by Pettis et al. and are taught for example in WO2003094995, the contents of which are incorporated herein by reference in their entirety. According to Pettis, multiple needles having lengths between about 300 μm and about 5 mm are incorporated into a device which delivers to intradermal and subcutaneous tissue compartments simultaneously.

[0918] A drug delivery device with needles and a roller has been described by Zimmerman et al. and is taught for example in WO2012006259, the contents of which are incorporated herein by reference in their entirety. According to Zimmerman, multiple hollow needles positioned in a roller are incorporated into the device which delivers the content in a reservoir through the needles as the roller rotates.

[0919] A drug delivery device such as a stent is known in the art and is taught for example in U.S. Pat. No. 8,333,799, U.S. Pub. Nos. US20060020329, US20040172127 and US20100161032; the contents of each of which are herein incorporated by reference in their entirety. Formulations of the polynucleotides, primary constructs, mmRNA described herein may be delivered using stents. Additionally, stents used herein may be able to deliver multiple polynucleotides, primary constructs and/or mmRNA and/or formulations at the same or varied rates of delivery. Non-limiting examples of manufacturers of stents include CORDIS® (Miami, FL) (CYPHER®), Boston Scientific Corporation (Natick, MA) (TAXUS®), Medtronic (Minneapolis, MN) (ENDEAVOUR®) and Abbott (Abbott Park, TL) (XIENCE V®).

Methods and Devices Utilizing Catheters and/or Lumens

[0920] Methods and devices using catheters and lumens may be employed to administer the mmRNA of the present invention on a single, multi- or split dosing schedule. Such methods and devices are described below.

[0921] A catheter-based delivery of skeletal myoblasts to the myocardium of damaged hearts has been described by Jacoby et al and is taught for example in US Patent Publication 20060263338, the contents of which are incorporated herein by reference in their entirety. According to Jacoby, multiple needles are incorporated into the device at least part of which is inserted into a blood vessel and delivers the cell composition through the needles into the localized region of the subject's heart.

[0922] An apparatus for treating asthma using neurotoxin has been described by Deem et al and is taught for example in US Patent Publication 20060225742, the contents of which are incorporated herein by reference in their entirety. According to Deem, multiple needles are incorporated into the device which delivers neurotoxin through the needles into the bronchial tissue.

[0923] A method for administering multiple-component therapies has been described by Nayak and is taught for example in U.S. Pat. No. 7,699,803, the contents of which are incorporated herein by reference in their entirety. According to Nayak, multiple injection cannulas may be incorporated into a device wherein depth slots may be included for controlling the depth at which the therapeutic substance is delivered within the tissue.

[0924] A surgical device for ablating a channel and delivering at least one therapeutic agent into a desired region of the tissue has been described by McIntyre et al and is taught for example in U.S. Pat. No. 8,012,096, the contents of which are incorporated herein by reference in their entirety. According to McIntyre, multiple needles are incorporated into the device which dispenses a therapeutic agent into a region of tissue surrounding the channel and is particularly well suited for transmyocardial revascularization operations.

[0925] Methods of treating functional disorders of the bladder in mammalian females have been described by Versi et al and are taught for example in U.S. Pat. No. 8,029,496, the contents of which are incorporated herein by reference in their entirety. According to Versi, an array of micro-needles is incorporated into a device which delivers a therapeutic agent through the needles directly into the trigone of the bladder.

[0926] A device and a method for delivering fluid into a flexible biological barrier have been described by Yeshurun et al. and are taught for example in U.S. Pat. Nos. 7,998,119 (device) and 8,007,466 (method), the contents of which are incorporated herein by reference in their entirety. According to Yeshurun, the micro-needles on the device penetrate and extend into the flexible biological barrier and fluid is injected through the bore of the hollow micro-needles.

[0927] A method for epicardially injecting a substance into an area of tissue of a heart having an epicardial surface and disposed within a torso has been described by Bonner et al and is taught for example in U.S. Pat. No. 7,628,780, the contents of which are incorporated herein by reference in their entirety. According to Bonner, the devices have elongate shafts and distal injection heads for driving needles into tissue and injecting medical agents into the tissue through the needles.

[0928] A device for sealing a puncture has been described by Nielsen et al and is taught for example in U.S. Pat. No. 7,972,358, the contents of which are incorporated herein by reference in their entirety. According to Nielsen, multiple needles are incorporated into the device which delivers a closure agent into the tissue surrounding the puncture tract.

[0929] A method for myogenesis and angiogenesis has been described by Chiu et al. and is taught for example in U.S. Pat. No. 6,551,338, the contents of which are incorporated herein by reference in their entirety. According to Chiu, 5 to 15 needles having a maximum diameter of at least 1.25 mm and a length effective to provide a puncture depth of 6 to 20 mm are incorporated into a device which inserts into proximity with a myocardium and supplies an exogeneous angiogenic or myogenic factor to said myocardium through the conduits which are in at least some of said needles.

[0930] A method for the treatment of prostate tissue has been described by Bolmsj et al. and is taught for example in U.S. Pat. No. 6,524,270, the contents of which are incorporated herein by reference in their entirety. According to Bolmsj, a device comprising a catheter which is inserted through the urethra has at least one hollow tip extendible into the surrounding prostate tissue. An astringent and analgesic medicine is administered through said tip into said prostate tissue.

[0931] A method for infusing fluids to an intraosseous site has been described by Findlay et al. and is taught for example in U.S. Pat. No. 6,761,726, the contents of which are incorporated herein by reference in their entirety. According to Findlay, multiple needles are incorporated into a device which is capable of penetrating a hard shell of material covered by a layer of soft material and delivers a fluid at a predetermined distance below said hard shell of material.

[0932] A device for injecting medications into a vessel wall has been described by Vigil et al. and is taught for example in U.S. Pat. No. 5,713,863, the contents of which are incorporated herein by reference in their entirety. According to Vigil, multiple injectors are mounted on each of the flexible tubes in the device which introduces a medication fluid through a multi-lumen catheter, into said flexible tubes and out of said injectors for infusion into the vessel wall.

[0933] A catheter for delivering therapeutic and/or diagnostic agents to the tissue surrounding a bodily passageway has been described by Faxon et al. and is taught for example in U.S. Pat. No. 5,464,395, the contents of which are incorporated herein by reference in their entirety. According to Faxon, at least one needle cannula is incorporated into the catheter which delivers the desired agents to the tissue through said needles which project outboard of the catheter.

[0934] Balloon catheters for delivering therapeutic agents have been described by Orr and are taught for example in WO2010024871, the contents of which are incorporated herein by reference in their entirety. According to Orr, multiple needles are incorporated into the devices which deliver the therapeutic agents to different depths within the tissue. In another aspect, drug-eluting balloons may be used to deliver the formulations described herein. The drug-eluting balloons may be used in target lesion applications such as, but are not limited to, in-stent restenosis, treating lesion in tortuous vessels, bifurcation lesions, femoral/popliteal lesions and below the knee lesions.

[0935] A device for deliverying therapeutic agents (e.g., polynucleotides, primary constructs or mmRNA) to tissue disposed about a lumin has been described by Perry et al. and is taught for example in U.S. Pat. Pub. US20100125239, the contents of which are herein incorporated by reference in their entirety. According to Perry, the catheter has a balloon which may be coated with a therapeutic agent by methods known in the art and described in Perry. When the balloon expands, the therapeutic agent will contact the surrounding tissue. The device may additionally have a heat source to change the temperature of the coating on the balloon to release the therapeutic agent to the tissue.

### Methods and Devices Utilizing Electrical Current

[0936] Methods and devices utilizing electric current may be employed to deliver the mmRNA of the present invention according to the single, multi- or split dosing regimens taught herein. Such methods and devices are described below.

[0937] An electro collagen induction therapy device has been described by Marquez and is taught for example in US Patent Publication 20090137945, the contents of which are incorporated herein by reference in their entirety. According to Marquez, multiple needles are incorporated into the device which repeatedly pierce the skin and draw in the skin a portion of the substance which is applied to the skin first.

[0938] An electrokinetic system has been described by Etheredge et al. and is taught for example in US Patent Publication 20070185432, the contents of which are incorporated herein by reference in their entirety. According to Etheredge, micro-needles are incorporated into a device which drives by an electrical current the medication through the needles into the targeted treatment site.

[0939] An iontophoresis device has been described by Matsumura et al. and is taught for example in U.S. Pat. No. 7,437,189, the contents of which are incorporated herein by reference in their entirety. According to Matsumura, multiple needles are incorporated into the device which is capable of delivering ionizable drug into a living body at higher speed or with higher efficiency.

[0940] Intradermal delivery of biologically active agents by needle-free injection and electroporation has been described by Hoffmann et al and is taught for example in U.S. Pat. No. 7,171,264, the contents of which are incorporated herein by reference in their entirety. According to Hoffmann, one or more needle-free injectors are incorporated into an electroporation device and the combination of needle-free injection and electroporation is sufficient to introduce the agent into cells in skin, muscle or mucosa.

[0941] A method for electropermeabilization-mediated intracellular delivery has been described by Lundkvist et al. and is taught for example in U.S. Pat. No. 6,625,486, the contents of which are incorporated herein by reference in their entirety. According to Lundkvist, a pair of needle electrodes is incorporated into a catheter. Said catheter is positioned into a body lumen followed by extending said needle electrodes to penetrate into the tissue surrounding said lumen. Then the device introduces an agent through at least one of said needle electrodes and applies electric field by said pair of needle electrodes to allow said agent pass through the cell membranes into the cells at the treatment site.

[0942] A delivery system for transdermal immunization has been described by Levin et al. and is taught for example in WO2006003659, the contents of which are incorporated herein by reference in their entirety. According to Levin, multiple electrodes are incorporated into the device which applies electrical energy between the electrodes to generate micro channels in the skin to facilitate transdermal delivery.

[0943] A method for delivering RF energy into skin has been described by Schomacker and is taught for example in WO2011163264, the contents of which are incorporated herein by reference in their entirety. According to Schomacker, multiple needles are incorporated into a device which applies vacuum to draw skin into contact with a plate so that needles insert into skin through the holes on the plate and deliver RF energy.

### VII. Definitions

[0944] At various places in the present specification, substituents of compounds of the present disclosure are disclosed in groups or in ranges. It is specifically intended that the present disclosure include each and every individual subcombination of the members of such groups and ranges. For example, the term “C₁₋₆ alkyl” is specifically intended to individually disclose methyl, ethyl, C₃ alkyl, C₄ alkyl, C₅ alkyl, and C₆ alkyl.

[0945] About: As used herein, the term “about” means+/−10% of the recited value.

[0946] Administered in combination: As used herein, the term “administered in combination” or “combined administration” means that two or more agents are administered to a subject at the same time or within an interval such that there may be an overlap of an effect of each agent on the patient. In some embodiments, they are administered within about 60, 30, 15, 10, 5, or 1 minute of one another. In some embodiments, the administrations of the agents are spaced sufficiently closely together such that a combinatorial (e.g., a synergistic) effect is achieved.

[0947] Animal: As used herein, the term “animal” refers to any member of the animal kingdom. In some embodiments, “animal” refers to humans at any stage of development. In some embodiments, “animal” refers to non-human animals at any stage of development. In certain embodiments, the non-human animal is a mammal (e.g., a rodent, a mouse, a rat, a rabbit, a monkey, a dog, a cat, a sheep, cattle, a primate, or a pig). In some embodiments, animals include, but are not limited to, mammals, birds, reptiles, amphibians, fish, and worms. In some embodiments, the animal is a transgenic animal, genetically-engineered animal, or a clone.

[0948] Antigens of interest or desired antigens: As used herein, the terms “antigens of interest” or “desired antigens” include those proteins and other biomolecules provided herein that are immunospecifically bound by the antibodies and fragments, mutants, variants, and alterations thereof described herein. Examples of antigens of interest include, but are not limited to, insulin, insulin-like growth factor, hGH, tPA, cytokines, such as interleukins (IL), e.g., IL-1, IL-2, IL-3, IL-4, IL-5, IL-6, IL-7, IL-8, IL-9, IL-10, IL-11, IL-12, IL-13, IL-14, IL-15, IL-16, IL-17, IL-18, interferon (IFN) alpha, IFN beta, IFN gamma, IFN omega or IFN tau, tumor necrosis factor (TNF), such as TNF alpha and TNF beta, TNF gamma, TRAIL; G-CSF, GM-CSF, M-CSF, MCP-1 and VEGF.

[0949] Approximately: As used herein, the term “approximately” or “about,” as applied to one or more values of interest, refers to a value that is similar to a stated reference value. In certain embodiments, the term “approximately” or “about” refers to a range of values that fall within 25%, 20%, 19%, 18%, 17%, 16%, 15%, 14%, 13%, 12%, 11%, 10%, 9%, 8%, 7%, 6%, 5%, 4%, 3%, 2%, 1%, or less in either direction (greater than or less than) of the stated reference value unless otherwise stated or otherwise evident from the context (except where such number would exceed 100% of a possible value).

[0950] Associated with: As used herein, the terms “associated with,” “conjugated,” “linked,” “attached,” and “tethered,” when used with respect to two or more moieties, means that the moieties are physically associated or connected with one another, either directly or via one or more additional moieties that serves as a linking agent, to form a structure that is sufficiently stable so that the moieties remain physically associated under the conditions in which the structure is used, e.g., physiological conditions. An “association” need not be strictly through direct covalent chemical bonding. It may also suggest ionic or hydrogen bonding or a hybridization based connectivity sufficiently stable such that the “associated” entities remain physically associated.

[0951] Bifunctional: As used herein, the term “bifunctional” refers to any substance, molecule or moiety which is capable of or maintains at least two functions. The functions may effect the same outcome or a different outcome. The structure that produces the function may be the same or different. For example, bifunctional modified RNAs of the present invention may encode a cytotoxic peptide (a first function) while those nucleosides which comprise the encoding RNA are, in and of themselves, cytotoxic (second function). In this example, delivery of the bifunctional modified RNA to a cancer cell would produce not only a peptide or protein molecule which may ameliorate or treat the cancer but would also deliver a cytotoxic payload of nucleosides to the cell should degradation, instead of translation of the modified RNA, occur.

[0952] Biocompatible: As used herein, the term “biocompatible” means compatible with living cells, tissues, organs or systems posing little to no risk of injury, toxicity or rejection by the immune system.

[0953] Biodegradable: As used herein, the term “biodegradable” means capable of being broken down into innocuous products by the action of living things.

[0954] Biologically active: As used herein, the phrase “biologically active” refers to a characteristic of any substance that has activity in a biological system and/or organism. For instance, a substance that, when administered to an organism, has a biological effect on that organism, is considered to be biologically active. In particular embodiments, a polynucleotide, primary construct or mmRNA of the present invention may be considered biologically active if even a portion of the polynucleotide, primary construct or mmRNA is biologically active or mimics an activity considered biologically relevant.

[0955] Chemical terms: The following provides the definition of various chemical terms from “acyl” to “thiol.”

[0956] The term “acyl,” as used herein, represents a hydrogen or an alkyl group (e.g., a haloalkyl group), as defined herein, that is attached to the parent molecular group through a carbonyl group, as defined herein, and is exemplified by formyl (i.e., a carboxyaldehyde group), acetyl, propionyl, butanoyl and the like. Exemplary unsubstituted acyl groups include from 1 to 7, from 1 to 11, or from 1 to 21 carbons. In some embodiments, the alkyl group is further substituted with 1, 2, 3, or 4 substituents as described herein.

[0957] The term “acylamino,” as used herein, represents an acyl group, as defined herein, attached to the parent molecular group though an amino group, as defined herein (i.e., —N(R^{N1})—C(O)—R, where R is H or an optionally substituted C₁₋₆, C₁₋₁₀, or C₁₋₂₀ alkyl group and R^{N1} is as defined herein). Exemplary unsubstituted acylamino groups include from 1 to 41 carbons (e.g., from 1 to 7, from 1 to 13, from 1 to 21, from 2 to 7, from 2 to 13, from 2 to 21, or from 2 to 41 carbons). In some embodiments, the alkyl group is further substituted with 1, 2, 3, or 4 substituents as described herein, and/or the amino group is —NH₂ or —NHR^{N1}, wherein R^{N1} is, independently, OH, NO₂, NH₂, NR^{N2}₂, SO₂OR^{N2}, SO₂R^{N2}, SOR^{N2}, alkyl, or aryl, and each R^{N2} can be H, alkyl, or aryl.

[0958] The term “acyloxy,” as used herein, represents an acyl group, as defined herein, attached to the parent molecular group though an oxygen atom (i.e., —O—C(O)—R, where R is H or an optionally substituted C₁₋₆, C₁₋₁₀, or C₁₋₂₀ alkyl group). Exemplary unsubstituted acyloxy groups include from 1 to 21 carbons (e.g., from 1 to 7 or from 1 to 11 carbons). In some embodiments, the alkyl group is further substituted with 1, 2, 3, or 4 substituents as described herein, and/or the amino group is —NH₂ or —NHR^{N1}, wherein R^{N1} is, independently, OH, NO₂, NH₂, NR^{N2}₂, SO₂OR^{N2}, SO₂R^{N2}, SOR^{N2}, alkyl, or aryl, and each R^{N2} can be H, alkyl, or aryl.

[0959] The term “alkaryl,” as used herein, represents an aryl group, as defined herein, attached to the parent molecular group through an alkylene group, as defined herein. Exemplary unsubstituted alkaryl groups are from 7 to 30 carbons (e.g., from 7 to 16 or from 7 to 20 carbons, such as C₁₋₆ alk-C₆₋₁₀ aryl, C₁₋₁₀ alk-C₆₋₁₀ aryl, or C₁₋₂₀ alk-C₆₋₁₀ aryl). In some embodiments, the alkylene and the aryl each can be further substituted with 1, 2, 3, or 4 substituent groups as defined herein for the respective groups. Other groups preceded by the prefix “alk-” are defined in the same manner, where “alk” refers to a C₁₋₆ alkylene, unless otherwise noted, and the attached chemical structure is as defined herein.

[0960] The term “alkcycloalkyl” represents a cycloalkyl group, as defined herein, attached to the parent molecular group through an alkylene group, as defined herein (e.g., an alkylene group of from 1 to 4, from 1 to 6, from 1 to 10, or form 1 to 20 carbons). In some embodiments, the alkylene and the cycloalkyl each can be further substituted with 1, 2, 3, or 4 substituent groups as defined herein for the respective group.

[0961] The term “alkenyl,” as used herein, represents monovalent straight or branched chain groups of, unless otherwise specified, from 2 to 20 carbons (e.g., from 2 to 6 or from 2 to 10 carbons) containing one or more carbon-carbon double bonds and is exemplified by ethenyl, 1-propenyl, 2-propenyl, 2-methyl-1-propenyl, 1-butenyl, 2-butenyl, and the like. Alkenyls include both cis and trans isomers. Alkenyl groups may be optionally substituted with 1, 2, 3, or 4 substituent groups that are selected, independently, from amino, aryl, cycloalkyl, or heterocyclyl (e.g., heteroaryl), as defined herein, or any of the exemplary alkyl substituent groups described herein.

[0962] The term “alkenyloxy” represents a chemical substituent of formula —OR, where R is a C₂₋₂₀ alkenyl group (e.g., C₂₋₆ or C₂₋₁₀ alkenyl), unless otherwise specified. Exemplary alkenyloxy groups include ethenyloxy, propenyloxy, and the like. In some embodiments, the alkenyl group can be further substituted with 1, 2, 3, or 4 substituent groups as defined herein (e.g., a hydroxy group).

[0963] The term “alkheteroaryl” refers to a heteroaryl group, as defined herein, attached to the parent molecular group through an alkylene group, as defined herein. Exemplary unsubstituted alkheteroaryl groups are from 2 to 32 carbons (e.g., from 2 to 22, from 2 to 18, from 2 to 17, from 2 to 16, from 3 to 15, from 2 to 14, from 2 to 13, or from 2 to 12 carbons, such as C₁₋₆ alk-C₁₋₁₂ heteroaryl, C₁₋₁₀ alk-C₁₋₁₂ heteroaryl, or C₁₋₂₀ alk-C₁₋₁₂ heteroaryl). In some embodiments, the alkylene and the heteroaryl each can be further substituted with 1, 2, 3, or 4 substituent groups as defined herein for the respective group. Alkheteroaryl groups are a subset of alkheterocyclyl groups.

[0964] The term “alkheterocyclyl” represents a heterocyclyl group, as defined herein, attached to the parent molecular group through an alkylene group, as defined herein. Exemplary unsubstituted alkheterocyclyl groups are from 2 to 32 carbons (e.g., from 2 to 22, from 2 to 18, from 2 to 17, from 2 to 16, from 3 to 15, from 2 to 14, from 2 to 13, or from 2 to 12 carbons, such as C₁₋₆ alk-C₁₋₁₂ heterocyclyl, C₁₋₁₀ alk-C₁₋₁₂ heterocyclyl, or C₁₋₂₀ alk-C₁₋₁₂ heterocyclyl). In some embodiments, the alkylene and the heterocyclyl each can be further substituted with 1, 2, 3, or 4 substituent groups as defined herein for the respective group.

[0965] The term “alkoxy” represents a chemical substituent of formula —OR, where R is a C₁₋₂₀ alkyl group (e.g., C₁₋₆ or C₁₋₁₀ alkyl), unless otherwise specified. Exemplary alkoxy groups include methoxy, ethoxy, propoxy (e.g., n-propoxy and isopropoxy), t-butoxy, and the like. In some embodiments, the alkyl group can be further substituted with 1, 2, 3, or 4 substituent groups as defined herein (e.g., hydroxy or alkoxy).

[0966] The term “alkoxyalkoxy” represents an alkoxy group that is substituted with an alkoxy group. Exemplary unsubstituted alkoxyalkoxy groups include between 2 to 40 carbons (e.g., from 2 to 12 or from 2 to 20 carbons, such as C₁₋₆ alkoxy-C₁₋₆ alkoxy, C₁₋₁₀ alkoxy-C₁₋₁₀ alkoxy, or C₁₋₂₀ alkoxy-C₁₋₂₀ alkoxy). In some embodiments, the each alkoxy group can be further substituted with 1, 2, 3, or 4 substituent groups as defined herein.

[0967] The term “alkoxyalkyl” represents an alkyl group that is substituted with an alkoxy group. Exemplary unsubstituted alkoxyalkyl groups include between 2 to 40 carbons (e.g., from 2 to 12 or from 2 to 20 carbons, such as C₁₋₆ alkoxy-C₁₋₆ alkyl, C₁₋₁₀ alkoxy-C₁₋₁₀ alkyl, or C₁₋₂₀ alkoxy-C₁₋₂₀ alkyl). In some embodiments, the alkyl and the alkoxy each can be further substituted with 1, 2, 3, or 4 substituent groups as defined herein for the respective group.

[0968] The term “alkoxycarbonyl,” as used herein, represents an alkoxy, as defined herein, attached to the parent molecular group through a carbonyl atom (e.g., —C(O)—OR, where R is H or an optionally substituted C₁₋₆, C₁₋₁₀, or C₁₋₂₀ alkyl group). Exemplary unsubstituted alkoxycarbonyl include from 1 to 21 carbons (e.g., from 1 to 11 or from 1 to 7 carbons). In some embodiments, the alkoxy group is further substituted with 1, 2, 3, or 4 substituents as described herein.

[0969] The term “alkoxycarbonylalkoxy,” as used herein, represents an alkoxy group, as defined herein, that is substituted with an alkoxycarbonyl group, as defined herein (e.g., —O— alkyl-C(O)—OR, where R is an optionally substituted C₁₋₆, C₁₋₁₀, or C₁₋₂₀ alkyl group). Exemplary unsubstituted alkoxycarbonylalkoxy include from 3 to 41 carbons (e.g., from 3 to 10, from 3 to 13, from 3 to 17, from 3 to 21, or from 3 to 31 carbons, such as C₁₋₆ alkoxycarbonyl-C₁₋₆ alkoxy, C₁₋₁₀ alkoxycarbonyl-C₁₋₁₀ alkoxy, or C₁₋₂₀ alkoxycarbonyl-C₁₋₂₀ alkoxy). In some embodiments, each alkoxy group is further independently substituted with 1, 2, 3, or 4 substituents, as described herein (e.g., a hydroxy group).

[0970] The term “alkoxycarbonylalkyl,” as used herein, represents an alkyl group, as defined herein, that is substituted with an alkoxycarbonyl group, as defined herein (e.g., -alkyl-C(O)—OR, where R is an optionally substituted C₁₋₂₀, C₁₋₁₀, or C₁₋₆ alkyl group). Exemplary unsubstituted alkoxycarbonylalkyl include from 3 to 41 carbons (e.g., from 3 to 10, from 3 to 13, from 3 to 17, from 3 to 21, or from 3 to 31 carbons, such as C₁₋₆ alkoxycarbonyl-C₁₋₆ alkyl, C₁₋₁₀ alkoxycarbonyl-C₁₋₁₀ alkyl, or C₁₋₂₀ alkoxycarbonyl-C₁₋₂₀ alkyl). In some embodiments, each alkyl and alkoxy group is further independently substituted with 1, 2, 3, or 4 substituents as described herein (e.g., a hydroxy group).

[0971] The term “alkyl,” as used herein, is inclusive of both straight chain and branched chain saturated groups from 1 to 20 carbons (e.g., from 1 to 10 or from 1 to 6), unless otherwise specified. Alkyl groups are exemplified by methyl, ethyl, n- and iso-propyl, n-, sec-, iso- and tert-butyl, neopentyl, and the like, and may be optionally substituted with one, two, three, or, in the case of alkyl groups of two carbons or more, four substituents independently selected from the group consisting of: (1) C₁₋₆ alkoxy; (2) C₁₋₆ alkylsulfinyl; (3) amino, as defined herein (e.g., unsubstituted amino (i.e., —NH₂) or a substituted amino (i.e., —N(R^{N1})₂, where R^{N1} is as defined for amino); (4) C₆₋₁₀ aryl-C₁₋₆ alkoxy; (5) azido; (6) halo; (7) (C₂₋₉ heterocyclyl)oxy; (8) hydroxy; (9) nitro; (10) oxo (e.g., carboxyaldehyde or acyl); (11) C₁₋₇ spirocyclyl; (12) thioalkoxy; (13) thiol; (14) —CO₂R^{A′}, where R^{A′} is selected from the group consisting of (a) C₁₋₂₀ alkyl (e.g., C₁₋₆ alkyl), (b) C₂₋₂₀ alkenyl (e.g., C₂₋₆ alkenyl), (c) C₆₋₁₀ aryl, (d) hydrogen, (e) C₁₋₆ alk-C₁₋₁₀ aryl, (f) amino-C₁₋₂₀ alkyl, (g) polyethylene glycol of —(CH₂)ₛ₂(OCH₂CH₂)ₛ₁(CH₂)ₛ₃OR′, wherein s1 is an integer from 1 to 10 (e.g., from 1 to 6 or from 1 to 4), each of s2 and s3, independently, is an integer from 0 to 10 (e.g., from 0 to 4, from 0 to 6, from 1 to 4, from 1 to 6, or from 1 to 10), and R′ is H or C₁₋₂₀ alkyl, and (h) amino-polyethylene glycol of —NR^{N1}(CH₂)ₛ₂(CH₂CH₂O)ₛ₁(CH₂)ₛ₃NR^{N1}, wherein s1 is an integer from 1 to 10 (e.g., from 1 to 6 or from 1 to 4), each of s2 and s3, independently, is an integer from 0 to 10 (e.g., from 0 to 4, from 0 to 6, from 1 to 4, from 1 to 6, or from 1 to 10), and each R^{N1} is, independently, hydrogen or optionally substituted C₁₋₆ alkyl; (15) —C(O)NR^{B}‘Rc’, where each of R^{B′} and R^{C′} is, independently, selected from the group consisting of (a) hydrogen, (b) C₁₋₆ alkyl, (c) C₆₋₁₀ aryl, and (d) C₁₋₆ alk-C₆₋₁₀ aryl; (16) —SO₂RD′, where RD′ is selected from the group consisting of (a) C₁₋₆ alkyl, (b) C₆₋₁₀ aryl, (c) C₁₋₆ alk-C₆₋₁₀ aryl, and (d) hydroxy; (17) —SO₂NR^{E′}R^{F′}, where each of RE′ and R^{F′} is, independently, selected from the group consisting of (a) hydrogen, (b) C₁₋₆ alkyl, (c) C₆₋₁₀ aryl and (d) C₁₋₆ alk-C₆₋₁₀ aryl; (18) —C(O)R^{G′}, where R^{G′} is selected from the group consisting of (a) C₁₋₂₀ alkyl (e.g., C₁₋₆ alkyl), (b) C₂₋₂₀ alkenyl (e.g., C₂₋₆ alkenyl), (c) C₆₋₁₀ aryl, (d) hydrogen, (e) C1-6 alk-C₆₋₁₀ aryl, (f) amino-C₁₋₂₀ alkyl, (g) polyethylene glycol of —(CH₂)ₛ₂(OCH₂CH₂)ₛ₁(CH₂)ₛ₃OR′, wherein s1 is an integer from 1 to 10 (e.g., from 1 to 6 or from 1 to 4), each of s2 and s3, independently, is an integer from 0 to 10 (e.g., from 0 to 4, from 0 to 6, from 1 to 4, from 1 to 6, or from 1 to 10), and R′ is H or C₁₋₂₀ alkyl, and (h) amino-polyethylene glycol of —NR^{N1}(CH₂)ₛ₂(CH₂CH₂O)ₛ₁(CH₂)ₛ₃NR^{N1}, wherein s1 is an integer from 1 to 10 (e.g., from 1 to 6 or from 1 to 4), each of s2 and s3, independently, is an integer from 0 to 10 (e.g., from 0 to 4, from 0 to 6, from 1 to 4, from 1 to 6, or from 1 to 10), and each R^{N1} is, independently, hydrogen or optionally substituted C₁₋₆ alkyl; (19) —NR^{H′}C(O)R, wherein R^{H′} is selected from the group consisting of (a1) hydrogen and (b1) C₁₋₆ alkyl, and R^{1′} is selected from the group consisting of (a2) C₁₋₂₀ alkyl (e.g., C₁₋₆ alkyl), (b2) C₂₋₂₀ alkenyl (e.g., C₂₋₆ alkenyl), (c2) C₆₋₁₀ aryl, (d2) hydrogen, (e2) C₁₋₆ alk-C₆₋₁₀ aryl, (f2) amino-C₁₋₂₀ alkyl, (g2) polyethylene glycol of —(CH₂)ₛ₂(OCH₂CH₂)ₛ₁(CH₂)ₛ₃OR′, wherein s1 is an integer from 1 to 10 (e.g., from 1 to 6 or from 1 to 4), each of s2 and s3, independently, is an integer from 0 to 10 (e.g., from 0 to 4, from 0 to 6, from 1 to 4, from 1 to 6, or from 1 to 10), and R′ is H or C₁₋₂₀ alkyl, and (h2) amino-polyethylene glycol of —NR^{N1}(CH₂)ₛ₂(CH₂CH₂O)ₛ₁(CH₂)ₛ₃NR^{N1}, wherein s1 is an integer from 1 to 10 (e.g., from 1 to 6 or from 1 to 4), each of s2 and s3, independently, is an integer from 0 to 10 (e.g., from 0 to 4, from 0 to 6, from 1 to 4, from 1 to 6, or from 1 to 10), and each R^{N1} is, independently, hydrogen or optionally substituted C₁₋₆ alkyl; (20) —NR^{J′}C(O)OR^{K′}, wherein R′ is selected from the group consisting of (al) hydrogen and (b1) C₁₋₆ alkyl, and R^{K′} is selected from the group consisting of (a2) C₁₋₂₀ alkyl (e.g., C₁₋₆ alkyl), (b2) C₂₋₂₀ alkenyl (e.g., C₂₋₆ alkenyl), (c2) C₆₋₁₀ aryl, (d2) hydrogen, (e2) C₁₋₆ alk-C₆₋₁₀ aryl, (f2) amino-C₁₋₂₀ alkyl, (g2) polyethylene glycol of —(CH₂)ₛ₂(OCH₂CH₂)ₛ₁(CH₂)ₛ₃OR′, wherein s1 is an integer from 1 to 10 (e.g., from 1 to 6 or from 1 to 4), each of s2 and s3, independently, is an integer from 0 to 10 (e.g., from 0 to 4, from 0 to 6, from 1 to 4, from 1 to 6, or from 1 to 10), and R′ is H or C₁₋₂₀ alkyl, and (h2) amino-polyethylene glycol of —NR^{N1}(CH₂)ₛ₂(CH₂CH₂O)ₛ₁(CH₂)ₛ₃NR^{N1}, wherein s1 is an integer from 1 to 10 (e.g., from 1 to 6 or from 1 to 4), each of s2 and s3, independently, is an integer from 0 to 10 (e.g., from 0 to 4, from 0 to 6, from 1 to 4, from 1 to 6, or from 1 to 10), and each R^{N1} is, independently, hydrogen or optionally substituted C₁₋₆ alkyl; and (21) amidine. In some embodiments, each of these groups can be further substituted as described herein. For example, the alkylene group of a C1-alkaryl can be further substituted with an oxo group to afford the respective aryloyl substituent.

[0972] The term “alkylene” and the prefix “alk-,” as used herein, represent a saturated divalent hydrocarbon group derived from a straight or branched chain saturated hydrocarbon by the removal of two hydrogen atoms, and is exemplified by methylene, ethylene, isopropylene, and the like. The term “C_{x-y} alkylene” and the prefix “C_{x-y} alk-” represent alkylene groups having between x and y carbons. Exemplary values for x are 1, 2, 3, 4, 5, and 6, and exemplary values for y are 2, 3, 4, 5, 6, 7, 8, 9, 10, 12, 14, 16, 18, or 20 (e.g., C₁₋₆, C₁₋₁₀, C₂₋₂₀, C₂₋₆, C₂₋₁₀, or C₂₋₂₀ alkylene). In some embodiments, the alkylene can be further substituted with 1, 2, 3, or 4 substituent groups as defined herein for an alkyl group.

[0973] The term “alkylsulfinyl,” as used herein, represents an alkyl group attached to the parent molecular group through an —S(O)— group. Exemplary unsubstituted alkylsulfinyl groups are from 1 to 6, from 1 to 10, or from 1 to 20 carbons. In some embodiments, the alkyl group can be further substituted with 1, 2, 3, or 4 substituent groups as defined herein.

[0974] The term “alkylsulfinylalkyl,” as used herein, represents an alkyl group, as defined herein, substituted by an alkylsulfinyl group. Exemplary unsubstituted alkylsulfinylalkyl groups are from 2 to 12, from 2 to 20, or from 2 to 40 carbons. In some embodiments, each alkyl group can be further substituted with 1, 2, 3, or 4 substituent groups as defined herein.

[0975] The term “alkynyl,” as used herein, represents monovalent straight or branched chain groups from 2 to 20 carbon atoms (e.g., from 2 to 4, from 2 to 6, or from 2 to 10 carbons) containing a carbon-carbon triple bond and is exemplified by ethynyl, 1-propynyl, and the like. Alkynyl groups may be optionally substituted with 1, 2, 3, or 4 substituent groups that are selected, independently, from aryl, cycloalkyl, or heterocyclyl (e.g., heteroaryl), as defined herein, or any of the exemplary alkyl substituent groups described herein.

[0976] The term “alkynyloxy” represents a chemical substituent of formula —OR, where R is a C₂₋₂₀ alkynyl group (e.g., C₂₋₆ or C₂₋₁₀ alkynyl), unless otherwise specified. Exemplary alkynyloxy groups include ethynyloxy, propynyloxy, and the like. In some embodiments, the alkynyl group can be further substituted with 1, 2, 3, or 4 substituent groups as defined herein (e.g., a hydroxy group).

[0977] The term “amidine,” as used herein, represents a —C(═NH)NH₂ group.

[0978] The term “amino,” as used herein, represents —N(R^{N1})₂, wherein each R^{N1} is, independently, H, OH, NO₂, N(R^{N2})₂, SO₂OR^{N2}, SO₂R^{N2}, SOR^{N2}, an N-protecting group, alkyl, alkenyl, alkynyl, alkoxy, aryl, alkaryl, cycloalkyl, alkcycloalkyl, carboxyalkyl, sulfoalkyl, heterocyclyl (e.g., heteroaryl), or alkheterocyclyl (e.g., alkheteroaryl), wherein each of these recited R^{N1} groups can be optionally substituted, as defined herein for each group; or two R^{N1} combine to form a heterocyclyl or an N-protecting group, and wherein each R^{N2} is, independently, H, alkyl, or aryl. The amino groups of the invention can be an unsubstituted amino (i.e., —NH₂) or a substituted amino (i.e., —N(R^{N1})₂). In a preferred embodiment, amino is —NH₂ or —NHR^{N1}, wherein R^{N1} is, independently, OH, NO₂, NH₂, NR^{N2}₂, SO₂OR^{N2}, SO₂R^{N2}, SOR^{N2}, alkyl, carboxyalkyl, sulfoalkyl, or aryl, and each R^{N2} can be H, C₁₋₂₀ alkyl (e.g., C₁₋₆ alkyl), or C₆₋₁₀ aryl.

[0979] The term “amino acid,” as described herein, refers to a molecule having a side chain, an amino group, and an acid group (e.g., a carboxy group of —CO₂H or a sulfo group of —SO₃H), wherein the amino acid is attached to the parent molecular group by the side chain, amino group, or acid group (e.g., the side chain). In some embodiments, the amino acid is attached to the parent molecular group by a carbonyl group, where the side chain or amino group is attached to the carbonyl group. Exemplary side chains include an optionally substituted alkyl, aryl, heterocyclyl, alkaryl, alkheterocyclyl, aminoalkyl, carbamoylalkyl, and carboxyalkyl. Exemplary amino acids include alanine, arginine, asparagine, aspartic acid, cysteine, glutamic acid, glutamine, glycine, histidine, hydroxynorvaline, isoleucine, leucine, lysine, methionine, norvaline, ornithine, phenylalanine, proline, pyrrolysine, selenocysteine, serine, taurine, threonine, tryptophan, tyrosine, and valine. Amino acid groups may be optionally substituted with one, two, three, or, in the case of amino acid groups of two carbons or more, four substituents independently selected from the group consisting of: (1) C₁₋₆ alkoxy; (2) C₁₋₆ alkylsulfinyl; (3) amino, as defined herein (e.g., unsubstituted amino (i.e., —NH₂) or a substituted amino (i.e., —N(R^{N1})₂, where R^{N1} is as defined for amino); (4) C₆₋₁₀ aryl-C₁₋₆ alkoxy; (5) azido; (6) halo; (7) (C₂₋₉ heterocyclyl)oxy; (8) hydroxy; (9) nitro; (10) oxo (e.g., carboxyaldehyde or acyl); (11) C1.7 spirocyclyl; (12) thioalkoxy; (13) thiol; (14) —CO₂R^{A′}, where R^{A′} is selected from the group consisting of (a) C₁₋₂₀ alkyl (e.g., C₁₋₆ alkyl), (b) C₂₋₂₀ alkenyl (e.g., C₂₋₆ alkenyl), (c) C₆₋₁₀ aryl, (d) hydrogen, (e) C₁₋₆ alk-C₆₋₁₀ aryl, (f) amino-C₁₋₂₀ alkyl, (g) polyethylene glycol of —(CH₂)ₛ₂(OCH₂CH₂)ₛ₁(CH₂)ₛ₃OR′, wherein s1 is an integer from 1 to 10 (e.g., from 1 to 6 or from 1 to 4), each of s2 and s3, independently, is an integer from 0 to 10 (e.g., from 0 to 4, from 0 to 6, from 1 to 4, from 1 to 6, or from 1 to 10), and R′ is H or C₁₋₂₀ alkyl, and (h) amino-polyethylene glycol of —NR^{N1}(CH₂)ₛ₂(CH₂CH₂O)ₛ₁(CH₂)ₛ₃NR^{N1}, wherein s1 is an integer from 1 to 10 (e.g., from 1 to 6 or from 1 to 4), each of s2 and s3, independently, is an integer from 0 to 10 (e.g., from 0 to 4, from 0 to 6, from 1 to 4, from 1 to 6, or from 1 to 10), and each RN is, independently, hydrogen or optionally substituted C₁₋₆ alkyl; (15) —C(O)NR^{B}‘Rc’, where each of R^{B′} and R^{C′} is, independently, selected from the group consisting of (a) hydrogen, (b) C₁₋₆ alkyl, (c) C₆₋₁₀ aryl, and (d) C₁₋₆ alk-C₆₋₁₀ aryl; (16) —SO₂R^{D′}, where R^{D′} is selected from the group consisting of (a) C₁₋₆ alkyl, (b) C₆₋₁₀ aryl, (c) C₁₋₆ alk-C₆₋₁₀ aryl, and (d) hydroxy; (17) —SO₂NR^{E′}R^{F′}, where each of R^{E′} and R^{F′} is, independently, selected from the group consisting of (a) hydrogen, (b) C₁₋₆ alkyl, (c) C₆₋₁₀ aryl and (d) C₁₋₆ alk-C₆₋₁₀ aryl; (18) —C(O)R^{G′}, where R^{G′} is selected from the group consisting of (a) C₁₋₂₀ alkyl (e.g., C₁₋₆ alkyl), (b) C₂₋₂₀ alkenyl (e.g., C₂₋₆ alkenyl), (c) C₆₋₁₀ aryl, (d) hydrogen, (e) C₁₋₆ alk-C₆₋₁₀ aryl, (f) amino-C₁₋₂₀ alkyl, (g) polyethylene glycol of —(CH₂)ₛ₂(OCH₂CH₂)ₛ₁(CH₂)ₛ₃OR′, wherein s1 is an integer from 1 to 10 (e.g., from 1 to 6 or from 1 to 4), each of s2 and s3, independently, is an integer from 0 to 10 (e.g., from 0 to 4, from 0 to 6, from 1 to 4, from 1 to 6, or from 1 to 10), and R′ is H or C₁₋₂₀ alkyl, and (h) amino-polyethylene glycol of —NR^{N1}(CH₂)ₛ₂(CH₂CH₂O)ₛ₁(CH₂)ₛ₃NR^{N1}, wherein s1 is an integer from 1 to 10 (e.g., from 1 to 6 or from 1 to 4), each of s2 and s3, independently, is an integer from 0 to 10 (e.g., from 0 to 4, from 0 to 6, from 1 to 4, from 1 to 6, or from 1 to 10), and each R^{N1} is, independently, hydrogen or optionally substituted C₁₋₆ alkyl; (19) —NR^{H′}C(O)R′ wherein R^{H′} is selected from the group consisting of (al) hydrogen and (b1) C₁₋₆ alkyl, and R is selected from the group consisting of (a2) C₁₋₂₀ alkyl (e.g., C₁₋₆ alkyl), (b2) C₂₋₂₀ alkenyl (e.g., C₂₋₆ alkenyl), (c2) C₆₋₁₀ aryl, (d2) hydrogen, (e2) C₁₋₆ alk-C₆₋₁₀ aryl, (f2) amino-C₁₋₂₀ alkyl, (g2) polyethylene glycol of —(CH₂)ₛ₂(OCH₂CH₂)ₛ₁(CH₂)ₛ₃OR′, wherein s1 is an integer from 1 to 10 (e.g., from 1 to 6 or from 1 to 4), each of s2 and s3, independently, is an integer from 0 to 10 (e.g., from 0 to 4, from 0 to 6, from 1 to 4, from 1 to 6, or from 1 to 10), and R′ is H or C₁₋₂₀ alkyl, and (h2) amino-polyethylene glycol of —NR^{N1}(CH₂)ₛ₂(CH₂CH₂O)ₛ₁(CH₂)ₛ₃NR^{N1}, wherein s1 is an integer from 1 to 10 (e.g., from 1 to 6 or from 1 to 4), each of s2 and s3, independently, is an integer from 0 to 10 (e.g., from 0 to 4, from 0 to 6, from 1 to 4, from 1 to 6, or from 1 to 10), and each R^{N1} is, independently, hydrogen or optionally substituted C₁₋₆ alkyl; (20) —NR^{J′}C(O)OR^{K′}, wherein R^{J′} is selected from the group consisting of (a1) hydrogen and (b1) C₁₋₆ alkyl, and R^{K′} is selected from the group consisting of (a2) C₁₋₂₀ alkyl (e.g., C₁₋₆ alkyl), (b2) C₂₋₂₀ alkenyl (e.g., C₂₋₆ alkenyl), (c2) C₆₋₁₀ aryl, (d2) hydrogen, (e2) C₁₋₆ alk-C₆₋₁₀ aryl, (f2) amino-C₁₋₂₀ alkyl, (g2) polyethylene glycol of —(CH₂)ₛ₂(OCH₂CH₂)ₛ₁(CH₂)ₛ₃OR′, wherein s1 is an integer from 1 to 10 (e.g., from 1 to 6 or from 1 to 4), each of s2 and s3, independently, is an integer from 0 to 10 (e.g., from 0 to 4, from 0 to 6, from 1 to 4, from 1 to 6, or from 1 to 10), and R′ is H or C₁₋₂₀ alkyl, and (h2) amino-polyethylene glycol of —NR^{N1}(CH₂)ₛ₂(CH₂CH₂O)ₛ₁(CH₂)ₛ₃NR^{N1} wherein s1 is an integer from 1 to 10 (e.g., from 1 to 6 or from 1 to 4), each of s2 and s3, independently, is an integer from 0 to 10 (e.g., from 0 to 4, from 0 to 6, from 1 to 4, from 1 to 6, or from 1 to 10), and each R^{N1} is, independently, hydrogen or optionally substituted C₁₋₆ alkyl; and (21) amidine. In some embodiments, each of these groups can be further substituted as described herein.

[0980] The term “aminoalkoxy,” as used herein, represents an alkoxy group, as defined herein, substituted by an amino group, as defined herein. The alkyl and amino each can be further substituted with 1, 2, 3, or 4 substituent groups as described herein for the respective group (e.g., CO₂R^{A′}, where R^{A′} is selected from the group consisting of (a) C₁₋₆ alkyl, (b) C6-10 aryl, (c) hydrogen, and (d) C₁₋₆ alk-C₆₋₁₀ aryl, e.g., carboxy).

[0981] The term “aminoalkyl,” as used herein, represents an alkyl group, as defined herein, substituted by an amino group, as defined herein. The alkyl and amino each can be further substituted with 1, 2, 3, or 4 substituent groups as described herein for the respective group (e.g., CO₂R^{A′}, where R^{A′} is selected from the group consisting of (a) C₁₋₆ alkyl, (b) C₆₋₁₀ aryl, (c) hydrogen, and (d) C₁₋₆ alk-C₆₋₁₀ aryl, e.g., carboxy).

[0982] The term “aryl,” as used herein, represents a mono-, bicyclic, or multicyclic carbocyclic ring system having one or two aromatic rings and is exemplified by phenyl, naphthyl, 1,2-dihydronaphthyl, 1,2,3,4-tetrahydronaphthyl, anthracenyl, phenanthrenyl, fluorenyl, indanyl, indenyl, and the like, and may be optionally substituted with 1, 2, 3, 4, or 5 substituents independently selected from the group consisting of: (1) C1.7 acyl (e.g., carboxyaldehyde); (2) C₁₋₂₀ alkyl (e.g., C₁₋₆ alkyl, C₁₋₆ alkoxy-C₁₋₆ alkyl, C₁₋₆ alkylsulfinyl-C₁₋₆ alkyl, amino-C₁₋₆ alkyl, azido-C₁₋₆ alkyl, (carboxyaldehyde)-C₁₋₆ alkyl, halo-C₁₋₆ alkyl (e.g., perfluoroalkyl), hydroxy-C₁₋₆ alkyl, nitro-C₁₋₆ alkyl, or C₁₋₆ thioalkoxy-C₁₋₆ alkyl); (3) C₁₋₂₀ alkoxy (e.g., C₁₋₆ alkoxy, such as perfluoroalkoxy); (4) C₁₋₆ alkylsulfinyl; (5) C₆₋₁₀ aryl; (6) amino; (7) C₁₋₆ alk-C₆₋₁₀ aryl; (8) azido; (9) C₃₋₈ cycloalkyl; (10) C₁₋₆ alk-C₃₋₈ cycloalkyl; (11) halo; (12) C₁₋₁₂ heterocyclyl (e.g., C₁₋₁₂ heteroaryl); (13) (C₁₋₁₂ heterocyclyl)oxy; (14) hydroxy; (15) nitro; (16) C₁₋₂₀ thioalkoxy (e.g., C₁₋₆ thioalkoxy); (17) —(CH₂)_{q}CO₂R^{A′}, where q is an integer from zero to four, and R^{A′} is selected from the group consisting of (a) C₁₋₆ alkyl, (b) C₆₋₁₀ aryl, (c) hydrogen, and (d) C₁₋₆ alk-C₆₋₁₀ aryl; (18) —(CH₂)_{q}CONR^{B′}R^{C′}, where q is an integer from zero to four and where R^{B′} and R^{C′} are independently selected from the group consisting of (a) hydrogen, (b) C₁₋₆ alkyl, (c) C₆₋₁₀ aryl, and (d) C₁₋₆ alk-C₆₋₁₀ aryl; (19) —(CH₂)_{q}SO₂R^{D′}, where q is an integer from zero to four and where R^{D′} is selected from the group consisting of (a) alkyl, (b) C₆₋₁₀ aryl, and (c) alk-C₆₋₁₀ aryl; (20) —(CH₂)_{q}SO₂NR^{E′}R^{F′}, where q is an integer from zero to four and where each of R^{E′} and R^{F′} is, independently, selected from the group consisting of (a) hydrogen, (b) C₁₋₆ alkyl, (c) C₆₋₁₀ aryl, and (d) C₁₋₆ alk-C₆₋₁₀ aryl; (21) thiol; (22) C₆₋₁₀ aryloxy; (23) C₃₋₈ cycloalkoxy; (24) C₆₋₁₀ aryl-C₁₋₆ alkoxy; (25) C₁₋₆ alk-C₁₋₁₂ heterocyclyl (e.g., C₁₋₆ alk-C₁₋₁₂ heteroaryl); (26) C₂₋₂₀ alkenyl; and (27) C₂₋₂₀ alkynyl. In some embodiments, each of these groups can be further substituted as described herein. For example, the alkylene group of a C₁-alkaryl or a C₁-alkheterocyclyl can be further substituted with an oxo group to afford the respective aryloyl and (heterocyclyl)oyl substituent group.

[0983] The term “arylalkoxy,” as used herein, represents an alkaryl group, as defined herein, attached to the parent molecular group through an oxygen atom. Exemplary unsubstituted alkoxyalkyl groups include from 7 to 30 carbons (e.g., from 7 to 16 or from 7 to 20 carbons, such as C₆₋₁₀ aryl-C₁₋₆ alkoxy, C₆₋₁₀ aryl-C₁₋₁₀ alkoxy, or C₆₋₁₀ aryl-C₁₋₂₀ alkoxy). In some embodiments, the arylalkoxy group can be substituted with 1, 2, 3, or 4 substituents as defined herein

[0984] The term “aryloxy” represents a chemical substituent of formula —OR′, where R′ is an aryl group of 6 to 18 carbons, unless otherwise specified. In some embodiments, the aryl group can be substituted with 1, 2, 3, or 4 substituents as defined herein.

[0985] The term “aryloyl,” as used herein, represents an aryl group, as defined herein, that is attached to the parent molecular group through a carbonyl group. Exemplary unsubstituted aryloyl groups are of 7 to 11 carbons. In some embodiments, the aryl group can be substituted with 1, 2, 3, or 4 substituents as defined herein.

[0986] The term “azido” represents an —N₃ group, which can also be represented as —N═N═N.

[0987] The term “bicyclic,” as used herein, refer to a structure having two rings, which may be aromatic or non-aromatic. Bicyclic structures include spirocyclyl groups, as defined herein, and two rings that share one or more bridges, where such bridges can include one atom or a chain including two, three, or more atoms. Exemplary bicyclic groups include a bicyclic carbocyclyl group, where the first and second rings are carbocyclyl groups, as defined herein; a bicyclic aryl groups, where the first and second rings are aryl groups, as defined herein; bicyclic heterocyclyl groups, where the first ring is a heterocyclyl group and the second ring is a carbocyclyl (e.g., aryl) or heterocyclyl (e.g., heteroaryl) group; and bicyclic heteroaryl groups, where the first ring is a heteroaryl group and the second ring is a carbocyclyl (e.g., aryl) or heterocyclyl (e.g., heteroaryl) group. In some embodiments, the bicyclic group can be substituted with 1, 2, 3, or 4 substituents as defined herein for cycloalkyl, heterocyclyl, and aryl groups.

[0988] The terms “carbocyclic” and “carbocyclyl,” as used herein, refer to an optionally substituted C₃₋₁₂ monocyclic, bicyclic, or tricyclic structure in which the rings, which may be aromatic or non-aromatic, are formed by carbon atoms. Carbocyclic structures include cycloalkyl, cycloalkenyl, and aryl groups.

[0989] The term “carbamoyl,” as used herein, represents —C(O)—N(R^{N1})₂, where the meaning of each R^{N1} is found in the definition of “amino” provided herein.

[0990] The term “carbamoylalkyl,” as used herein, represents an alkyl group, as defined herein, substituted by a carbamoyl group, as defined herein. The alkyl group can be further substituted with 1, 2, 3, or 4 substituent groups as described herein.

[0991] The term “carbamyl,” as used herein, refers to a carbamate group having the structure —NR^{N1}C(═O)OR or —OC(═O)N(R^{N1})₂, where the meaning of each R^{N1} is found in the definition of “amino” provided herein, and R is alkyl, cycloalkyl, alkcycloalkyl, aryl, alkaryl, heterocyclyl (e.g., heteroaryl), or alkheterocyclyl (e.g., alkheteroaryl), as defined herein.

[0992] The term “carbonyl,” as used herein, represents a C(O) group, which can also be represented as C═O.

[0993] The term “carboxyaldehyde” represents an acyl group having the structure —CHO.

[0994] The term “carboxy,” as used herein, means —CO₂H.

[0995] The term “carboxyalkoxy,” as used herein, represents an alkoxy group, as defined herein, substituted by a carboxy group, as defined herein. The alkoxy group can be further substituted with 1, 2, 3, or 4 substituent groups as described herein for the alkyl group.

[0996] The term “carboxyalkyl,” as used herein, represents an alkyl group, as defined herein, substituted by a carboxy group, as defined herein. The alkyl group can be further substituted with 1, 2, 3, or 4 substituent groups as described herein.

[0997] The term “cyano,” as used herein, represents an —CN group.

[0998] The term “cycloalkoxy” represents a chemical substituent of formula —OR, where R is a C₃₋₈ cycloalkyl group, as defined herein, unless otherwise specified. The cycloalkyl group can be further substituted with 1, 2, 3, or 4 substituent groups as described herein. Exemplary unsubstituted cycloalkoxy groups are from 3 to 8 carbons. In some embodiment, the cycloalkyl group can be further substituted with 1, 2, 3, or 4 substituent groups as described herein.

[0999] The term “cycloalkyl,” as used herein represents a monovalent saturated or unsaturated non-aromatic cyclic hydrocarbon group from three to eight carbons, unless otherwise specified, and is exemplified by cyclopropyl, cyclobutyl, cyclopentyl, cyclohexyl, cycloheptyl, bicyclo[2.2.1.]heptyl, and the like. When the cycloalkyl group includes one carbon-carbon double bond, the cycloalkyl group can be referred to as a “cycloalkenyl” group. Exemplary cycloalkenyl groups include cyclopentenyl, cyclohexenyl, and the like. The cycloalkyl groups of this invention can be optionally substituted with: (1) C₁₋₇ acyl (e.g., carboxyaldehyde); (2) C₁₋₂₀ alkyl (e.g., C₁₋₆ alkyl, C₁₋₆ alkoxy-C₁₋₆ alkyl, C₁₋₆ alkylsulfinyl-C₁₋₆ alkyl, amino-C₁₋₆ alkyl, azido-C1-6 alkyl, (carboxyaldehyde)-C₁₋₆ alkyl, halo-C₁₋₆ alkyl (e.g., perfluoroalkyl), hydroxy-C1-6 alkyl, nitro-C1-6 alkyl, or C₁₋₆ thioalkoxy-C₁₋₆ alkyl); (3) C₁₋₂₀ alkoxy (e.g., C₁₋₆ alkoxy, such as perfluoroalkoxy); (4) C₁₋₆ alkylsulfinyl; (5) C₆₋₁₀ aryl; (6) amino; (7) C₁₋₆ alk-C₆₋₁₀ aryl; (8) azido; (9) C₃₋₈ cycloalkyl; (10) C₁₋₆ alk-C₃₋₈ cycloalkyl; (11) halo; (12) C1-12 heterocyclyl (e.g., C₁₋₁₂ heteroaryl); (13) (C₁₋₁₂ heterocyclyl)oxy; (14) hydroxy; (15) nitro; (16) C₁₋₂₀ thioalkoxy (e.g., C₁₋₆ thioalkoxy); (17) —(CH₂)_{q}CO₂R^{A′}, where q is an integer from zero to four, and R^{A′} is selected from the group consisting of (a) C₁₋₆ alkyl, (b) C₆₋₁₀ aryl, (c) hydrogen, and (d) C₁₋₆ alk-C₆₋₁₀ aryl; (18) —(CH₂)_{q}CONR^{B′}R^{C′}, where q is an integer from zero to four and where R^{B′} and R^{C′} are independently selected from the group consisting of (a) hydrogen, (b) C₆₋₁₀ alkyl, (c) C₆. 10 aryl, and (d) C₁₋₆ alk-C₆₋₁₀ aryl; (19) —(CH₂)_{q}SO₂R^{D′}, where q is an integer from zero to four and where R^{D′} is selected from the group consisting of (a) C₆₋₁₀ alkyl, (b) C₆₋₁₀ aryl, and (c) C₁₋₆ alk-C₆₋₁₀ aryl; (20) —(CH₂)_{q}SO₂NR^{E′}R^{F′}, where q is an integer from zero to four and where each of R^{E}‘ and RF’ is, independently, selected from the group consisting of (a) hydrogen, (b) C₆₋₁₀ alkyl, (c) C₆₋₁₀ aryl, and (d) C₁₋₆ alk-C₆₋₁₀ aryl; (21) thiol; (22) C₆₋₁₀ aryloxy; (23) C₃₋₈ cycloalkoxy; (24) C₆₋₁₀ aryl-C₁₋₆ alkoxy; (25) C₁₋₆ alk-C₁₋₁₂ heterocyclyl (e.g., C₁₋₆ alk-C₁₋₁₂ heteroaryl); (26) oxo; (27) C₂₋₂₀ alkenyl; and (28) C₂₋₂₀ alkynyl. In some embodiments, each of these groups can be further substituted as described herein. For example, the alkylene group of a C₁-alkaryl or a C₁-alkheterocyclyl can be further substituted with an oxo group to afford the respective aryloyl and (heterocyclyl)oyl substituent group.

[1000] The term “diastereomer,” as used herein means stereoisomers that are not mirror images of one another and are non-superimposable on one another.

[1001] The term “effective amount” of an agent, as used herein, is that amount sufficient to effect beneficial or desired results, for example, clinical results, and, as such, an “effective amount” depends upon the context in which it is being applied. For example, in the context of administering an agent that treats cancer, an effective amount of an agent is, for example, an amount sufficient to achieve treatment, as defined herein, of cancer, as compared to the response obtained without administration of the agent.

[1002] The term “enantiomer,” as used herein, means each individual optically active form of a compound of the invention, having an optical purity or enantiomeric excess (as determined by methods standard in the art) of at least 80% (i.e., at least 90% of one enantiomer and at most 10% of the other enantiomer), preferably at least 90% and more preferably at least 98%.

[1003] The term “halo,” as used herein, represents a halogen selected from bromine, chlorine, iodine, or fluorine.

[1004] The term “haloalkoxy,” as used herein, represents an alkoxy group, as defined herein, substituted by a halogen group (i.e., F, Cl, Br, or I). A haloalkoxy may be substituted with one, two, three, or, in the case of alkyl groups of two carbons or more, four halogens. Haloalkoxy groups include perfluoroalkoxys (e.g., —OCF₃), —OCHF₂, —OCH₂F, —OCCl₃, —OCH₂CH₂Br, —OCH₂CH(CH₂CH₂Br)CH₃, and —OCHICH₃. In some embodiments, the haloalkoxy group can be further substituted with 1, 2, 3, or 4 substituent groups as described herein for alkyl groups.

[1005] The term “haloalkyl,” as used herein, represents an alkyl group, as defined herein, substituted by a halogen group (i.e., F, Cl, Br, or I). A haloalkyl may be substituted with one, two, three, or, in the case of alkyl groups of two carbons or more, four halogens. Haloalkyl groups include perfluoroalkyls (e.g., —CF₃), —CHF₂, —CH₂F, —CCl₃, —CH₂CH₂Br, —CH₂CH(CH₂CH₂Br)CH₃, and —CHICH₃. In some embodiments, the haloalkyl group can be further substituted with 1, 2, 3, or 4 substituent groups as described herein for alkyl groups.

[1006] The term “heteroalkylene,” as used herein, refers to an alkylene group, as defined herein, in which one or two of the constituent carbon atoms have each been replaced by nitrogen, oxygen, or sulfur. In some embodiments, the heteroalkylene group can be further substituted with 1, 2, 3, or 4 substituent groups as described herein for alkylene groups.

[1007] The term “heteroaryl,” as used herein, represents that subset of heterocyclyls, as defined herein, which are aromatic: i.e., they contain 4n+2 pi electrons within the mono- or multicyclic ring system. Exemplary unsubstituted heteroaryl groups are of 1 to 12 (e.g., 1 to 11, 1 to 10, 1 to 9, 2 to 12, 2 to 11, 2 to 10, or 2 to 9) carbons. In some embodiment, the heteroaryl is substituted with 1, 2, 3, or 4 substituents groups as defined for a heterocyclyl group.

[1008] The term “heterocyclyl,” as used herein represents a 5-, 6- or 7-membered ring, unless otherwise specified, containing one, two, three, or four heteroatoms independently selected from the group consisting of nitrogen, oxygen, and sulfur. The 5-membered ring has zero to two double bonds, and the 6- and 7-membered rings have zero to three double bonds. Exemplary unsubstituted heterocyclyl groups are of 1 to 12 (e.g., 1 to 11, 1 to 10, 1 to 9, 2 to 12, 2 to 11, 2 to 10, or 2 to 9) carbons. The term “heterocyclyl” also represents a heterocyclic compound having a bridged multicyclic structure in which one or more carbons and/or heteroatoms bridges two non-adjacent members of a monocyclic ring, e.g., a quinuclidinyl group. The term “heterocyclyl” includes bicyclic, tricyclic, and tetracyclic groups in which any of the above heterocyclic rings is fused to one, two, or three carbocyclic rings, e.g., an aryl ring, a cyclohexane ring, a cyclohexene ring, a cyclopentane ring, a cyclopentene ring, or another monocyclic heterocyclic ring, such as indolyl, quinolyl, isoquinolyl, tetrahydroquinolyl, benzofuryl, benzothienyl and the like. Examples of fused heterocyclyls include tropanes and 1,2,3,5,8,8a-hexahydroindolizine. Heterocyclics include pyrrolyl, pyrrolinyl, pyrrolidinyl, pyrazolyl, pyrazolinyl, pyrazolidinyl, imidazolyl, imidazolinyl, imidazolidinyl, pyridyl, piperidinyl, homopiperidinyl, pyrazinyl, piperazinyl, pyrimidinyl, pyridazinyl, oxazolyl, oxazolidinyl, isoxazolyl, isoxazolidiniyl, morpholinyl, thiomorpholinyl, thiazolyl, thiazolidinyl, isothiazolyl, isothiazolidinyl, indolyl, indazolyl, quinolyl, isoquinolyl, quinoxalinyl, dihydroquinoxalinyl, quinazolinyl, cinnolinyl, phthalazinyl, benzimidazolyl, benzothiazolyl, benzoxazolyl, benzothiadiazolyl, furyl, thienyl, thiazolidinyl, isothiazolyl, triazolyl, tetrazolyl, oxadiazolyl (e.g., 1,2,3-oxadiazolyl), purinyl, thiadiazolyl (e.g., 1,2,3-thiadiazolyl), tetrahydrofuranyl, dihydrofuranyl, tetrahydrothienyl, dihydrothienyl, dihydroindolyl, dihydroquinolyl, tetrahydroquinolyl, tetrahydroisoquinolyl, dihydroisoquinolyl, pyranyl, dihydropyranyl, dithiazolyl, benzofuranyl, isobenzofuranyl, benzothienyl, and the like, including dihydro and tetrahydro forms thereof, where one or more double bonds are reduced and replaced with hydrogens. Still other exemplary heterocyclyls include: 2,3,4,5-tetrahydro-2-oxo-oxazolyl; 2,3-dihydro-2-oxo-1H-imidazolyl; 2,3,4,5-tetrahydro-5-oxo-1H-pyrazolyl (e.g., 2,3,4,5-tetrahydro-2-phenyl-5-oxo-1H-pyrazolyl); 2,3,4,5-tetrahydro-2,4-dioxo-1H-imidazolyl (e.g., 2,3,4,5-tetrahydro-2,4-dioxo-5-methyl-5-phenyl-1H-imidazolyl); 2,3-dihydro-2-thioxo-1,3,4-oxadiazolyl (e.g., 2,3-dihydro-2-thioxo-5-phenyl-1,3,4-oxadiazolyl); 4,5-dihydro-5-oxo-1H-triazolyl (e.g., 4,5-dihydro-3-methyl-4-amino 5-oxo-1H-triazolyl); 1,2,3,4-tetrahydro-2,4-dioxopyridinyl (e.g., 1,2,3,4-tetrahydro-2,4-dioxo-3,3-diethylpyridinyl); 2,6-dioxo-piperidinyl (e.g., 2,6-dioxo-3-ethyl-3-phenylpiperidinyl); 1,6-dihydro-6-oxopyridiminyl; 1,6-dihydro-4-oxopyrimidinyl (e.g., 2-(methylthio)-1,6-dihydro-4-oxo-5-methylpyrimidin-1-yl); 1,2,3,4-tetrahydro-2,4-dioxopyrimidinyl (e.g., 1,2,3,4-tetrahydro-2,4-dioxo-3-ethylpyrimidinyl); 1,6-dihydro-6-oxo-pyridazinyl (e.g., 1,6-dihydro-6-oxo-3-ethylpyridazinyl); 1,6-dihydro-6-oxo-1,2,4-triazinyl (e.g., 1,6-dihydro-5-isopropyl-6-oxo-1,2,4-triazinyl); 2,3-dihydro-2-oxo-1H-indolyl (e.g., 3,3-dimethyl-2,3-dihydro-2-oxo-1H-indolyl and 2,3-dihydro-2-oxo-3,3′-spiropropane-1H-indol-1-yl); 1,3-dihydro-1-oxo-2H-iso-indolyl; 1,3-dihydro-1,3-dioxo-2H-iso-indolyl; 1H-benzopyrazolyl (e.g., 1-(ethoxycarbonyl)-1H-benzopyrazolyl); 2,3-dihydro-2-oxo-1H-benzimidazolyl (e.g., 3-ethyl-2,3-dihydro-2-oxo-1H-benzimidazolyl); 2,3-dihydro-2-oxo-benzoxazolyl (e.g., 5-chloro-2,3-dihydro-2-oxo-benzoxazolyl); 2,3-dihydro-2-oxo-benzoxazolyl; 2-oxo-2H-benzopyranyl; 1,4-benzodioxanyl; 1,3-benzodioxanyl; 2,3-dihydro-3-oxo,4H-1,3-benzothiazinyl; 3,4-dihydro-4-oxo-3H-quinazolinyl (e.g., 2-methyl-3,4-dihydro-4-oxo-3H-quinazolinyl); 1,2,3,4-tetrahydro-2,4-dioxo-3H-quinazolyl (e.g., 1-ethyl-1,2,3,4-tetrahydro-2,4-dioxo-3H-quinazolyl); 1,2,3,6-tetrahydro-2,6-dioxo-7H-purinyl (e.g., 1,2,3,6-tetrahydro-1,3-dimethyl-2,6-dioxo-7H-purinyl); 1,2,3,6-tetrahydro-2,6-dioxo-1H-purinyl (e.g., 1,2,3,6-tetrahydro-3,7-dimethyl-2,6-dioxo-1H-purinyl); 2-oxobenz[c,d]indolyl; 1,1-dioxo-2H-naphth[1,8-c,d]isothiazolyl; and 1,8-naphthylenedicarboxamido. Additional heterocyclics include 3,3a,4,5,6,6α-hexahydro-pyrrolo[3,4-b]pyrrol-(2H)-yl, and 2,5-diazabicyclo[2.2.1]heptan-2-yl, homopiperazinyl (or diazepanyl), tetrahydropyranyl, dithiazolyl, benzofuranyl, benzothienyl, oxepanyl, thiepanyl, azocanyl, oxecanyl, and thiocanyl. Heterocyclic groups also include groups of the formula

[chemical structure]

where
[1009] E′ is selected from the group consisting of —N— and —CH—; F′ is selected from the group consisting of —N═CH—, —NH—CH₂—, —NH—C(O)—, —NH—, —CH═N—, —CH₂—NH—, —C(O)—NH—, —CH═CH—, —CH₂—, —CH₂CH₂—, —CH₂O—, —OCH₂—, —O—, and —S—; and G′ is selected from the group consisting of —CH— and —N—. Any of the heterocyclyl groups mentioned herein may be optionally substituted with one, two, three, four or five substituents independently selected from the group consisting of: (1) C₁₋₇ acyl (e.g., carboxyaldehyde); (2) C₁₋₂₀ alkyl (e.g., C₁₋₆ alkyl, C₁₋₆ alkoxy-C₁₋₆ alkyl, C₁₋₆ alkylsulfinyl-C₁₋₆ alkyl, amino-C₁₋₆ alkyl, azido-C₁₋₆ alkyl, (carboxyaldehyde)-C₁₋₆ alkyl, halo-C₁₋₆ alkyl (e.g., perfluoroalkyl), hydroxy-C₁₋₆ alkyl, nitro-C₁₋₆ alkyl, or C₁₋₆ thioalkoxy-C₁₋₆ alkyl); (3) C₁₋₂₀ alkoxy (e.g., C₁₋₆ alkoxy, such as perfluoroalkoxy); (4) C₁₋₆ alkylsulfinyl; (5) C₆₋₁₀ aryl; (6) amino; (7) C₁₋₆ alk-C₆₋₁₀ aryl; (8) azido; (9) C₃₋₈ cycloalkyl; (10) C₁₋₆ alk-C₃₋₈ cycloalkyl; (11) halo; (12) C₁₋₁₂ heterocyclyl (e.g., C₂₋₁₂ heteroaryl); (13) (C₁₋₁₂ heterocyclyl)oxy; (14) hydroxy; (15) nitro; (16) C₁₋₂₀ thioalkoxy (e.g., C₁₋₆ thioalkoxy); (17) —(CH₂)_{q}CO₂R^{A′}, where q is an integer from zero to four, and R^{A′} is selected from the group consisting of (a) C₁₋₆ alkyl, (b) C₆₋₁₀ aryl, (c) hydrogen, and (d) C₁₋₆ alk-C₆₋₁₀ aryl; (18) —(CH₂)_{q}CONR^{B}‘Rc’, where q is an integer from zero to four and where R^{B′} and R^{C′} are independently selected from the group consisting of (a) hydrogen, (b) C₁₋₆ alkyl, (c) C₆₋₁₀ aryl, and (d) C₁₋₆ alk-C₆₋₁₀ aryl; (19) —(CH₂)_{q}SO₂R^{D′}, where q is an integer from zero to four and where R^{D′} is selected from the group consisting of (a) C₁₋₆ alkyl, (b) C₆₋₁₀ aryl, and (c) C₁₋₆ alk-C₆₋₁₀ aryl; (20) —(CH₂)_{q}SO₂NRE‘RF’, where q is an integer from zero to four and where each of RE′ and R^{F′} is, independently, selected from the group consisting of (a) hydrogen, (b) C₁₋₆ alkyl, (c) C₆₋₁₀ aryl, and (d) C₁₋₆ alk-C₆₋₁₀ aryl; (21) thiol; (22) C₆₋₁₀ aryloxy; (23) C₃₋₈ cycloalkoxy; (24) arylalkoxy; (25) C₁₋₆ alk-C₁₋₁₂ heterocyclyl (e.g., C₁₋₆ alk-C₁₋₁₂ heteroaryl); (26) oxo; (27) (C₁₋₁₂ heterocyclyl)imino; (28) C₂₋₂₀ alkenyl; and (29) C₂₋₂₀ alkynyl. In some embodiments, each of these groups can be further substituted as described herein. For example, the alkylene group of a C1-alkaryl or a C₁-alkheterocyclyl can be further substituted with an oxo group to afford the respective aryloyl and (heterocyclyl)oyl substituent group.

[1010] The term “(heterocyclyl)imino,” as used herein, represents a heterocyclyl group, as defined herein, attached to the parent molecular group through an imino group. In some embodiments, the heterocyclyl group can be substituted with 1, 2, 3, or 4 substituent groups as defined herein.

[1011] The term “(heterocyclyl)oxy,” as used herein, represents a heterocyclyl group, as defined herein, attached to the parent molecular group through an oxygen atom. In some embodiments, the heterocyclyl group can be substituted with 1, 2, 3, or 4 substituent groups as defined herein.

[1012] The term “(heterocyclyl)oyl,” as used herein, represents a heterocyclyl group, as defined herein, attached to the parent molecular group through a carbonyl group. In some embodiments, the heterocyclyl group can be substituted with 1, 2, 3, or 4 substituent groups as defined herein.

[1013] The term “hydrocarbon,” as used herein, represents a group consisting only of carbon and hydrogen atoms.

[1014] The term “hydroxy,” as used herein, represents an —OH group.

[1015] The term “hydroxyalkenyl,” as used herein, represents an alkenyl group, as defined herein, substituted by one to three hydroxy groups, with the proviso that no more than one hydroxy group may be attached to a single carbon atom of the alkyl group, and is exemplified by dihydroxypropenyl, hydroxyisopentenyl, and the like.

[1016] The term “hydroxyalkyl,” as used herein, represents an alkyl group, as defined herein, substituted by one to three hydroxy groups, with the proviso that no more than one hydroxy group may be attached to a single carbon atom of the alkyl group, and is exemplified by hydroxymethyl, dihydroxypropyl, and the like.

[1017] The term “isomer,” as used herein, means any tautomer, stereoisomer, enantiomer, or diastereomer of any compound of the invention. It is recognized that the compounds of the invention can have one or more chiral centers and/or double bonds and, therefore, exist as stereoisomers, such as double-bond isomers (i.e., geometric E/Z isomers) or diastereomers (e.g., enantiomers (i.e., (+) or (−)) or cis/trans isomers). According to the invention, the chemical structures depicted herein, and therefore the compounds of the invention, encompass all of the corresponding stereoisomers, that is, both the stereomerically pure form (e.g., geometrically pure, enantiomerically pure, or diastereomerically pure) and enantiomeric and stereoisomeric mixtures, e.g., racemates. Enantiomeric and stereoisomeric mixtures of compounds of the invention can typically be resolved into their component enantiomers or stereoisomers by well-known methods, such as chiral-phase gas chromatography, chiral-phase high performance liquid chromatography, crystallizing the compound as a chiral salt complex, or crystallizing the compound in a chiral solvent. Enantiomers and stereoisomers can also be obtained from stereomerically or enantiomerically pure intermediates, reagents, and catalysts by well-known asymmetric synthetic methods.

[1018] The term “N-protected amino,” as used herein, refers to an amino group, as defined herein, to which is attached one or two N-protecting groups, as defined herein.

[1019] The term “N-protecting group,” as used herein, represents those groups intended to protect an amino group against undesirable reactions during synthetic procedures. Commonly used N-protecting groups are disclosed in Greene, “Protective Groups in Organic Synthesis,” 3^{rd} Edition (John Wiley & Sons, New York, 1999), which is incorporated herein by reference. N-protecting groups include acyl, aryloyl, or carbamyl groups such as formyl, acetyl, propionyl, pivaloyl, t-butylacetyl, 2-chloroacetyl, 2-bromoacetyl, trifluoroacetyl, trichloroacetyl, phthalyl, o-nitrophenoxyacetyl, α-chlorobutyryl, benzoyl, 4-chlorobenzoyl, 4-bromobenzoyl, 4-nitrobenzoyl, and chiral auxiliaries such as protected or unprotected D, L or D, L-amino acids such as alanine, leucine, phenylalanine, and the like; sulfonyl-containing groups such as benzenesulfonyl, p-toluenesulfonyl, and the like; carbamate forming groups such as benzyloxycarbonyl, p-chlorobenzyloxycarbonyl, p-methoxybenzyloxycarbonyl, p-nitrobenzyloxycarbonyl, 2-nitrobenzyloxycarbonyl, p-bromobenzyloxycarbonyl, 3,4-dimethoxybenzyloxycarbonyl, 3,5-dimethoxybenzyloxycarbonyl, 2,4-dimethoxybenzyloxycarbonyl, 4-methoxybenzyloxycarbonyl, 2-nitro-4,5-dimethoxybenzyloxycarbonyl, 3,4,5-trimethoxybenzyloxycarbonyl, 1-(p-biphenylyl)-1-methylethoxycarbonyl, α,α-dimethyl-3,5-dimethoxybenzyloxycarbonyl, benzhydryloxy carbonyl, t-butyloxycarbonyl, diisopropylmethoxycarbonyl, isopropyloxycarbonyl, ethoxycarbonyl, methoxycarbonyl, allyloxycarbonyl, 2,2,2,-trichloroethoxycarbonyl, phenoxycarbonyl, 4-nitrophenoxy carbonyl, fluorenyl-9-methoxycarbonyl, cyclopentyloxycarbonyl, adamantyloxycarbonyl, cyclohexyloxycarbonyl, phenylthiocarbonyl, and the like, alkaryl groups such as benzyl, triphenylmethyl, benzyloxymethyl, and the like and silyl groups, such as trimethylsilyl, and the like. Preferred N-protecting groups are formyl, acetyl, benzoyl, pivaloyl, t-butylacetyl, alanyl, phenylsulfonyl, benzyl, t-butyloxycarbonyl (Boc), and benzyloxycarbonyl (Cbz).

[1020] The term “nitro,” as used herein, represents an —NO₂ group.

[1021] The term “oxo” as used herein, represents ═O.

[1022] The term “perfluoroalkyl,” as used herein, represents an alkyl group, as defined herein, where each hydrogen radical bound to the alkyl group has been replaced by a fluoride radical. Perfluoroalkyl groups are exemplified by trifluoromethyl, pentafluoroethyl, and the like.

[1023] The term “perfluoroalkoxy,” as used herein, represents an alkoxy group, as defined herein, where each hydrogen radical bound to the alkoxy group has been replaced by a fluoride radical. Perfluoroalkoxy groups are exemplified by trifluoromethoxy, pentafluoroethoxy, and the like.

[1024] The term “spirocyclyl,” as used herein, represents a C₂₋₇ alkylene diradical, both ends of which are bonded to the same carbon atom of the parent group to form a spirocyclic group, and also a C₁₋₆ heteroalkylene diradical, both ends of which are bonded to the same atom. The heteroalkylene radical forming the spirocyclyl group can containing one, two, three, or four heteroatoms independently selected from the group consisting of nitrogen, oxygen, and sulfur. In some embodiments, the spirocyclyl group includes one to seven carbons, excluding the carbon atom to which the diradical is attached. The spirocyclyl groups of the invention may be optionally substituted with 1, 2, 3, or 4 substituents provided herein as optional substituents for cycloalkyl and/or heterocyclyl groups.

[1025] The term “stereoisomer,” as used herein, refers to all possible different isomeric as well as conformational forms which a compound may possess (e.g., a compound of any formula described herein), in particular all possible stereochemically and conformationally isomeric forms, all diastereomers, enantiomers and/or conformers of the basic molecular structure. Some compounds of the present invention may exist in different tautomeric forms, all of the latter being included within the scope of the present invention.

[1026] The term “sulfoalkyl,” as used herein, represents an alkyl group, as defined herein, substituted by a sulfo group of —SO₃H. In some embodiments, the alkyl group can be further substituted with 1, 2, 3, or 4 substituent groups as described herein.

[1027] The term “sulfonyl,” as used herein, represents an —S(O)₂— group.

[1028] The term “thioalkaryl,” as used herein, represents a chemical substituent of formula —SR, where R is an alkaryl group. In some embodiments, the alkaryl group can be further substituted with 1, 2, 3, or 4 substituent groups as described herein.

[1029] The term “thioalkheterocyclyl,” as used herein, represents a chemical substituent of formula —SR, where R is an alkheterocyclyl group. In some embodiments, the alkheterocyclyl group can be further substituted with 1, 2, 3, or 4 substituent groups as described herein.

[1030] The term “thioalkoxy,” as used herein, represents a chemical substituent of formula —SR, where R is an alkyl group, as defined herein. In some embodiments, the alkyl group can be further substituted with 1, 2, 3, or 4 substituent groups as described herein.

[1031] The term “thiol” represents an —SH group.

[1032] Compound: As used herein, the term “compound,” is meant to include all stereoisomers, geometric isomers, tautomers, and isotopes of the structures depicted.

[1033] The compounds described herein can be asymmetric (e.g., having one or more stereocenters). All stereoisomers, such as enantiomers and diastereomers, are intended unless otherwise indicated. Compounds of the present disclosure that contain asymmetrically substituted carbon atoms can be isolated in optically active or racemic forms. Methods on how to prepare optically active forms from optically active starting materials are known in the art, such as by resolution of racemic mixtures or by stereoselective synthesis. Many geometric isomers of olefins, C═N double bonds, and the like can also be present in the compounds described herein, and all such stable isomers are contemplated in the present disclosure. Cis and trans geometric isomers of the compounds of the present disclosure are described and may be isolated as a mixture of isomers or as separated isomeric forms.

[1034] Compounds of the present disclosure also include tautomeric forms. Tautomeric forms result from the swapping of a single bond with an adjacent double bond and the concomitant migration of a proton. Tautomeric forms include prototropic tautomers which are isomeric protonation states having the same empirical formula and total charge. Examples prototropic tautomers include ketone-enol pairs, amide-imidic acid pairs, lactam-lactim pairs, amide-imidic acid pairs, enamine-imine pairs, and annular forms where a proton can occupy two or more positions of a heterocyclic system, such as, 1H- and 3H-imidazole, 1H-, 2H- and 4H-1,2,4-triazole, 1H- and 2H-isoindole, and 1H- and 2H-pyrazole. Tautomeric forms can be in equilibrium or sterically locked into one form by appropriate substitution.

[1035] Compounds of the present disclosure also include all of the isotopes of the atoms occurring in the intermediate or final compounds. “Isotopes” refers to atoms having the same atomic number but different mass numbers resulting from a different number of neutrons in the nuclei. For example, isotopes of hydrogen include tritium and deuterium.

[1036] The compounds and salts of the present disclosure can be prepared in combination with solvent or water molecules to form solvates and hydrates by routine methods.

[1037] Conserved: As used herein, the term “conserved” refers to nucleotides or amino acid residues of a polynucleotide sequence or polypeptide sequence, respectively, that are those that occur unaltered in the same position of two or more sequences being compared. Nucleotides or amino acids that are relatively conserved are those that are conserved amongst more related sequences than nucleotides or amino acids appearing elsewhere in the sequences.

[1038] In some embodiments, two or more sequences are said to be “completely conserved” if they are 100% identical to one another. In some embodiments, two or more sequences are said to be “highly conserved” if they are at least 70% identical, at least 80% identical, at least 90% identical, or at least 95% identical to one another. In some embodiments, two or more sequences are said to be “highly conserved” if they are about 70% identical, about 80% identical, about 90% identical, about 95%, about 98%, or about 99% identical to one another. In some embodiments, two or more sequences are said to be “conserved” if they are at least 30% identical, at least 40% identical, at least 50% identical, at least 60% identical, at least 70% identical, at least 80% identical, at least 90% identical, or at least 95% identical to one another. In some embodiments, two or more sequences are said to be “conserved” if they are about 30% identical, about 40% identical, about 50% identical, about 60% identical, about 70% identical, about 80% identical, about 90% identical, about 95% identical, about 98% identical, or about 99% identical to one another. Conservation of sequence may apply to the entire length of an oligonucleotide or polypeptide or may apply to a portion, region or feature thereof.

[1039] Controlled Release: As used herein, the term “controlled release” refers to a pharmaceutical composition or compound release profile that conforms to a particular pattern of release to effect a therapeutic outcome.

[1040] Cyclic or Cyclized: As used herein, the term “cyclic” refers to the presence of a continuous loop. Cyclic molecules need not be circular, only joined to form an unbroken chain of subunits. Cyclic molecules such as the engineered RNA or mRNA of the present invention may be single units or multimers or comprise one or more components of a complex or higher order structure.

[1041] Cytostatic: As used herein, “cytostatic” refers to inhibiting, reducing, suppressing the growth, division, or multiplication of a cell (e.g., a mammalian cell (e.g., a human cell)), bacterium, virus, fungus, protozoan, parasite, prion, or a combination thereof.

[1042] Cytotoxic: As used herein, “cytotoxic” refers to killing or causing injurious, toxic, or deadly effect on a cell (e.g., a mammalian cell (e.g., a human cell)), bacterium, virus, fungus, protozoan, parasite, prion, or a combination thereof.

[1043] Delivery: As used herein, “delivery” refers to the act or manner of delivering a compound, substance, entity, moiety, cargo or payload.

[1044] Delivery Agent: As used herein, “delivery agent” refers to any substance which facilitates, at least in part, the in vivo delivery of a polynucleotide, primary construct or mmRNA to targeted cells.

[1045] Destabilized: As used herein, the term “destable,” “destabilize,” or “destabilizing region” means a region or molecule that is less stable than a starting, wild-type or native form of the same region or molecule.

[1046] Detectable label: As used herein, “detectable label” refers to one or more markers, signals, or moieties which are attached, incorporated or associated with another entity that is readily detected by methods known in the art including radiography, fluorescence, chemiluminescence, enzymatic activity, absorbance and the like. Detectable labels include radioisotopes, fluorophores, chromophores, enzymes, dyes, metal ions, ligands such as biotin, avidin, streptavidin and haptens, quantum dots, and the like. Detectable labels may be located at any position in the peptides or proteins disclosed herein. They may be within the amino acids, the peptides, or proteins, or located at the N- or C-termini.

[1047] Digest: As used herein, the term “digest” means to break apart into smaller pieces or components. When referring to polypeptides or proteins, digestion results in the production of peptides.

[1048] Distal: As used herein, the term “distal” means situated away from the center or away from a point or region of interest.

[1049] Dosing regimen: As used herein, a “dosing regimen” is a schedule of administration or physician determined regimen of treatment, prophylaxis, or palliative care.

[1050] Dose splitting factor (DSF)-ratio of PUD of dose split treatment divided by PUD of total daily dose or single unit dose. The value is derived from comparison of dosing regimens groups.

[1051] Encapsulate: As used herein, the term “encapsulate” means to enclose, surround or encase.

[1052] Encoded protein cleavage signal: As used herein, “encoded protein cleavage signal” refers to the nucleotide sequence which encodes a protein cleavage signal.

[1053] Engineered: As used herein, embodiments of the invention are “engineered” when they are designed to have a feature or property, whether structural or chemical, that varies from a starting point, wild type or native molecule.

[1054] Exosome: As used herein, “exosome” is a vesicle secreted by mammalian cells or a complex involved in RNA degradation.

[1055] Expression: As used herein, “expression” of a nucleic acid sequence refers to one or more of the following events: (1) production of an RNA template from a DNA sequence (e.g., by transcription); (2) processing of an RNA transcript (e.g., by splicing, editing, 5′ cap formation, and/or 3′ end processing); (3) translation of an RNA into a polypeptide or protein; and (4) post-translational modification of a polypeptide or protein.

[1056] Feature: As used herein, a “feature” refers to a characteristic, a property, or a distinctive element.

[1057] Formulation: As used herein, a “formulation” includes at least a polynucleotide, primary construct or mmRNA and a delivery agent.

[1058] Fragment: A “fragment,” as used herein, refers to a portion. For example, fragments of proteins may comprise polypeptides obtained by digesting full-length protein isolated from cultured cells.

[1059] Functional: As used herein, a “functional” biological molecule is a biological molecule in a form in which it exhibits a property and/or activity by which it is characterized.

[1060] Homology: As used herein, the term “homology” refers to the overall relatedness between polymeric molecules, e.g. between nucleic acid molecules (e.g. DNA molecules and/or RNA molecules) and/or between polypeptide molecules. In some embodiments, polymeric molecules are considered to be “homologous” to one another if their sequences are at least 25%, 30%, 35%, 40%, 45%, 50%, 55%, 60%, 65%, 70%, 75%, 80%, 85%, 90%, 95%, or 99% identical or similar. The term “homologous” necessarily refers to a comparison between at least two sequences (polynucleotide or polypeptide sequences). In accordance with the invention, two polynucleotide sequences are considered to be homologous if the polypeptides they encode are at least about 50%, 60%, 70%, 80%, 90%, 95%, or even 99% for at least one stretch of at least about 20 amino acids. In some embodiments, homologous polynucleotide sequences are characterized by the ability to encode a stretch of at least 4-5 uniquely specified amino acids. For polynucleotide sequences less than 60 nucleotides in length, homology is determined by the ability to encode a stretch of at least 4-5 uniquely specified amino acids. In accordance with the invention, two protein sequences are considered to be homologous if the proteins are at least about 50%, 60%, 70%, 80%, or 90% identical for at least one stretch of at least about 20 amino acids.

[1061] Identity: As used herein, the term “identity” refers to the overall relatedness between polymeric molecules, e.g., between oligonucleotide molecules (e.g. DNA molecules and/or RNA molecules) and/or between polypeptide molecules. Calculation of the percent identity of two polynucleotide sequences, for example, can be performed by aligning the two sequences for optimal comparison purposes (e.g., gaps can be introduced in one or both of a first and a second nucleic acid sequences for optimal alignment and non-identical sequences can be disregarded for comparison purposes). In certain embodiments, the length of a sequence aligned for comparison purposes is at least 30%, at least 40%, at least 50%, at least 60%, at least 70%, at least 80%, at least 90%, at least 95%, or 100% of the length of the reference sequence. The nucleotides at corresponding nucleotide positions are then compared. When a position in the first sequence is occupied by the same nucleotide as the corresponding position in the second sequence, then the molecules are identical at that position. The percent identity between the two sequences is a function of the number of identical positions shared by the sequences, taking into account the number of gaps, and the length of each gap, which needs to be introduced for optimal alignment of the two sequences. The comparison of sequences and determination of percent identity between two sequences can be accomplished using a mathematical algorithm. For example, the percent identity between two nucleotide sequences can be determined using methods such as those described in Computational Molecular Biology, Lesk, A. M., ed., Oxford University Press, New York, 1988; Biocomputing: Informatics and Genome Projects, Smith, D. W., ed., Academic Press, New York, 1993; Sequence Analysis in Molecular Biology, von Heinje, G., Academic Press, 1987; Computer Analysis of Sequence Data, Part I, Griffin, A. M., and Griffin, H. G., eds., Humana Press, New Jersey, 1994; and Sequence Analysis Primer, Gribskov, M. and Devereux, J., eds., M Stockton Press, New York, 1991; each of which is incorporated herein by reference. For example, the percent identity between two nucleotide sequences can be determined using the algorithm of Meyers and Miller (CABIOS, 1989, 4:11-17), which has been incorporated into the ALIGN program (version 2.0) using a PAM120 weight residue table, a gap length penalty of 12 and a gap penalty of 4. The percent identity between two nucleotide sequences can, alternatively, be determined using the GAP program in the GCG software package using an NWSgapdna.CMP matrix. Methods commonly employed to determine percent identity between sequences include, but are not limited to those disclosed in Carillo, H., and Lipman, D., SIAM J Applied Math., 48:1073 (1988); incorporated herein by reference. Techniques for determining identity are codified in publicly available computer programs. Exemplary computer software to determine homology between two sequences include, but are not limited to, GCG program package, Devereux, J., et al., Nucleic Acids Research, 12(1), 387 (1984)), BLASTP, BLASTN, and FASTA Altschul, S. F. et al., J. Molec. Biol., 215, 403 (1990)).

[1062] Inhibit expression of a gene: As used herein, the phrase “inhibit expression of a gene” means to cause a reduction in the amount of an expression product of the gene. The expression product can be an RNA transcribed from the gene (e.g., an mRNA) or a polypeptide translated from an mRNA transcribed from the gene. Typically a reduction in the level of an mRNA results in a reduction in the level of a polypeptide translated therefrom. The level of expression may be determined using standard techniques for measuring mRNA or protein.

[1063] In vitro: As used herein, the term “in vitro” refers to events that occur in an artificial environment, e.g., in a test tube or reaction vessel, in cell culture, in a Petri dish, etc., rather than within an organism (e.g., animal, plant, or microbe).

[1064] In vivo: As used herein, the term “in vivo” refers to events that occur within an organism (e.g., animal, plant, or microbe or cell or tissue thereof).

[1065] Isolated: As used herein, the term “isolated” refers to a substance or entity that has been separated from at least some of the components with which it was associated (whether in nature or in an experimental setting). Isolated substances may have varying levels of purity in reference to the substances from which they have been associated. Isolated substances and/or entities may be separated from at least about 10%, about 20%, about 30%, about 40%, about 50%, about 60%, about 70%, about 80%, about 90%, or more of the other components with which they were initially associated. In some embodiments, isolated agents are more than about 80%, about 85%, about 90%, about 91%, about 92%, about 93%, about 94%, about 95%, about 96%, about 97%, about 98%, about 99%, or more than about 99% pure. As used herein, a substance is “pure” if it is substantially free of other components. Substantially isolated: By “substantially isolated” is meant that the compound is substantially separated from the environment in which it was formed or detected. Partial separation can include, for example, a composition enriched in the compound of the present disclosure. Substantial separation can include compositions containing at least about 50%, at least about 60%, at least about 70%, at least about 80%, at least about 90%, at least about 95%, at least about 97%, or at least about 99% by weight of the compound of the present disclosure, or salt thereof. Methods for isolating compounds and their salts are routine in the art.

[1066] Linker: As used herein, a linker refers to a group of atoms, e.g., 10-1,000 atoms, and can be comprised of the atoms or groups such as, but not limited to, carbon, amino, alkylamino, oxygen, sulfur, sulfoxide, sulfonyl, carbonyl, and imine. The linker can be attached to a modified nucleoside or nucleotide on the nucleobase or sugar moiety at a first end, and to a payload, e.g., a detectable or therapeutic agent, at a second end. The linker may be of sufficient length as to not interfere with incorporation into a nucleic acid sequence. The linker can be used for any useful purpose, such as to form mmRNA multimers (e.g., through linkage of two or more polynucleotides, primary constructs, or mmRNA molecules) or mmRNA conjugates, as well as to administer a payload, as described herein. Examples of chemical groups that can be incorporated into the linker include, but are not limited to, alkyl, alkenyl, alkynyl, amido, amino, ether, thioether, ester, alkylene, heteroalkylene, aryl, or heterocyclyl, each of which can be optionally substituted, as described herein. Examples of linkers include, but are not limited to, unsaturated alkanes, polyethylene glycols (e.g., ethylene or propylene glycol monomeric units, e.g., diethylene glycol, dipropylene glycol, triethylene glycol, tripropylene glycol, tetraethylene glycol, or tetraethylene glycol), and dextran polymers and derivatives thereof, Other examples include, but are not limited to, cleavable moieties within the linker, such as, for example, a disulfide bond (—S—S—) or an azo bond (—N═N—), which can be cleaved using a reducing agent or photolysis. Non-limiting examples of a selectively cleavable bond include an amido bond can be cleaved for example by the use of tris(2-carboxyethyl)phosphine (TCEP), or other reducing agents, and/or photolysis, as well as an ester bond can be cleaved for example by acidic or basic hydrolysis.

[1067] MicroRNA (miRNA) binding site: As used herein, a microRNA (miRNA) binding site represents a nucleotide location or region of a nucleic acid transcript to which at least the “seed” region of a miRNA binds.

[1068] Modified: As used herein “modified” refers to a changed state or structure of a molecule of the invention. Molecules may be modified in many ways including chemically, structurally, and functionally. In one embodiment, the mRNA molecules of the present invention are modified by the introduction of non-natural nucleosides and/or nucleotides, e.g., as it relates to the natural ribonucleotides A, U, G, and C. Noncanonical nucleotides such as the cap structures are not considered “modified” although they differ from the chemical structure of the A, C, G, U ribonucleotides.

[1069] Mucus: As used herein, “mucus” refers to the natural substance that is viscous and comprises mucin glycoproteins.

[1070] Naturally occurring: As used herein, “naturally occurring” means existing in nature without artificial aid.

[1071] Non-human vertebrate: As used herein, a “non human vertebrate” includes all vertebrates except Homo sapiens, including wild and domesticated species. Examples of non-human vertebrates include, but are not limited to, mammals, such as alpaca, banteng, bison, camel, cat, cattle, deer, dog, donkey, gayal, goat, guinea pig, horse, llama, mule, pig, rabbit, reindeer, sheep water buffalo, and yak.

[1072] Off-target: As used herein, “off target” refers to any unintended effect on any one or more target, gene, or cellular transcript.

[1073] Open readingframe: As used herein, “open reading frame” or “ORF” refers to a sequence which does not contain a stop codon in a given reading frame.

[1074] Operably linked: As used herein, the phrase “operably linked” refers to a functional connection between two or more molecules, constructs, transcripts, entities, moieties or the like.

[1075] Optionally substituted: Herein a phrase of the form “optionally substituted X” (e.g., optionally substituted alkyl) is intended to be equivalent to “X, wherein X is optionally substituted” (e.g., “alkyl, wherein said alkyl is optionally substituted”). It is not intended to mean that the feature “X” (e.g. alkyl) per se is optional.

[1076] Peptide: As used herein, “peptide” is less than or equal to 50 amino acids long, e.g., about 5, 10, 15, 20, 25, 30, 35, 40, 45, or 50 amino acids long.

[1077] Paratope: As used herein, a “paratope” refers to the antigen-binding site of an antibody.

[1078] Patient: As used herein, “patient” refers to a subject who may seek or be in need of treatment, requires treatment, is receiving treatment, will receive treatment, or a subject who is under care by a trained professional for a particular disease or condition.

[1079] Pharmaceutically acceptable: The phrase “pharmaceutically acceptable” is employed herein to refer to those compounds, materials, compositions, and/or dosage forms which are, within the scope of sound medical judgment, suitable for use in contact with the tissues of human beings and animals without excessive toxicity, irritation, allergic response, or other problem or complication, commensurate with a reasonable benefit/risk ratio.

[1080] Pharmaceutically acceptable excipients: The phrase “pharmaceutically acceptable excipient,” as used herein, refers any ingredient other than the compounds described herein (for example, a vehicle capable of suspending or dissolving the active compound) and having the properties of being substantially nontoxic and non-inflammatory in a patient. Excipients may include, for example: antiadherents, antioxidants, binders, coatings, compression aids, disintegrants, dyes (colors), emollients, emulsifiers, fillers (diluents), film formers or coatings, flavors, fragrances, glidants (flow enhancers), lubricants, preservatives, printing inks, sorbents, suspensing or dispersing agents, sweeteners, and waters of hydration. Exemplary excipients include, but are not limited to: butylated hydroxytoluene (BHT), calcium carbonate, calcium phosphate (dibasic), calcium stearate, croscarmellose, crosslinked polyvinyl pyrrolidone, citric acid, crospovidone, cysteine, ethylcellulose, gelatin, hydroxypropyl cellulose, hydroxypropyl methylcellulose, lactose, magnesium stearate, maltitol, mannitol, methionine, methylcellulose, methyl paraben, microcrystalline cellulose, polyethylene glycol, polyvinyl pyrrolidone, povidone, pregelatinized starch, propyl paraben, retinyl palmitate, shellac, silicon dioxide, sodium carboxymethyl cellulose, sodium citrate, sodium starch glycolate, sorbitol, starch (corn), stearic acid, sucrose, talc, titanium dioxide, vitamin A, vitamin E, vitamin C, and xylitol.

[1081] Pharmaceutically acceptable salts: The present disclosure also includes pharmaceutically acceptable salts of the compounds described herein. As used herein, “pharmaceutically acceptable salts” refers to derivatives of the disclosed compounds wherein the parent compound is modified by converting an existing acid or base moiety to its salt form (e.g., by reacting the free base group with a suitable organic acid). Examples of pharmaceutically acceptable salts include, but are not limited to, mineral or organic acid salts of basic residues such as amines; alkali or organic salts of acidic residues such as carboxylic acids; and the like. Representative acid addition salts include acetate, adipate, alginate, ascorbate, aspartate, benzenesulfonate, benzoate, bisulfate, borate, butyrate, camphorate, camphorsulfonate, citrate, cyclopentanepropionate, digluconate, dodecylsulfate, ethanesulfonate, fumarate, glucoheptonate, glycerophosphate, hemisulfate, heptonate, hexanoate, hydrobromide, hydrochloride, hydroiodide, 2-hydroxy-ethanesulfonate, lactobionate, lactate, laurate, lauryl sulfate, malate, maleate, malonate, methanesulfonate, 2-naphthalenesulfonate, nicotinate, nitrate, oleate, oxalate, palmitate, pamoate, pectinate, persulfate, 3-phenylpropionate, phosphate, picrate, pivalate, propionate, stearate, succinate, sulfate, tartrate, thiocyanate, toluenesulfonate, undecanoate, valerate salts, and the like. Representative alkali or alkaline earth metal salts include sodium, lithium, potassium, calcium, magnesium, and the like, as well as nontoxic ammonium, quaternary ammonium, and amine cations, including, but not limited to ammonium, tetramethylammonium, tetraethylammonium, methylamine, dimethylamine, trimethylamine, triethylamine, ethylamine, and the like. The pharmaceutically acceptable salts of the present disclosure include the conventional non-toxic salts of the parent compound formed, for example, from non-toxic inorganic or organic acids. The pharmaceutically acceptable salts of the present disclosure can be synthesized from the parent compound which contains a basic or acidic moiety by conventional chemical methods. Generally, such salts can be prepared by reacting the free acid or base forms of these compounds with a stoichiometric amount of the appropriate base or acid in water or in an organic solvent, or in a mixture of the two; generally, nonaqueous media like ether, ethyl acetate, ethanol, isopropanol, or acetonitrile are preferred. Lists of suitable salts are found in Remington's Pharmaceutical Sciences, 17^{th} ed., Mack Publishing Company, Easton, Pa., 1985, p. 1418, Pharmaceutical Salts: Properties, Selection, and Use, P. H. Stahl and C. G. Wermuth (eds.), Wiley-VCH, 2008, and Berge et al., Journal of Pharmaceutical Science, 66, 1-19 (1977), each of which is incorporated herein by reference in its entirety.

[1082] Pharmaceutically acceptable solvate: The term “pharmaceutically acceptable solvate,” as used herein, means a compound of the invention wherein molecules of a suitable solvent are incorporated in the crystal lattice. A suitable solvent is physiologically tolerable at the dosage administered. For example, solvates may be prepared by crystallization, recrystallization, or precipitation from a solution that includes organic solvents, water, or a mixture thereof. Examples of suitable solvents are ethanol, water (for example, mono-, di-, and tri-hydrates), N-methylpyrrolidinone (NMP), dimethyl sulfoxide (DMSO), N,N′-dimethylformamide (DMF), N,N′-dimethylacetamide (DMAC), 1,3-dimethyl-2-imidazolidinone (DMEU), 1,3-dimethyl-3,4,5,6-tetrahydro-2-(1H)-pyrimidinone (DMPU), acetonitrile (ACN), propylene glycol, ethyl acetate, benzyl alcohol, 2-pyrrolidone, benzyl benzoate, and the like. When water is the solvent, the solvate is referred to as a “hydrate.”

[1083] Pharmacokinetic: As used herein, “pharmacokinetic” refers to any one or more properties of a molecule or compound as it relates to the determination of the fate of substances administered to a living organism. Pharmacokinetics is divided into several areas including the extent and rate of absorption, distribution, metabolism and excretion. This is commonly referred to as ADME where: (A) Absorption is the process of a substance entering the blood circulation; (D) Distribution is the dispersion or dissemination of substances throughout the fluids and tissues of the body; (M) Metabolism (or Biotransformation) is the irreversible transformation of parent compounds into daughter metabolites; and (E) Excretion (or Elimination) refers to the elimination of the substances from the body. In rare cases, some drugs irreversibly accumulate in body tissue.

[1084] Physicochemical: As used herein, “physicochemical” means of or relating to a physical and/or chemical property.

[1085] Polypeptide per unit drug (PUD): As used herein, a PUD or product per unit drug, is defined as a subdivided portion of total daily dose, usually 1 mg, pg, kg, etc., of a product (such as a polypeptide) as measured in body fluid or tissue, usually defined in concentration such as pmol/mL, mmol/mL, etc divided by the measure in the body fluid.

[1086] Preventing: As used herein, the term “preventing” refers to partially or completely delaying onset of an infection, disease, disorder and/or condition; partially or completely delaying onset of one or more symptoms, features, or clinical manifestations of a particular infection, disease, disorder, and/or condition; partially or completely delaying onset of one or more symptoms, features, or manifestations of a particular infection, disease, disorder, and/or condition; partially or completely delaying progression from an infection, a particular disease, disorder and/or condition; and/or decreasing the risk of developing pathology associated with the infection, the disease, disorder, and/or condition.

[1087] Prodrug: The present disclosure also includes prodrugs of the compounds described herein. As used herein, “prodrugs” refer to any substance, molecule or entity which is in a form predicate for that substance, molecule or entity to act as a therapeutic upon chemical or physical alteration. Prodrugs may by covalently bonded or sequestered in some way and which release or are converted into the active drug moiety prior to, upon or after administered to a mammalian subject. Prodrugs can be prepared by modifying functional groups present in the compounds in such a way that the modifications are cleaved, either in routine manipulation or in vivo, to the parent compounds. Prodrugs include compounds wherein hydroxyl, amino, sulfhydryl, or carboxyl groups are bonded to any group that, when administered to a mammalian subject, cleaves to form a free hydroxyl, amino, sulfhydryl, or carboxyl group respectively. Preparation and use of prodrugs is discussed in T. Higuchi and V. Stella, “Pro-drugs as Novel Delivery Systems,” Vol. 14 of the A.C.S. Symposium Series, and in Bioreversible Carriers in Drug Design, ed. Edward B. Roche, American Pharmaceutical Association and Pergamon Press, 1987, both of which are hereby incorporated by reference in their entirety.

[1088] Proliferate: As used herein, the term “proliferate” means to grow, expand or increase or cause to grow, expand or increase rapidly. “Proliferative” means having the ability to proliferate. “Anti-proliferative” means having properties counter to or inapposite to proliferative properties.

[1089] Protein cleavage site: As used herein, “protein cleavage site” refers to a site where controlled cleavage of the amino acid chain can be accomplished by chemical, enzymatic or photochemical means.

[1090] Protein cleavage signal: As used herein “protein cleavage signal” refers to at least one amino acid that flags or marks a polypeptide for cleavage.

[1091] Protein ofinterest: As used herein, the terms “proteins of interest” or “desired proteins” include those provided herein and fragments, mutants, variants, and alterations thereof.

[1092] Proximal: As used herein, the term “proximal” means situated nearer to the center or to a point or region of interest.

[1093] Pseudouridine: As used herein, pseudouridine refers to the C-glycoside isomer of the nucleoside uridine. A “pseudouridine analog” is any modification, variant, isoform or derivative of pseudouridine. For example, pseudouridine analogs include but are not limited to 1-carboxymethyl-pseudouridine, 1-propynyl-pseudouridine, 1-taurinomethyl-pseudouridine, 1-taurinomethyl-4-thio-pseudouridine, 1-methylpseudouridine (m¹ψ), 1-methyl-4-thio-pseudouridine (m¹s⁴ψ), 4-thio-1-methyl-pseudouridine, 3-methyl-pseudouridine (m³′), 2-thio-1-methyl-pseudouridine, 1-methyl-1-deaza-pseudouridine, 2-thio-1-methyl-1-deaza-pseudouridine, dihydropseudouridine, 2-thio-dihydropseudouridine, 2-methoxyuridine, 2-methoxy-4-thio-uridine, 4-methoxy-pseudouridine, 4-methoxy-2-thio-pseudouridine, N1-methyl-pseudouridine, 1-methyl-3-(3-amino-3-carboxypropyl)pseudouridine (acp³ ψ), and 2′-O-methyl-pseudouridine (wm).

[1094] Purified: As used herein, “purify,” “purified,” “purification” means to make substantially pure or clear from unwanted components, material defilement, admixture or imperfection.

[1095] Sample: As used herein, the term “sample” or “biological sample” refers to a subset of its tissues, cells or component parts (e.g. body fluids, including but not limited to blood, mucus, lymphatic fluid, synovial fluid, cerebrospinal fluid, saliva, amniotic fluid, amniotic cord blood, urine, vaginal fluid and semen). A sample further may include a homogenate, lysate or extract prepared from a whole organism or a subset of its tissues, cells or component parts, or a fraction or portion thereof, including but not limited to, for example, plasma, serum, spinal fluid, lymph fluid, the external sections of the skin, respiratory, intestinal, and genitourinary tracts, tears, saliva, milk, blood cells, tumors, organs. A sample further refers to a medium, such as a nutrient broth or gel, which may contain cellular components, such as proteins or nucleic acid molecule.

[1096] Signal Sequences: As used herein, the phrase “signal sequences” refers to a sequence which can direct the transport or localization of a protein.

[1097] Single unit dose: As used herein, a “single unit dose” is a dose of any therapeutic administed in one dose/at one time/single route/single point of contact, i.e., single administration event.

[1098] Similarity: As used herein, the term “similarity” refers to the overall relatedness between polymeric molecules, e.g. between polynucleotide molecules (e.g. DNA molecules and/or RNA molecules) and/or between polypeptide molecules. Calculation of percent similarity of polymeric molecules to one another can be performed in the same manner as a calculation of percent identity, except that calculation of percent similarity takes into account conservative substitutions as is understood in the art.

[1099] Split dose: As used herein, a “split dose” is the division of single unit dose or total daily dose into two or more doses.

[1100] Stable: As used herein “stable” refers to a compound that is sufficiently robust to survive isolation to a useful degree of purity from a reaction mixture, and preferably capable of formulation into an efficacious therapeutic agent.

[1101] Stabilized: As used herein, the term “stabilize”, “stabilized,” “stabilized region” means to make or become stable.

[1102] Subject: As used herein, the term “subject” or “patient” refers to any organism to which a composition in accordance with the invention may be administered, e.g., for experimental, diagnostic, prophylactic, and/or therapeutic purposes. Typical subjects include animals (e.g., mammals such as mice, rats, rabbits, non-human primates, and humans) and/or plants.

[1103] Substantially: As used herein, the term “substantially” refers to the qualitative condition of exhibiting total or near-total extent or degree of a characteristic or property of interest. One of ordinary skill in the biological arts will understand that biological and chemical phenomena rarely, if ever, go to completion and/or proceed to completeness or achieve or avoid an absolute result. The term “substantially” is therefore used herein to capture the potential lack of completeness inherent in many biological and chemical phenomena.

[1104] Substantially equal: As used herein as it relates to time differences between doses, the term means plus/minus 2%.

[1105] Substantially simultaneously: As used herein and as it relates to plurality of doses, the term means within 2 seconds.

[1106] Suffering from: An individual who is “suffering from” a disease, disorder, and/or condition has been diagnosed with or displays one or more symptoms of a disease, disorder, and/or condition.

[1107] Susceptible to: An individual who is “susceptible to” a disease, disorder, and/or condition has not been diagnosed with and/or may not exhibit symptoms of the disease, disorder, and/or condition but harbors a propensity to develop a disease or its symptoms. In some embodiments, an individual who is susceptible to a disease, disorder, and/or condition (for example, cancer) may be characterized by one or more of the following: (1) a genetic mutation associated with development of the disease, disorder, and/or condition; (2) a genetic polymorphism associated with development of the disease, disorder, and/or condition; (3) increased and/or decreased expression and/or activity of a protein and/or nucleic acid associated with the disease, disorder, and/or condition; (4) habits and/or lifestyles associated with development of the disease, disorder, and/or condition; (5) a family history of the disease, disorder, and/or condition; and (6) exposure to and/or infection with a microbe associated with development of the disease, disorder, and/or condition. In some embodiments, an individual who is susceptible to a disease, disorder, and/or condition will develop the disease, disorder, and/or condition. In some embodiments, an individual who is susceptible to a disease, disorder, and/or condition will not develop the disease, disorder, and/or condition.

[1108] Sustained release: As used herein, the term “sustained release” refers to a pharmaceutical composition or compound release profile that conforms to a release rate over a specific period of time.

[1109] Synthetic: The term “synthetic” means produced, prepared, and/or manufactured by the hand of man. Synthesis of polynucleotides or polypeptides or other molecules of the present invention may be chemical or enzymatic.

[1110] Targeted Cells: As used herein, “targeted cells” refers to any one or more cells of interest. The cells may be found in vitro, in vivo, in situ or in the tissue or organ of an organism. The organism may be an animal, preferably a mammal, more preferably a human and most preferably a patient.

[1111] Therapeutic Agent: The term “therapeutic agent” refers to any agent that, when administered to a subject, has a therapeutic, diagnostic, and/or prophylactic effect and/or elicits a desired biological and/or pharmacological effect.

[1112] Therapeutically effective amount: As used herein, the term “therapeutically effective amount” means an amount of an agent to be delivered (e.g., nucleic acid, drug, therapeutic agent, diagnostic agent, prophylactic agent, etc.) that is sufficient, when administered to a subject suffering from or susceptible to an infection, disease, disorder, and/or condition, to treat, improve symptoms of, diagnose, prevent, and/or delay the onset of the infection, disease, disorder, and/or condition.

[1113] Therapeutically effective outcome: As used herein, the term “therapeutically effective outcome” means an outcome that is sufficient in a subject suffering from or susceptible to an infection, disease, disorder, and/or condition, to treat, improve symptoms of, diagnose, prevent, and/or delay the onset of the infection, disease, disorder, and/or condition.

[1114] Total daily dose: As used herein, a “total daily dose” is an amount given or prescribed in 24 hr period. It may be administered as a single unit dose.

[1115] Transcription factor: As used herein, the term “transcription factor” refers to a DNA-binding protein that regulates transcription of DNA into RNA, for example, by activation or repression of transcription. Some transcription factors effect regulation of transcription alone, while others act in concert with other proteins. Some transcription factor can both activate and repress transcription under certain conditions. In general, transcription factors bind a specific target sequence or sequences highly similar to a specific consensus sequence in a regulatory region of a target gene. Transcription factors may regulate transcription of a target gene alone or in a complex with other molecules.

[1116] Treating: As used herein, the term “treating” refers to partially or completely alleviating, ameliorating, improving, relieving, delaying onset of, inhibiting progression of, reducing severity of, and/or reducing incidence of one or more symptoms or features of a particular infection, disease, disorder, and/or condition. For example, “treating” cancer may refer to inhibiting survival, growth, and/or spread of a tumor. Treatment may be administered to a subject who does not exhibit signs of a disease, disorder, and/or condition and/or to a subject who exhibits only early signs of a disease, disorder, and/or condition for the purpose of decreasing the risk of developing pathology associated with the disease, disorder, and/or condition.

[1117] Unmodified: As used herein, “unmodified” refers to any substance, compound or molecule prior to being changed in any way. Unmodified may, but does not always, refer to the wild type or native form of a biomolecule. Molecules may undergo a series of modifications whereby each modified molecule may serve as the “unmodified” starting molecule for a subsequent modification.

### Equivalents and Scope

[1118] Those skilled in the art will recognize, or be able to ascertain using no more than routine experimentation, many equivalents to the specific embodiments in accordance with the invention described herein. The scope of the present invention is not intended to be limited to the above Description, but rather is as set forth in the appended claims.

[1119] In the claims, articles such as “a,” “an,” and “the” may mean one or more than one unless indicated to the contrary or otherwise evident from the context. Claims or descriptions that include “or” between one or more members of a group are considered satisfied if one, more than one, or all of the group members are present in, employed in, or otherwise relevant to a given product or process unless indicated to the contrary or otherwise evident from the context. The invention includes embodiments in which exactly one member of the group is present in, employed in, or otherwise relevant to a given product or process. The invention includes embodiments in which more than one, or all of the group members are present in, employed in, or otherwise relevant to a given product or process.

[1120] It is also noted that the term “comprising” is intended to be open and permits but does not require the inclusion of additional elements or steps. When the term “comprising” is used herein, the term “consisting of” is thus also encompassed and disclosed.

[1121] Where ranges are given, endpoints are included. Furthermore, it is to be understood that unless otherwise indicated or otherwise evident from the context and understanding of one of ordinary skill in the art, values that are expressed as ranges can assume any specific value or subrange within the stated ranges in different embodiments of the invention, to the tenth of the unit of the lower limit of the range, unless the context clearly dictates otherwise.

[1122] In addition, it is to be understood that any particular embodiment of the present invention that falls within the prior art may be explicitly excluded from any one or more of the claims. Since such embodiments are deemed to be known to one of ordinary skill in the art, they may be excluded even if the exclusion is not set forth explicitly herein. Any particular embodiment of the compositions of the invention (e.g., any nucleic acid or protein encoded thereby; any method of production; any method of use; etc.) can be excluded from any one or more claims, for any reason, whether or not related to the existence of prior art.

[1123] All cited sources, for example, references, publications, databases, database entries, and art cited herein, are incorporated into this application by reference, even if not expressly stated in the citation. In case of conflicting statements of a cited source and the instant application, the statement in the instant application shall control.

[1124] Section and table headings are not intended to be limiting.

### EXAMPLES

### Example 1. Modified mRNA Production

[1125] Modified mRNAs (mmRNA) according to the invention may be made using standard laboratory methods and materials. The open reading frame (ORF) of the gene of interest may be flanked by a 5′ untranslated region (UTR) which may contain a strong Kozak translational initiation signal and/or an alpha-globin 3′ UTR which may include an oligo(dT) sequence for templated addition of a poly-A tail. The modified mRNAs may be modified to reduce the cellular innate immune response. The modifications to reduce the cellular response may include pseudouridine (ψ) and 5-methyl-cytidine (5meC, 5mc or m⁵C). (See, Kariko K et al. Immunity 23:165-75 (2005), Kariko K et al. Mol Ther 16:1833-40 (2008), Anderson B R et al. NAR (2010); each of which are herein incorporated by reference in their entireties).

[1126] The ORF may also include various upstream or downstream additions (such as, but not limited to, β-globin, tags, etc.) may be ordered from an optimization service such as, but limited to, DNA2.0 (Menlo Park, CA) and may contain multiple cloning sites which may have XbaI recognition. Upon receipt of the construct, it may be reconstituted and transformed into chemically competent E. coli.

[1127] For the present invention, NEB DH5-alpha Competent E. coli are used. Transformations are performed according to NEB instructions using 100 ng of plasmid. The protocol is as follows:
[1128] 1 Thaw a tube of NEB 5-alpha Competent E. coli cells on ice for 10 minutes.
[1129] 2 Add 1-5 μl containing 1 pg-100 ng of plasmid DNA to the cell mixture. Carefully flick the tube 4-5 times to mix cells and DNA. Do not vortex.
[1130] 3 Place the mixture on ice for 30 minutes. Do not mix.
[1131] 4 Heat shock at 42° C. for exactly 30 seconds. Do not mix.
[1132] 5 Place on ice for 5 minutes. Do not mix.
[1133] 6 Pipette 950 μl of room temperature SOC into the mixture.
[1134] 7 Place at 37° C. for 60 minutes. Shake vigorously (250 rpm) or rotate.
[1135] 8 Warm selection plates to 37° C.
[1136] 9 Mix the cells thoroughly by flicking the tube and inverting.

[1137] Spread 50-100 μl of each dilution onto a selection plate and incubate overnight at 37° C. Alternatively, incubate at 30° C. for 24-36 hours or 25° C. for 48 hours.

[1138] A single colony is then used to inoculate 5 ml of LB growth media using the appropriate antibiotic and then allowed to grow (250 RPM, 37° C.) for 5 hours. This is then used to inoculate a 200 ml culture medium and allowed to grow overnight under the same conditions.

[1139] To isolate the plasmid (up to 850 pg), a maxi prep is performed using the Invitrogen PURELINK™ HiPure Maxiprep Kit (Carlsbad, CA), following the manufacturer's instructions.

[1140] In order to generate cDNA for In Vitro Transcription (IVT), the plasmid (an Example of which is shown in FIG. 3) is first linearized using a restriction enzyme such as XbaI. A typical restriction digest with XbaI will comprise the following: Plasmid 1.0 μg; 10× Buffer 1.0 μl; XbaI 1.5 μl; dH₂O up to 10 μl; incubated at 37° C. for 1 hr. If performing at lab scale (<5 μg), the reaction is cleaned up using Invitrogen's PURELINK™ PCR Micro Kit (Carlsbad, CA) per manufacturer's instructions. Larger scale purifications may need to be done with a product that has a larger load capacity such as Invitrogen's standard PURELINK™ PCR Kit (Carlsbad, CA). Following the cleanup, the linearized vector is quantified using the NanoDrop and analyzed to confirm linearization using agarose gel electrophoresis.

[1141] The methods described herein to make modified mRNA may be used to produce molecules of all sizes including long molecules. Modified mRNA using the described methods has been made for different sized molecules including glucosidase, alpha; acid (GAA) (3.2 kb), cystic fibrosis transmembrane conductance regulator (CFTR) (4.7 kb), Factor VII (7.3 kb), lysosomal acid lipase (45.4 kDa), glucocerebrosidase (59.7 kDa) and iduronate 2-sulfatase (76 kDa).

[1142] As a non-limiting example, G-CSF may represent the polypeptide of interest. Sequences used in the steps outlined in Examples 1-5 are shown in Table 11. It should be noted that the start codon (ATG) has been underlined in each sequence of Table 11.

TABLE 11
G-CSF Sequences

| SEQ | |
|---|---|
| ID | |
| NO | Description |
| 31904 | cDNA sequence: |
| | ATGGCTGGACCTGCCACCCAGAGCCCCATGAAGCTGATGGCCC |
| | TGCAGCTGCTGCTGTGGCACAGTGCACTCTGGACAGTGCAGGA |
| | AGCCACCCCCCTGGGCCCTGCCAGCTCCCTGCCCCAGAGCTTC |
| | CTGCTCAAGTGCTTAGAGCAAGTGAGGAAGATCCAGGGCGATG |
| | GCGCAGCGCTCCAGGAGAAGCTGTGTGCCACCTACAAGCTGTG |
| | CCACCCCGAGGAGCTGGTGCTGCTCGGACACTCTCTGGGCATC |
| | CCCTGGGCTCCCCTGAGCAGCTGCCCCAGCCAGGCCCTGCAGC |
| | TGGCAGGCTGCTTGAGCCAACTCCATAGCGGCCTTTTCCTCTA |
| | CCAGGGGCTCCTGCAGGCCCTGGAAGGGATCTCCCCCGAGTTG |
| | GGTCCCACCTTGGACACACTGCAGCTGGACGTCGCCGACTTTG |
| | CCACCACCATCTGGCAGCAGATGGAAGAACTGGGAATGGCCCC |
| | TGCCCTGCAGCCCACCCAGGGTGCCATGCCGGCCTTCGCCTCT |
| | GCTTTCCAGCGCCGGGCAGGAGGGGTCCTGGTTGCCTCCCATC |
| | TGCAGAGCTTCCTGGAGGTGTCGTACCGCGTTCTACGCCACCT |
| | TGCCCAGCCCTGA |
| 31905 | cDNA having T7 polymerase site, AfeI and |
| | Xba restriction site: |
| | TAATACGACTCACTATA |
| | GGGAAATAAGAGAGAAAAGAAGAGTAAGAAGAAATATAAGAGC |
| | CACC |
| | ATGGCTGGACCTGCCACCCAGAGCCCCATGAAGCTGATGGCCC |
| | TGCAGCTGCTGCTGTGGCACAGTGCACTCTGGACAGTGCAGGA |
| | AGCCACCCCCCTGGGCCCTGCCAGCTCCCTGCCCCAGAGCTTC |
| | CTGCTCAAGTGCTTAGAGCAAGTGAGGAAGATCCAGGGCGATG |
| | GCGCAGCGCTCCAGGAGAAGCTGTGTGCCACCTACAAGCTGTG |
| | CCACCCCGAGGAGCTGGTGCTGCTCGGACACTCTCTGGGCATC |
| | CCCTGGGCTCCCCTGAGCAGCTGCCCCAGCCAGGCCCTGCAGC |
| | TGGCAGGCTGCTTGAGCCAACTCCATAGCGGCCTTTTCCTCTA |
| | CCAGGGGCTCCTGCAGGCCCTGGAAGGGATCTCCCCCGAGTTG |
| | GGTCCCACCTTGGACACACTGCAGCTGGACGTCGCCGACTTTG |
| | CCACCACCATCTGGCAGCAGATGGAAGAACTGGGAATGGCCCC |
| | TGCCCTGCAGCCCACCCAGGGTGCCATGCCGGCCTTCGCCTCT |
| | GCTTTCCAGCGCCGGGCAGGAGGGGTCCTGGTTGCCTCCCATC |
| | TGCAGAGCTTCCTGGAGGTGTCGTACCGCGTTCTACGCCACCT |
| | TGCCCAGCCCTGAAGCGCTGCCTTCTGCGGGGCTTGCCTTCTG |
| | GCCATGCCCTTCTTCTCTCCCTTGCACCTGTACCTCTTGGTCT |
| | TTGAATAAAGCCTGAGTAGGAAGGCGGCCGCTCGAGCATGCAT |
| | CTAGA |
| 31906 | Optimized sequence; containing T7 polymerase |
| | site, AfeI and Xba restriction site |
| | TAATACGACTCACTATA |
| | GGGAAATAAGAGAGAAAAGAAGAGTAAGAAGAAATATAAGAGC |
| | CACC |
| | ATGGCCGGTCCCGCGACCCAAAGCCCCATGAAACTTATGGCCC |
| | TGCAGTTGCTGCTTTGGCACTCGGCCCTCTGGACAGTCCAAGA |
| | AGCGACTCCTCTCGGACCTGCCTCATCGTTGCCGCAGTCATTC |
| | CTTTTGAAGTGTCTGGAGCAGGTGCGAAAGATTCAGGGCGATG |
| | GAGCCGCACTCCAAGAGAAGCTCTGCGCGACATACAAACTTTG |
| | CCATCCCGAGGAGCTCGTACTGCTCGGGCACAGCTTGGGGATT |
| | CCCTGGGCTCCTCTCTCGTCCTGTCCGTCGCAGGCTTTGCAGT |
| | TGGCAGGGTGCCTTTCCCAGCTCCACTCCGGTTTGTTCTTGTA |
| | TCAGGGACTGCTGCAAGCCCTTGAGGGAATCTCGCCAGAATTG |
| | GGCCCGACGCTGGACACGTTGCAGCTCGACGTGGCGGATTTCG |
| | CAACAACCATCTGGCAGCAGATGGAGGAACTGGGGATGGCACC |
| | CGCGCTGCAGCCCACGCAGGGGGCAATGCCGGCCTTTGCGTCC |
| | GCGTTTCAGCGCAGGGCGGGTGGAGTCCTCGTAGCGAGCCACC |
| | TTCAATCATTTTTGGAAGTCTCGTACCGGGTGCTGAGACATCT |
| | TGCGCAGCCGTGAAGCGCTGCCTTCTGCGGGGCTTGCCTTCTG |
| | GCCATGCCCTTCTTCTCTCCCTTGCACCTGTACCTCTTGGTCT |
| | TTGAATAAAGCCTGAGTAGGAAGGCGGCCGCTCGAGCATGCAT |
| | CTAGA |
| 31907 | mRNA sequence (transcribed) |
| | GGGAAAUAAGAGAGAAAAGAAGAGUAAGAAGAAAUAUAAGAGC |
| | CACC |
| | AUGGCCGGUCCCGCGACCCAAAGCCCCAUGAAACUUAUGGCCC |
| | UGCAGUUGCUGCUUUGGCACUCGGCCCUCUGGACAGUCCAAGA |
| | AGCGACUCCUCUCGGACCUGCCUCAUCGUUGCCGCAGUCAUUC |
| | CUUUUGAAGUGUCUGGAGCAGGUGCGAAAGAUUCAGGGCGAUG |
| | GAGCCGCACUCCAAGAGAAGCUCUGCGCGACAUACAAACUUUG |
| | CCAUCCCGAGGAGCUCGUACUGCUCGGGCACAGCUUGGGGAUU |
| | CCCUGGGCUCCUCUCUCGUCCUGUCCGUCGCAGGCUUUGCAGU |
| | UGGCAGGGUGCCUUUCCCAGCUCCACUCCGGUUUGUUCUUGUA |
| | UCAGGGACUGCUGCAAGCCCUUGAGGGAAUCUCGCCAGAAUUG |
| | GGCCCGACGCUGGACACGUUGCAGCUCGACGUGGCGGAUUUCG |
| | CAACAACCAUCUGGCAGCAGAUGGAGGAACUGGGGAUGGCACC |
| | CGCGCUGCAGCCCACGCAGGGGGCAAUGCCGGCCUUUGCGUCC |
| | GCGUUUCAGCGCAGGGCGGGUGGAGUCCUCGUAGCGAGCCACC |
| | UUCAAUCAUUUUUGGAAGUCUCGUACCGGGUGCUGAGACAUCU |
| | UGCGCAGCCGUGA |
| | AGCGCUGCCUUCUGCGGGGCUUGCCUUCUGGCCAUGCCCUUCU |
| | UCUCUCCCUUGCACCUGUACCUCUUGGUCUUUGAAUAAAGCCU |
| | GAGUAGGAAG |

### Example 2: PCR for cDNA Production

[1143] PCR procedures for the preparation of cDNA are performed using 2× KAPA HIFI™ HotStart ReadyMix by Kapa Biosystems (Woburn, MA). This system includes 2× KAPA ReadyMix 12.5 μl; Forward Primer (10 uM) 0.75 μl; Reverse Primer (10 uM) 0.75 μl; Template cDNA 100 ng; and dH₂O diluted to 25.0 μl. The reaction conditions are at 95° C. for 5 min. and 25 cycles of 98° C. for 20 sec, then 58° C. for 15 sec, then 72° C. for 45 sec, then 72° C. for 5 min. then 4° C. to termination.

[1144] The reverse primer of the instant invention incorporates a poly-T₁₂₀ for a poly-A₁₂₀ in the mRNA. Other reverse primers with longer or shorter poly(T) tracts can be used to adjust the length of the poly(A) tail in the mRNA.

[1145] The reaction is cleaned up using Invitrogen's PURELINK™ PCR Micro Kit (Carlsbad, CA) per manufacturer's instructions (up to 5 μg). Larger reactions will require a cleanup using a product with a larger capacity. Following the cleanup, the cDNA is quantified using the NANODROP™ and analyzed by agarose gel electrophoresis to confirm the cDNA is the expected size. The cDNA is then submitted for sequencing analysis before proceeding to the in vitro transcription reaction.

### Example 3. In Vitro Transcription (IVT)

[1146] The in vitro transcription reaction generates mRNA containing modified nucleotides or modified RNA. The input nucleotide triphosphate (NTP) mix is made in-house using natural and un-natural NTPs.

[1147] A typical in vitro transcription reaction includes the following:

| 1 | Template cDNA | 1.0 | μg |
|---|---|---|---|
| 2 | 10x transcription buffer (400 mM Tris-HCl pH 8.0, 190 mM | 2.0 | μl |
| | MgCl₂, 50 mM DTT, 10 mM Spermidine) | | |
| 3 | Custom NTPs (25 mM each) | 7.2 | μl |
| 4 | RNase Inhibitor | 20 | U |
| 5 | T7 RNA polymerase | 3000 | U |
| 6 | dH₂0 | Up to 20.0 μl. and | |
| 7 | Incubation at 37° C. for 3 hr-5 hrs. | | |

[1148] The crude IVT mix may be stored at 4° C. overnight for cleanup the next day. 1 U of RNase-free DNase is then used to digest the original template. After 15 minutes of incubation at 37° C., the mRNA is purified using Ambion's MEGACLEAR™ Kit (Austin, TX) following the manufacturer's instructions. This kit can purify up to 500 μg of RNA. Following the cleanup, the RNA is quantified using the NanoDrop and analyzed by agarose gel electrophoresis to confirm the RNA is the proper size and that no degradation of the RNA has occurred.

### Example 4. Enzymatic Capping of mRNA

[1149] Capping of the mRNA is performed as follows where the mixture includes: IVT RNA 60 μg-180 μg and dH₂O up to 72 μl. The mixture is incubated at 65° C. for 5 minutes to denature RNA, and then is transferred immediately to ice.

[1150] The protocol then involves the mixing of 10× Capping Buffer (0.5 M Tris-HCl (pH 8.0), 60 mM KCl, 12.5 mM MgCl₂) (10.0 μl); 20 mM GTP (5.0 μl); 20 mM S-Adenosyl Methionine (2.5 μl); RNase Inhibitor (100 U); 2′-O-Methyltransferase (400U); Vaccinia capping enzyme (Guanylyl transferase) (40 U); dH₂O (Up to 28 μl); and incubation at 37° C. for 30 minutes for 60 μg RNA or up to 2 hours for 180 μg of RNA.

[1151] The mRNA is then purified using Ambion's MEGACLEAR™ Kit (Austin, TX) following the manufacturer's instructions. Following the cleanup, the RNA is quantified using the NANODROP™ (ThermoFisher, Waltham, MA) and analyzed by agarose gel electrophoresis to confirm the RNA is the proper size and that no degradation of the RNA has occurred. The RNA product may also be sequenced by running a reverse-transcription-PCR to generate the cDNA for sequencing.

### Example 5. PolyA Tailing Reaction

[1152] Without a poly-T in the cDNA, a poly-A tailing reaction must be performed before cleaning the final product. This is done by mixing Capped IVT RNA (100 μl); RNase Inhibitor (20 U); 10× Tailing Buffer (0.5 M Tris-HCl (pH 8.0), 2.5 M NaCl, 100 mM MgCl₂)(12.0 μl); 20 mM ATP (6.0 μl); Poly-A Polymerase (20 U); dH₂O up to 123.5 μl and incubation at 370 C for 30 min. If the poly-A tail is already in the transcript, then the tailing reaction may be skipped and proceed directly to cleanup with Ambion's MEGACLEAR™ kit (Austin, TX) (up to 500 μg). Poly-A Polymerase is preferably a recombinant enzyme expressed in yeast.

[1153] For studies performed and described herein, the poly-A tail is encoded in the IVT template to comprise 160 nucleotides in length. However, it should be understood that the processivity or integrity of the polyA tailing reaction may not always result in exactly 160 nucleotides. Hence polyA tails of approximately 160 nucleotides, e.g, about 150-165, 155, 156, 157, 158, 159, 160, 161, 162, 163, 164 or 165 are within the scope of the invention.

### Example 6. Natural 5′ Caps and 5′ Cap Analogues

[1154] 5′-capping of modified RNA may be completed concomitantly during the in vitro-transcription reaction using the following chemical RNA cap analogs to generate the 5′-guanosine cap structure according to manufacturer protocols: 3′-O-Me-m7G(5′)ppp(5′) G [the ARCA cap]; G(5′)ppp(5′)A; G(5′)ppp(5′)G; m7G(5′)ppp(5′)A; m7G(5′)ppp(5′)G (New England BioLabs, Ipswich, MA). 5′-capping of modified RNA may be completed post-transcriptionally using a Vaccinia Virus Capping Enzyme to generate the “Cap 0” structure: m7G(5′)ppp(5′)G (New England BioLabs, Ipswich, MA). Cap 1 structure may be generated using both Vaccinia Virus Capping Enzyme and a 2′-O methyl-transferase to generate: m7G(5′)ppp(5′)G-2′-O-methyl. Cap 2 structure may be generated from the Cap 1 structure followed by the 2′-O-methylation of the 5′-antepenultimate nucleotide using a 2′-0 methyl-transferase. Cap 3 structure may be generated from the Cap 2 structure followed by the 2′-O-methylation of the 5′-preantepenultimate nucleotide using a 2′-O methyl-transferase. Enzymes are preferably derived from a recombinant source.

[1155] When transfected into mammalian cells, the modified mRNAs have a stability of between 12-18 hours or more than 18 hours, e.g., 24, 36, 48, 60, 72 or greater than 72 hours.

### Example 7. Capping

[1156] A. Protein Expression Assay

[1157] Synthetic mRNAs encoding human G-CSF (cDNA shown in SEQ ID NO: 31904; mRNA sequence fully modified with 5-methylcytosine at each cytosine and pseudouridine replacement at each uridine site shown in SEQ ID NO: 31907 with a polyA tail approximately 160 nucleotides in length not shown in sequence) containing the ARCA (3′ O-Me-m7G(5′)ppp(5′)G) cap analog or the Cap1 structure can be transfected into human primary keratinocytes at equal concentrations. 6, 12, 24 and 36 hours post-transfection the amount of G-CSF secreted into the culture medium can be assayed by ELISA. Synthetic mRNAs that secrete higher levels of G-CSF into the medium would correspond to a synthetic mRNA with a higher translationally-competent Cap structure.

[1158] B. Purity Analysis Synthesis

[1159] Synthetic mRNAs encoding human G-CSF (cDNA shown in SEQ ID NO: 31904; mRNA sequence fully modified with 5-methylcytosine at each cytosine and pseudouridine replacement at each uridine site shown in SEQ ID NO: 31907 with a polyA tail approximately 160 nucleotides in length not shown in sequence) containing the ARCA cap analog or the Cap1 structure crude synthesis products can be compared for purity using denaturing Agarose-Urea gel electrophoresis or HPLC analysis. Synthetic mRNAs with a single, consolidated band by electrophoresis correspond to the higher purity product compared to a synthetic mRNA with multiple bands or streaking bands. Synthetic mRNAs with a single HPLC peak would also correspond to a higher purity product. The capping reaction with a higher efficiency would provide a more pure mRNA population.

[1160] C. Cytokine Analysis

[1161] Synthetic mRNAs encoding human G-CSF (cDNA shown in SEQ ID NO: 31904; mRNA sequence fully modified with 5-methylcytosine at each cytosine and pseudouridine replacement at each uridine site shown in SEQ ID NO: 31907 with a polyA tail approximately 160 nucleotides in length not shown in sequence) containing the ARCA cap analog or the Cap1 structure can be transfected into human primary keratinocytes at multiple concentrations. 6, 12, 24 and 36 hours post-transfection the amount of pro-inflammatory cytokines such as TNF-alpha and IFN-beta secreted into the culture medium can be assayed by ELISA. Synthetic mRNAs that secrete higher levels of pro-inflammatory cytokines into the medium would correspond to a synthetic mRNA containing an immune-activating cap structure.

[1162] D. Capping Reaction Efficiency

[1163] Synthetic mRNAs encoding human G-CSF (cDNA shown in SEQ ID NO: 31904; mRNA sequence fully modified with 5-methylcytosine at each cytosine and pseudouridine replacement at each uridine site shown in SEQ ID NO: 31907 with a polyA tail approximately 160 nucleotides in length not shown in sequence) containing the ARCA cap analog or the Cap1 structure can be analyzed for capping reaction efficiency by LC-MS after capped mRNA nuclease treatment. Nuclease treatment of capped mRNAs would yield a mixture of free nucleotides and the capped 5′-5-triphosphate cap structure detectable by LC-MS. The amount of capped product on the LC-MS spectra can be expressed as a percent of total mRNA from the reaction and would correspond to capping reaction efficiency. The cap structure with higher capping reaction efficiency would have a higher amount of capped product by LC-MS.

### Example 8. Agarose Gel Electrophoresis of Modified RNA or RT PCR Products

[1164] Individual modified RNAs (200-400 ng in a 20 μl volume) or reverse transcribed PCR products (200-400 ng) are loaded into a well on a non-denaturing 1.2% Agarose E-Gel (Invitrogen, Carlsbad, CA) and run for 12-15 minutes according to the manufacturer protocol.

### Example 9. Nanodrop Modified RNA Quantification and UV Spectral Data

[1165] Modified RNAs in TE buffer (1 μl) are used for Nanodrop UV absorbance readings to quantitate the yield of each modified RNA from an in vitro transcription reaction.

### Example 10. Formulation of Modified mRNA Using Lipidoids

[1166] Modified mRNAs (mmRNA) are formulated for in vitro experiments by mixing the mmRNA with the lipidoid at a set ratio prior to addition to cells. In vivo formulation may require the addition of extra ingredients to facilitate circulation throughout the body. To test the ability of these lipidoids to form particles suitable for in vivo work, a standard formulation process used for siRNA-lipidoid formulations was used as a starting point. Initial mmRNA-lipidoid formulations may consist of particles composed of 42% lipidoid, 48% cholesterol and 10% PEG, with further optimization of ratios possible. After formation of the particle, mmRNA is added and allowed to integrate with the complex. The encapsulation efficiency is determined using a standard dye exclusion assays.

### Materials and Methods for Examples 11-15

[1167] A. Lipid Synthesis

[1168] Six lipids, DLin-DMA, DLin-K-DMA, DLin-KC2-DMA, 98N12-5, C12-200 and DLin-MC3-DMA, were synthesized by methods outlined in the art in order to be formulated with modified RNA. DLin-DMA and precursorswere synthesized as described in Heyes et. al, J. Control Release, 2005, 107, 276-287. DLin-K-DMA and DLin-KC2-DMA and precursors were synthesized as described in Semple et. al, Nature Biotechnology, 2010, 28, 172-176. 98N12-5 and precursor were synthesized as described in Akinc et. al, Nature Biotechnology, 2008, 26, 561-569.

[1169] C12-200 and precursors were synthesized according to the method outlined in Love et. al, PNAS, 2010, 107, 1864-1869. 2-epoxydodecane (5.10 g, 27.7 mmol, 8.2 eq) was added to a vial containing Amine 200 (0.723 g, 3.36 mmol, 1 eq) and a stirring bar. The vial was sealed and warmed to 80° C. The reaction was stirred for 4 days at 80° C. Then the mixture was purified by silica gel chromatography using a gradient from pure dichloromethane (DCM) to DCM:MeOH 98:2. The target compound was further purified by RP-HPLC to afford the desired compound.

[1170] DLin-MC3-DMA and precursors were synthesized according to procedures described in WO 2010054401 herein incorporated by reference in its entirety. A mixture of dilinoleyl methanol (1.5 g, 2.8 mmol, 1 eq), N,N-dimethylaminobutyric acid (1.5 g, 2.8 mmol, 1 eq), DIPEA (0.73 mL, 4.2 mmol, 1.5 eq) and TBTU(1.35 g, 4.2 mmol, 1.5 eq) in 10 mL of DMF was stirred for 10 h at room temperature. Then the reaction mixture was diluted in ether and washed with water. The organic layer was dried over anhydrous sodium sulfate, filtrated and concentrated under reduced pressure. The crude product was purified by silica gel chromatography using a gradient DCM to DCM:MeOH 98:2. Subsequently the target compound was subjected to an additional RP-HPLC purification which was done using a YMC—Pack C4 column to afford the target compound.

[1171] B. Formulation of Modified RNA Nanoparticles

[1172] Solutions of synthesized lipid, 1,2-distearoyl-3-phosphatidylcholine (DSPC) (Avanti Polar Lipids, Alabaster, AL), cholesterol (Sigma-Aldrich, Taufkirchen, Germany), and α-[3′-(1,2-dimyristoyl-3-propanoxy)-carboxamide-propyl]-ω-methoxy-polyoxyethylene (PEG-c-DOMG) (NOF, Bouwelven, Belgium) were prepared at concentrations of 50 mM in ethanol and stored at −20° C. The lipids were combined to yield molar ratio of 50:10:38.5:1.5 (Lipid: DSPC: Cholesterol: PEG-c-DOMG) and diluted with ethanol to a final lipid concentration of 25 mM. Solutions of modified mRNA at a concentration of 1-2 mg/mL in water were diluted in 50 mM sodium citrate buffer at a pH of 3 to form a stock modified mRNA solution. Formulations of the lipid and modified mRNA were prepared by combining the synthesized lipid solution with the modified mRNA solution at total lipid to modified mRNA weight ratio of 10:1, 15:1, 20:1 and 30:1. The lipid ethanolic solution was rapidly injected into aqueous modified mRNA solution to afford a suspension containing 33% ethanol. The solutions were injected either manually (MI) or by the aid of a syringe pump (SP) (Harvard Pump 33 Dual Syringe Pump Harvard Apparatus Holliston, MA).

[1173] To remove the ethanol and to achieve the buffer exchange, the formulations were dialyzed twice against phosphate buffered saline (PBS), pH 7.4 at volumes 200-times of the primary product using a Slide-A-Lyzer cassettes (Thermo Fisher Scientific Inc. Rockford, IL) with a molecular weight cutoff (MWCO) of 10 kD. The first dialysis was carried at room temperature for 3 hours and then the formulations were dialyzed overnight at 4° C. The resulting nanoparticle suspension was filtered through 0.2 μm sterile filter (Sarstedt, Numbrecht, Germany) into glass vials and sealed with a crimp closure.

[1174] C. Characterization of Formulations

[1175] A Zetasizer Nano ZS (Malvern Instruments Ltd, Malvern, Worcestershire, UK) was used to determine the particle size, the polydispersity index (PDI) and the zeta potential of the modified mRNA nanoparticles in 1×PBS in determining particle size and 15 mM PBS in determining zeta potential.

[1176] Ultraviolet-visible spectroscopy was used to determine the concentration of modified mRNA nanoparticle formulation. 100 μL of the diluted formulation in 1×PBS was added to 900 μL of a 4:1 (v/v) mixture of methanol and chloroform. After mixing, the absorbance spectrum of the solution was recorded between 230 nm and 330 nm on a DU 800 spectrophotometer (Beckman Coulter, Beckman Coulter, Inc., Brea, CA). The modified RNA concentration in the nanoparicle formulation was calculated based on the extinction coefficient of the modified RNA used in the formulation and on the difference between the absorbance at a wavelength of 260 nm and the baseline value at a wavelength of 330 nm.

[1177] QUANT-IT™ RIBOGREEN® RNA assay (Invitrogen Corporation Carlsbad, CA) was used to evaluate the encapsulation of modified RNA by the nanoparticle. The samples were diluted to a concentration of approximately 5 μg/mL in TE buffer (10 mM Tris-HCl, 1 mM EDTA, pH 7.5). 50 μL of the diluted samples were transferred to a polystyrene 96 well plate, then either 50 μL of TE buffer or 50 μL of a 2% Triton X-100 solution was added. The plate was incubated at a temperature of 37° C. for 15 minutes. The RIBOGREEN® reagent was diluted 1:100 in TE buffer, 100 μL of this solution was added to each well. The fluorescence intensity was measured using a fluorescence plate reader (Wallac Victor 1420 Multilablel Counter; Perkin Elmer, Waltham, MA) at an excitation wavelength of ˜480 nm and an emission wavelength of ˜520 nm. The fluorescence values of the reagent blank were subtracted from that of each of the samples and the percentage of free modified RNA was determined by dividing the fluorescence intensity of the intact sample (without addition of Triton X-100) by the fluorescence value of the disrupted sample (caused by the addition of Triton X-100).

[1178] D. In Vitro Incubation

[1179] Human embryonic kidney epithelial (HEK293) and hepatocellular carcinoma epithelial (HepG2) cells (LGC standards GmbH, Wesel, Germany) were seeded on 96-well plates (Greiner Bio-one GmbH, Frickenhausen, Germany) and plates for HEK293 cells were precoated with collagen type1. HEK293 were seeded at a density of 30,000 and HepG2 were seeded at a density of 35,000 cells per well in 100 μl cell culture medium. For HEK293 the cell culture medium was DMEM, 10% FCS, adding 2 mM L-Glutamine, 1 mM Sodiumpyruvate and 1× non-essential amino acids (Biochrom AG, Berlin, Germany) and 1.2 mg/ml Sodiumbicarbonate (Sigma-Aldrich, Munich, Germany) and for HepG2 the culture medium was MEM (Gibco Life Technologies, Darmstadt, Germany), 10% FCS adding 2 mM L-Glutamine, 1 mM Sodiumpyruvate and 1× non-essential amino acids (Biochrom AG, Berlin, Germany. Formulations containing mCherry mRNA (mRNA sequence shown in SEQ ID NO: 31908; polyA tail of approximately 160 nucleotides not shown in sequence; 5′cap, Cap1) were added in quadruplicates directly after seeding the cells and incubated. The mCherry cDNA with the T7 promoter, 5′untranslated region (UTR) and 3′ UTR used in in vitro transcription (IVT) is given in SEQ ID NO: 31909. The mCherry mRNA was modified with a 5meC at each cytosine and pseudouridine replacement at each uridine site.

[1180] Cells were harvested by transferring the culture media supernatants to a 96-well Pro-Bind U-bottom plate (Beckton Dickinson GmbH, Heidelberg, Germany). Cells were trypsinized with 1/2 volume Trypsin/EDTA (Biochrom AG, Berlin, Germany), pooled with respective supernatants and fixed by adding one volume PBS/2% FCS (both Biochrom AG, Berlin, Germany)/0.5% formaldehyde (Merck, Darmstadt, Germany). Samples then were submitted to a flow cytometer measurement with a 532 nm excitation laser and the 610/20 filter for PE-Texas Red in a LSRII cytometer (Beckton Dickinson GmbH, Heidelberg, Germany). The mean fluorescence intensity (MFI) of all events and the standard deviation of four independent wells are presented in for samples analyzed.

### Example 11. Purification of Nanoparticle Formulations

[1181] Nanoparticle formulations of DLin-KC2-DMA and 98N12-5 in HEK293 and HepG2 were tested to determine if the mean fluorescent intensity (MFI) was dependent on the lipid to modified RNA ratio and/or purification. Three formulations of DLin-KC2-DMA and two formulations of 98N12-5 were produced using a syringe pump to the specifications described in Table 12. Purified samples were purified by SEPHADEX™ G-25 DNA grade (GE Healthcare, Sweden). Each formulation before and after purification (aP) was tested at concentration of 250 ng modified RNA per well in a 24 well plate. The percentage of cells that are positive for the marker for FL4 channel (% FL4-positive) when analyzed by the flow cytometer for each formulation and the background sample, and the MFI of the marker for the FL4 channel for each formulation and the background sample are shown in Table 13. The formulations which had been purified had a slightly higher MFI than those formulations tested before purification.

TABLE 12
Formulations

| | | Lipid/RNA | Mean |
|---|---|---|---|
| Formulation # | Lipid | wt/wt | size (nm) |
| NPA-001-1 | DLin-KC2-DMA | 10 | 155 nm |
| | | | PDI: 0.08 |
| NPA-001-1 aP | DLin-KC2-DMA | 10 | 141 nm |
| | | | PDI: 0.14 |
| NPA-002-1 | DLin-KC2-DMA | 15 | 140 nm |
| | | | PDI: 0.11 |
| NPA-002-1 aP | DLin-KC2-DMA | 15 | 125 nm |
| | | | PDI: 0.12 |
| NPA-003-1 | DLin-KC2-DMA | 20 | 114 nm |
| | | | PDI: 0.08 |
| NPA-003-1 aP | DLin-KC2-DMA | 20 | 104 nm |
| | | | PDI: 0.06 |
| NPA-005-1 | 98N12-5 | 15 | 127 nm |
| | | | PDI: 0.12 |
| NPA-005-1 aP | 98N12-5 | 15 | 134 nm |
| | | | PDI: 0.17 |
| NPA-006-1 | 98N12 | 20 | 126 nm |
| | | | PDI: 0.08 |
| NPA-006-1 aP | 98N12 | 20 | 118 nm |
| | | | PDI: 0.13 |

TABLE 13
HEK293 and HepG2, 24-well, 250 ng Modified RNA/well

| | |
|---|---|
| % FL4-positive | FL4 MFI |

| Formulation | HEK293 | HepG2 | HEK293 | HepG2 |
|---|---|---|---|---|
| Untreated | 0.33 | 0.40 | 0.25 | 0.30 |
| NPA-001-1 | 62.42 | 5.68 | 1.49 | 0.41 |
| NPA-001-ap | 87.32 | 9.02 | 3.23 | 0.53 |
| NPA-002-1 | 91.28 | 9.90 | 4.43 | 0.59 |
| NPA-002-ap | 92.68 | 14.02 | 5.07 | 0.90 |
| NPA-003-1 | 87.70 | 11.76 | 6.83 | 0.88 |
| NPA-003-ap | 88.88 | 15.46 | 8.73 | 1.06 |
| NPA-005-1 | 50.60 | 4.75 | 1.83 | 0.46 |
| NPA-005-ap | 38.64 | 5.16 | 1.32 | 0.46 |
| NPA-006-1 | 54.19 | 13.16 | 1.30 | 0.60 |
| NPA-006-ap | 49.97 | 13.74 | 1.27 | 0.61 |

### Example 12. Concentration Response Curve

[1182] Nanoparticle formulations of 98N12-5 (NPA-005) and DLin-KC2-DMA (NPA-003) were tested at varying concentrations to determine the MFI of FL4 or mCherry (mRNA sequence shown in SEQ ID NO: 31908; polyA tail of approximately 160 nucleotides not shown in sequence; 5′cap, Cap1; fully modified with 5-methylcytosine and pseudouridine) over a range of doses. The formulations tested are outlined in Table 14. To determine the optimal concentration of nanoparticle formulations of 98N12-5, varying concentrations of formulated modified RNA (100 ng, 10 ng, 1.0 ng, 0.1 ng and 0.01 ng per well) were tested in a 24-well plate of HEK293, and the results of the FL4 MFI of each dose are shown in Table 15. Likewise, to determine the optimal concentration of nanoparticle formulations of DLin-KC2-DMA, varying concentrations of formulated modified RNA (250 ng 100 ng, 10 ng, 1.0 ng, 0.1 ng and 0.01 ng per well) were tested in a 24-well plate of HEK293, and the results of the FL4 MFI of each dose are shown in Table 16. Nanoparticle formulations of DLin-KC2-DMA were also tested at varying concentrations of formulated modified RNA (250 ng, 100 ng and 30 ng per well) in a 24 well plate of HEK293, and the results of the FL4 MFI of each dose are shown in Table 17. A dose of 1 ng/well for 98N12-5 and a dose of 10 ng/well for DLin-KC2-DMA were found to resemble the FL4 MFI of the background.

[1183] To determine how close the concentrations resembled the background, we utilized a flow cytometer with optimized filter sets for detection of mCherry expression, and were able to obtain results with increased sensitivity relative to background levels. Doses of 25 ng/well, 0.25 ng/well, 0.025 ng/well and 0.0025 ng/well were analyzed for 98N12-5 (NPA-005) and DLin-KC2-DMA (NPA-003) to determine the MFI of mCherry. As shown in Table 18, the concentration of 0.025 ng/well and lesser concentrations are similar to the background MFI level of mCherry which is about 386.125.

TABLE 14
Formulations

| Formulation # | NPA-003 | NPA-005 |
|---|---|---|
| Lipid | DLin-KC2-DMA | 98N12-5 |
| Lipid/RNA | 20 | 15 |
| wt/wt | | |
| Mean size | 114 nm | 106 nm |
| | PDI: 0.08 | PDI: 0.12 |

TABLE 15
HEK293, NPA-005, 24-well, n = 4

| Formulation | FL4 MFI |
|---|---|
| Untreated control | 0.246 |
| NPA-005 100 ng | 2.2175 |
| NPA-005 10 ng | 0.651 |
| NPA-005 1.0 ng | 0.28425 |
| NPA-005 0.1 ng | 0.27675 |
| NPA-005 0.01 ng | 0.2865 |

TABLE 16
HEK293, NPA-003, 24-well, n = 4

| Formulation | FL4 MFI |
|---|---|
| Untreated control | 0.3225 |
| NPA-003 250 ng | 2.9575 |
| NPA-003 100 ng | 1.255 |
| NPA-003 10 ng | 0.40025 |
| NPA-003 1 ng | 0.33025 |
| NPA-003 0.1 ng | 0.34625 |
| NPA-003 0.01 ng | 0.3475 |

TABLE 17
HEK293, NPA-003, 24-well, n = 4

| Formulation | FL4 MFI |
|---|---|
| Untreated control | 0.27425 |
| NPA-003 250 ng | 5.6075 |
| NPA-003 100 ng | 3.7825 |
| NPA-003 30 ng | 1.5525 |

TABLE 18
Concentration and MFI

MFI mCherry

| Formulation | NPA-003 | NPA-005 |
|---|---|---|
| 25 ng/well | 11963.25 | 12256.75 |
| 0.25 ng/well | 1349.75 | 2572.75 |
| 0.025 ng/well | 459.50 | 534.75 |
| 0.0025 ng/well | 310.75 | 471.75 |

### Example 13. Manual Injection and Syringe Pump Formulations

[1184] Two formulations of DLin-KC2-DMA and 98N12-5 were prepared by manual injection (MI) and syringe pump injection (SP) and analyzed along with a background sample to compare the MFI of mCherry (mRNA sequence shown in SEQ ID NO: 31908; polyA tail of approximately 160 nucleotides not shown in sequence; 5′cap, Cap1; fully modified with 5-methylcytosine and pseudouridine) of the different formulations. Table 19 shows that the syringe pump formulations had a higher MFI as compared to the manual injection formulations of the same lipid and lipid/RNA ratio.

TABLE 19
Formulations and MFI

| | | Lipid/ | Mean | Method | |
|---|---|---|---|---|---|
| Formu- | | RNA | size | of formu- | |
| lation # | Lipid | wt/wt | (nm) | lation | MFI |
| Untreated | N/A | N/A | N/A | N/A | 674.67 |
| Control | | | | | |
| NPA-002 | DLin-KC2- | 15 | 140 nm | MI | 10318.25 |
| | DMA | | PDI: 0.11 | | |
| NPA-002-2 | DLin-KC2- | 15 | 105 nm | SP | 37054.75 |
| | DMA | | PDI: 0.04 | | |
| NPA-003 | DLin-KC2- | 20 | 114 nm | MI | 22037.5 |
| | DMA | | PDI: 0.08 | | |
| NPA-003-2 | DLin-KC2- | 20 | 95 nm | SP | 37868.75 |
| | DMA | | PDI: 0.02 | | |
| NPA-005 | 98N12-5 | 15 | 127 nm | MI | 11504.75 |
| | | | PDI: 0.12 | | |
| NPA-005-2 | 98N12-5 | 15 | 106 nm | SP | 9343.75 |
| | | | PDI: 0.07 | | |
| NPA-006 | 98N12-5 | 20 | 126 nm | MI | 11182.25 |
| | | | PDI: 0.08 | | |
| NPA-006-2 | 98N12-5 | 20 | 93 nm | SP | 5167 |
| | | | PDI: 0.08 | | |

### Example 14. Lipid Nanoparticle Formulations

[1185] Formulations of DLin-DMA, DLin-K-DMA, DLin-KC2-DMA, 98N12-5, C12-200 and DLin-MC3-DMA were incubated at a concentration of 60 ng/well or 62.5 ng/well in a plate of HEK293 and 62.5 ng/well in a plate of HepG2 cells for 24 hours to determine the MFI of mCherry (mRNA sequence shown in SEQ ID NO: 31908; polyA tail of approximately 160 nucleotides not shown in sequence; 5′cap, Cap1; fully modified with 5-methylcytosine and pseudouridine) for each formulation. The formulations tested are outlined in Table 20 below. As shown in Table 21 for the 60 ng/well and Tables 22, 23, 24 and 25 for the 62.5 ng/well, the formulation of NPA-003 and NPA-018 have the highest mCherry MFI and the formulations of NPA-008, NPA-010 and NPA-013 are most the similar to the background sample mCherry MFI value.

TABLE 20
Formulations

| | | Lipid/RNA | Mean |
|---|---|---|---|
| Formulation # | Lipid | wt/wt | size (nm) |
| NPA-001 | DLin-KC2-DMA | 10 | 155 nm |
| | | | PDI: 0.08 |
| NPA-002 | DLin-KC2-DMA | 15 | 140 nm |
| | | | PDI: 0.11 |
| NPA-002-2 | DLin-KC2-DMA | 15 | 105 nm |
| | | | PDI: 0.04 |
| NPA-003 | DLin-KC2-DMA | 20 | 114 nm |
| | | | PDI: 0.08 |
| NPA-003-2 | DLin-KC2-DMA | 20 | 95 nm |
| | | | PDI: 0.02 |
| NPA-005 | 98N12-5 | 15 | 127 nm |
| | | | PDI: 0.12 |
| NPA-006 | 98N12-5 | 20 | 126 nm |
| | | | PDI: 0.08 |
| NPA-007 | DLin-DMA | 15 | 148 nm |
| | | | PDI: 0.09 |
| NPA-008 | DLin-K-DMA | 15 | 121 nm |
| | | | PDI: 0.08 |
| NPA-009 | C12-200 | 15 | 138 nm |
| | | | PDI: 0.15 |
| NPA-010 | DLin-MC3-DMA | 15 | 126 nm |
| | | | PDI: 0.09 |
| NPA-012 | DLin-DMA | 20 | 86 nm |
| | | | PDI: 0.08 |
| NPA-013 | DLin-K-DMA | 20 | 104 nm |
| | | | PDI: 0.03 |
| NPA-014 | C12-200 | 20 | 101 nm |
| | | | PDI: 0.06 |
| NPA-015 | DLin-MC3-DMA | 20 | 109 nm |
| | | | PDI: 0.07 |

TABLE 21
HEK293, 96-well, 60 ng Modified RNA/well

| Formulation | MFI mCherry |
|---|---|
| Untreated | 871.81 |
| NPA-001 | 6407.25 |
| NPA-002 | 14995 |
| NPA-003 | 29499.5 |
| NPA-005 | 3762 |
| NPA-006 | 2676 |
| NPA-007 | 9905.5 |
| NPA-008 | 1648.75 |
| NPA-009 | 2348.25 |
| NPA-010 | 4426.75 |
| NPA-012 | 11466 |
| NPA-013 | 2098.25 |
| NPA-014 | 3194.25 |
| NPA-015 | 14524 |

TABLE 22
HEK293, 62.5 ng/well

| Formulation | MFI mCherry |
|---|---|
| Untreated | 871.81 |
| NPA-001 | 6407.25 |
| NPA-002 | 14995 |
| NPA-003 | 29499.5 |
| NPA-005 | 3762 |
| NPA-006 | 2676 |
| NPA-007 | 9905.5 |
| NPA-008 | 1648.75 |
| NPA-009 | 2348.25 |
| NPA-010 | 4426.75 |
| NPA-012 | 11466 |
| NPA-013 | 2098.25 |
| NPA-014 | 3194.25 |
| NPA-015 | 14524 |

TABLE 23
HEK293, 62.5 ng/well

| Formulation | MFI mCherry |
|---|---|
| Untreated | 295 |
| NPA-007 | 3504 |
| NPA-012 | 8286 |
| NPA-017 | 6128 |
| NPA-003-2 | 17528 |
| NPA-018 | 34142 |
| NPA-010 | 1095 |
| NPA-015 | 5859 |
| NPA-019 | 3229 |

TABLE 24
HepG2, 62.5 ng/well

| Formulation | MFI mCherry |
|---|---|
| Untreated | 649.94 |
| NPA-001 | 6006.25 |
| NPA-002 | 8705 |
| NPA-002-2 | 15860.25 |
| NPA-003 | 15059.25 |
| NPA-003-2 | 28881 |
| NPA-005 | 1676 |
| NPA-006 | 1473 |
| NPA-007 | 15678 |
| NPA-008 | 2976.25 |
| NPA-009 | 961.75 |
| NPA-010 | 3301.75 |
| NPA-012 | 18333.25 |
| NPA-013 | 5853 |
| NPA-014 | 2257 |
| NPA-015 | 16225.75 |

TABLE 25
HepG2, 62.5 ng/well

| Formulation | MFI mCherry |
|---|---|
| Untreated control | 656 |
| NPA-007 | 16798 |
| NPA-012 | 21993 |
| NPA-017 | 20377 |
| NPA-003-2 | 35651 |
| NPA-018 | 40154 |
| NPA-010 | 2496 |
| NPA-015 | 19741 |
| NPA-019 | 16373 |

### Example 15. In Vivo Formulation Studies

[1186] Rodents (n=5) are administered intravenously, subcutaneously or intramuscularly a single dose of a formulation containing a modified mRNA and a lipid. The modified mRNA administered to the rodents is selected from G-CSF (mRNA sequence shown in SEQ ID NO: 31907; polyA tail of approximately 160 nucleotides not shown in sequence; 5′cap, Cap1), erythropoietin (EPO) (mRNA sequence shown in SEQ ID NO: 31910; polyA tail of approximately 160 nucleotides not shown in sequence; 5′cap, Cap1), Factor IX (mRNA sequence shown in SEQ ID NO: 31911; polyA tail of approximately 160 nucleotides not shown in sequence; 5′cap, Cap1) or mCherry (mRNA sequence shown in SEQ ID NO: 31908; polyA tail of approximately 160 nucleotides not shown in sequence; 5′cap, Cap1). The erythropoietin cDNA with the T7 promoter, 5′untranslated region (UTR) and 3′ UTR used in in vitro transcription (IVT) is given in SEQ ID NO: 31912 and SEQ ID NO: 31913.

[1187] Each formulation also contains a lipid which is selected from one of DLin-DMA, DLin-K-DMA, DLin-KC2-DMA, 98N12-5, C12-200, DLin-MC3-DMA, reLNP, ATUPLEX®, DACC and DBTC. The rodents are injected with 100 ug, 10 ug or 1 ug of the formulated modified mRNA and samples are collected at specified time intervals.

[1188] Serum from the rodents administered formulations containing human G-CSF modified mRNA are measured by specific G-CSF ELISA and serum from mice administered human factor IX modified RNA is analyzed by specific factor IX ELISA or chromogenic assay. The liver and spleen from the mice administered with mCherry modified mRNA are analyzed by immunohistochemistry (IHC) or fluorescence-activated cell sorting (FACS). As a control, a group of mice are not injected with any formulation and their serum and tissue are collected analyzed by ELISA, FACS and/or IHC.

[1189] A. Time Course

[1190] The rodents are administered formulations containing at least one modified mRNA to study the time course of protein expression for the administered formulation. The rodents are bled at specified time intervals prior to and after administration of the modified mRNA formulations to determine protein expression and complete blood count. Samples are also collected from the site of administration of rodents administered modified mRNA formulations subcutaneously and intramuscularly to determine the protein expression in the tissue.

[1191] B. Dose Response

[1192] The rodents are administered formulations containing at least one modified mRNA to determine dose response of each formulation. The rodents are bled at specified time intervals prior to and after administration of the modified mRNA formulations to determine protein expression and complete blood count. The rodents are also sacrified to analyze the effect of the modified mRNA formulation on the internal tissue. Samples are also collected from the site of administration of rodents administered modified mRNA formulations subcutaneously and intramuscularly to determine the protein expression in the tissue.

[1193] C. Toxicity

[1194] The rodents are administered formulations containing at least one modified mRNA to study toxicity of each formulation. The rodents are bled at specified time intervals prior to and after administration of the modified mRNA formulations to determine protein expression and complete blood count. The rodents are also sacrificed to analyze the effect of the modified mRNA formulation on the internal tissue. Samples are also collected from the site of administration of rodents administered modified mRNA formulations subcutaneously and intramuscularly to determine the protein expression in the tissue.

### Example 16. PLGA Microsphere Formulations

[1195] Optimization of parameters used in the formulation of PLGA microspheres may allow for tunable release rates and high encapsulation efficiencies while maintaining the integrity of the modified RNA encapsulated in the microspheres. Parameters such as, but not limited to, particle size, recovery rates and encapsulation efficiency may be optimized to achieve the optimal formulation.

[1196] A. Synthesis of PLGA microspheres

[1197] Polylacticglycolic acid (PLGA) microspheres were synthesized using the water/oil/water double emulsification methods known in the art using PLGA (Lactel, Cat #B6010-2, inherent viscosity 0.55-0.75, 50:50 LA:GA), polyvinylalcohol (PVA) (Sigma, Cat #348406-25G, MW 13-23 k) dichloromethane and water. Briefly, 0.1 ml of water (W1) was added to 2 ml of PLGA dissolved in dichloromethane (DCM) (01) at concentrations ranging from 50-200 mg/ml of PLGA. The W1/O1 emulsion was homogenized (IKA Ultra-Turrax Homogenizer, T18) for 30 seconds at speed 4 (˜15,000 rpm). The W1/01 emulsion was then added to 100 to 200 ml of 0.3 to 1% PVA (W2) and homogenized for 1 minute at varied speeds. Formulations were left to stir for 3 hours and then washed by centrifugation (20-25 min, 4,000 rpm, 4° C.). The supernatant was discarded and the PLGA pellets were resuspended in 5-10 ml of water, which was repeated 2×. Average particle size (represents 20-30 particles) for each formulation was determined by microscopy after washing. Table 26 shows that an increase in the PLGA concentration led to larger sized microspheres. A PLGA concentration of 200 mg/mL gave an average particle size of 14.8 μm, 100 mg/mL was 8.7 μm, and 50 mg/mL of PLGA gave an average particle size of 4.0 μm.

TABLE 26
Varied PLGA Concentration

| | | PLGA | | PVA | | |
|---|---|---|---|---|---|---|
| | O1 | Concen- | W2 | Concen- | | Average |
| Sample | Volume | tration | Volume | tration | | Size |
| ID | (mL) | (mg/mL) | (mL) | (%) | Speed | (μm) |
| 1 | 2 | 200 | 100 | 0.3 | 5 | 14.8 |
| 2 | 2 | 100 | 100 | 0.3 | 5 | 8.7 |
| 3 | 2 | 50 | 100 | 0.3 | 5 | 4.0 |

[1198] Table 27 shows that decreasing the homogenization speed from 5 (˜20,000 rpm) to speed 4 (˜15,000 rpm) led to an increase in particle size from 14.8 μm to 29.7 μm.

TABLE 27
Varied Homogenization Speed

| | | PLGA | | PVA | | |
|---|---|---|---|---|---|---|
| | O1 | Concen- | W2 | Concen- | | Average |
| Sample | Volume | tration | Volume | tration | | Size |
| ID | (mL) | (mg/mL) | (mL) | (%) | Speed | (μm) |
| 1 | 2 | 200 | 100 | 0.3 | 5 | 14.8 |
| 4 | 2 | 200 | 100 | 0.3 | 4 | 29.7 |

[1199] Table 28 shows that increasing the W2 volume (i.e. increasing the ratio of W2:O1 from 50:1 to 100:1), decreased average particle size slightly. Altering the PVA concentration from 0.3 to 1 wt % had little impact on PLGA microsphere size.

TABLE 28
Varied W2 Volume and Concentration

| | | PLGA | | PVA | | |
|---|---|---|---|---|---|---|
| | O1 | Concen- | W2 | Concen- | | Average |
| Sample | Volume | tration | Volume | tration | | Size |
| ID | (mL) | (mg/mL) | (mL) | (%) | Speed | (μm) |
| 1 | 2 | 200 | 100 | 0.3 | 5 | 14.8 |
| 5 | 2 | 200 | 200 | 0.3 | 5 | 11.7 |
| 6 | 2 | 200 | 190 | 0.3 | 5 | 11.4 |
| 7 | 2 | 200 | 190 | 1.0 | 5 | 12.3 |

[1200] B. Encapsulation of modified mRNA

[1201] Modified G-CSF mRNA (mRNA sequence shown in SEQ ID NO: 31907; polyA tail of approximately 160 nucleotides not shown in sequence; 5′cap, Cap1; fully modified with 5-methylcytosine and pseudouridine) was dissolved in water at a concentration of 2 mg/ml (W3). Three batches of PLGA microsphere formulations were made as described above with the following parameters: 0.1 ml of W3 at 2 mg/ml, 1.6 ml of O1 at 200 mg/ml, 160 ml of W2 at 1%, and homogenized at a speed of 4 for the first emulsion (W3/01) and homogenized at a speed of 5 for the second emulstion (W3/01/W2). After washing by centrifugation, the formulations were frozen in liquid nitrogen and then lyophilized for 3 days. To test the encapsulation efficiency of the formulations, the lyophilized material was deformulated in DCM for 6 hours followed by an overnight extraction in water. The modified RNA concentration in the samples was then determined by OD260. Encapsulation efficiency was calculated by taking the actual amount of modified RNA and dividing by the starting amount of modified RNA. In the three batches tested, there was an encapsulation efficiency of 59.2, 49.8 and 61.3.

[1202] C. Integrity of Modified mRNA Encapsulated in PLGA Microspheres

[1203] Modified Factor IX mRNA (mRNA sequence shown in SEQ ID NO: 31911; polyA tail of approximately 160 nucleotides not shown in sequence; 5′cap, Cap1; fully modified with 5-methylcytosine and pseudouridine) was dissolved in water at varied concentrations (W4) to vary the weight percent loading in the formulation (mg modified RNA/mg PLGA*100) and to determine encapsulation efficiency. The parameters in Table 29 were used to make four different batches of PLGA microsphere formulations with a homogenization speed of 4 for the first emulstion (W4/01) and a homogenization speed of 5 for the second emulsion (W4/O1/W2).

TABLE 29
Factor IX PLGA Microsphere Formulation Parameters

| | W4 | Factor | Factor | O1 | PLGA | W2 | PVA | Weight % |
|---|---|---|---|---|---|---|---|---|
| | | | IX | | | | | |
| | Vol | IX Conc | Amnt | Vol | Conc | Vol | Conc | (wt %) |
| ID | (uL) | (mg/ml) | (ug) | (ml) | (mg/ml) | (ml) | (%) | Loading |
| A | 100 | 2.0 | 200.0 | 2.0 | 200 | 200 | 1.0 | 0.05 |
| B | 100 | 4.0 | 400.0 | 2.0 | 200 | 200 | 1.0 | 0.10 |
| C | 400 | 2.0 | 800.0 | 2.0 | 200 | 200 | 1.0 | 0.20 |
| D | 400 | 4.0 | 1600.0 | 2.0 | 200 | 200 | 1.0 | 0.40 |

[1204] After lyophilization, PLGA microspheres were weighed out in 2 ml eppendorf tubes to correspond to ˜10 ug of modified RNA. Lyophilization was found to not destroy the overall structure of the PLGA microspheres. To increase weight percent loading (wt %) for the PLGA microspheres, increasing amounts of modified RNA were added to the samples. PLGA microspheres were deformulated by adding 1.0 ml of DCM to each tube and then shaking the samples for 6 hours. For modified RNA extraction, 0.5 ml of water was added to each sample and the samples were shaken overnight before the concentration of modified RNA in the samples was determined by OD260. To determine the recovery of the extraction process, unformulated Factor IX modified RNA (mRNA sequence shown in SEQ ID NO: 31911; polyA tail of approximately 160 nucleotides not shown in sequence; 5′cap, Cap1; fully modified with 5-methylcytosine and pseudouridine) (deformulation control) was spiked into DCM and was subjected to the deformulation process. Table 30 shows the loading and encapsulation efficiency for the samples. All encapsulation efficiency samples were normalized to the deformulation control.

TABLE 30
Weight Percent Loading and Encapsulation Efficiency

| | Theoretical | Actual | |
|---|---|---|---|
| | modified RNA | modified RNA | Encapsulation |
| ID | loading (wt %) | loading (wt %) | Efficiency (%) |
| A | 0.05 | 0.06 | 97.1 |
| B | 0.10 | 0.10 | 85.7 |
| C | 0.20 | 0.18 | 77.6 |
| D | 0.40 | 0.31 | 68.1 |
| Control | — | — | 100.0 |

[1205] D. Release Study of Modified mRNA Encapsulated in PLGA Microspheres

[1206] PLGA microspheres formulated with Factor IX modified RNA (mRNA sequence shown in SEQ ID NO: 31911; polyA tail of approximately 160 nucleotides not shown in sequence; 5′cap, Cap1; fully modified with 5-methylcytosine and pseudouridine) were deformulated as described above and the integrity of the extracted modified RNA was determined by automated electrophoresis (Bio-Rad Experion). The extracted modified mRNA was compared against unformulated modified mRNA and the deformulation control in order to test the integrity of the encapsulated modified mRNA. As shown in FIG. 4, the majority of modRNA was intact for batch ID A, B, C and D, for the deformulated control (Deform control) and the unformulated control (Unform control).

[1207] E. Protein Expression of Modified mRNA Encapsulated in PLGA Microspheres

[1208] PLGA microspheres formulated with Factor IX modified RNA (mRNA sequence shown in SEQ ID NO: 31911; polyA tail of approximately 160 nucleotides not shown in sequence; 5′cap, Cap1; fully modified with 5-methylcytosine and pseudouridine) were deformulated as described above and the protein expression of the extracted modified RNA was determined by an in vitro transfection assay. HEK293 cells were reverse transfected with 250 ng of Factor IX modified RNA complexed with RNAiMAX (Invitrogen) in triplicate.

[1209] Factor IX modified RNA was diluted in nuclease-free water to a concentration of 25 ng/μl and RNAiMAX was diluted 13.3× in serum-free EMEM. Equal volumes of diluted modified RNA and diluted RNAiMAX were mixed together and were allowed to stand for 20 to 30 minutes at room temperature. Subsequently, 20 μl of the transfection mix containing 250 ng of Factor IX modified RNA was added to 80 μl of a cell suspension containing 30,000 cells. Cells were then incubated for 16 h in a humidified 37° C./5% CO2 cell culture incubator before harvesting the cell culture supernatant. Factor IX protein expression in the cell supernatant was analyzed by an ELISA kit specific for Factor IX (Molecular Innovations, Cat #HFIXKT-TOT) and the protein expression is shown in Table 31 and FIG. 5. In all PLGA microsphere batches tested, Factor IX modified RNA remained active and expressed Factor IX protein after formulation in PLGA microspheres and subsequent deformulation.

TABLE 31
Protein Expression

| | Factor IX Protein |
|---|---|
| Sample | Expression (ng/ml) |
| Batch A | 0.83 |
| Batch B | 1.83 |
| Batch C | 1.54 |
| Batch D | 2.52 |
| Deformulated Control | 4.34 |
| Unformulated Control | 3.35 |

[1210] F. Release Study of Modified mRNA Encapsulated in PLGA Microspheres

[1211] PLGA micropsheres formulated with Factor IX modified RNA (mRNA sequence shown in SEQ ID NO: 31911; polyA tail of approximately 160 nucleotides not shown in sequence; 5′cap, Cap1; fully modified with 5-methylcytosine and pseudouridine) were resuspended in water to a PLGA microsphere concentration of 24 mg/ml. After resuspension, 150 ul of the PLGA microsphere suspension was aliquoted into eppendorf tubes. Samples were kept incubating and shaking at 37° C. during the course of the study. Triplicate samples were pulled at 0.2, 1, 2, 8, 14, and 21 days. To determine the amount of modified RNA released from the PLGA microspheres, samples were centrifuged, the supernatant was removed, and the modified RNA concentration in the supernatant was determined by OD 260. The percent release, shown in Table 32, was calculated based on the total amount of modified RNA in each sample. After 31 days, 96% of the Factor IX modified RNA was released from the PLGA microsphere formulations.

TABLE 32
Percent Release

| Time (days) | % Release |
|---|---|
| 0 | 0.0 |
| 0.2 | 27.0 |
| 1 | 37.7 |
| 2 | 45.3 |
| 4 | 50.9 |
| 8 | 57.0 |
| 14 | 61.8 |
| 21 | 75.5 |
| 31 | 96.4 |

[1212] G. Particle Size Reproducibility of PLGA Microspheres

[1213] Three batches of Factor IX modified RNA (mRNA sequence shown in SEQ ID NO: 31911; polyA tail of approximately 160 nucleotides not shown in sequence; 5′cap, Cap1; fully modified with 5-methylcytosine and pseudouridine) PLGA microspheres were made using the same conditions described for Batch D, shown in Table 29, (0.4 ml of W4 at 4 mg/ml, 2.0 ml of O1 at 200 mg/ml, 200 ml of W2 at 1%, and homogenized at a speed of 5 for the W4/O1/W2 emulsion). To improve the homogeneity of the PLGA microsphere suspension, filtration was incorporated prior to centrifugation. After stirring for 3 hours and before centrifuging, all formulated material was passed through a 100 μm nylon mesh strainer (Fisherbrand Cell Strainer, Cat #22-363-549) to remove larger aggregates. After washing and resuspension with water, 100-200 μl of a PLGA microspheres sample was used to measure particle size of the formulations by laser diffraction (Malvern Mastersizer2000). The particle size of the samples is shown in Table 33.

TABLE 33
Particle Size Summary

| | | | | Volume | |
|---|---|---|---|---|---|
| | D10 | D50 | D90 | Weighted | |
| ID | (μm) | (μm) | (μm) | Mean (um) | Filtration |
| Control | 19.2 | 62.5 | 722.4 | 223.1 | No |
| A | 9.8 | 31.6 | 65.5 | 35.2 | Yes |
| B | 10.5 | 32.3 | 66.9 | 36.1 | Yes |
| C | 10.8 | 35.7 | 79.8 | 41.4 | Yes |

[1214] Results of the 3 PLGA microsphere batches using filtration were compared to a PLGA microsphere batch made under the same conditions without filtration. The inclusion of a filtration step before washing reduced the mean particle size and demonstrated a consistent particle size distribution between 3 PLGA microsphere batches.

[1215] H. Serum Stability of Factor IX PLGA Microspheres

[1216] Factor IX mRNA RNA (mRNA sequence shown in SEQ ID NO: 31911; polyA tail of approximately 160 nucleotides not shown in sequence; 5′cap, Cap1; fully modified with 5-methylcytosine and pseudouridine) in buffer (TE) or 90% serum (Se), or Factor IX mRNA in PLGA in buffer, 90% serum or 1% serum was incubated in buffer, 90% serum or 1% serum at an mRNA concentration of 50 ng/ul in a total volume of 70 ul. The samples were removed at 0, 30, 60 or 120 minutes. RNases were inactivated with proteinase K digestion for 20 minutes at 55° C. by adding 25 ul of 4× proteinase K buffer (0.4 ml 1M TRIS-HCl pH 7.5, 0.1 ml 0.5M EDTA, 0.12 ml 5M NaCl, and 0.4 ml 10% SDS) and 8 ul of proteinase K at 20 mg/ml. The Factor IX mRNA was precipitated (add 250 ul 95% ethanol for 1 hour, centrifuge for 10 min at 13 k rpm and remove supernatant, add 200 ul 70% ethanol to the pellet, centrifuge again for 5 min at 13 k rpm and remove supernatant and resuspend the pellet in 70 ul water) or extracted from PLGA microspheres (centrifuge 5 min at 13 k rpm and remove supernatant, wash pellet with 1 ml water, centrifuge 5 min at 13 k rpm and remove supernatant, add 280 ul dichloromethane to the pellet and shake for 15 minutes, add 70 ul water and then shake for 2 hours and remove the aqueous phase) before being analyzed by bioanalyzer. PLGA microspheres protect Factor IX modified mRNA from degradation in 90% and 1% serum over 2 hours. Factor IX modified mRNA completely degrades in 90% serum at the initial time point.

### Example 17. Lipid Nanoparticle In Vivo Studies

[1217] G-CSF (cDNA with the T7 promoter, 5′ Untranslated region (UTR) and 3′UTR used in in vitro transcription is given in SEQ ID NO: 31906. mRNA sequence shown in SEQ ID NO: 31907; polyA tail of approximately 160 nucleotides not shown in sequence; 5′cap, Cap 1; fully modified with 5-methylcytosine and pseudouridine) and Factor IX (cDNA with the T7 promoter, 5′ UTR and 3′UTR used in in vitro transcription is given in SEQ ID NO: 31914. mRNA sequence shown in SEQ ID NO: 31911; polyA tail of approximately 160 nucleotides not shown in sequence; 5′cap, Cap 1; fully modified with 5-methylcytosine and pseudouridine) modified mRNA were formulated as lipid nanoparticles (LNPs) using the syringe pump method. The LNPs were formulated at a 20:1 weight ratio of total lipid to modified mRNA with a final lipid molar ratio of 50:10:38.5:1.5 (DLin-KC2-DMA: DSPC: Cholesterol: PEG-c-DOMG). Formulations, listed in Table 34, were characterized by particle size, zeta potential, and encapsulation.

TABLE 34
Formulations

| Formulation # | NPA-029-1 | NPA-030-1 |
|---|---|---|
| Modified mRNA | Factor IX | G-CSF |
| Mean size | 91 nm | 106 nm |
| | PDI: 0.04 | PDI: 0.06 |
| Zeta at pH 7.4 | 1.8 mV | 0.9 mV |
| Encaps. | 92% | 100% |
| (RiboGr) | | |

[1218] LNP formulations were administered to mice (n=5) intravenously at a modified mRNA dose of 100, 10, or 1 ug. Mice were sacrificed at 8 hrs after dosing. Serum was collected by cardiac puncture from mice that were administered with G-CSF or Factor IX modified mRNA formulations. Protein expression was determined by ELISA.

[1219] There was no significant body weight loss (<5%) in the G-CSF or Factor IX dose groups. Protein expression for G-CSF or Factor IX dose groups was determined by ELISA from a standard curve. Serum samples were diluted (about 20-2500× for G-CSF and about 10-250× for Factor IX) to ensure samples were within the linear range of the standard curve. As shown in Table 35, G-CSF protein expression determined by ELISA was approximately 17, 1200, and 4700 ng/ml for the 1, 10, and 100 ug dose groups, respectively. As shown in Table 36, Factor IX protein expression determined by ELISA was approximately 36, 380, and 3000-11000 ng/ml for the 1, 10, and 100 ug dose groups, respectively.

TABLE 35
G-CSF Protein Expression

| Dose (ug) | Conc (ng/ml) | Dilution Factor | Sample Volume |
|---|---|---|---|
| 1 | 17.73 | 20x | 5 ul |
| 10 | 1204.82 | 2500x | 0.04 ul |
| 100 | 4722.20 | 2500x | 0.04 ul |

TABLE 36
Factor IX Protein Expression

| Dose (ug) | Conc (ng/ml) | Dilution Factor | Sample Volume |
|---|---|---|---|
| 1 | 36.05 | 10x | 5 ul |
| 10 | 383.04 | 10x | 5 ul |
| 100* | 3247.75 | 50x | 1 ul |
| 100* | 11177.20 | 250x | 0.2 ul |

[1220] As shown in Table 37, the LNP formulations described above have about a 10,000-100,000-fold increase in protein production compared to an administration of an intravenous (IV)-lipoplex formulation for the same dosage of modified mRNA and intramuscular (IM) or subcutaneous (SC) administration of the same dose of modified mRNA in saline. As used in Table 37, the symbol “˜” means about.

TABLE 37
Protein Production

| | | Serum Concentration (pg/ml) |
|---|---|---|
| G-CSF | Dose (ug) | 8-12 hours after administration |
| IM | 100 | ~20-80 |
| SC | 100 | ~10-40 |
| IV (Lipoplex) | 100 | ~30 |
| IV (LNP) | 100 | ~5,000,000 |
| IV (LNP) | 10 | ~1,000,000 |
| IV (LNP) | 1 | ~20,000 |

| | | Serum Concentration (ng/ml) | |
|---|---|---|---|
| Factor IX | Dose (ug) | 8-12 hours after administration | |
| IM | 2 x 100 | ~1.6 | ng/ml |
| IV (LNP) | 100 | ~3,000-10,000 | ng/ml |
| IV (LNP) | 10 | ~400 | ng/ml |
| IV (LNP) | 1 | ~40 | ng/ml |

### Materials and Methods for Examples 18-23

[1221] G-CSF (mRNA sequence shown in SEQ ID NO: 31907; polyA tail of approximately 160 nucleotides not shown in sequence; 5′cap, Cap 1; fully modified with 5-methylcytosine and pseudouridine) and EPO (mRNA sequence shown in SEQ ID NO: 31910; polyA tail of approximately 160 nucleotides not shown in sequence; 5′cap, Cap 1; fully modified with 5-methylcytosine and pseudouridine) modified mRNA were formulated as lipid nanoparticles (LNPs) using the syringe pump method. The LNPs were formulated at a 20:1 weight ratio of total lipid to modified mRNA with a final lipid molar ratio of 50:10:38.5:1.5 (DLin-KC2-DMA: DSPC: Cholesterol: PEG-c-DOMG). Formulations, listed in Table 38, were characterized by particle size, zeta potential, and encapsulation.

TABLE 38
Formulations

| Formulation # | NPA-030-2 | NPA-060-1 |
|---|---|---|
| Modified mRNA | G-CSF | EPO |
| Mean size | 84 nm | 85 nm |
| | PDI: 0.04 | PDI: 0.03 |
| Zeta at pH 7.4 | 0.8 mV | 1.5 mV |
| Encapsulation | 95% | 98% |
| (RiboGreen) | | |

### Example 18. Lipid Nanoparticle In Vivo Studies with Modified mRNA

[1222] LNP formulations, shown in Table 38 (above), were administered to rats (n=5) intravenously (IV), intramuscularly (IM) or subcutaneously (SC) at a single modified mRNA dose of 0.05 mg/kg. A control group of rats (n=4) was untreated. The rats were bled at 2 hours, 8 hours, 24 hours, 48 hours and 96 hours and after they were administered with G-CSF or EPO modified mRNA formulations to determine protein expression using ELISA. The rats administered EPO modified mRNA intravenously were also bled at 7 days.

[1223] As shown in Table 39, EPO protein expression in the rats intravenously administered modified EPO mRNA was detectable out to 5 days. G-CSF in the rats intravenously administered modified G-CSF mRNA was detectable to 7 days. Subcutaneous and intramuscular administration of EPO modified mRNA was detectable to at least 24 hours and G-CSF modified mRNA was detectable to at least 8 hours. In Table 39, “OSC” refers to values that were outside the standard curve and “NT” means not tested.

TABLE 39
G-CSF and EPO Protein Expression

| | | | EPO Serum | G-CSF Serum |
|---|---|---|---|---|
| | | | Concentration | Concentration |
| Route | Time | | (pg/ml) | (pg/ml) |
| IV | 2 | hours | 36,981.0 | 31,331.9 |
| IV | 8 | hours | 62,053.3 | 70,532.4 |
| IV | 24 | hours | 42,077.0 | 5,738.6 |
| IV | 48 | hours | 5,561.5 | 233.8 |
| IV | 5 | days | 0.0 | 60.4 |
| IV | 7 | days | 0.0 | NT |
| IM | 2 | hours | 1395.4 | 1620.4 |
| IM | 8 | hours | 8974.6 | 7910.4 |
| IM | 24 | hours | 4678.3 | 893.3 |
| IM | 48 | hours | NT | OSC |
| IM | 5 | days | NT | OSC |
| SC | 2 | hours | 386.2 | 80.3 |
| SC | 8 | hours | 985.6 | 164.2 |
| SC | 24 | hours | 544.2 | OSC |
| SC | 48 | hours | NT | OSC |
| SC | 5 | days | NT | OSC |

| | | | |
|---|---|---|---|
| Untreated | All bleeds | 0 | 0 |

### Example 19. Time Course In Vivo Study

[1224] LNP formulations, shown in Table 38 (above), were administered to mice (n=5) intravenously (IV) at a single modified mRNA dose of 0.5, 0.05 or 0.005 mg/kg. The mice were bled at 8 hours, 24 hours, 72 hours and 6 days after they were administered with G-CSF or EPO modified mRNA formulations to determine protein expression using ELISA.

[1225] As shown in Table 40, EPO and G-CSF protein expression in the mice administered with the modified mRNA intravenously was detectable out to 72 hours for the mice dosed with 0.005 mg/kg and 0.05 mg/kg of modified mRNA and out to 6 days for the mice administered the EPO modified mRNA. In Table 40, “>” means greater than and “ND” means not detected.

TABLE 40
Protein Expression

| | | | EPO Serum | G-CSF Serum |
|---|---|---|---|---|
| Dose | | | Concentration | Concentration |
| (mg/kg) | Time | | (pg/ml) | (pg/ml) |
| 0.005 | 8 | hours | 12,508.3 | 11,550.6 |
| 0.005 | 24 | hours | 6,803.0 | 5,068.9 |
| 0.005 | 72 | hours | ND | ND |
| 0.005 | 6 | days | ND | ND |
| 0.05 | 8 | hours | 92,139.9 | 462,312.5 |
| 0.05 | 24 | hours | 54,389.4 | 80,903.8 |
| 0.05 | 72 | hours | ND | ND |
| 0.05 | 6 | days | ND | ND |
| 0.5 | 8 | hours | 498,515.3 | >1,250,000 |
| 0.5 | 24 | hours | 160,566.3 | 495,812.5 |
| 0.5 | 72 | hours | 3,492.5 | 1,325.6 |
| 0.5 | 6 | days | 21.2 | ND |

### Example 20. LNP Formulations In Vivo Study in Rodents

[1226] A. LNP Formulations in Mice

[1227] LNP formulations, shown in Table 38 (above), were administered to mice (n=4) intravenously (IV) at a single modified mRNA dose 0.05 mg/kg or 0.005 mg/kg. There was also 3 control groups of mice (n=4) that were untreated. The mice were bled at 2 hours, 8 hours, 24 hours, 48 hours and 72 hours after they were administered with G-CSF or EPO modified mRNA formulations to determine the protein expression. Protein expression of G-CSF and EPO were determined using ELISA.

[1228] As shown in Table 41, EPO and G-CSF protein expression in the mice was detectable at least out to 48 hours for the mice that received a dose of 0.005 mg/kg modified RNA and 72 hours for the mice that received a dose of 0.05 mg/kg modified RNA. In Table 41, “OSC” refers to values that were outside the standard curve and “NT” means not tested.

TABLE 41
Protein Expression in Mice

| | | | EPO Serum | G-CSF Serum |
|---|---|---|---|---|
| Dose | | | Concentration | Concentration |
| (mg/kg) | Time | | (pg/ml) | (pg/ml) |
| 0.005 | 2 | hours | OSC | 3,447.8 |
| 0.005 | 8 | hours | 1,632.8 | 11,454.0 |
| 0.005 | 24 | hours | 1,141.0 | 4,960.2 |
| 0.005 | 48 | hours | 137.4 | 686.4 |
| 0.005 | 72 | hours | 0 | NT |
| 0.05 | 2 | hours | 10,027.3 | 20,951.4 |
| 0.05 | 8 | hours | 56,547.2 | 70,012.8 |
| 0.05 | 24 | hours | 25,027.3 | 19,356.2 |
| 0.05 | 48 | hours | 1,432.3 | 1,963.0 |
| 0.05 | 72 | hours | 82.2 | 47.3 |

[1229] B. LNP Formulations in Rodents

[1230] LNP formulations, shown in Table 38 (above), are administered to rats (n=4) intravenously (IV) at a single modified mRNA dose 0.05 mg/kg. There is also a control group of rats (n=4) that are untreated. The rats are bled at 2 hours, 8 hours, 24 hours, 48 hours, 72 hours, 7 days and 14 days after they were administered with G-CSF or EPO modified mRNA formulations to determine the protein expression. Protein expression of G-CSF and EPO are determined using ELISA.

### Example 21. Early Time Course Study of LNPs

[1231] LNP formulations, shown in Table 38 (above), are administered to mammals intravenously (IV), intramuscularly (IM) or subcutaneously (SC) at a single modified mRNA dose of 0.5 mg/kg, 0.05 mg/kg or 0.005 mg/kg. A control group of mammals are not treated. The mammals are bled at 5 minutes, 10 minutes, 20 minutes, 30 minutes, 45 minutes, 1 hour, 1.5 hours and/or 2 hours after they are administered with the modified mRNA LNP formulations to determine protein expression using ELISA. The mammals are also bled to determine the complete blood count such as the granulocyte levels and red blood cell count.

### Example 22. Non-Human Primate In Vivo Study

[1232] LNP formulations, shown in Table 38 (above), were administered to non-human primates (NHP) (cynomolgus monkey) (n=2) as a bolus intravenous injection (IV) over approximately 30 seconds using a hypodermic needle, which may be attached to a syringe/abbocath or butterfly if needed. The NHP were administered a single modified mRNA IV dose of 0.05 mg/kg of EPO or G-CSF or 0.005 mg/kg of EPO in a dose volume of 0.5 mL/kg. The NHPs were bled 5-6 days before dosing with the modified mRNA LNP formulations to determine protein expression in the serum and a baseline complete blood count. After administration with the modified mRNA formulation the NHP were bled at 8, 24, 48 and 72 hours to determined protein expression. At 24 and 72 hours after administration the complete blood count of the NHP was also determined. Protein expression of G-CSF and EPO was determined by ELISA. Urine from the NHPs was collected over the course of the entire experiment and analyzed to evaluate clinical safety. Samples were collected from the NHPs after they were administered with G-CSF or EPO modified mRNA formulations to determine protein expression using ELISA. Clinical chemistry, hematology, urinalysis and cytokines of the non-human primates were also analyzed.

[1233] As shown in Table 42, EPO protein expression in the NHPs administered 0.05 mg/kg is detectable out to 72 hours and the 0.005 mg/kg dosing of the EPO formulation is detectable out to 48 hours. In Table 42, the “<” means less than a given value. G-CSF protein expression was seen out to 24 hours after administration with the modified mRNA formulation. Preliminarily, there was an increase in granulocytes and reticulocytes levels seen in the NHP after administration with the modified mRNA formulations.

TABLE 42
Protein Expression in Non-Human Primates

| | | | Female NHP Serum | Male NHP Serum | Average Serum |
|---|---|---|---|---|---|
| Modified | Dose | | Concentration | Concentration | Conentration |
| mRNA | (mg/kg) | Time | (pg/ml) | (pg/ml) | (pg/ml) |
| G-CSF | 0.05 | Pre-bleed | 0 | 0 | 0 |

| | | | | |
|---|---|---|---|---|
| 8 | hours | 3289 | 1722 | 2,506 |
| 24 | hours | 722 | 307 | 515 |
| 48 | hours | 0 | 0 | 0 |
| 72 | hours | 0 | 0 | 0 |

| | | | | | |
|---|---|---|---|---|---|
| EPO | 0.05 | Pre-bleed | 0 | 0 | 0 |

| | | | | |
|---|---|---|---|---|
| 8 | hours | 19.858 | 7,072 | 13,465 |
| 24 | hours | 18,178 | 4,913 | 11,546 |
| 48 | hours | 5.291 | 498 | 2,895 |
| 72 | hours | 744 | 60 | 402 |

| | | | | | |
|---|---|---|---|---|---|
| EPO | 0.005 | Pre-bleed | 0 | 0 | 0 |

| | | | | |
|---|---|---|---|---|
| 8 | hours | 523 | 250 | 387 |
| 24 | hours | 302 | 113 | 208 |
| 48 | hours | <7.8 | <7.8 | <7.8 |
| 72 | hours | 0 | 0 | 0 |

### Example 23. Non-Human Primate In Vivo Study for G-CSF and EPO

[1234] LNP formulations, shown in Table 38 (above), were administered to non-human primates (NHP) (cynomolgus monkey) (n=2) as intravenous injection (IV). The NHP were administered a single modified mRNA IV dose of 0.5 mg/kg, 0.05 mg/kg or 0.005 mg/kg of G-CSF or EPO in a dose volume of 0.5 mL/kg. The NHPs were bled before dosing with the modified mRNA LNP formulations to determine protein expression in the serum and a baseline complete blood count. After administration with the G-CSF modified mRNA formulation the NHP were bled at 8, 24, 48 and 72 hours to determined protein expression. After administration with the EPO modified mRNA formulation the NP were bled at 8, 24, 48, 72 hours and 7 days to determined protein expression.

[1235] Samples collected from the NHPs after they were administered with G-CSF or EPO modified mRNA formulations were analyzed by ELISA to determine protein expression. Neutrophil and reticulocyte count was also determined pre-dose, 24 hours, 3 days, 7 days, 14 days and 18 days after administration of the modified G-CSF or EPO formulation.

[1236] As shown in Table 43, G-CSF protein expression was not detected beyond 72 hours. In Table 43, “<39” refers to a value below the lower limit of detection of 39 μg/ml.

TABLE 43
G-CSF Protein Expression

| | | | Female NHP Serum | Male NHP Serum |
|---|---|---|---|---|
| Modified | Dose | | G-CSF Concentration | G-CSF Concentration |
| mRNA | (mg/kg) | Time | (pg/ml) | (pg/ml) |
| G-CSF | 0.5 | Pre-bleed | <39 | <39 |

| | | | |
|---|---|---|---|
| 8 | hours | 43,525 | 43,594 |
| 24 | hours | 11,374 | 3,628 |
| 48 | hours | 1,100 | 833 |
| 72 | hours | <39 | 306 |

| | | | | |
|---|---|---|---|---|
| G-CSF | 0.05 | Pre-bleed | <39 | <39 |

| | | | |
|---|---|---|---|
| 8 | hours | 3,289 | 1,722 |
| 24 | hours | 722 | 307 |
| 48 | hours | <39 | <39 |
| 72 | hours | <39 | <39 |

| | | | | |
|---|---|---|---|---|
| G-CSF | 0.005 | Pre-bleed | <39 | <39 |

| | | | |
|---|---|---|---|
| 8 | hours | 559 | 700 |
| 24 | hours | 155 | <39 |
| 48 | hours | <39 | <39 |
| 72 | hours | <39 | <39 |

[1237] As shown in Table 44, EPO protein expression was not detected beyond 7 days. In Table 44, “<7.8” refers to a value below the lower limit of detection of 7.8 μg/ml.

TABLE 44
EPO Protein Expression

| | | | Female NHP Serum | Male NHP Serum |
|---|---|---|---|---|
| Modified | Dose | | EPO Concentration | EPO Concentration |
| mRNA | (mg/kg) | Time | (pg/ml) | (pg/ml) |
| EPO | 0.5 | Pre-bleed | <7.8 | <7.8 |

| | | | |
|---|---|---|---|
| 8 | hours | 158,771 | 119,086 |
| 24 | hours | 133,978 | 85,825 |
| 48 | hours | 45,250 | 64,793 |
| 72 | hours | 15,097 | 20,407 |
| 7 | days | <7.8 | <7.8 |

| | | | | |
|---|---|---|---|---|
| EPO | 0.05 | Pre-bleed | <7.8 | <7.8 |

| | | | |
|---|---|---|---|
| 8 | hours | 19,858 | 7,072 |
| 24 | hours | 18,187 | 4,913 |
| 48 | hours | 5,291 | 498 |
| 72 | hours | 744 | 60 |
| 7 | days | <7.8 | <7.8 |

| | | | | |
|---|---|---|---|---|
| EPO | 0.005 | Pre-bleed | <7.8 | <7.8 |

| | | | |
|---|---|---|---|
| 8 | hours | 523 | 250 |
| 24 | hours | 302 | 113 |
| 48 | hours | 11 | 29 |
| 72 | hours | <7.8 | <7.8 |
| 7 | days | <7.8 | <7.8 |

[1238] As shown in Table 45, there was an increase in neutrophils in all G-CSF groups relative to pre-dose levels.

TABLE 45
Pharmacologic Effect of G-CSF mRNA in NHP

| | | | Male NHP (G- | Female NHP (G- | Male NHP (EPO) | Female NHP (EPO) |
|---|---|---|---|---|---|---|
| Dose | | | CSF) Neutrophils | CSF) Neutrophils | Neutrophils | Neutrophils |
| (mg/kg) | Time | | (10⁹/L) | (10⁹/L) | (10⁹/L) | (10⁹/L) |
| 0.5 | Pre-dose | | 1.53 | 1.27 | 9.72 | 1.82 |
| | 24 | hours | 14.92 | 13.96 | 7.5 | 11.85 |
| | 3 | days | 9.76 | 13.7 | 11.07 | 5.22 |
| | 7 | days | 2.74 | 3.81 | 11.8 | 2.85 |
| | 14/18 | days | 2.58 | 1.98 | 7.16 | 2.36 |
| 0.05 | Pre-dose | | 13.74 | 3.05 | 0.97 | 2.15 |
| | 24 | hours | 19.92 | 29.91 | 2.51 | 2.63 |
| | 3 | days | 7.49 | 10.77 | 1.73 | 4.08 |
| | 7 | days | 4.13 | 3.8 | 1.23 | 2.77 |
| | 14/18 | days | 3.59 | 1.82 | 1.53 | 1.27 |
| 0.005 | Pre-dose | | 1.52 | 2.54 | 5.46 | 5.96 |
| | 24 | hours | 16.44 | 8.6 | 5.37 | 2.59 |
| | 3 | days | 3.74 | 1.78 | 6.08 | 2.83 |
| | 7 | days | 7.28 | 2.27 | 3.51 | 2.23 |
| | 14/18 | days | 4.31 | 2.28 | 1.52 | 2.54 |

[1239] As shown in Table 46, there was an increase in reticulocytes in all EPO groups 3 days to 14/18 days after dosing relative to reticulocyte levels 24 hours after dosing.

TABLE 46
Pharmacologic Effect of EPO mRNA on Neutrophil Count

| | | | Male NHP (G- | Female NHP (G- | Male NHP (EPO) | Female NHP (EPO) |
|---|---|---|---|---|---|---|
| Dose | | | CSF) Neutrophils | CSF) Neutrophils | Neutrophils | Neutrophils |
| (mg/kg) | Time | | (10¹²/L) | (10¹²/L) | (10¹²/L) | (10¹²/L) |
| 0.5 | Pre-dose | | 0.067 | 0.055 | 0.107 | 0.06 |
| | 24 | hours | 0.032 | 0.046 | 0.049 | 0.045 |
| | 3 | days | 0.041 | 0.017 | 0.09 | 0.064 |
| | 7 | days | 0.009 | 0.021 | 0.35 | 0.367 |
| | 14/18 | days | 0.029 | 0.071 | 0.066 | 0.071 |
| 0.05 | Pre-dose | | 0.055 | 0.049 | 0.054 | 0.032 |
| | 24 | hours | 0.048 | 0.046 | 0.071 | 0.04 |
| | 3 | days | 0.101 | 0.061 | 0.102 | 0.105 |
| | 7 | days | 0.157 | 0.094 | 0.15 | 0.241 |
| | 14/18 | days | 0.107 | 0.06 | 0.067 | 0.055 |
| 0.005 | Pre-dose | | 0.037 | 0.06 | 0.036 | 0.052 |
| | 24 | hours | 0.037 | 0.07 | 0.034 | 0.061 |
| | 3 | days | 0.037 | 0.054 | 0.079 | 0.118 |
| | 7 | days | 0.046 | 0.066 | 0.049 | 0.087 |
| | 14/18 | days | 0.069 | 0.057 | 0.037 | 0.06 |

[1240] As shown in Tables 47-49, the administration of EPO modified RNA had an effect on other erythropoetic parameters including hemoglobin (HGB), hematocrit (HCT) and red blood cell (RBC) count.

TABLE 47
Pharmacologic Effect of EPO mRNA on Hemoglobin

| | | | | | | Female NHP |
|---|---|---|---|---|---|---|
| Dose | | | Male NHP (G- | Female NHP (G- | Male NHP (EPO) | (EPO) HGB |
| (mg/kg) | Time | | CSF) HGB (g/L) | CSF) HGB (g/L) | HGB (g/L) | (g/L) |
| 0.5 | Pre-dose | | 133 | 129 | 134 | 123 |
| | 24 | hours | 113 | 112 | 127 | 108 |
| | 3 | days | 118 | 114 | 126 | 120 |
| | 7 | days | 115 | 116 | 140 | 134 |
| | 14/18 | days | 98 | 113 | 146 | 133 |
| 0.05 | Pre-dose | | 137 | 129 | 133 | 133 |
| | 24 | hours | 122 | 117 | 123 | 116 |
| | 3 | days | 126 | 115 | 116 | 120 |
| | 7 | days | 126 | 116 | 126 | 121 |
| | 14/18 | days | 134 | 123 | 133 | 129 |
| 0.005 | Pre-dose | | 128 | 129 | 132 | 136 |
| | 24 | hours | 117 | 127 | 122 | 128 |
| | 3 | days | 116 | 127 | 125 | 130 |
| | 7 | days | 116 | 129 | 119 | 127 |
| | 14/18 | days | 118 | 129 | 128 | 129 |

TABLE 48
Pharmacologic Effect of EPO mRNA on Hematocrit

| | | | | | | Female NHP |
|---|---|---|---|---|---|---|
| Dose | | | Male NHP (G- | Female NHP (G- | Male NHP (EPO) | (EPO) HCT |
| (mg/kg) | Time | | CSF) HCT (L/L) | CSF) HCT (L/L) | HCT (L/L) | (L/L) |
| 0.5 | Pre-dose | | 0.46 | 0.43 | 0.44 | 0.4 |
| | 24 | hours | 0.37 | 0.38 | 0.4 | 0.36 |
| | 3 | days | 0.39 | 0.38 | 0.41 | 0.39 |
| | 7 | days | 0.39 | 0.38 | 0.45 | 0.45 |
| | 14/18 | days | 0.34 | 0.37 | 0.48 | 0.46 |
| 0.05 | Pre-dose | | 0.44 | 0.44 | 0.45 | 0.43 |
| | 24 | hours | 0.39 | 0.4 | 0.43 | 0.39 |
| | 3 | days | 0.41 | 0.39 | 0.38 | 0.4 |
| | 7 | days | 0.42 | 0.4 | 0.45 | 0.41 |
| | 14/18 | days | 0.44 | 0.4 | 0.46 | 0.43 |
| 0.005 | Pre-dose | | 0.42 | 0.42 | 0.48 | 0.45 |
| | 24 | hours | 0.4 | 0.42 | 0.42 | 0.43 |
| | 3 | days | 0.4 | 0.41 | 0.44 | 0.42 |
| | 7 | days | 0.39 | 0.42 | 0.41 | 0.42 |
| | 14/18 | days | 0.41 | 0.42 | 0.42 | 0.42 |

TABLE 49
Pharmacologic Effect of EPO mRNA on Red Blood Cells

| | | | Male NHP (G- | Female NHP (G- | Male NHP | Female NHP |
|---|---|---|---|---|---|---|
| Dose | | | CSF) RBC | CSF) RBC | (EPO) RBC | (EPO) RBC |
| (mg/kg) | Time | | (10¹²/L) | (10¹²/L) | (10¹²/L) | (10¹²/L) |
| 0.5 | Pre-dose | | 5.57 | 5.57 | 5.43 | 5.26 |
| | 24 | hours | 4.66 | 4.96 | 5.12 | 4.69 |
| | 3 | days | 4.91 | 4.97 | 5.13 | 5.15 |
| | 7 | days | 4.8 | 5.04 | 5.55 | 5.68 |
| | 14/18 | days | 4.21 | 4.92 | 5.83 | 5.72 |
| 0.05 | Pre-dose | | 5.68 | 5.64 | 5.57 | 5.84 |
| | 24 | hours | 4.96 | 5.08 | 5.25 | 5.18 |
| | 3 | days | 5.13 | 5.04 | 4.81 | 5.16 |
| | 7 | days | 5.17 | 5.05 | 5.37 | 5.31 |
| | 14/18 | days | 5.43 | 5.26 | 5.57 | 5.57 |
| 0.005 | Pre-dose | | 5.67 | 5.36 | 6.15 | 5.72 |
| | 24 | hours | 5.34 | 5.35 | 5.63 | 5.35 |
| | 3 | days | 5.32 | 5.24 | 5.77 | 5.42 |
| | 7 | days | 5.25 | 5.34 | 5.49 | 5.35 |
| | 14/18 | days | 5.37 | 5.34 | 5.67 | 5.36 |

[1241] As shown in Tables 50 and 51, the administration of modified RNA had an effect on serum chemistry parameters including alanine transaminase (ALT) and aspartate transaminase

TABLE 50
Pharmacologic Effect of EPO mRNA on Alanine Transaminase

| | | | | | | Female NHP |
|---|---|---|---|---|---|---|
| Dose | | | Male NHP (G- | Female NHP (G- | Male NHP (EPO) | (EPO) ALT |
| (mg/kg) | Time | | CSF) ALT (U/L) | CSF) ALT (U/L) | ALT (U/L) | (U/L) |
| 0.5 | Pre-dose | | 29 | 216 | 50 | 31 |
| | 2 | days | 63 | 209 | 98 | 77 |
| | 4 | days | 70 | 98 | 94 | 87 |
| | 7 | days | 41 | 149 | 60 | 59 |
| | 14 | days | 43 | 145 | 88 | 44 |
| 0.05 | Pre-dose | | 58 | 53 | 56 | 160 |
| | 2 | days | 82 | 39 | 95 | 254 |
| | 4 | days | 88 | 56 | 70 | 200 |
| | 7 | days | 73 | 73 | 64 | 187 |
| | 14 | days | 50 | 31 | 29 | 216 |
| 0.005 | Pre-dose | | 43 | 51 | 45 | 45 |
| | 2 | days | 39 | 32 | 62 | 48 |
| | 4 | days | 48 | 58 | 48 | 50 |
| | 7 | days | 29 | 55 | 21 | 48 |
| | 14 | days | 44 | 46 | 43 | 51 |

TABLE 51
Pharmacologic Effect of EPO mRNA on Aspartate Transaminase

| | | | | | | Female NHP |
|---|---|---|---|---|---|---|
| Dose | | | Male NHP (G- | Female NHP (G- | Male NHP (EPO) | (EPO) AST |
| (mg/kg) | Time | | CSF) AST (U/L) | CSF) AST (U/L) | AST (U/L) | (U/L) |
| 0.5 | Pre-dose | | 32 | 47 | 59 | 20 |
| | 2 | days | 196 | 294 | 125 | 141 |
| | 4 | days | 67 | 63 | 71 | 60 |
| | 7 | days | 53 | 68 | 56 | 47 |
| | 14 | days | 47 | 67 | 82 | 44 |
| 0.05 | Pre-dose | | 99 | 33 | 74 | 58 |
| | 2 | days | 95 | 34 | 61 | 80 |
| | 4 | days | 69 | 42 | 48 | 94 |
| | 7 | days | 62 | 52 | 53 | 78 |
| | 14 | days | 59 | 20 | 32 | 47 |
| 0.005 | Pre-dose | | 35 | 54 | 39 | 40 |
| | 2 | days | 70 | 34 | 29 | 25 |
| | 4 | days | 39 | 36 | 43 | 55 |
| | 7 | days | 28 | 31 | 55 | 31 |
| | 14 | days | 39 | 20 | 35 | 54 |

[1242] As shown in Table 52, the administration of lipid nanoparticle-formulated modified RNA at high doses (0.5 mg/kg) caused an increase in cytokines, interferon-alpha (IFN-alpha) after administration of modified mRNA.

TABLE 52
Pharmacologic Effect of EPO mRNA on Alanine Transaminase

| | | Male NHP (G- | Female NHP (G- | Male NHP (EPO) | Female NHP |
|---|---|---|---|---|---|
| Dose | | CSF) IFN-alpha | CSF) IFN-alpha | IFN-alpha | (EPO) IFN- |
| (mg/kg) | Time | (pg/mL) | (pg/mL) | (pg/mL) | alpha (pg/mL) |
| 0.5 | Pre-dose | 0 | 0 | 0 | 0 |
| | Day 1 + 8 hr | 503.8 | 529.2 | 16.79 | 217.5 |
| | 4 days | 0 | 0 | 0 | 0 |
| 0.05 | Pre-dose | 0 | 0 | 0 | 0 |
| | Day 1 + 8 hr | 0 | 0 | 0 | 0 |
| | 4 days | 0 | 0 | 0 | 0 |
| 0.005 | Pre-dose | 0 | 0 | 0 | 0 |
| | Day 1 + 8 hr | 0 | 0 | 0 | 0 |
| | 4 days | 0 | 0 | 0 | 0 |

### Example 24. Study of Intramuscular and/or Subcutaneous Administration in Non-Human Primates

[1243] Formulations containing modified EPO mRNA (mRNA sequence shown in SEQ ID NO: 31910; polyA tail of approximately 160 nucleotides not shown in sequence; 5′cap, Cap1; fully modified with 5-methylcytosine and pseudouridine) or G-CSF mRNA (mRNA sequence shown in SEQ ID NO: 31907; polyA tail of approximately 160 nucleotides not shown in sequence; 5′cap, Cap1; fully modified with 5-methylcytosine and pseudouridine) in saline were administered to non-human primates (Cynomolgus monkey) (NHP) intramuscularly (IM) or subcutaneously (SC). The single modified mRNA dose of 0.05 mg/kg or 0.005 mg/kg was in a dose volume of 0.5 mL/kg. The non-human primates are bled 5-6 days prior to dosing to determine serum protein concentration and a baseline complete blood count. After administration with the modified mRNA formulation the NHP are bled at 8 hours, 24 hours, 48 hours, 72 hours, 7 days and 14 days to determined protein expression. Protein expression of G-CSF and EPO is determined by ELISA. At 24 hours, 72 hours, 7 days and 14 days after administration the complete blood count of the NHP is also determined. Urine from the NHPs is collected over the course of the entire experiment and analyzed to evaluate clinical safety. Tissue near the injection site is also collected and analyzed to determine protein expression.

### Example 25. Modified mRNA Trafficking

[1244] In order to determine localization and/or trafficking of the modified mRNA, studies may be performed as follows.

[1245] LNP formulations of siRNA and modified mRNA are formulated according to methods known in the art and/or described herein. The LNP formulations may include at least one modified mRNA which may encode a protein such as G-CSF, EPO, Factor VII, and/or any protein described herein. The formulations may be administered locally into muscle of mammals using intramuscular or subcutaneous injection. The dose of modified mRNA and the size of the LNP may be varied to determine the effect on trafficking in the body of the mammal and/or to assess the impact on a biologic reaction such as, but not limited to, inflammation. The mammal may be bled at different time points to determine the expression of protein encoded by the modified mRNA administered present in the serum and/or to determine the complete blood count in the mammal.

[1246] For example, modified mRNA encoding Factor VII, expressed in the liver and secreted into the serum, may be administered intramuscularly and/or subcutaneously. Coincident or prior to modified mRNA administration, siRNA is administered to knock out endogenous Factor VII. Factor VII arising from the intramuscular and/or subcutaneous injection of modified mRNA is administered is measured in the blood. Also, the levels of Factor VII is measured in the tissues near the injection site. If Factor VII is expressed in blood then there is trafficking of the modified mRNA. If Factor VII is expressed in tissue and not in the blood than there is only local expression of Factor VII.

### Example 26. Formulations of Multiple Modified mRNA

[1247] LNP formulations of modified mRNA are formulated according to methods known in the art and/or described herein or known in the art. The LNP formulations may include at least one modified mRNA which may encode a protein such as G-CSF, EPO, thrombopoietin and/or any protein described herein. The at least one modified mRNA may include 1, 2, 3, 4 or 5 modified mRNA molecules. The formulations containing at least one modified mRNA may be administered intravenously, intramuscularly or subcutaneously in a single or multiple dosing regimens. Biological samples such as, but not limited to, blood and/or serum may be collected and analyzed at different time points before and/or after administration of the at least one modified mRNA formulation. An expression of a protein in a biological sample of 50-200 pg/ml after the mammal has been administered a formulation containing at least one modified mRNA encoding said protein would be considered biologically effective.

### Example 27. Polyethylene Glycol Ratio Studies

[1248] A. Formulation and Characterization of PEG LNPs

[1249] Lipid nanoparticles (LNPs) were formulated using the syringe pump method. The LNPs were formulated at a 20:1 weight ratio of total lipid to modified G-CSF mRNA (mRNA sequence shown in SEQ ID NO: 31907; polyA tail of approximately 160 nucleotides not shown in sequence; 5′cap, Cap1; fully modified with 5-methylcytosine and pseudouridine). The molar ratio ranges of the formulations are shown in Table 53.

TABLE 53
Molar Ratios

| | DLin-KC2-DMA | DSPC | Cholesterol | PEG-c-DOMG |
|---|---|---|---|---|
| Mole Percent | 50.0 | 10.0 | 37-38.5 | 1.5-3 |
| (mol %) | | | | |

[1250] Two types of PEG lipid, 1,2-Dimyristoyl-sn-glycerol, methoxypolyethylene Glycol (PEG-DMG, NOF Cat #SUNBRIGHT® GM-020) and 1,2-Distearoyl-sn-glycerol, methoxypolyethylene Glycol (PEG-DSG, NOF Cat #SUNBRIGHT® GS-020), were tested at 1.5 or 3.0 mol %. After the formation of the LNPs and the encapsulation of the modified G-CSF mRNA, the LNP formulations were characterized by particle size, zeta potential and encapsulation percentage and the results are shown in Table 54.

TABLE 54
Characterization of LNP Formulations

| Formulation | | | | |
|---|---|---|---|---|
| No. | NPA-071-1 | NPA-072-1 | NPA-073-1 | NPA-074-1 |
| Lipid | PEG-DMG | PEG-DMG | PEG-DSA | PEG-DSA |
| | 1.5% | 3% | 1.5% | 3% |
| Mean Size | 95 nm | 85 nm | 95 nm | 75 nm |
| | PDI: 0.01 | PDI: 0.06 | PDI: 0.08 | PDI: 0.08 |
| Zeta at pH 7.4 | −1.1 mV | −2.6 mV | 1.7 mV | 0.7 mV |
| Encapsulation | 88% | 89% | 98% | 95% |
| (RiboGreen) | | | | |

[1251] B. In Vivo Screening of PEG LNPs

[1252] Formulations of the PEG LNPs described in Table 55 were administered to mice (n=5) intravenously at a dose of 0.5 mg/kg. Serum was collected from the mice at 2 hours, 8 hours, 24 hours, 48 hours, 72 hours and 8 days after administration of the formulation. The serum was analyzed by ELISA to determine the protein expression of G-CSF and the expression levels are shown in Table 55. LNP formulations using PEG-DMG gave substantially higher levels of protein expression than LNP formulations with PEG-DSA.

TABLE 55
Protein Expression

| | Formulation | | | Protein Expression |
|---|---|---|---|---|
| Lipid | No. | Time | | (pg/ml) |
| PEG-DMG, | NPA-071-1 | 2 | hours | 114,102 |
| 1.5% | | 8 | hours | 357,944 |
| | | 24 | hours | 104,832 |
| | | 48 | hours | 6,697 |
| | | 72 | hours | 980 |
| | | 8 | days | 0 |
| PEG-DMG, 3% | NPA-072-1 | 2 | hours | 154,079 |
| | | 8 | hours | 354,994 |
| | | 24 | hours | 164,311 |
| | | 48 | hours | 13,048 |
| | | 72 | hours | 1,182 |
| | | 8 | days | 13 |
| PEG-DSA, 1.5% | NPA-073-1 | 2 | hours | 3,193 |
| | | 8 | hours | 6,162 |
| | | 24 | hours | 446 |
| | | 48 | hours | 197 |
| | | 72 | hours | 124 |
| | | 8 | days | 5 |
| PEG-DSA, 3% | NPA-074-1 | 2 | hours | 259 |
| | | 8 | hours | 567 |
| | | 24 | hours | 258 |
| | | 48 | hours | 160 |
| | | 72 | hours | 328 |
| | | 8 | days | 33 |

### Example 28. Cationic Lipid Formulation Studies

[1253] A. Formulation and Characterization of Cationic Lipid Nanoparticles

[1254] Lipid nanoparticles (LNPs) were formulated using the syringe pump method. The LNPs were formulated at a 20:1 weight ratio of total lipid to modified mRNA. The final lipid molar ratio ranges of cationic lipid, DSPC, cholesterol and PEG-c-DOMG are outlined in Table 56.

TABLE 56
Molar Ratios

| | Cationic | | | PEG-c- |
|---|---|---|---|---|
| | Lipid | DSPC | Cholesterol | DOMG |
| Mole Percent | 50.0 | 10.0 | 38.5 | 1.5 |
| (mol %) | | | | |

[1255] A 25 mM lipid solution in ethanol and modified RNA in 50 mM citrate at a pH of 3 were mixed to create spontaneous vesicle formation. The vesicles were stabilized in ethanol before the ethanol was removed and there was a buffer exchange by dialysis. The LNPs were then characterized by particle size, zeta potential, and encapsulation percentage. Table 57 describes the characterization of LNPs encapsulating EPO modified mRNA (mRNA sequence shown in SEQ ID NO: 31910 polyA tail of approximately 160 nucleotides not shown in sequence; 5′cap, Cap1; fully modified with 5-methylcytosine and pseudouridine) or G-CSF modified mRNA (mRNA sequence shown in SEQ ID NO: 31907; polyA tail of approximately 160 nucleotides not shown in sequence; 5′cap, Cap1; fully modified with 5-methylcytosine and pseudouridine) using DLin-MC3-DMA, DLin-DMA or C12-200 as the cationic lipid.

TABLE 57
Characterization of Cationic Lipid Formulations

| Formulation | NPA- | NPA- | NPA- | NPA- | NPA- | NPA- |
|---|---|---|---|---|---|---|
| No. | 071-1 | 072-1 | 073-1 | 074-1 | 075-1 | 076-1 |
| Lipid | DLin- | DLin- | DLin- | DLin- | C12- | C12- |
| | MC3- | MC3- | DMA | DMA | 200 | 200 |
| | DMA | DMA | | | | |
| Modified | EPO | G-CSF | EPO | G-CSF | EPO | G-CSF |
| RNA | | | | | | |
| Mean Size | 89 nm | 96 nm | 70 nm | 73 nm | 97 nm | 103 nm |
| | PDI: | PDI: | PDI: | PDI: | PDI: | PDI: |
| | 0.07 | 0.08 | 0.04 | 0.06 | 0.05 | 0.09 |
| Zeta at pH | −1.1 | −1.4 | −1.6 | −0.4 | 1.4 mV | −0.9 |
| | mV | mV | mV | mV | | mV |
| 7.4 | | | | | | |
| Encapsulation | 100% | 100% | 99% | 100% | 88% | 98% |
| (RiboGreen) | | | | | | |

[1256] B. In Vivo Screening of Cationic LNP Formulations

[1257] Formulations of the cationic lipid formulations described in Table 57 were administered to mice (n=5) intravenously at a dose of 0.5 mg/kg. Serum was collected from the mice at 2 hours, 24 hours, 72 hours and/or 7 days after administration of the formulation. The serum was analyzed by ELISA to determine the protein expression of EPO or G-CSF and the expression levels are shown in Table 58.

TABLE 58
Protein Expression

| | | | Protein |
|---|---|---|---|
| Modified | Formulation | | Expression |
| mRNA | No. | Time | (pg/ml) |
| EPO | NPA-071-1 | 2 hours | 304,190.0 |
| | | 24 hours | 166,811.5 |
| | | 72 hours | 1,356.1 |
| | | 7 days | 20.3 |
| EPO | NPA-073-1 | 2 hours | 73,852.0 |
| | | 24 hours | 75,559.7 |
| | | 72 hours | 130.8 |
| EPO | NPA-075-1 | 2 hours | 413,010.2 |
| | | 24 hours | 56,463.8 |
| G-CSF | NPA-072-1 | 2 hours | 62,113.1 |
| | | 24 hours | 53,206.6 |
| G-CSF | NPA-074-1 | 24 hours | 25,059.3 |
| G-CSF | NPA-076-1 | 2 hours | 219,198.1 |
| | | 24 hours | 8,470.0 |

[1258] Toxicity was seen in the mice administered the LNPs formulations with the cationic lipid C12-200 (NPA-075-1 and NPA-076-1) and they were sacrificed at 24 hours because they showed symptoms such as scrubby fur, cowering behavior and weight loss of greater than 10%. C12-200 was expected to be more toxic but also had a high level of expression over a short period. The cationic lipid DLin-DMA (NPA-073-1 and NPA-074-1) had the lowest expression out of the three cationic lipids tested. DLin-MC3-DMA (NPA-071-1 and NPA-072-1) showed good expression up to day three and was above the background sample out to day 7 for EPO formulations.

### Example 29. Method of Screening for Protein Expression

[1259] A. Electrospray Ionization

[1260] A biological sample which may contain proteins encoded by modified RNA administered to the subject is prepared and analyzed according to the manufacturer protocol for electrospray ionization (ESI) using 1, 2, 3 or 4 mass analyzers. A biologic sample may also be analyzed using a tandem ESI mass spectrometry system.

[1261] Patterns of protein fragments, or whole proteins, are compared to known controls for a given protein and identity is determined by comparison.

[1262] B. Matrix-Assisted Laser Desorption/Ionization

[1263] A biological sample which may contain proteins encoded by modified RNA administered to the subject is prepared and analyzed according to the manufacturer protocol for matrix-assisted laser desorption/ionization (MALDI).

[1264] Patterns of protein fragments, or whole proteins, are compared to known controls for a given protein and identity is determined by comparison.

[1265] C. Liquid Chromatography-Mass Spectrometry-Mass Spectrometry

[1266] A biological sample, which may contain proteins encoded by modified RNA, may be treated with a trypsin enzyme to digest the proteins contained within. The resulting peptides are analyzed by liquid chromatography-mass spectrometry-mass spectrometry (LC/MS/MS). The peptides are fragmented in the mass spectrometer to yield diagnostic patterns that can be matched to protein sequence databases via computer algorithms. The digested sample may be diluted to achieve 1 ng or less starting material for a given protein. Biological samples containing a simple buffer background (e.g. water or volatile salts) are amenable to direct in-solution digest; more complex backgrounds (e.g. detergent, non-volatile salts, glycerol) require an additional clean-up step to facilitate the sample analysis.

[1267] Patterns of protein fragments, or whole proteins, are compared to known controls for a given protein and identity is determined by comparison.

### Example 30. Lipid Nanoparticle In Vivo Studies

[1268] mCherry mRNA (mRNA sequence shown in SEQ ID NO: 31915; polyA tail of approximately 160 nucleotides not shown in sequence; 5′cap, Cap1; fully modified with 5-methylcytosine and pseudouridine) was formulated as a lipid nanoparticle (LNP) using the syringe pump method. The LNP was formulated at a 20:1 weight ratio of total lipid to modified mRNA with a final lipid molar ratio of 50:10:38.5:1.5 (DLin-KC2-DMA: DSPC: Cholesterol: PEG-c-DOMG). The mCherry formulation, listed in Table 59, was characterized by particle size, zeta potential, and encapsulation.

TABLE 59
mCherry Formulation

| Formulation # | NPA-003-5 |
|---|---|
| Modified mRNA | mCherry |
| Mean size | 105 nm |
| | PDI: 0.09 |
| Zeta at pH 7.4 | 1.8 mV |
| Encaps. (RiboGr) | 100% |

[1269] The LNP formulation was administered to mice (n=5) intravenously at a modified mRNA dose of 100 ug. Mice were sacrificed at 24 hrs after dosing. The liver and spleen from the mice administered with mCherry modified mRNA formulations were analyzed by immunohistochemistry (IHC), western blot, or fluorescence-activated cell sorting (FACS).

[1270] Histology of the liver showed uniform mCherry expression throughout the section, while untreated animals did not express mCherry. Western blots were also used to confirm mCherry expression in the treated animals, whereas mCherry was not detected in the untreated animals. Tubulin was used as a control marker and was detected in both treated and untreated mice, indicating that normal protein expression in hepatocytes was unaffected.

[1271] FACS and IHC were also performed on the spleens of mCherry and untreated mice. All leukocyte cell populations were negative for mCherry expression by FACS analysis. By IHC, there were also no observable differences in the spleen in the spleen between mCherry treated and untreated mice.

### Example 31. Syringe Pump In Vivo Studies

[1272] mCherry modified mRNA (mRNA sequence shown in SEQ ID NO: 31908; polyA tail of approximately 160 nucleotides not shown in sequence; 5′cap, Cap1) is formulated as a lipid nanoparticle (LNP) using the syringe pump method. The LNP is formulated at a 20:1 weight ratio of total lipid to modified mRNA with a final lipid molar ratio of 50:10:38.5:1.5 (DLin-KC2-DMA: DSPC: Cholesterol: PEG-c-DOMG). The mCherry formulation is characterized by particle size, zeta potential, and encapsulation.

[1273] The LNP formulation is administered to mice (n=5) intravenously at a modified mRNA dose of 10 or 100 ug. Mice are sacrificed at 24 hrs after dosing. The liver and spleen from the mice administered with mCherry modified mRNA formulations are analyzed by immunohistochemistry (IHC), western blot, and/or fluorescence-activated cell sorting (FACS).

### Example 32. In Vitro and In Vivo Expression

[1274] A. In Vitro Expression in Human Cells Using Lipidoid Formulations

[1275] The ratio of mmRNA to lipidoid used to test for in vitro transfection is tested empirically at different lipidoid:mmRNA ratios. Previous work using siRNA and lipidoids have utilized 2.5:1, 5:1, 10:1, and 15:1 lipidoid:siRNA wt:wt ratios. Given the longer length of mmRNA relative to siRNA, a lower wt:wt ratio of lipidoid to mmRNA may be effective. In addition, for comparison mmRNA were also formulated using RNAIMAX™ (Invitrogen, Carlsbad, CA) or TRANSIT-mRNA (Mirus Bio, Madison, WI) cationic lipid delivery vehicles.

[1276] The ability of lipidoid-formulated Luciferase (IVT cDNA sequence as shown in SEQ ID NO: 31916; mRNA sequence shown in SEQ ID NO: 31917, polyA tail of approximately 160 nucleotides not shown in sequence, 5′cap, Cap1, fully modified with 5-methylcytosine at each cytosine and pseudouridine replacement at each uridine site), green fluorescent protein (GFP) (IVT cDNA sequence as shown in SEQ ID NO: 31918; mRNA sequence shown in SEQ ID NO: 31919, polyA tail of approximately 160 nucleotides not shown in sequence, 5′cap, Cap1, fully modified with 5-methylcytosine at each cytosine and pseudouridine replacement at each uridine site), G-CSF mRNA (mRNA sequence shown in SEQ ID NO: 31908; polyA tail of approximately 160 nucleotides not shown in sequence; 5′cap, Cap1), and EPO mRNA (mRNA sequence shown in SEQ ID NO: 31910; polyA tail of approximately 160 nucleotides not shown in sequence; 5′cap, Cap1) to express the desired protein product can be confirmed by luminescence for luciferase expression, flow cytometry for GFP expression, and by ELISA for G-CSF and Erythropoietin (EPO) secretion.

[1277] B. In Vivo Expression Following Intravenous Injection

[1278] Systemic intravenous administration of the formulations are created using various different lipidoids including, but not limited to, 98N12-5, C12-200, and MD1.

[1279] Lipidoid formulations containing mmRNA are injected intravenously into animals. The expression of the modified mRNA (mmRNA)-encoded proteins are assessed in blood and/or other organs samples such as, but not limited to, the liver and spleen collected from the animal. Conducting single dose intravenous studies will also allow an assessment of the magnitude, dose responsiveness, and longevity of expression of the desired product.

[1280] In one embodiment, lipidoid based formulations of 98N12-5, C12-200, MD1 and other lipidoids, are used to deliver luciferase, green fluorescent protein (GFP), mCherry fluorescent protein, secreted alkaline phosphatase (sAP), human G-CSF, human Factor IX, or human Erythropoietin (EPO) mmRNA into the animal. After formulating mmRNA with a lipid, as described previously, animals are divided into groups to receive either a saline formulation, or a lipidoid-formulation which contains one of a different mmRNA selected from luciferase, GFP, mCherry, sAP, human G-CSF, human Factor IX, and human EPO. Prior to injection into the animal, mmRNA-containing lipidoid formulations are diluted in PBS. Animals are then administered a single dose of formulated mmRNA ranging from a dose of 10 mg/kg to doses as low as 1 ng/kg, with a preferred range to be 10 mg/kg to 100 ng/kg, where the dose of mmRNA depends on the animal body weight such as a 20 gram mouse receiving a maximum formulation of 0.2 ml (dosing is based no mmRNA per kg body weight). After the administration of the mmRNA-lipidoid formulation, serum, tissues, and/or tissue lysates are obtained and the level of the mmRNA-encoded product is determined at a single and/or a range of time intervals. The ability of lipidoid-formulated Luciferase, GFP, mCherry, sAP, G-CSF, Factor IX, and EPO mmRNA to express the desired protein product is confirmed by luminescence for the expression of Luciferase, flow cytometry for the expression of GFP and mCherry expression, by enzymatic activity for sAP, or by ELISA for the section of G-CSF, Factor IX and/or EPO.

[1281] Further studies for a multi-dose regimen are also performed to determine the maximal expression of mmRNA, to evaluate the saturability of the mmRNA-driven expression (by giving a control and active mmRNA formulation in parallel or in sequence), and to determine the feasibility of repeat drug administration (by giving mmRNA in doses separated by weeks or months and then determining whether expression level is affected by factors such as immunogenicity). An assessment of the physiological function of proteins such as G-CSF and EPO are also determined through analyzing samples from the animal tested and detecting increases in granulocyte and red blood cell counts, respectively. Activity of an expressed protein product such as Factor IX, in animals can also be assessed through analysis of Factor IX enzymatic activity (such as an activated partial thromboplastin time assay) and effect of clotting times.

[1282] C. In Vitro Expression Following Intramuscular and/or Subcutaneous Injection

[1283] The use of lipidoid formulations to deliver oligonucleotides, including mRNA, via an intramuscular route or a subcutaneous route of injection needs to be evaluated as it has not been previously reported. Intramuscular and/or subcutaneous injection of mmRNA are evaluated to determine if mmRNA-containing lipidoid formulations are capable to produce both localized and systemic expression of a desired portions.

[1284] Lipidoid formulations of 98N12-5, C12-200, and MD1 containing mmRNA selected from luciferase, green fluorescent protein (GFP), mCherry fluorescent protein, secreted alkaline phosphatase (sAP), human G-CSF, human factor IX, or human Erythropoietin (EPO) mmRNA are injected intramuscularly and/or subcutaneously into animals. The expression of mmRNA-encoded proteins are assessed both within the muscle or subcutaneous tissue and systemically in blood and other organs such as the liver and spleen. Single dose studies allow an assessment of the magnitude, dose responsiveness, and longevity of expression of the desired product.

[1285] Animals are divided into groups to receive either a saline formulation or a formulation containing modified mRNA. Prior to injection mmRNA-containing lipidoid formulations are diluted in PBS. Animals are administered a single intramuscular dose of formulated mmRNA ranging from 50 mg/kg to doses as low as 1 ng/kg with a preferred range to be 10 mg/kg to 100 ng/kg. A maximum dose for intramuscular administration, for a mouse, is roughly 1 mg mmRNA or as low as 0.02 ng mmRNA for an intramuscular injection into the hind limb of the mouse. For subcutaneous administration, the animals are administered a single subcutaneous dose of formulated mmRNA ranging from 400 mg/kg to doses as low as 1 ng/kg with a preferred range to be 80 mg/kg to 100 ng/kg. A maximum dose for subcutaneous administration, for a mouse, is roughly 8 mg mmRNA or as low as 0.02 ng mmRNA.

[1286] For a 20 gram mouse the volume of a single intramuscular injection is maximally 0.025 ml and a single subcutaneous injection is maximally 0.2 ml. The optimal dose of mmRNA administered is calculated from the body weight of the animal. At various points in time points following the administration of the mmRNA-lipidoid, serum, tissues, and tissue lysates is obtained and the level of the mmRNA-encoded product is determined. The ability of lipidoid-formulated luciferase, green fluorescent protein (GFP), mCherry fluorescent protein, secreted alkaline phosphatase (sAP), human G-CSF, human factor IX, or human Erythropoietin (EPO) mmRNA to express the desired protein product is confirmed by luminescence for luciferase expression, flow cytometry for GFP and mCherry expression, by enzymatic activity for sAP, and by ELISA for G-CSF, Factor IX and Erythropoietin (EPO) secretion.

[1287] Additional studies for a multi-dose regimen are also performed to determine the maximal expression using mmRNA, to evaluate the saturability of the mmRNA-driven expression (achieved by giving a control and active mmRNA formulation in parallel or in sequence), and to determine the feasibility of repeat drug administration (by giving mmRNA in doses separated by weeks or months and then determining whether expression level is affected by factors such as immunogenicity). Studies utilizing multiple subcutaneous or intramuscular injection sites at one time point, are also utilized to further increase mmRNA drug exposure and improve protein production. An assessment of the physiological function of proteins, such as GFP, mCherry, sAP, human G-CSF, human factor IX, and human EPO, are determined through analyzing samples from the tested animals and detecting a change in granulocyte and/or red blood cell counts. Activity of an expressed protein product such as Factor IX, in animals can also be assessed through analysis of Factor IX enzymatic activity (such as an activated partial thromboplastin time assay) and effect of clotting times.

### Example 33. Bifunctional mmRNA

[1288] Using the teachings and synthesis methods described herein, modified RNAs are designed and synthesized to be bifunctional, thereby encoding one or more cytotoxic protein molecules as well as be synthesized using cytotoxic nucleosides.

[1289] Administration of the bifunctional modified mRNAs is effected using either saline or a lipid carrier. Once administered, the bifunctional modified mRNA is translated to produce the encoded cytotoxic peptide. Upon degradation of the delivered modified mRNA, the cytotoxic nucleosides are released which also effect therapeutic benefit to the subject.

### Example 34. Modified mRNA Transfection

[1290] A. Reverse Transfection

[1291] For experiments performed in a 24-well collagen-coated tissue culture plate, Keratinocytes are seeded at a cell density of 1×10⁵. For experiments performed in a 96-well collagen-coated tissue culture plate, Keratinocytes are seeded at a cell density of 0.5×10⁵. For each modified mRNA (mmRNA) to be transfected, modified mRNA: RNAIMAX™ is prepared as described and mixed with the cells in the multi-well plate within a period of time, e.g., 6 hours, of cell seeding before cells had adhered to the tissue culture plate.

[1292] B. Forward Transfection

[1293] In a 24-well collagen-coated tissue culture plate, Keratinocytes are seeded at a cell density of 0.7×10⁵. For experiments performed in a 96-well collagen-coated tissue culture plate, Keratinocytes are seeded at a cell density of 0.3×10⁵. Keratinocytes are grown to a confluency of >70% for over 24 hours. For each modified mRNA (mmRNA) to be transfected, modified mRNA: RNAIMAX™ is prepared as described and transfected onto the cells in the multi-well plate over 24 hours after cell seeding and adherence to the tissue culture plate.

[1294] C. Modified mRNA Translation Screen: G-CSF ELISA

[1295] Keratinocytes are grown in EPILIFE medium with Supplement S7 from Invitrogen (Carlsbad, CA) at a confluence of >70%. One set of keratinocytes were reverse transfected with 300 ng of the chemically modified mRNA (mmRNA) complexed with RNAIMAX™ from Invitrogen. Another set of keratinocytes are forward transfected with 300 ng modified mRNA complexed with RNAIMAX™ from Invitrogen. The modified mRNA: RNAIMAX™ complex is formed by first incubating the RNA with Supplement-free EPILIFE® media in a 5× volumetric dilution for 10 minutes at room temperature.

[1296] In a second vial, RNAIMAX™ reagent was incubated with Supplement-free EPILIFE® Media in 10× volumetric dilution for 10 minutes at room temperature. The RNA vial was then mixed with the RNAIMAX™ vial and incubated for 20-30 minutes at room temperature before being added to the cells in a drop-wise fashion. Secreted human Granulocyte-Colony Stimulating Factor (G-CSF) concentration in the culture medium is measured at 18 hours post-transfection for each of the chemically modified mRNA in triplicate.

[1297] Secretion of Human G-CSF from transfected human keratinocytes is quantified using an ELISA kit from Invitrogen or R&D Systems (Minneapolis, MN) following the manufacturers recommended instructions.

[1298] D. Modified mRNA Dose and Duration: G-CSF ELISA

[1299] Keratinocytes are grown in EPILIFE® medium with Supplement S7 from Invitrogen at a confluence of >70%. Keratinocytes are reverse transfected with either 0 ng, 46.875 ng, 93.75 ng, 187.5 ng, 375 ng, 750 ng, or 1500 ng modified mRNA complexed with the RNAIMAX™ from Invitrogen (Carlsbad, CA). The modified mRNA:RNAIMAX™ complex is formed as described. Secreted human G-CSF concentration in the culture medium is measured at 0, 6, 12, 24, and 48 hours post-transfection for each concentration of each modified mRNA in triplicate. Secretion of human G-CSF from transfected human keratinocytes is quantified using an ELISA kit from Invitrogen or R&D Systems following the manufacturers recommended instructions.

### Example 35. Split Dose Studies

[1300] Studies utilizing multiple subcutaneous or intramuscular injection sites at one time point were designed and performed to investigate ways to increase mmRNA drug exposure and improve protein production. In addition to detection of the expressed protein product, an assessment of the physiological function of proteins was also determined through analyzing samples from the animal tested.

[1301] Surprisingly, it has been determined that split dosing of mmRNA produces greater protein production and phenotypic responses than those produced by single unit dosing or multi-dosing schemes.

[1302] The design of a single unit dose, multi-dose and split dose experiment involved using human erythropoietin (EPO) mmRNA (mRNA shown in SEQ ID NO: 31910; polyA tail of approximately 160 nucleotides not shown in sequence; 5′cap, Cap1) administered in buffer alone. The dosing vehicle (F. buffer) consisted of 150 mM NaCl, 2 mM CaCl₂), 2 mM Na⁺-phosphate (1.4 mM monobasic sodium phosphate; 0.6 mM dibasic sodium phosphate), and 0.5 mM EDTA, pH 6.5. The pH was adjusted using sodium hydroxide and the final solution was filter sterilized. The mmRNA was modified with 5meC at each cytosine and pseudouridine replacement at each uridine site.

[1303] Animals (n=5) were injected IM (intramuscular) for the single unit dose of 100 ug. For multi-dosing, two schedules were used, 3 doses of 100 ug and 6 doses of 100 ug. For the split dosing scheme, two schedules were used, 3 doses at 33.3 ug and 6 doses of 16.5 ug mmRNA. Control dosing involved use of buffer only at 6 doses. Control mmRNA involved the use of luciferase mmRNA (IVT cDNA sequence shown in SEQ ID NO: 31916; mRNA sequence shown in SEQ ID NO: 31917, polyA tail of approximately 160 nucleotides not shown in sequence, 5′cap, Cap1, fully modified with 5-methylcytosine at each cytosine and pseudouridine replacement at each uridine site) dosed 6 times at 100 ug. Blood and muscle tissue were evaluated 13 hrs post injection.

[1304] Human EPO protein was measured in mouse serum 13 h post I.M. single, multi- or split dosing of the EPO mmRNA in buffer. Seven groups of mice (n=5 mice per group) were treated and evaluated. The results are shown in Table 60.

TABLE 60
Split dose study

| | | | | Avg. | Polypeptide | |
|---|---|---|---|---|---|---|
| | | | | pmol/mL | per | Dose |
| | | Dose of | Total | human | unit drug | Splitting |
| Group | Treatment | mmRNA | Dose | EPO | (pmol/ug) | Factor |
| 1 | Human EPO | 1 × 100 ug | 100 ug | 14.3 | .14 | 1 |
| | mmRNA | | | | | |
| 2 | Human EPO | 3 × 100 ug | 300 ug | 82.5 | .28 | 2 |
| | mmRNA | | | | | |
| 3 | Human EPO | 6 × 100 ug | 600 ug | 273.0 | .46 | 3.3 |
| | mmRNA | | | | | |
| 4 | Human EPO | 3 × 33.3 ug | 100 ug | 104.7 | 1.1 | 7.9 |
| | mmRNA | | | | | |
| 5 | Human EPO | 6 × 16.5 ug | 100 ug | 127.9 | 1.3 | 9.3 |
| | mmRNA | | | | | |
| 6 | Luciferase | 6 × 100 ug | 600 ug | 0 | — | — |
| | mmRNA | | | | | |
| 7 | Buffer Alone | — | — | 0 | — | — |

[1305] The splitting factor is defined as the product per unit drug divided by the single dose product per unit drug (PUD). For example for treatment group 2 the value 0.28 or product (EPO) per unit drug (mmRNA) is divided by the single dose product per unit drug of 0.14. The result is 2. Likewise, for treatment group 4, the value 1.1 or product (EPO) per unit drug (mmRNA) is divided by the single dose product per unit drug of 0.14. The result is 7.9. Consequently, the dose splitting factor (DSF) may be used as an indicator of the efficacy of a split dose regimen. For any single administration of a total daily dose, the DSF should be equal to 1. Therefore any DSF greater than this value in a split dose regimen is an indication of increased efficacy.

[1306] To determine the dose response trends, impact of injection site and impact of injection timing, studies are performed. In these studies, varied doses of 1 ug, 5 ug, 10 ug, 25 ug, 50 ug, and values in between are used to determine dose response outcomes. Split dosing for a 100 ug total dose includes three or six doses of 1.6 ug, 4.2 ug, 8.3 ug, 16.6 ug, or values and total doses equal to administration of the total dose selected.

[1307] Injection sites are chosen from the limbs or any body surface presenting enough area suitable for injection. This may also include a selection of injection depth to target the dermis (Intradermal), epidermis (Epidermal), subcutaneous tissue (SC) or muscle (IM). Injection angle will vary based on targeted delivery site with injections targeting the intradermal site to be 10-15 degree angles from the plane of the surface of the skin, between 20-45 degrees from the plane of the surface of the skin for subcutaneous injections and angles of between 60-90 degrees for injections substantially into the muscle.

### Example 36. Quantification in Exosomes

[1308] The quantity and localization of the mmRNA of the present invention can be determined by measuring the amounts (initial, timecourse, or residual basis) in isolated exosomes. In this study, since the mmRNA are typically codon-optimized and distinct in sequence from endogenous mRNA, the levels of mmRNA are quantitated as compared to endogenous levels of native or wild type mRNA by using the methods of Gibbings, PCT/IB2009/005878, the contents of which are incorporated herein by reference in their entirety.

[1309] In these studies, the method is performed by first isolating exosomes or vesicles preferably from a bodily fluid of a patient previously treated with a polynucleotide, primary construct or mmRNA of the invention, then measuring, in said exosomes, the polynucleotide, primary construct or mmRNA levels by one of mRNA microarray, qRT-PCR, or other means for measuring RNA in the art including by suitable antibody or immunohistochemical methods.

### Example 37. Effect of Modified mRNA on Cellular Viability, Cytotoxicity and Apoptosis

[1310] This experiment demonstrates cellular viability, cytotoxicity and apoptosis for distinct modified mRNA in-vitro transfected Human Keratinocyte cells. Keratinocytes are grown in EPILIFE® medium with Human Keratinocyte Growth Supplement in the absence of hydrocortisone from Invitrogen (Carlsbad, CA) at a confluence of >70%. Keratinocytes are reverse transfected with 0 ng, 46.875 ng, 93.75 ng, 187.5 ng, 375 ng, 750 ng, 1500 ng, 3000 ng, or 6000 ng of modified mRNA complexed with RNAIMAX™ from Invitrogen. The modified mRNA:RNAIMAX™ complex is formed. Secreted human G-CSF concentration in the culture medium is measured at 0, 6, 12, 24, and 48 hours post-transfection for each concentration of each modified m RNA in triplicate. Secretion of human G-CSF from transfected human keratinocytes is quantified using an ELISA kit from Invitrogen or R&D Systems following the manufacturers recommended instructions.

[1311] Cellular viability, cytotoxicity and apoptosis is measured at 0, 12, 48, 96, and 192 hours post-transfection using the APOTOX-GLO™ kit from Promega (Madison, WI) according to manufacturer instructions.

### Example 38. Detection of a Cellular Innate Immune Response to Modified mRNA Using an ELISA Assay

[1312] An enzyme-linked immunosorbent assay (ELISA) for Human Tumor Necrosis Factor-α (TNF-α), Human Interferon-β (IFN-β) and Human Granulocyte-Colony Stimulating Factor (G-CSF) secreted from in vitro-transfected Human Keratinocyte cells is tested for the detection of a cellular innate immune response. Keratinocytes are grown in EPILIFE® medium with Human Keratinocyte Growth Supplement in the absence of hydrocortisone from Invitrogen (Carlsbad, CA) at a confluence of >70%. Secreted TNF-α keratinocytes are reverse transfected with 0 ng, 93.75 ng, 1 87.5 ng, 375 ng, 750 ng, 1500 ng or 3000 ng of the chemically modified mRNA (mmRNA) complexed with RNAIMAX™ from Invitrogen as described in triplicate. Secreted TNF-α in the culture medium is measured 24 hours post-transfection for each of the chemically modified mRNA using an ELISA kit from Invitrogen according to the manufacturer protocols.

[1313] Secreted IFN-β in the same culture medium is measured 24 hours post-transfection for each of the chemically modified mRNA using an ELISA kit from Invitrogen according to the manufacturer protocols. Secreted human G-CSF concentration in the same culture medium is measured at 24 hours post-transfection for each of the chemically modified mRNA. Secretion of human G-CSF from transfected human keratinocytes is quantified using an ELISA kit from Invitrogen or R&D Systems (Minneapolis, MN) following the manufacturers recommended instructions. These data indicate which modified mRNA (mmRNA) are capable eliciting a reduced cellular innate immune response in comparison to natural and other chemically modified polynucleotides or reference compounds by measuring exemplary type 1 cytokines TNF-α and IFN-β.

### Example 39. Human Granulocyte-Colony Stimulating Factor (G-CSF) Modified mRNA-Induced Cell Proliferation Assay

[1314] Human keratinocytes are grown in EPILIFE® medium with Supplement S7 from Invitrogen at a confluence of >70% in a 24-well collagen-coated TRANSWELL® (Coming, Lowell, MA) co-culture tissue culture plate. Keratinocytes are reverse transfected with 750 ng of the indicated chemically modified mRNA (mmRNA) complexed with RNAIMAX from Invitrogen as described in triplicate. The modified mRNA:RNAIMAX complex is formed as described. Keratinocyte media is exchanged 6-8 hours post-transfection. 42-hours post-transfection, the 24-well TRANSWELL® plate insert with a 0.4 μm-pore semi-permeable polyester membrane is placed into the human G-CSF modified mRNA-transfected keratinocyte containing culture plate

[1315] Human myeloblast cells, Kasumi-1 cells or KG-1 (0.2×10⁵ cells), are seeded into the insert well and cell proliferation is quantified 42 hours post-co-culture initiation using the CyQuant Direct Cell Proliferation Assay (Invitrogen, Carlsbad, CA) in a 100-120 μl volume in a 96-well plate. Modified mRNA-encoding human G-CSF-induced myeloblast cell proliferation is expressed as a percent cell proliferation normalized to untransfected keratinocyte/myeloblast co-culture control wells. Secreted human G-CSF concentration in both the keratinocyte and myeloblast insert co-culture wells is measured at 42 hours post-co-culture initiation for each modified mRNA in duplicate. Secretion of human G-CSF is quantified using an ELISA kit from Invitrogen following the manufacturer recommended instructions.

[1316] Transfected human G-CSF modified mRNA in human keratinocyte feeder cells and untransfected human myeloblast cells are detected by RT-PCR. Total RNA from sample cells is extracted and lysed using RNEASY® kit (Qiagen, Valencia, CA) according to the manufacturer instructions. Extracted total RNA is submitted to RT-PCR for specific amplification of modified mRNA-G-CSF using PROTOSCRIPT® M-MuLV Taq RT-PCR kit (New England BioLabs, Ipswich, MA) according to the manufacturer instructions with human G-CSF-specific primers. RT-PCR products are visualized by 1.2% agarose gel electrophoresis.

### Example 40: Co-Culture Assay

[1317] Modified mRNA comprised of chemically-distinct modified nucleotides encoding human Granulocyte-Colony Stimulating Factor (G-CSF) may stimulate the cellular proliferation of a transfection incompetent cell in a co-culture environment. The co-culture includes a highly transfectable cell type such as a human keratinocyte and a transfection incompetent cell type such as a white blood cell (WBC). The modified mRNA encoding G-CSF are transfected into the highly transfectable cell allowing for the production and secretion of G-CSF protein into the extracellular environment where G-CSF acts in a paracrine-like manner to stimulate the white blood cell expressing the G-CSF receptor to proliferate. The expanded WBC population may be used to treat immune-compromised patients or partially reconstitute the WBC population of an immunosuppressed patient and thus reduce the risk of opportunistic infections. In another example, a highly transfectable cell such as a fibroblast are transfected with certain growth factors support and simulate the growth, maintenance, or differentiation of poorly transfectable embryonic stem cells or induced pluripotent stem cells.

### Example 41: Detection Assays of Human IgG Antibodies

[1318] A. ELISA Detection of Human IgG Antibodies

[1319] This example describes an ELISA for Human IgG from Chinese Hamster Ovary's (CHO) and Human Embryonic Kidney (HEK, HER-2 Negative) 293 cells transfected with human IgG modified mRNA (mmRNA). The Human Embryonic Embryonic Kidney (HEK) 293 are grown in CD 293 Medium with Supplement of L-Glutamine from Invitrogen until they reach a confluence of 80-90%. The CHO cells are grown in CD CHO Medium with Supplement of L-Glutamine, Hypoxanthine and Thymidine. In one aspect, 2×106 cells are transfected with 24 μg modified mRNA complexed with RNAIMAX™ from Invitrogen in a 75 cm2 culture flask from Corning in 7 ml of medium. In another aspect, 80,000 cells are transfected with 1 μg modified mRNA complexed with RNAIMAX™ from Invitrogen in a 24-well plate. The modified mRNA:RNAIMAX™ complex is formed by incubating in a vial the mmRNA with either the CD 293 or CD CHO medium in a 5× volumetric dilution for 10 minutes at room temperature. In a second vial, RNAIMAX™ reagent is incubated with CD 293 medium or CD CHO medium in a 10× volumetric dilution for 10 minutes at room temperature. The mmRNA vial is then mixed with the RNAIMAX™ vial and incubated for 20-30 minutes at room temperature before it is added to the CHO or HEK cells in a drop-wise fashion. The culture supernatants are stored at 4 degrees celsius. The concentration of the secreted human IgG in the culture medium in the 24 μg mmRNA transfections is measured at 12, 24, 36 hours post-transfection and the 1 μg mmRNA transfection is measured at 36 hours. Secretion of Trastuzumab from transfected HEK 293 cells is quantified using an ELISA kit from Abcam (Cambridge, MA) following the manufacturers recommended instructions. The data shows that a Humanized IgG antibody (such as Trastuzumab) mmRNA is capable of being translated in HEK Cells and that Trastuzumab is secreted out of the cells and released into the extracellular environment. Furthermore, the data demonstrate that transfection of cells with mmRNA encoding Trastuzumab for the production of secreted protein can be scaled up to a bioreactor or large cell culture conditions.

[1320] B. Western Detection of Modified mRNA Produced Human IgG Antibody

[1321] A Western Blot of CHO-K1 cells is co-transfected with 1 μg each of Heavy and Light Chain of Trastuzumab modified mRNA (mmRNA). CHO cells are grown using standard protocols in 24-well plates. The cell supernatants or cell lysates are collected 24 hours post-transfection, separated on a 12% SDS-Page gel and transferred onto a nitrocellulose membrane using the IBOT® by Invitrogen (Carlsbad, CA). The cells are incubated with a first conjugation of a rabbit polyclonal antibody to Human IgG conjugated to DYLIGHT594 (ab96904, abcam, Cambridge, MA) and a second conjugation of a goat polyclonal antibody to Rb IgG which is conjugated to alkaline phosphatase. After incubation, the antibody is detected using Novex® alkaline phosphatase chromogenic substrate by Invitrogen (Carlsbad, CA).

[1322] C. Cell Immuno Staining of Modified mRNA Produced Trastuzumab and Rituximab

[1323] CHO-K1 cells are co-transfected with 500 ng each of Heavy and Light Chain of either Trastuzumab or Rituximab. Cells are grown in F-12K Medium from GIBCO® (Grand Island, NY) and 10% FBS. Cells are fixed with 4% paraformaldehyde in PBS, permeabilized with 0.1% Triton X-100 in PBS for 5-10 minutes at room temperature and cells are washed 3 times with room temperature PBS. Trastuzumab and Rituximab staining is performed using rabbit polyclonal antibody to Human IgG conjugated to DYLIGHT®594 (ab96904, abcam, Cambridge, MA) according to the manufacture's recommended dilutions. Nuclear DNA staining is performed with DAPI dye from Invitrogen (Carlsbad, CA). The protein for Trastuzumab and Rituximab is translated and localized to the cytoplasm upon modified mRNA transfections. Pictures are taken 13 hours post-transfection.

[1324] D. Binding Immunoblot Assay for Modified mRNA Produced Trastuzumab and Rituximab

[1325] Trastuzumab and Rituximab are detected using a binding immunoblot detection assay. Varying concentrations (100 ng/ul to 0 ng/ul) of the ErB2 peptide (ab40048, abeam, Cambridge, MA), antigen for Trastuzumab and the CD20 peptide (ab97360, abeam, Cambridge, MA), antigen for Rituximab are run on a 12% SDS-Page gel and transferred onto a membrane using the iBlot from Invitrogen. The membranes are incubated for 1 hour with their respective cell supernatants from CHO-K1 cells which are co-transfected with 500 ng each of Heavy and Light Chain of either Trastuzumab or Rituximab. The membranes are blocked with 1% BSA and a secondary anti-human IgG antibody conjugated to alkaline phosphatase (abcam, Cambridge, MA) is added. Antibody detection is conducted using the NOVEX alkaline phosphatase chromogenic substrate by Invitrogen (Carlsbad, CA). The data shows that a humanized IgG antibodies generated from modified mRNA is capable of recognizing and binding to their respective antigens.

[1326] E. Cell Proliferation Assay

[1327] The SK-BR-3 cell line, an adherent cell line derived from a human breast adenocarcinoma, which overexpresses the HER2/neu receptor can be used to compare the anti-proliferative properties of modified mRNA (mmRNA) generated Trastuzumab. Varying concentrations of purified Trastuzumab generated from modified mRNA and trastuzumab are be added to cell cultures, and their effects on cell growth are be assessed in triplicate cytotoxicity and viability assays.

### Example 42: Bulk Transfection of Modified mRNA into Cell Culture

[1328] A. Cationic Lipid Delivery Vehicles

[1329] RNA transfections are carried out using RNAIMAX™ (Invitrogen, Carlsbad, CA) or TRANSIT-mRNA (Mirus Bio, Madison, WI) cationic lipid delivery vehicles. RNA and reagent are first diluted in Opti-MEM basal media (Invitrogen, Carlsbad, CA). 100 ng/uL RNA is diluted 5× and 5 μL of RNAIMax per g of RNA is diluted 10×. The diluted components are pooled and incubated 15 minutes at room temperature before they are dispensed to culture media. For TRANSIT-mRNA transfections, 100 ng/uL RNA is diluted 10× in Opti-MEM and BOOST reagent is added (at a concentration of 2 μL per g of RNA), TRANSIT-mRNA is added (at a concentration of 2 μL per g of RNA), and then the RNA-lipid complexes are delivered to the culture media after a 2-minute incubation at room temperature. RNA transfections are performed in Nutristem xenofree hES media (Stemgent, Cambridge, MA) for RiPS derivations, Dermal Cell Basal Medium plus Keratinocyte Growth Kit (ATCC) for keratinocyte experiments, and Opti-MEM plus 2% FBS for all other experiments. Successful introduction of a modified mRNA (mmRNA) into host cells can be monitored using various known methods, such as a fluorescent marker, such as Green Fluorescent Protein (GFP). Successful transfection of a modified mRNA can also be determined by measuring the protein expression level of the target polypeptide by e.g., Western Blotting or immunocytochemistry. Similar methods may be followed for large volume scale-up to multi-liter (5-10,000 L) culture format following similar RNA-lipid complex ratios.

[1330] B. Electroporation Delivery of Exogenous Synthetic mRNA Transcripts

[1331] Electroporation parameters are optimized by transfecting MRC-5 fibroblasts with in vitro synthetic modified mRNA (mmRNA) transcripts and measuring transfection efficiency by quantitative RT-PCR with primers designed to specifically detect the exogenous transcripts. Discharging a 150 uF capacitor charged to F into 2.5×10⁶ cells suspended in 50 μl of Opti-MEM (Invitrogen, Carlsbad, CA) in a standard electroporation cuvette with a 2 mm gap is sufficient for repeated delivery in excess of 10,000 copies of modified mRNA transcripts per cell, as determined using the standard curve method, while maintaining high viability (>70%). Further experiments may reveal that the voltage required to efficiently transfect cells with mmRNA transcripts can depend on the cell density during electroporation. Cell density may vary from 1×10⁶ cell/50 μl to a density of 2.5×10⁶ cells/50 μl and require from 110V to 145V to transfect cells with similar efficiencies measured in transcript copies per cell. Large multi-liter (5-10,000 L) electroporation may be performed similar to large volume flow electroporation strategies similar to methods described with the above described constraints (Li et al., 2002; Geng et al., 2010).

### Example 43: In Vivo Delivery Using Lipoplexes

[1332] A. Human EPO Modified RNA Lipoplex

[1333] A formulation containing 100 μg of modified human erythropoietin mRNA (mRNA shown in SEQ ID NO: 31910; polyA tail of approximately 160 nucleotides not shown in sequence; 5′cap, Cap1) (EPO; fully modified 5-methylcytosine; N1-methyl-pseudouridine) was lipoplexed with 30% by volume of RNAIMAX™ (Lipoplex-h-Epo-46; Generation 2 or Gen2) in 50-70 uL delivered intramuscularly to four C57/BL6 mice. Other groups consisted of mice receiving an injection of the lipoplexed modified luciferase mRNA (Lipoplex-luc) (IVT cDNA sequence shown in SEQ ID NO: 31916; mRNA sequence shown in SEQ ID NO: 31917, polyA tail of approximately 160 nucleotides not shown in sequence, 5′cap, Cap1, fully modified with 5-methylcytosine at each cytosine and pseudouridine replacement at each uridine site) which served as a control containing 100 μg of modified luciferase mRNA was lipoplexed with 30% by volume of RNAiMAX™ or mice receiving an injection of the formulation buffer as negative control at a dose volume of 65 ul. 13 hours after the intramuscular injection, serum was collected from each mouse to measure the amount of human EPO protein in the mouse serum by human EPO ELISA and the results are shown in Table 61.

TABLE 61
Human EPO Production (IM Injection Route)

| Formualtion | Mouse #1 | Mouse #2 | Mouse #3 | Mouse #4 | Average |
|---|---|---|---|---|---|
| Lipoplex-h-Epo- | 189.8 | 92.55 | 409.5 | 315.95 | 251.95 |
| 46 | | | | | |
| Lipoplex-Luc | 0 | 0 | 0 | 0 | 0 |
| Formulation | 0 | 0 | 0 | 0 | 0 |
| Buffer | | | | | |

[1334] B. Human G-CSF Modified RNA Lipoplex

[1335] A formulation containing 100 μg of one of two versions of modified human G-CSF mRNA(mRNA sequence shown in SEQ ID NO: 31907; polyA tail of approximately 160 nucleotides not shown in sequence; 5′cap, Cap1) (G-CSF fully modified with 5-methylcytosine and pseudouridine (G-CSF) or G-CSF fully modified with 5-methylcytosine and N1-methyl-pseudouridine (G-CSF-N1) lipoplexed with 30% by volume of RNAIMAX™ and delivered in 150 uL intramuscularly (IM), in 150 uL subcutaneously (S.C) and in 225 uL intravenously (IV) to C57/BL6 mice.

[1336] Three control groups were administered either 100 μg of modified luciferase mRNA (IVT cDNA sequence shown in SEQ ID NO: 31916; mRNA sequence shown in SEQ ID NO: 31917, polyA tail of approximately 160 nucleotides not shown in sequence, 5′cap, Cap1, fully modified with 5-methylcytosine at each cytosine and pseudouridine replacement at each uridine site) intramuscularly (Luc-unsp I.M.) or 150 μg of modified luciferase mRNA intravenously (Luc-unsp I.V.) or 150 uL of the formulation buffer intramuscularly (Buffer I.M.). 6 hours after administration of a formulation, serum was collected from each mouse to measure the amount of human G-CSF protein in the mouse serum by human G-CSF ELISA and the results are shown in Table 62.

[1337] These results demonstrate that both 5-methylcytosine/pseudouridine and 5-methylcytosine/N1-methyl-pseudouridine modified human G-CSF mRNA can result in specific human G-CSF protein expression in serum when delivered via IV. or I.M. route of administration in a lipoplex formulation.

TABLE 62
Human G-CSF in Serum (I.M., I.V., S.C. Injection Route)

| Formulation | Route | G-CSF (pg/ml) |
|---|---|---|
| G-CSF | I.M. | 85.6 |
| G-CSF N1 | I.M. | 40.1 |
| G-CSF | S.C. | 3.9 |
| G-CSF N1 | S.C. | 0.0 |
| G-CSF | I.V. | 31.0 |
| G-CSF N1 | I.V. | 6.1 |
| Luc-unsp | I.M. | 0.0 |
| Luc-unsp | I.V. | 0.0 |
| Buffer | I.M. | 0.0 |

[1338] C. Human G-CSF Modified RNA Lipoplex Comparison

[1339] A formulation containing 100 μg of either modified human G-CSF mRNA lipoplexed with 30% by volume of RNAIMAX™ with a 5-methylcytosine (5mc) and a pseudouridine (ψ) modification (G-CSF-Gen1-Lipoplex), modified human G-CSF mRNA with a 5mc and W modification in saline (G-CSF-Gen1-Saline), modified human G-CSF mRNA with a N1-5-methylcytosine (N1-5mc) and a ψ modification lipoplexed with 30% by volume of RNAIMAX™ (G-CSF-Gen2-Lipoplex), modified human G-CSF mRNA with a N1-5mc and W modification in saline (G-CSF-Gen2-Saline), modified luciferase with a 5mc and W modification lipoplexed with 30% by volume of RNAIMAX™ (Luc-Lipoplex), or modified luciferase mRNA with a 5mc and ψ modification in saline (Luc-Saline) was delivered intramuscularly (I.M.) or subcutaneously (S.C.) and a control group for each method of administration was giving a dose of 80 uL of the formulation buffer (F. Buffer) to C57/BL6 mice. 13 hours post injection serum and tissue from the site of injection were collected from each mouse and analyzed by G-CSF ELISA to compare human G-CSF protein levels. The results of the human G-CSF protein in mouse serum from the intramuscular administration, and the subcutaneous administration results are shown in Table 63.

[1340] These results demonstrate that 5-methylcytosine/pseudouridine and 5-methylcytosine/N1-methyl-pseudouridine modified human G-CSF mRNA can result in specific human G-CSF protein expression in serum when delivered via I.M. or S.C. route of administration whether in a saline formulation or in a lipoplex formulation. As shown in Table 63, 5-methylcytosine/N1-methyl-pseudouridine modified human G-CSF mRNA generally demonstrates increased human G-CSF protein production relative to 5-methylcytosine/pseudouridine modified human G-CSF mRNA.

TABLE 63
Human G-CSF Protein in Mouse Serum

| | G-CSF (pg/ml) | |
|---|---|---|
| Formulation | I.M. Injection Route | S.C. Injenction Route |
| G-CSF-Gen1-Lipoplex | 13.988 | 42.855 |
| G-CSF-Gen1-saline | 9.375 | 4.614 |
| G-CSF-Gen2-lipoplex | 75.572 | 32.107 |
| G-CSF-Gen2-saline | 20.190 | 45.024 |
| Luc lipoplex | 0 | 3.754 |
| Luc saline | 0.0748 | 0 |
| F. Buffer | 4.977 | 2.156 |

[1341] D. mCherry Modified RNA Lipoplex Comparison

[1342] Intramuscular and Subcutaneous Administration

[1343] A formulation containing 100 μg of either modified mCherry mRNA (mRNA sequence shown in SEQ ID NO: 31908; polyA tail of approximately 160 nucleotides not shown in sequence; 5′cap, Cap1) lipoplexed with 30% by volume of RNAIMAX™ or modified mCherry mRNA in saline is delivered intramuscularly and subcutaneously to mice. A formulation buffer is also administered to a control group of mice either intramuscularly or subcutaneously. The site of injection on the mice may be collected 17 hours post injection for sectioning to determine the cell type(s) responsible for producing protein.

[1344] Intravitreal Administration

[1345] A formulation containing 10 μg of either modified mCherry mRNA lipoplexed with RNAIMAX™, modified mCherry mRNA in a formulation buffer, modified luciferase mRNA lipoplexed with RNAMAX™, modified luciferase mRNA in a formulation buffer can be administered by intravitreal injection (IVT) in rats in a dose volume of 5 μl/eye. A formulation buffer is also administered by IVT to a control group of rats in a dose volume of 5 μl/eye. Eyes from treated rats can be collected after 18 hours post injection for sectioning and lysating to determine whether mmRNA can be effectively delivered in vivo to the eye and result in protein production, and to also determine the cell type(s) responsible for producing protein in vivo.

[1346] Intranasal Administration

[1347] A formulation containing 100 μg of either modified mCherry mRNA lipoplexed with 30% by volume of RNAIMAX™, modified mCherry mRNA in saline, modified luciferase mRNA lipoplexed with 30% by volume of RNAIMAX™ or modified luciferase mRNA in saline is delivered intranasally. A formulation buffer is also administered to a control group intranasally. Lungs may be collected about 13 hours post instillation for sectioning (for those receiving mCherry mRNA) or homogenization (for those receiving luciferase mRNA). These samples will be used to determine whether mmRNA can be effectively delivered in vivo to the lungs and result in protein production, and to also determine the cell type(s) responsible for producing protein in vivo.

### Example 44: In Vivo Delivery Using Varying Lipid Ratios

[1348] Modified mRNA was delivered to C57/BL6 mice to evaluate varying lipid ratios and the resulting protein expression. Formulations of 100 μg modified human EPO mRNA (mRNA shown in SEQ ID NO: 31910; polyA tail of approximately 160 nucleotides not shown in sequence; 5′cap, Cap1; fully modified with 5-methylcytosine and pseudouridine) lipoplexed with 10%, 30% or 50% RNAIMAX™, 100 μg modified luciferase mRNA (IVT cDNA sequence shown in SEQ ID NO: 31916; mRNA sequence shown in SEQ ID NO: 31917, polyA tail of approximately 160 nucleotides not shown in sequence, 5′cap, Cap1, fully modified with 5-methylcytosine at each cytosine and pseudouridine replacement at each uridine site) lipoplexed with 10%, 30% or 50% RNAIMAX™ or a formulation buffer were administered intramuscularly to mice in a single 70 μl dose. Serum was collected 13 hours post injection to undergo a human EPO ELISA to determine the human EPO protein level in each mouse. The results of the human EPO ELISA, shown in Table 64, show that modified human EPO expressed in the muscle is secreted into the serum for each of the different percentage of RNAIMAX™

TABLE 64
Human EPO Protein in Mouse Serum (IM Injection Route)

| Formulation | EPO (pg/ml) |
|---|---|
| Epo + 10% RNAiMAX | 11.4 |
| Luc + 10% RNAiMAX | 0 |
| Epo + 30% RNAiMAX | 27.1 |
| Luc + 30% RNAiMAX | 0 |
| Epo + 50% RNAiMAX | 19.7 |
| Luc + 50% RNAiMAX | 0 |
| F. Buffer | 0 |

### Example 45: Intramuscular and Subcutaneous In Vivo Delivery in Mammals

[1349] Modified human EPO mRNA (mRNA sequence shown in SEQ ID NO: 31910; polyA tail of approximately 160 nucleotides not shown in sequence; 5′cap, Cap1; fully modified with 5-methylcytosine and pseudouridine) formulated in formulation buffer was delivered to either C57/BL6 mice or Sprague-Dawley rats to evaluate the dose dependency on human EPO production. Rats were intramuscularlly injected with 50 μl of the modified human EPO mRNA (h-EPO), modified luciferase mRNA (Luc) (IVT cDNA sequence shown in SEQ ID NO: 31916; mRNA sequence shown in SEQ ID NO: 31917, polyA tail of approximately 160 nucleotides not shown in sequence, 5′cap, Cap1, fully modified with 5-methylcytosine at each cytosine and pseudouridine replacement at each uridine site) or the formulation buffer (F.Buffer) as described in the dosing chart Table 65.

[1350] Mice were intramuscularly or subcutaneously injected with 50 μl of the modified human EPO mRNA (h-EPO), modified luciferase mRNA (Luc) or the formulation buffer (F.Buffer) as described in the dosing chart Table 66. 13 hours post injection blood was collected and serum was analyzed to determine the amount human EPO for each mouse or rat. The average and geometric mean in pg/ml for the rat study are also shown in Table 65.

TABLE 65
Rat Study

| | | Dose | Avg. | Geometric- |
|---|---|---|---|---|
| | Group | (ug) | pg/ml | mean pg/ml |
| h-EPO | G#1 | 150 | 67.7 | 67.1 |
| h-EPO | G#2 | 100 | 79.4 | 66.9 |
| h-EPO | G#3 | 50 | 101.5 | 85.4 |
| h-EPO | G#4 | 10 | 46.3 | 31.2 |
| h-EPO | G#5 | 1 | 28.7 | 25.4 |
| Luc | G#6 | 100 | 24.5 | 22.4 |
| F. Buffer | G#7 | — | 18.7 | 18.5 |

TABLE 66
Mouse Study

| | | | | Average Level |
|---|---|---|---|---|
| Route | Treatment | Group | Dose | in serum pg/ml |
| IM | h-EPO | 1 | 100 μg | 96.2 |
| IM | h-EPO | 2 | 50 μg | 63.5 |
| IM | h-EPO | 3 | 25 μg | 18.7 |
| IM | h-EPO | 4 | 10 μg | 25.9 |
| IM | h-EPO | 5 | 1 μg | 2.6 |
| IM | Luc | 6 | 100 μg | 0 |
| IM | F. Buffer | 7 | — | 1.0 |
| SC | h-EPO | 1 | 100 μg | 72.0 |
| SC | Luc | 2 | 100 μg | 26.7 |
| SC | F. Buffer | 3 | — | 17.4 |

### Example 46: Duration of Activity after Intramuscular In Vivo Delivery

[1351] Modified human EPO mRNA (mRNA sequence shown in SEQ ID NO: 31910; polyA tail of approximately 160 nucleotides not shown in sequence; 5′cap, Cap1; fully modified with 5-methylcytosine and pseudouridine) formulated in formulation buffer was delivered to Sprague-Dawley rats to determine the duration of the dose response. Rats were intramuscularly injected with 50 μl of the modified human EPO mRNA (h-EPO), modified luciferase mRNA(IVT cDNA sequence shown in SEQ ID NO: 31916; mRNA sequence shown in SEQ ID NO: 31917, polyA tail of approximately 160 nucleotides not shown in sequence, 5′cap, Cap1, fully modified with 5-methylcytosine at each cytosine and pseudouridine replacement at each uridine site) (Luc) or the formulation buffer (F.Buffer) as described in the dosing chart Table 67. The rats were bled 2, 6, 12, 24, 48 and 72 hours after the intramuscular injection to determine the concentration of human EPO in serum at a given time. The average and geometric mean in pg/ml for this study are also shown in Table 67.

TABLE 67
Dosing Chart

| | | Dose | Avg. | Geometric- |
|---|---|---|---|---|
| | Group | (ug) | pg/ml | mean (pg/ml) |
| h-EPO | 2 hour | 100 | 59.6 | 58.2 |
| h-EPO | 6 hour | 100 | 68.6 | 55.8 |
| h-EPO | 12 hour | 100 | 87.4 | 84.5 |
| h-EPO | 24 hour | 100 | 108.6 | 95.3 |
| h-EPO | 48 hour | 100 | 77.9 | 77.0 |
| h-EPO | 72 hour | 100 | 80.1 | 75.8 |
| Luc | 24, 48 and | 100 | 37.2 | 29.2 |
| | 72 hour | | | |
| F. Buffer | 24, 48 and | — | 48.9 | 10.4 |
| | 72 hour | | | |

### Example 47: Routes of Administration

[1352] Further studies were performed to investigate dosing using different routes of administration. Following the protocol outlined in Example 35, 4 mice per group were dosed intramuscularly (I.M.), intravenously (IV) or subcutaneously (S.C.) by the dosing chart outlined in Table 68. Serum was collected 13 hours post injection from all mice, tissue was collected from the site of injection from the intramuscular and subcutaneous group and the spleen, liver and kidneys were collected from the intravenous group. The results from the intramuscular group and the subcutaneous group results are shown in Table 69.

TABLE 68
Dosing Chart

| | | | | Total | Dosing |
|---|---|---|---|---|---|
| Group | Treatment | Route | Dose of mmRNA | Dose | Vehicle |
| 1 | Lipoplex-human EPO mmRNA | I.M. | 4 × 100 ug + 30% Lipoplex | 4 × 70 ul | Lipoplex |
| 2 | Lipoplex-human EPO mmRNA | I.M. | 4 × 100 ug | 4 × 70 ul | Buffer |
| 3 | Lipoplex-human EPO mmRNA | S.C. | 4 × 100 ug + 30% Lipoplex | 4 × 70 ul | Lipoplex |
| 4 | Lipoplex-human EPO mmRNA | S.C. | 4 × 100 ug | 4 × 70 ul | Buffer |
| 5 | Lipoplex-human EPO mmRNA | I.V. | 200 ug + 30% Lipoplex | 140 ul | Lipoplex |
| 6 | Lipoplexed-Luciferase mmRNA | I.M. | 100 ug + 30% Lipoplex | 4 × 70 ul | Lipoplex |
| 7 | Lipoplexed-Luciferase mmRNA | I.M. | 100 ug | 4 × 70 ul | Buffer |
| 8 | Lipoplexed-Luciferase mmRNA | S.C. | 100 ug + 30% Lipoplex | 4 × 70 ul | Lipoplex |
| 9 | Lipoplexed-Luciferase mmRNA | S.C. | 100 ug | 4 × 70 ul | Buffer |
| 10 | Lipoplexed-human EPO mmRNA | I.V. | 200 ug + 30% Lipoplex | 140 ul | Lipoplex |
| 11 | Formulation Buffer | I.M. | 4× multi dosing | 4 × 70 ul | Buffer |

TABLE 69
Human EPO Protein in Mouse Serum (I.M. Injection Route)

EPO (pg/ml)

| Formulation | I.M. Injection Route | S.C. Injection Route |
|---|---|---|
| Epo-Lipoplex | 67.115 | 2.154 |
| Luc-Lipoplex | 0 | 0 |
| Epo-Saline | 100.891 | 11.37 |
| Luc-Saline | 0 | 0 |
| Formulation Buffer | 0 | 0 |

### Example 48. Rapidly Eliminated Lipid Nanoparticle (reLNP) Studies

[1353] A. Formulation of Modified RNA reLNPs

[1354] Solutions of synthesized lipid, 1,2-distearoyl-3-phosphatidylcholine (DSPC) (Avanti Polar Lipids, Alabaster, AL), cholesterol (Sigma-Aldrich, Taufkirchen, Germany), and α-[3′-(1,2-dimyristoyl-3-propanoxy)-carboxamide-propyl]-ω-methoxy-polyoxyethylene (PEG-c-DOMG) (NOF, Bouwelven, Belgium) are prepared and stored at −20° C. The synthesized lipid is selected from DLin-DMA with an internal ester, DLin-DMA with a terminal ester, DLin-MC3-DMA-internal ester, and DLin-MC3-DMA with a terminal ester. The reLNPs are combined to yield a molar ratio of 50:10:38.5:1.5 (reLNP: DSPC: Cholesterol: PEG-c-DOMG). Formulations of the reLNPs and modified mRNA are prepared by combining the lipid solution with the modified mRNA solution at total lipid to modified mRNA weight ratio of 10:1, 15:1, 20:1 and 30:1.

[1355] B. Characterization of Formulations

[1356] A Zetasizer Nano ZS (Malvern Instruments Ltd, Malvern, Worcestershire, UK) is used to determine the particle size, the polydispersity index (PDI) and the zeta potential of the modified mRNA nanoparticles in 1×PBS in determining particle size and 15 mM PBS in determining zeta potential.

[1357] Ultraviolet-visible spectroscopy is used to determine the concentration of modified mRNA nanoparticle formulation. After mixing, the absorbance spectrum of the solution is recorded between 230 nm and 330 nm on a DU 800 spectrophotometer (Beckman Coulter, Beckman Coulter, Inc., Brea, CA). The modified RNA concentration in the nanoparicle formulation is calculated based on the extinction coefficient of the modified RNA used in the formulation and on the difference between the absorbance at a wavelength of 260 nm and the baseline value at a wavelength of 330 nm.

[1358] QUANT-IT™ RIBOGREEN® RNA assay (Invitrogen Corporation Carlsbad, CA) is used to evaluate the encapsulation of modified RNA by the nanoparticle. The samples are diluted, transferred to a polystyrene 96 well plate, then either a TE buffer or a 2% Triton X-100 solution is added. The plate is incubated and the RIBOGREEN® reagent is diluted in TE buffer, and of this solution is added to each well. The fluorescence intensity is measured using a fluorescence plate reader (Wallac Victor 1420 Multilablel Counter; Perkin Elmer, Waltham, MA) The fluorescence values of the reagent blank are subtracted from each of the samples and the percentage of free modified RNA is determined by dividing the fluorescence intensity of the intact sample by the fluorescence value of the disrupted sample.

[1359] C. In Vitro Incubation

[1360] Human embryonic kidney epithelial (HEK293) and hepatocellular carcinoma epithelial (HepG2) cells (LGC standards GmbH, Wesel, Germany) are seeded on 96-well plates (Greiner Bio-one GmbH, Frickenhausen, Germany) and plates for HEK293 cells are precoated with collagen typel. HEK293 are seeded at a density of about 30,000 and HepG2 are seeded at a density of about 35,000 cells per well in 100 μl cell culture medium. Formulations containing mCherry mRNA (mRNA sequence shown in SEQ ID NO: 31908; polyA tail of approximately 160 nucleotides not shown in sequence; 5′cap, Cap1) are added directly after seeding the cells and incubated. The mCherry cDNA with the T7 promoter, 5′untranslated region (UTR) and 3′ UTR used in in vitro transcription (IVT) is given in SEQ ID NO: 31909.

[1361] Cells are harvested by transferring the culture media supernatants to a 96-well Pro-Bind U-bottom plate (Beckton Dickinson GmbH, Heidelberg, Germany). Cells are trypsinized with 1/2 volume Trypsin/EDTA (Biochrom AG, Berlin, Germany), pooled with respective supernatants and fixed by adding one volume PBS/2% FCS (both Biochrom AG, Berlin, Germany)/0.5% formaldehyde (Merck, Darmstadt, Germany). Samples are then submitted to a flow cytometer measurement with an excitation laser and a filter for PE-Texas Red in a LSRII cytometer (Beckton Dickinson GmbH, Heidelberg, Germany). The mean fluorescence intensity (MFI) of all events and the standard deviation of four independent wells are presented in for samples analyzed.

[1362] D. In Vivo Formulation Studies

[1363] Mice are administered intravenously a single dose of a formulation containing a modified mRNA and a reLNP. The modified mRNA administered to the mice is selected from G-CSF (mRNA sequence shown in SEQ ID NO: 31907; polyA tail of approximately 160 nucleotides not shown in sequence; 5′cap, Cap1), Factor IX (mRNA shown in SEQ ID NO: 31911; polyA tail of approximately 160 nucleotides not shown in sequence; 5′cap, Cap1) or mCherry (mRNA sequence shown in SEQ ID NO:31908; polyA tail of approximately 160 nucleotides not shown in sequence; 5′cap, Cap1).

[1364] The mice are injected with 100 ug, 10 ug or 1 ug of the formulated modified mRNA and are sacrificed 8 hours after they are administered the formulation. Serum from the mice administered formulations containing human G-CSF modified mRNA are measured by specific G-CSF ELISA and serum from mice administered human Factor IX modified RNA is analyzed by specific factor IX ELISA or chromogenic assay. The liver and spleen from the mice administered with mCherry modified mRNA are analyzed by immunohistochemistry (IHC) or fluorescence-activated cell sorting (FACS). As a control, a group of mice are not injected with any formulation and their serum and tissue are collected analyzed by ELISA, FACS and/or IHC.

### Example 49. In Vitro Transfection of VEGF-A

[1365] Human vascular endothelial growth factor-isoform A (VEGF-A) modified mRNA (mRNA sequence shown in SEQ ID NO: 31920; polyA tail of approximately 160 nucleotides not shown in sequence; 5′cap, Cap1) was transfected via reverse transfection in Human Keratinocyte cells in 24 multi-well plates. Human Keratinocytes cells were grown in EPILIFE® medium with Supplement S7 from Invitrogen (Carlsbad, CA) until they reached a confluence of 50-70%. The cells were transfected with 0, 46.875, 93.75, 187.5, 375, 750, and 1500 ng of modified mRNA (mmRNA) encoding VEGF-A which had been complexed with RNAIMAX™ from Invitrogen (Carlsbad, CA). The RNA:RNAIMAX™ complex was formed by first incubating the RNA with Supplement-free EPILIFE® media in a 5× volumetric dilution for 10 minutes at room temperature. In a second vial, RNAIMAX™ reagent was incubated with Supplement-free EPILIFE® Media in a 10× volumetric dilution for 10 minutes at room temperature. The RNA vial was then mixed with the RNAIMAX™ vial and incubated for 20-30 minutes at room temperature before being added to the cells in a drop-wise fashion.

[1366] The fully optimized mRNA encoding VEGF-A (mRNA sequence shown in SEQ TD NO: 31920; polyA tail of approximately 160 nucleotides not shown in sequence; 5′ cap, Capil) transfected with the Human Keratinocyte cells included modifications during translation such as natural nucleoside triphosphates (NTP), pseudouridine at each uridine site and 5-methylcytosine at each cytosine site (pseudo-U/5 mC), and N1-methyl-pseudouridine at each uridine site and 5-methylcytosine at each cytosine site (N1-methyl-Pseudo-U/5 mC). Cells were transfected with the mmRNA encoding VEGF-A and secreted VEGF-A concentration (pg/ml) in the culture medium was measured at 6, 12, 24, and 48 hours post-transfection for each of the concentrations using an ELISA kit from Invitrogen (Carlsbad, CA) following the manufacturers recommended instructions. These data, shown in Table 70 and FIGS. 6A, 6B and 6C, show that modified mRNA encoding VEGF-A is capable of being translated in Human Keratinocyte cells and that VEGF-A is transported out of the cells and released into the extracellular environment.

TABLE 70
VEGF-A Dosing and Protein Secretion

| | | | | |
|---|---|---|---|---|
| | 6 hours | 12 hours | 24 hours | 48 hours |
| Dose (ng) | (pg/ml) | (pg/ml) | (pg/ml) | (pg/ml) |

VEGF-A Dose Containing Natural NTPs

| | | | | |
|---|---|---|---|---|
| 46.875 | 10.37 | 18.07 | 33.90 | 67.02 |
| 93.75 | 9.79 | 20.54 | 41.95 | 65.75 |
| 187.5 | 14.07 | 24.56 | 45.25 | 64.39 |
| 375 | 19.16 | 37.53 | 53.61 | 88.28 |
| 750 | 21.51 | 38.90 | 51.44 | 61.79 |
| 1500 | 36.11 | 61.90 | 76.70 | 86.54 |

VEGF-A Dose Containing Pseudo-U/5mC

| | | | | |
|---|---|---|---|---|
| 46.875 | 10.13 | 16.67 | 33.99 | 72.88 |
| 93.75 | 11.00 | 20.00 | 46.47 | 145.61 |
| 187.5 | 16.04 | 34.07 | 83.00 | 120.77 |
| 375 | 69.15 | 188.10 | 448.50 | 392.44 |
| 750 | 133.95 | 304.30 | 524.02 | 526.58 |
| 1500 | 198.96 | 345.65 | 426.97 | 505.41 |

VEGF-A Dose Containing N1-methyl-Pseudo-U/5mC

| | | | | |
|---|---|---|---|---|
| 46.875 | 0.03 | 6.02 | 27.65 | 100.42 |
| 93.75 | 12.37 | 46.38 | 121.23 | 167.56 |
| 187.5 | 104.55 | 365.71 | 1025.41 | 1056.91 |
| 375 | 605.89 | 1201.23 | 1653.63 | 1889.23 |
| 750 | 445.41 | 1036.45 | 1522.86 | 1954.81 |
| 1500 | 261.61 | 714.68 | 1053.12 | 1513.39 |

### Example 50. In Vivo Studies of Factor IX

[1367] Human Factor IX mmRNA (Gen1; fully modified 5-methycytosine and pseudouridine) formulated in formulation buffer was delivered to mice via intramuscular injection. The results demonstrate that Factor IX protein was elevated in serum as measured 13 hours after administration.

[1368] In this study, mice (N=5 for Factor IX, N=3 for Luciferase or Buffer controls) were intramuscularly injected with 50 μl of the Factor IX mmRNA (mRNA sequence shown in SEQ ID NO: 31911; polyA tail of approximately 160 nucleotides not shown in sequence; 5′cap, Cap1), Luciferase (IVT cDNA sequence shown in SEQ ID NO: 31916; mRNA sequence shown in SEQ ID NO: 31917, polyA tail of approximately 160 nucleotides not shown in sequence, 5′cap, Cap1, fully modified with 5-methylcytosine at each cytosine and pseudouridine replacement at each uridine site) or the formulation buffer (F.Buffer) at 2× 100 ug/mouse. The mice were bled at 13 hours after the intramuscular injection to determine the concentration of human the polypeptide in serum in pg/mL. The results revealed that administration of Factor IX mmRNA resulted in levels of 1600 pg/mL at 13 hours as compared to less than 100 pg/mL of Factor IX for either Luciferase or buffer control administration.

### Example 51. Multi-Site Administration: Intramuscular and Subcutaneous

[1369] Human G-CSF modified mRNA (mRNA sequence shown in SEQ ID NO: 31907; polyA tail of approximately 160 nucleotides not shown in sequence; 5′cap, Cap1) modified as either Gen1 or Gen2 (5-methylcytosine (5mc) and a pseudouridine (ψ) modification, G-CSF-Gen1; or N1-5-methylcytosine (N1-5mc) and a ψ modification, G-CSF-Gen2) and formulated in formulation buffer were delivered to mice via intramuscular (IM) or subcutaneous (SC) injection. Injection of four doses or 2× 50 ug (two sites) daily for three days (24 hrs interval) was performed. The fourth dose was administered 6 hrs before blood collection and CBC analysis. Controls included Luciferase (IVT cDNA sequence shown in SEQ ID NO: 31916; mRNA sequence shown in SEQ ID NO: 31917, polyA tail of approximately 160 nucleotides not shown in sequence, 5′cap, Cap1, fully modified with 5-methylcytosine at each cytosine and pseudouridine replacement at each uridine site) or the formulation buffer (F.Buffer). The mice were bled at 72 hours after the first mRNA injection (6 hours after the last modified mRNA dose) to determine the effect of mRNA-encoded human G-CSF on the neutrophil count. The dosing regimen is shown in Table 71 as are the resulting neutrophil counts (thousands/uL). In Table 71, an asterisk(*) indicates statistical significance at p<0.05.

[1370] For intramuscular administration, the data reveal a four fold increase in neutrophil count above control at day 3 for the Gen1 G-CSF mRNA and a two fold increase for the Gen2 G-CSF mmRNA. For subcutaneous administration, the data reveal a two fold increase in neutrophil count above control at day 3 for the Gen2 G-CSF mRNA.

[1371] These data demonstrate that both 5-methylcytidine/pseudouridine and 5-methylcytidine/N1-methyl-pseudouridine-modified mRNA can be biologically active, as evidenced by specific increases in blood neutrophil counts.

TABLE 71
Dosing Regimen

| | | | | | Dose Vol. | Dosing | Neutrophil |
|---|---|---|---|---|---|---|---|
| Gr. | Treatment | Route | N = | Dose (μg/mouse) | (μl/mouse) | Vehicle | Thous/uL |
| 1 | G-CSF (Gen1) | I.M | 5 | 2 × 50 ug (four doses) | 50 | F. buffer | 840* |
| 2 | G-CSF (Gen1) | S.C | 5 | 2 × 50 ug (four doses) | 50 | F. buffer | 430 |
| 3 | G-CSF (Gen2) | I.M | 5 | 2 × 50 ug (four doses) | 50 | F. buffer | 746* |
| 4 | G-CSF (Gen2) | S.C | 5 | 2 × 50 ug (four doses) | 50 | F. buffer | 683 |
| 5 | Luc (Gen1) | I.M. | 5 | 2 × 50 ug (four doses) | 50 | F. buffer | 201 |
| 6 | Luc (Gen1) | S.C. | 5 | 2 × 50 ug (four doses) | 50 | F. buffer | 307 |
| 7 | Luc (Gen2) | I.M | 5 | 2 × 50 ug (four doses) | 50 | F. buffer | 336 |
| 8 | Luc (Gen2) | S.C | 5 | 2 × 50 ug (four doses) | 50 | F. buffer | 357 |
| 9 | F. Buffer | I.M | 4 | 0 (four doses) | 50 | F. buffer | 245 |
| 10 | F. Buffer | S.C. | 4 | 0 (four doses) | 50 | F. buffer | 509 |
| 11 | Untreated | — | 4 | | | — | 312 |

### Example 52. Intravenous Administration

[1372] Human G-CSF modified mRNA (mRNA sequence shown in SEQ ID NO: 31907; polyA tail of approximately 160 nucleotides not shown in sequence; 5′cap, Cap1) modified with 5-methylcytosine (5mc) and a pseudouridine (ψ) modification (Gen 1); or having no modifications and formulated in 10% lipoplex (RNAiMax) were delivered to mice at a dose of 50 ug RNA and in a volume of 100 ul via intravenous (IV) injection at days 0, 2 and 4. Neutrophils were measured at days 1, 5 and 8. Controls included non-specific mammalian RNA or the formulation buffer alone (F.Buffer). The mice were bled at days 1, 5 and 8 to determine the effect of modified mRNA-encoded human G-CSF to increase neutrophil count. The dosing regimen is shown in Table 72 as are the resulting neutrophil counts (thousands/uL; K/uL).

[1373] For intravenous administration, the data reveal a four to five fold increase in neutrophil count above control at day 5 with G-CSF modified mRNA but not with unmodified G-CSF mRNA or non-specific controls. Blood count returned to baseline four days after the final injection. No other changes in leukocyte populations were observed.

[1374] In Table 72, an asterisk(*) indicates statistical significance at p<0.001 compared to buffer.

[1375] These data demonstrate that lipoplex-formulated 5-methylcytidine/pseudouridine-modified mRNA can be biologically active, when delivered through an I.V. route of administration as evidenced by specific increases in blood neutrophil counts. No other cell subsets were significantly altered. Unmodified G-CSF mRNA similarly administered showed no pharmacologic effect on neutrophil counts.

TABLE 72
Dosing Regimen

| | | | | Dose Vol. | Dosing | Neutrophil |
|---|---|---|---|---|---|---|
| Gr. | Day | Treatment | N = | (μl/mouse) | Vehicle | K/uL |
| 1 | 1 | G-CSF (Gen1) | 5 | 100 | 10% lipoplex | 2.91 |
| 2 | 5 | G-CSF (Gen1) | 5 | 100 | 10% lipoplex | 5.32* |
| 3 | 8 | G-CSF (Gen1) | 5 | 100 | 10% lipoplex | 2.06 |
| 4 | 1 | G-CSF (no | 5 | 100 | 10% lipoplex | 1.88 |
| | | modification) | | | | |
| 5 | 5 | G-CSF (no | 5 | 100 | 10% lipoplex | 1.95 |
| | | modification) | | | | |
| 6 | 8 | G-CSF (no | 5 | 100 | 10% lipoplex | 2.09 |
| | | modification) | | | | |
| 7 | 1 | RNA control | 5 | 100 | 10% lipoplex | 2.90 |
| 8 | 5 | RNA control | 5 | 100 | 10% lipoplex | 1.68 |
| 9 | 8 | RNA control | 4 | 100 | 10% lipoplex | 1.72 |
| 10 | 1 | F. Buffer | 4 | 100 | 10% lipoplex | 2.51 |
| 11 | 5 | F. Buffer | 4 | 100 | 10% lipoplex | 1.31 |
| 12 | 8 | F. Buffer | 4 | 100 | 10% lipoplex | 1.92 |

### Example 53. Saline Formulation: Intramuscular Administration

[1376] A. Protein Expression

[1377] Human G-CSF modified mRNA (mRNA sequence shown in SEQ ID NO: 31907; polyA tail of approximately 160 nucleotides not shown in sequence; 5′cap, Cap1) and human EPO mmRNA (mRNA sequence shown in SEQ ID NO: 31910; polyA tail of approximately 160 nucleotides not shown in sequence; 5′cap, Cap1); G-CSF modified mRNA (modified with 5-methylcytosine (5mc) and pseudouridine (ψ)) and EPO modified mRNA (modified with N1-5-methylcytosine (N1-5mc) and W modification), were formulated in formulation buffer (150 mM sodium chloride, 2 mM calcium chloride, 2 mM phosphate, 0.5 mM EDTA at a pH of 6.5) and delivered to mice via intramuscular (IM) injection at a dose of 100 ug.

[1378] Controls included Luciferase (IVT cDNA sequence shown in SEQ ID NO: 31916; mRNA sequence shown in SEQ ID NO: 31917, polyA tail of approximately 160 nucleotides not shown in sequence, 5′cap, Cap1, fully modified with 5-methylcytosine at each cytosine and pseudouridine replacement at each uridine site) or the formulation buffer (F.Buffer). The mice were bled at 13 hours after the injection to determine the concentration of the human polypeptide in serum in pg/mL. (G-CSF groups measured human G-CSF in mouse serum and EPO groups measured human EPO in mouse serum). The data are shown in Table 73.

TABLE 73
Dosing Regimen

| | | | Dose Vol. | Dosing | Average Protein |
|---|---|---|---|---|---|
| Group | Treatment | N= | (μl/mouse) | Vehicle | Product pg/mL, serum |
| G-CSF | G-CSF | 5 | 50 | Saline | 19.8 |
| G-CSF | Luciferase | 5 | 50 | Saline | 0.5 |
| G-CSF | F. buffer | 5 | 50 | F. buffer | 0.5 |
| EPO | EPO | 5 | 50 | Saline | 191.5 |
| EPO | Luciferase | 5 | 50 | Saline | 15.0 |
| EPO | F. buffer | | | F. buffer | 4.8 |

[1379] B. Dose Response

[1380] Human EPO modified mRNA (mRNA sequence shown in SEQ ID NO: 31910; polyA tail of approximately 160 nucleotides not shown in sequence; 5′cap, Cap1; fully modified with 5-methylcytosine and pseudouridine) were formulated in formulation buffer and delivered to mice via intramuscular (IM) injection.

[1381] Controls included Luciferase (mRNA sequence shown in SEQ ID NO: 31917, polyA tail of approximately 160 nucleotides not shown in sequence, 5′cap, Cap1, fully modified with 5-methylcytosine and pseudouridine) or the formulation buffer (F.Buffer). The mice were bled at 13 hours after the injection to determine the concentration of the human polypeptide in serum in pg/mL. The dose and expression are shown in Table 74.

TABLE 74
Dosing Regimen and Expression

| | Dose Vol. | Average Protein |
|---|---|---|
| Treatment | (μl/mouse) | Product pg/mL, serum |
| EPO | 100 | 96.2 |
| EPO | 50 | 63.5 |
| EPO | 25 | 18.7 |
| EPO | 10 | 25.9 |
| EPO | 1 | 2.6 |
| Luciferase | 100 | 0.0 |
| F. buffer | 100 | 1.0 |

### Example 54. EPO Multi-Dose/Multi-Administration

[1382] Studies utilizing multiple intramuscular injection sites at one time point were designed and performed.

[1383] The design of a single multi-dose experiment involved using human erythropoietin (EPO) mmRNA (mRNA sequence shown in SEQ ID NO: 31910; polyA tail of approximately 160 nucleotides not shown in sequence; 5′cap, Cap1) or G-CSF mmRNA (mRNA sequence shown in SEQ ID NO: 31907; polyA tail of approximately 160 nucleotides not shown in sequence; 5′cap, Cap1) administered in formulation buffer. The dosing vehicle (F. buffer) was used as a control. The EPO and G-CSF modified mRNA were modified with 5-methylcytosine at each cytosine and pseudouridine replacement at each uridine site.

[1384] Animals (n=5), Sprague-Dawley rats, were injected IM (intramuscular) for the single unit dose of 100 ug (delivered to one thigh). For multi-dosing 6 doses of 100 ug (delivered to two thighs) were used for both EPO and G-CSF mmRNA. Control dosing involved use of buffer at a single dose. Human EPO blood levels were evaluated 13 hrs post injection.

[1385] Human EPO protein was measured in rat serum 13 hrs post intramuscular injection. Five groups of rats were treated and evaluated. The results are shown in Table 75.

TABLE 75
Multi-dose study

| | | | | Avg. Pg/mL |
|---|---|---|---|---|
| | | Dose of | Total | human EPO, |
| Group | Treatment | mmRNA | Dose | serum |
| 1 | Human EPO mmRNA | 1 × 100 ug | 100 ug | 143 |
| 2 | Human EPO mmRNA | 6 × 100 ug | 600 ug | 256 |
| 3 | G-CSF mmRNA | 1 × 100 ug | 100 ug | 43 |
| 4 | G-CSF mmRNA | 6 × 100 ug | 600 ug | 58 |
| 5 | Buffer Alone | — | — | 20 |

### Example 55. Signal Sequence Exchange Study

[1386] Several variants of mmRNAs encoding human Granulocyte colony stimulating factor (G-CSF) (mRNA sequence shown in SEQ ID NO: 31907; polyA tail of approximately 160 nucleotides not shown in sequence; 5′cap, Cap1) were synthesized using modified nucleotides pseudouridine and 5-methylcytosine (pseudo-U/5 mC). These variants included the G-CSF constructs encoding either the wild-type N terminal secretory signal peptide sequence (MAGPATQSPMKLMALQLLLWHSALWTVQEA; SEQ ID NO: 95), no secretory signal peptide sequence, or secretory signal peptide sequences taken from other mRNAs. These included sequences where the wild type G-CSF signal peptide sequence was replaced with the signal peptide sequence of either: human α-1-anti trypsin (AAT) (MMPSSVSWGILLLAGLCCLVPVSLA; SEQ ID NO: 94), human Factor IX (FIX) (MQRVNMIMAESPSLITICLLGYLLSAECTVFLDHENANKILNRPKR; SEQ ID NO: 96), human Prolactin (Prolac) (MKGSLLLLLVSNLLLCQSVAP; SEQ ID NO: 97), or human Albumin (Alb) (MKWVTFISLLFLFSSAYSRGVFRR; SEQ ID NO: 98).

[1387] 250 ng of modified mRNA encoding each G-CSF variant was transfected into HEK293A (293A in the table), mouse myoblast (MM in the table) (C2C12, CRL-1772, ATCC) and rat myoblast (RM in the table) (L6 line, CRL-1458, ATCC) cell lines in a 24 well plate using 1 ul of Lipofectamine 2000 (Life Technologies), each well containing 300,000 cells. The supernatants were harvested after 24 hrs and the secreted G-CSF protein was analyzed by ELISA using the Human G-CSF ELISA kit (Life Technologies). The data shown in Table 76 reveal that cells transfected with G-CSF mmRNA encoding the Albumin signal peptide secrete at least 12 fold more G-CSF protein than its wild type counterpart.

TABLE 76
Signal Peptide Exchange

| | 293A | MM | RM |
|---|---|---|---|
| Signal peptides | (pg/ml) | (pg/ml) | (pg/ml) |
| G-CSF Natural | 9650 | 3450 | 6050 |
| α-1-anti trypsin | 9950 | 5000 | 8475 |
| Factor IX | 11675 | 6175 | 11675 |
| Prolactin | 7875 | 1525 | 9800 |
| Albumin | 122050 | 81050 | 173300 |
| No Signal peptide | 0 | 0 | 0 |

### Example 56. Cytokine Study: PBMC

[1388] A. PBMC Isolation and Culture

[1389] 50 mL of human blood from two donors was received from Research Blood Components (lots KP30928 and KP30931) in sodium heparin tubes. For each donor, the blood was pooled and diluted to 70 mL with DPBS (SAFC Bioscience 59331C, lot 071M8408) and split evenly between two 50 mL conical tubes. 10 mL of Ficoll Paque (GE Healthcare 17-5442-03, lot 10074400) was gently dispensed below the blood layer. The tubes were centrifuged at 2000 rpm for 30 minutes with low acceleration and braking. The tubes were removed and the buffy coat PBMC layers were gently transferred to a fresh 50 mL conical and washed with DPBS. The tubes were centrifuged at 1450 rpm for 10 minutes.

[1390] The supernatant was aspirated and the PBMC pellets were resuspended and washed in 50 mL of DPBS. The tubes were centrifuged at 1250 rpm for 10 minutes. This wash step was repeated, and the PBMC pellets were resuspended in 19 mL of Optimem I (Gibco 11058, lot 1072088) and counted. The cell suspensions were adjusted to a concentration of 3.0×10\hat{ }6 cells/mL live cells.

[1391] These cells were then plated on five 96 well tissue culture treated round bottom plates (Costar 3799) per donor at 50 uL per well. Within 30 minutes, transfection mixtures were added to each well at a volume of 50 uL per well. After 4 hours post transfection, the media was supplemented with 10 uL of Fetal Bovine Serum (Gibco 10082, lot 1012368)

[1392] B. Transfection Preparation

[1393] mmRNA encoding human G-CSF (mRNA sequence shown in SEQ ID NO: 31907; polyA tail of approximately 160 nucleotides not shown in sequence; 5′cap, Cap1) (containing either (1) natural NTPs, (2) 100% substitution with 5-methyl cytidine and pseudouridine, or (3) 100% substitution with 5-methyl cytidine and N1-methyl-pseudouridine; mmRNA encoding luciferase (IVT cDNA sequence shown in SEQ ID NO: 31916; mRNA sequence shown in SEQ ID NO: 31917, polyA tail of approximately 160 nucleotides not shown in sequence, 5′cap, Cap1, fully modified with 5-methylcytosine at each cytosine and pseudouridine replacement at each uridine site) (containing either (1) natural NTPs or (2) 100% substitution with 5-methyl cytidine and pseudouridine) and TLR agonist R848 (Invivogen tlrl-r848) were diluted to 38.4 ng/uL in a final volume of 2500 uL Optimem I.

[1394] Separately, 432 uL of Lipofectamine 2000 (Invitrogen 11668-027, lot 1070962) was diluted with 13.1 mL Optimem I. In a 96 well plate nine aliquots of 135 uL of each mmRNA, positive control (R-848) or negative control (Optimem I) was added to 135 uL of the diluted Lipofectamine 2000. The plate containing the material to be transfected was incubated for 20 minutes. The transfection mixtures were then transferred to each of the human PBMC plates at 50 uL per well. The plates were then incubated at 37 C. At 2, 4, 8, 20, and 44 hours each plate was removed from the incubator, and the supernatants were frozen.

[1395] After the last plate was removed, the supernatants were assayed using a human G-CSF ELISA kit (Invitrogen KHC2032) and human IFN-alpha ELISA kit (Thermo Scientific 41105-2). Each condition was done in duplicate.

[1396] C. Results

[1397] The ability of unmodified and modified mRNA (mmRNAs) to produce the encoded protein was assessed (G-CSF production) over time as was the ability of the mRNA to trigger innate immune recognition as measured by interferon-alpha production. Use of in vitro PBMC cultures is an accepted way to measure the immunostimulatory potential of oligonucleotides (Robbins et al., Oligonucleotides 2009 19:89-102; herein incorporated by reference in its entirety).

[1398] Results were interpolated against the standard curve of each ELISA plate using a four parameter logistic curve fit. Shown in Tables 77 and 78 are the average from 2 separate PBMC donors of the G-CSF and IFN-alpha production over time as measured by specific ELISA.

[1399] In the G-CSF ELISA, background signal from the Lipofectamine 2000 untreated condition was subtracted at each timepoint. The data demonstrated specific production of human G-CSF protein by human peripheral blood mononuclear is seen with G-CSF mRNA containing natural NTPs, 100% substitution with 5-methyl cytidine and pseudouridine, or 100% substitution with 5-methyl cytidine and N1-methyl-pseudouridine. Production of G-CSF was significantly increased through the use of modified mRNA relative to unmodified mRNA, with the 5-methyl cytidine and N1-methyl-pseudouridine containing G-CSF mmRNA showing the highest level of G-CSF production. With regards to innate immune recognition, unmodified mRNA resulted in substantial IFN-alpha production, while the modified mRNA largely prevented interferon-alpha production. G-CSF mRNA fully modified with 5-methyl cytidine and N1-methyl-pseudouridine did not significantly increase cytokines whereas G-CSF mRNA fully modified with 5-methyl cytidine and pseudouridine induced IFN-alpha, TNF-alpha and IP10. Many other cytokines were not affected by either modification.

TABLE 77
G-CSF Signal
G-CSF signal - 2 Donor Average

| pg/mL | 2 Hr | 4 Hr | 8 Hr | 20 Hr | 44 Hr |
|---|---|---|---|---|---|
| G-CSF (5mC/pseudouridine) | 120.3 | 136.8 | 421.0 | 346.1 | 431.8 |
| G-CSF (5mC/N1-methyl- | 256.3 | 273.7 | 919.3 | 1603.3 | 1843.3 |
| pseudouridine) | | | | | |
| G-CSF(Natural-no | 63.5 | 92.6 | 129.6 | 258.3 | 242.4 |
| modification) | | | | | |
| Luciferase | 4.5 | 153.7 | 33.0 | 186.5 | 58.0 |
| (5mC/pseudouridine) | | | | | |

TABLE 78
IFN-alpha signal
IFN-alpha signal - 2 donor average

| pg/mL | 2 Hr | 4 Hr | 8 Hr | 20 Hr | 44 Hr |
|---|---|---|---|---|---|
| G-CSF (5mC/pseudouridine) | 21.1 | 2.9 | 3.7 | 22.7 | 4.3 |
| G-CSF (5mC/N1-methyl- | 0.5 | 0.4 | 3.0 | 2.3 | 2.1 |
| pseudouridine) | | | | | |
| G-CSF(Natural) | 0.0 | 2.1 | 23.3 | 74.9 | 119.7 |
| Luciferase | 0.4 | 0.4 | 4.7 | 1.0 | 2.4 |
| (5mC/pseudouridine) | | | | | |
| R-848 | 39.1 | 151.3 | 278.4 | 362.2 | 208.1 |
| Lpf. 2000 control | 0.8 | 17.2 | 16.5 | 0.7 | 3.1 |

### Example 57. Chemical Modification Ranges of Modified mRNA

[1400] Modified nucleotides such as, but not limited to, the chemical modifications 5-methylcytosine and pseudouridine have been shown to lower the innate immune response and increase expression of RNA in mammalian cells. Surprisingly, and not previously known, the effects manifested by the chemical modifications can be titrated when the amount of chemical modification is less than 100%. Previously, it was believed that full modification was necessary and sufficient to elicit the beneficial effects of the chemical modifications and that less than 100% modification of an mRNA had little effect. However, it has now been shown that the benefits of chemical modification can be derived using less than complete modification and that the effects are target, concentration and modification dependent.

[1401] A. Modified RNA Transfected in PBMC

[1402] 960 ng of G-CSF mRNA modified with 5-methylcytosine (5 mC) and pseudouridine (pseudoU) or unmodified G-CSF mRNA was transfected with 0.8 uL of Lipofectamine 2000 into peripheral blood mononuclear cells (PBMC) from three normal blood donors (D1, D2, D3). The G-CSF mRNA (mRNA sequence shown in SEQ ID NO: 31907; polyA tail of approximately 160 nucleotides not shown in sequence; 5′cap, Cap1) was completely modified with 5 mC and pseudoU (100% modification), not modified with 5 mC and pseudoU (0% modification) or was partially modified with 5 mC and pseudoU so the mRNA would contain 50% modification, 25% modification, 10% modification, %5 modification, 1% modification or 0.1% modification. A control sample of Luciferase (mRNA sequence shown in SEQ ID NO: 31917; polyA tail of approximately 160 nucleotides not shown in sequence; 5′cap, Cap1; fully modified 5meC and pseudoU) was also analyzed for G-CSF expression. For TNF-alpha and IFN-alpha control samples of Lipofectamine2000, LPS, R-848, Luciferase (mRNA sequence shown in SEQ ID NO: 31917; polyA tail of approximately 160 nucleotides not shown in sequence; 5′cap, Cap1; fully modified 5 mC and pseudo), and P(I)P(C) were also analyzed. The supernatant was harvested and run by ELISA 22 hours after transfection to determine the protein expression. The expression of G-CSF is shown in Table 79 and the expression of IFN-alpha and TNF-alpha is shown in Table 80. The expression of IFN-alpha and TNF-alpha may be a secondary effect from the transfection of the G-CSF mRNA. Tables 79 and 80 show that the amount of chemical modification of G-CSF, IFN-alpha and TNF-alpha is titratable when the mRNA is not fully modified and the titratable trend is not the same for each target.

TABLE 79
G-CSF Expression

| | G-CSF Expression (pg/ml) | | |
|---|---|---|---|
| | D1 | D2 | D3 |
| 100% modification | 270.3 | 151.6 | 162.2 |
| 50% modification | 45.6 | 19.8 | 26.3 |
| 25% modification | 23.6 | 10.8 | 8.9 |
| 10% modification | 39.4 | 12.9 | 12.9 |
| 5% modification | 70.9 | 26.8 | 26.3 |
| 1% modification | 70.3 | 26.9 | 66.9 |
| 0.1% modification | 67.5 | 25.2 | 28.7 |
| Luciferase | 14.5 | 3.1 | 10.0 |

TABLE 80
IFN-alpha and TNF-alpha Expression

| | IFN-alpha Expression | | | TNF-alpha Expression | | |
|---|---|---|---|---|---|---|
| | (pg/ml) | | | (pg/ml) | | |
| | D1 | D2 | D3 | D1 | D2 | D3 |
| 100% modification | 76.8 | 6.8 | 15.1 | 5.6 | 1.4 | 21.4 |
| 50% modification | 22.0 | 5.5 | 257.3 | 4.7 | 1.7 | 12.1 |
| 25% modification | 64.1 | 14.9 | 549.7 | 3.9 | 0.7 | 10.1 |
| 10% modification | 150.2 | 18.8 | 787.8 | 6.6 | 0.9 | 13.4 |
| 5% modification | 143.9 | 41.3 | 1009.6 | 2.5 | 1.8 | 12.0 |
| 1% modification | 189.1 | 40.5 | 375.2 | 9.1 | 1.2 | 25.7 |
| 0.1% modification | 261.2 | 37.8 | 392.8 | 9.0 | 2. | 13.7 |
| 0% modification | 230.3 | 45.1 | 558.3 | 10.9 | 1.4 | 10.9 |
| LF 200 | 0 | 0 | 1.5 | 45.8 | 2.8 | 53.6 |
| LPS | 0 | 0 | 1.0 | 114.5 | 70.0 | 227.0 |
| R-848 | 39.5 | 11.9 | 183.5 | 389.3 | 256.6 | 410.6 |
| Luciferase | 9.1 | 0 | 3.9 | 4.5 | 2.7 | 13.6 |
| P(I)P(C) | 1498.1 | 216.8 | 238.8 | 61.2 | 4.4 | 69.1 |

[1403] B. Modified RNA Transfected in HEK293

[1404] Human embryonic kidney epithelial (HEK293) cells were seeded on 96-well plates at a density of 30,000 cells per well in 100 ul cell culture medium. 250 ng of modified G-CSF mRNA (mRNA sequence shown in SEQ ID NO: 31907; polyA tail of approximately 160 nucleotides not shown in sequence; 5′cap, Cap1) formulated with RNAiMAX™ (Invitrogen, Carlsbad, CA) was added to a well. The G-CSF was completely modified with 5 mC and pseudoU (100% modification), not modified with 5 mC and pseudoU (0% modification) or was partially modified with 5 mC and pseudoU so the mRNA would contain 75% modification, 50% modification or 25% modification. Control samples (AK 5/2, mCherry mRNA (mRNA sequence shown in SEQ ID NO: 31908; polyA tail of approximately 160 nucleotides not shown in sequence; 5′cap, Cap1; fully modified 5 mC and pseudoU) and untreated) were also analyzed. The half-life of G-CSF mRNA fully modified with 5-methylcytosine and pseudouridine is approximately 8-10 hours. The supernatants were harvested after 16 hours and the secreted G-CSF protein was analyzed by ELISA. Table 81 shows that the amount of chemical modification of G-CSF is titratable when the mRNA is not fully modified.

TABLE 81
G-CSF Expression

| | G-CSF Expression (ng/ml) |
|---|---|
| 100% modification | 118.4 |
| 75% modification | 101.9 |
| 50% modification | 105.7 |
| 25% modification | 231.1 |
| 0% modification | 270.9 |
| AK 5/2 | 166.8 |
| mCherry | 0 |
| Untreated | 0 |

### Example 58: In Vivo Delivery of Modified mRNA (mmRNA)

[1405] Modified RNA was delivered to C57/BL6 mice intramuscularly, subcutaneously, or intravenously to evaluate the bio-distribution of modified RNA using luciferase. A formulation buffer used with all delivery methods contained 150 mM sodium chloride, 2 mM calcium chloride, 2 mM Na+-phosphate which included 1.4 mM monobasic sodium phosphate and 0.6 mM of dibasic sodium phosphate, and 0.5 mM ethylenediaminetetraacetic acid (EDTA) was adjusted using sodium hydroxide to reach a final pH of 6.5 before being filtered and sterilized. A 1× concentration was used as the delivery buffer. To create the lipoplexed solution delivered to the mice, in one vial 50 μg of RNA was equilibrated for 10 minutes at room temperature in the delivery buffer and in a second vial 10 μl RNAiMAX™ was equilibrated for 10 minutes at room temperature in the delivery buffer. After equilibrium, the vials were combined and delivery buffer was added to reach a final volume of 100 μl which was then incubated for 20 minutes at room temperature. Luciferin was administered by intraperitoneal injection (IP) at 150 mg/kg to each mouse prior to imaging during the plateau phase of the luciferin exposure curve which was between 15 and 30 minutes. To create luciferin, 1 g of D-luciferin potassium or sodium salt was dissolved in 66.6 ml of distilled phosphate buffer solution (DPBS), not containing Mg2+ or Ca2+, to make a 15 mg/ml solution. The solution was gently mixed and passed through a 0.2 μm syringe filter, before being purged with nitrogen, aliquoted and frozen at −80° C. while being protected from light as much as possible. The solution was thawed using a waterbath if luciferin was not dissolved, gently mixed and kept on ice on the day of dosing.

[1406] Whole body images were taken of each mouse 2, 8 and 24 hours after dosing. Tissue images and serum was collected from each mouse 24 hours after dosing. Mice administered doses intravenously had their liver, spleen, kidneys, lungs, heart, peri-renal adipose tissue and thymus imaged. Mice administered doses intramuscularly or subcutaneously had their liver, spleen, kidneys, lungs, peri-renal adipose tissue, and muscle at the injection site. From the whole body images the bioluminescence was measured in photon per second for each route of administration and dosing regimen.

[1407] A. Intramuscular Administration

[1408] Mice were intramuscularly (I.M.) administered either modified luciferase mRNA fully modified with 5-methylcytosine and pseudouridine (Naked-Luc), lipoplexed modified luciferase mRNA fully modified with 5-methylcytosine and pseudouridine (Lipoplex-luc) (IVT cDNA sequence shown in SEQ ID NO: 31916; mRNA sequence shown in SEQ ID NO: 31917, polyA tail of approximately 160 nucleotides not shown in sequence, 5′cap, Cap1, fully modified with 5-methylcytosine at each cytosine and pseudouridine replacement at each uridine site), lipoplexed modified granulocyte colony-stimulating factor (G-CSF) mRNA (mRNA sequence shown in SEQ ID NO: 31907; polyA tail of approximately 160 nucleotides not shown in sequence; 5′cap, Cap1; fully modified with 5-methylcytosine and pseudouridine) (Lipoplex-Cytokine) or the formation buffer at a single dose of 50 μg of modified RNA in an injection volume of 50 μl for each formulation in the right hind limb and a single dose of 5 μg of modified RNA in an injection volume of 50 μl in the left hind limb. The bioluminescence average for the luciferase expression signals for each group at 2, 8 and 24 hours after dosing are shown in Table 82. The bioluminescence showed a positive signal at the injection site of the 5 μg and 50 μg modified RNA formulations containing and not containing lipoplex.

TABLE 82
In vivo Biophotoic Imaging (I.M. Injection Route)

| | Dose | Bioluminescence (photon/sec) | | |
|---|---|---|---|---|
| Formulation | (ug) | 2 hours | 8 hours | 24 hours |
| Naked-Luc | 5 | 224,000 | 683,000 | 927,000 |
| Lipolplex-Luc | 5 | 579,000 | 639,000 | 186,000 |
| Lipoplex-G-CSF | 5 | 64,600 | 85,600 | 75,100 |
| Formulation Buffer | 5 | 102,000 | 86,000 | 90,700 |
| Naked-Luc | 50 | 446,000 | 766,000 | 509,000 |
| Lipolplex-Luc | 50 | 374,000 | 501,000 | 332,000 |
| Lipoplex-G-CSF | 50 | 49,400 | 74,800 | 74,200 |
| Formulation Buffer | 50 | 59,300 | 69,200 | 63,600 |

[1409] B. Subcutaneous Administration

[1410] Mice were subcutaneously (S.C.) administered either modified luciferase mRNA (Naked-Luc), lipoplexed modified luciferase mRNA (Lipoplex-luc), lipoplexed modified G-CSF mRNA (Lipoplex-G-CSF) or the formation buffer at a single dose of 50 μg of modified mRNA in an injection volume of 100 μl for each formulation. The bioluminescence average for the luciferase expression signals for each group at 2, 8 and 24 hours after dosing are shown in Table 83. The bioluminescence showed a positive signal at the injection site of the 50 μg modified mRNA formulations containing and not containing lipoplex.

TABLE 83
In vivo Biophotoic Imaging (S.C. Injection Route)

| | Bioluminescence (photon/sec) | | |
|---|---|---|---|
| Formulation | 2 hours | 8 hours | 24 hours |
| Naked-Luc | 3,700,000 | 8,060,000 | 2,080,000 |
| Lipolplex-Luc | 3,960,000 | 1,700,000 | 1,290,000 |
| Lipoplex-G-CSF | 123,000 | 121,000 | 117,000 |
| Formulation Buffer | 116,000 | 127,000 | 123,000 |

[1411] C. Intravenous Administration

[1412] Mice were intravenously (I.V.) administered either modified luciferase mRNA (Naked-Luc), lipoplexed modified luciferase mRNA (Lipoplex-luc), lipoplexed modified G-CSF mRNA (Lipoplex-G-CSF) or the formation buffer at a single dose of 50 μg of modified mRNA in an injection volume of 100 μl for each formulation. The bioluminescence average for the luciferase expression signal in the spleen from each group at 2 hours after dosing is shown in Table 84. The bioluminescence showed a positive signal in the spleen of the 50 μg modified mRNA formulations containing lipoplex.

TABLE 84
In vivo Biophotoic Imaging (I.V. Injection Route)

| | Bioluminescence (photon/ |
|---|---|
| Formulation | sec) of the Spleen |
| Naked-Luc | 58,400 |
| Lipolplex-Luc | 65,000 |
| Lipoplex-G-CSF | 57,100 |
| Formulation Buffer | 58,300 |

### Example 59. Buffer Formulation Studies

[1413] G-CSF modified mRNA (mRNA sequence shown in SEQ ID NO: 31907; polyA tail of approximately 160 nucleotides not shown in sequence; 5′cap, Cap1; fully modified with N1-pseudouridine and 5-methylcytosine) or Factor IX modified mRNA (mRNA sequence shown in SEQ ID NO: 31911; polyA tail of approximately 160 nucleotides not shown in sequence; 5′cap, Cap1; fully modified with N1-pseudouridine and 5-methylcytosine) in a buffer solution is administered intramuscularly to rats in an injection volume of 50 μl (n=5) at a modified mRNA dose of 200 ug per rat as described in Table 85. The modified mRNA is lyophilized in water for 1-2 days. It is then reconstituted in the buffers listed below to a target concentration of 6 mg/ml. Concentration is determined by OD 260. Samples are diluted to 4 mg/ml in the appropriate buffer before dosing.

[1414] To precipitate the modified mRNA, 3M sodium acetate, pH 5.5 and pure ethanol are added at 1/10^{th} the total volume and 4 times the total volume of modified mRNA, respectively. The material is placed at −80C for a minimum of 1 hour. The material is then centrifuged for 30 minutes at 4000 rpm, 4C. The supernatant is removed and the pellet is centrifuged and washed 3× with 75% ethanol. Finally, the pellet is reconstituted with buffer to a target concentration of 6 mg/ml. Concentration is determined by OD 260. Samples are diluted to 4 mg/ml in the appropriate buffer before dosing. All samples are prepared by lyophilization unless noted below.

TABLE 85
Buffer Dosing Groups

| Group | Treatment | Buffer | Dose (ug/rat) |
|---|---|---|---|
| 1 | G-CSF | 0.9% Saline | 200 |
| | Factor IX | 0.9% Saline | 200 |
| 2 | G-CSF | 0.9% Saline + 2 mM | 200 |
| | | Calcium | |
| | Factor IX | 0.9% Saline + 2 mM | 200 |
| | | Calcium | |
| 3 | G-CSF | Lactated Ringer's | 200 |
| | Factor IX | Lactated Ringer's | 200 |
| 4 | G-CSF | 5% Sucrose | 200 |
| | Factor IX | 5% Sucrose | 200 |
| 5 | G-CSF | 5% Sucrose + 2 mM | 200 |
| | | Calcium | |
| | Factor IX | 5% Sucrose + 2 mM | 200 |
| | | Calcium | |
| 6 | G-CSF | 5% Mannitol | 200 |
| | Factor IX | 5% Mannitol | 200 |
| 7 | G-CSF | 5% Mannitol + 2 mM | 200 |
| | | Calcium | |
| | Factor IX | 5% Mannitol + 2 mM | 200 |
| | | Calcium | |
| 8 | G-CSF | 0.9% saline (precipitation) | 200 |
| | Factor IX | 0.9% saline (precipitation) | 200 |

[1415] Serum samples are collected from the rats at various time intervals and analyzed for G-CSF or Factor IX protein expression using G-CSF or Factor IX ELISA.

### Example 60. Multi-Dose Study

[1416] Sprague-Dawley rats (n=8) are injected intravenously eight times (twice a week) over 28 days. The rats are injected with 0.5 mg/kg, 0.05 mg/kg, 0.005 mg/kg or 0.0005 mg/kg of human G-CSF modified mRNA of luciferase modified mRNA formulated in a lipid nanoparticle, 0.5 mg/kg of human G-CSF modified mRNA in saline, 0.2 mg/kg of the human G-CSF protein Neupogen or non-translatable human G-CSF modified mRNA formulated in a lipid nanoparticle. Serum is collected during pre-determined time intervals to evaluate G-CSF protein expression (8, 24 and 72 hours after the first dose of the week), complete blood count and white blood count (24 and 72 hours after the first dose of the week) and clinical chemistry (24 and 72 hours after the first dose of the week). The rats are sacrificed at day 29, 4 days after the final dosing, to determine the complete blood count, white blood count, clinical chemistry, protein expression and to evaluate the effect on the major organs by histopathology and necropsy. Further, an antibody assay is performed on the rats on day 29.

### Example 61. LNP In Vivo Study

[1417] Luciferase modified mRNA (mRNA sequence shown in SEQ ID NO: 31917; polyA tail of approximately 160 nucleotides not shown in sequence, 5′ cap, Cap1; fully modified with 5-methylcytosine and pseudouridine was formulated as a lipid nanoparticle (LNP) using the syringe pump method. The LNP was formulated at a 20:1 weight ratio of total lipid to modified mRNA with a final lipid molar ratio of 50:10:38.5:1.5 (DLin-KC2-DMA: DSPC: Cholesterol: PEG-DMG). As shown in Table 86, the luciferase LNP formulation was characterized by particle size, zeta potential, and encapsulation.

TABLE 86
Luciferase Formulation

| Formulation | NPA-098-1 |
|---|---|
| Modified mRNA | Luciferase |
| Mean size | 135 nm |
| | PDI: 0.08 |
| Zeta at pH 7.4 | −0.6 mV |
| Encaps. | 91% |
| (RiboGr) | |

[1418] As outlined in Table 87, the luciferase LNP formulation was administered to Balb-C mice (n=3) intramuscularly, intravenously and subcutaneously and a luciferase modified RNA formulated in PBS was administered to mice intravenously.

TABLE 87
Luciferase Formulations

| | | | | Injec- | Amount of | |
|---|---|---|---|---|---|---|
| | | | Concen- | tion | | |
| Formu- | | | tration | Volume | modified | Dose |
| lation | Vehicle | Route | (mg/ml) | (ul) | RNA (ug) | (mg/kg) |
| Luc-LNP | PBS | IV | 0.20 | 50 | 10 | 0.50 |
| Luc-LNP | PBS | IM | 0.20 | 50 | 10 | 0.50 |
| Luc-LNP | PBS | SC | 0.20 | 50 | 10 | 0.50 |
| Luc-PBS | PBS | IV | 0.20 | 50 | 10 | 0.50 |

[1419] The mice administered the luciferase LNP formulation intravenously and intramuscularly were imaged at 2, 8, 24, 48, 120 and 192 hours and the mice administered the luciferase LNP formulation subcutaneously were imaged at 2, 8, 24, 48 and 120 hours to determine the luciferase expression as shown in Table 88. In Table 88, “NT” means not tested. Twenty minutes prior to imaging, mice were injected intraperitoneally with a D-luciferin solution at 150 mg/kg. Animals were then anesthetized and images were acquired with an IVIS Lumina II imaging system (Perkin Elmer). Bioluminescence was measured as total flux (photons/second) of the entire mouse.

TABLE 88
Luciferase Expression

| | | Average Expression (photon/second) | | | | | |
|---|---|---|---|---|---|---|---|
| | Route of | 2 | 8 | 24 | 48 | 120 | 192 |
| Formulation | Admin | hours | hours | hours | hours | hours | hours |
| Luc-LNP | IV | 1.62E+08 | 3.00E+09 | 7.77E+08 | 4.98E+08 | 1.89E+08 | 6.08E+07 |
| Luc-LNP | IM | 4.85E+07 | 4.92E+08 | 9.02E+07 | 3.17E+07 | 1.22E+07 | 2.38E+06 |
| Luc-LNP | SC | 1.85E+07 | 9.79E+08 | 3.09E+08 | 4.94E+07 | 1.98E+06 | NT |
| Luc-PBS | IV | 3.61E+05 | 5.64E+05 | 3.19E+05 | NT | NT | NT |

[1420] One mouse administered the LNP formulation intravenously was sacrificed at 8 hours to determine the luciferase expression in the liver and spleen. Also, one mouse administered the LNP formulation intramuscular was sacrificed at 8 hours to determine the luciferase expression of the muscle around the injection site and in the liver and spleen. As shown in Table 89, expression was seen in the both the liver and spleen after intravenous and intramuscular administration and in the muscle around the intramuscular injection site.

TABLE 89
Luciferase Expression in Tissue

| | Expression |
|---|---|
| | (photon/second) |
| Luciferase LNP: IV Administration | |
| Liver | 7.984E+08 |
| Spleen | 3.951E+08 |
| Luciferase LNP: IM Administration | |
| Muscle around the injection site | 3.688E+07 |
| Liver | 1.507E+08 |
| Spleen | 1.096E+07 |

### Example 62. Cytokine Study: PBMC

[1421] A. PBMC Isolation and Culture

[1422] 50 mL of human blood from two donors was received from Research Blood Components (lots KP30928 and KP30931) in sodium heparin tubes. For each donor, the blood was pooled and diluted to 70 mL with DPBS (SAFC Bioscience 59331C, lot 071M8408) and split evenly between two 50 mL conical tubes. 10 mL of Ficoll Paque (GE Healthcare 17-5442-03, lot 10074400) was gently dispensed below the blood layer. The tubes were centrifuged at 2000 rpm for 30 minutes with low acceleration and braking. The tubes were removed and the buffy coat PBMC layers were gently transferred to a fresh 50 mL conical and washed with DPBS. The tubes were centrifuged at 1450 rpm for 10 minutes.

[1423] The supernatant was aspirated and the PBMC pellets were resuspended and washed in 50 mL of DPBS. The tubes were centrifuged at 1250 rpm for 10 minutes. This wash step was repeated, and the PBMC pellets were resuspended in 19 mL of Optimem I (Gibco 11058, lot 1072088) and counted. The cell suspensions were adjusted to a concentration of 3.0×10\hat{ }6 cells/mL live cells.

[1424] These cells were then plated on five 96 well tissue culture treated round bottom plates (Costar 3799) per donor at 50 uL per well. Within 30 minutes, transfection mixtures were added to each well at a volume of 50 uL per well. After 4 hours post transfection, the media was supplemented with 10 uL of Fetal Bovine Serum (Gibco 10082, lot 1012368).

[1425] B. Transfection Preparation

[1426] Modified mRNA encoding human G-CSF (mRNA sequence shown in SEQ ID NO: 31907; polyA tail of approximately 160 nucleotides not shown in sequence; 5′cap, Cap1) (containing either (1) natural NTPs, (2) 100% substitution with 5-methyl cytidine and pseudouridine, or (3) 100% substitution with 5-methyl cytidine and N1-methyl-pseudouridine; mRNA encoding luciferase (IVT cDNA sequence shown in SEQ ID NO: 31916; mRNA sequence shown in SEQ ID NO: 31917, polyA tail of approximately 160 nucleotides not shown in sequence, 5′cap, Cap1, fully modified with 5-methylcytosine at each cytosine and pseudouridine replacement at each uridine site) (containing either (1) natural NTPs or (2) 100% substitution with 5-methyl cytidine and pseudouridine) and TLR agonist R848 (Invivogen tlrl-r848) were diluted to 38.4 ng/uL in a final volume of 2500 uL Optimem I.

[1427] Separately, 110 uL of Lipofectamine 2000 (Invitrogen 11668-027, lot 1070962) was diluted with 6.76 mL Optimem I. In a 96 well plate nine aliquots of 135 uL of each mRNA, positive control (R-848) or negative control (Optimem I) was added to 135 uL of the diluted Lipofectamine 2000. The plate containing the material to be transfected was incubated for 20 minutes. The transfection mixtures were then transferred to each of the human PBMC plates at 50 uL per well. The plates were then incubated at 37° C. At 2, 4, 8, 20, and 44 hours each plate was removed from the incubator, and the supernatants were frozen.

[1428] After the last plate was removed, the supernatants were assayed using a human G-CSF ELISA kit (Invitrogen KHC2032) and human IFN-alpha ELISA kit (Thermo Scientific 41105-2). Each condition was done in duplicate.

[1429] C. Protein and Innate Immune Response Analysis

[1430] The ability of unmodified and modified mRNA to produce the encoded protein was assessed (G-CSF production) over time as was the ability of the mRNA to trigger innate immune recognition as measured by interferon-alpha production. Use of in vitro PBMC cultures is an accepted way to measure the immunostimulatory potential of oligonucleotides (Robbins et al., Oligonucleotides 2009 19:89-102).

[1431] Results were interpolated against the standard curve of each ELISA plate using a four parameter logistic curve fit. Shown in Tables 90 and 91 are the average from 3 separate PBMC donors of the G-CSF, interferon-alpha (IFN-alpha) and tumor necrosis factor alpha (TNF-alpha) production over time as measured by specific ELISA.

[1432] In the G-CSF ELISA, background signal from the Lipofectamine 2000 (LF2000) untreated condition was subtracted at each time point. The data demonstrated specific production of human G-CSF protein by human peripheral blood mononuclear is seen with G-CSF mRNA containing natural NTPs, 100% substitution with 5-methyl cytidine and pseudouridine, or 100% substitution with 5-methyl cytidine and N1-methyl-pseudouridine. Production of G-CSF was significantly increased through the use of 5-methyl cytidine and N1-methyl-pseudouridine modified mRNA relative to 5-methyl cytidine and pseudouridine modified mRNA.

[1433] With regards to innate immune recognition, while both modified mRNA chemistries largely prevented IFN-alpha and TNF-alpha production relative to positive controls (R848, p(I)p(C)), significant differences did exist between the chemistries. 5-methyl cytidine and pseudouridine modified mRNA resulted in low but detectable levels of IFN-alpha and TNF-alpha production, while 5-methyl cytidine and N1-methyl-pseudouridine modified mRNA resulted in no detectable IFN-alpha and TNF-alpha production.

[1434] Consequently, it has been determined that, in addition to the need to review more than one cytokine marker of the activation of the innate immune response, it has surprisingly been found that combinations of modifications provide differing levels of cellular response (protein production and immune activation). The modification, N1-methyl-pseudouridine, in this study has been shown to convey added protection over the standard combination of 5-methylcytidine/pseudouridine explored by others resulting in twice as much protein and almost 150 fold reduction in immune activation (TNF-alpha).

[1435] Given that PBMC contain a large array of innate immune RNA recognition sensors and are also capable of protein translation, it offers a useful system to test the interdependency of these two pathways. It is known that mRNA translation can be negatively affected by activation of such innate immune pathways (Kariko et al. Immunity (2005) 23:165-175; Warren et al. Cell Stem Cell (2010) 7:618-630). Using PBMC as an in vitro assay system it is possible to establish a correlation between translation (in this case G-CSF protein production) and cytokine production (in this case exemplified by IFN-alpha and TNF-alpha protein production). Better protein production is correlated with lower induction of innate immune activation pathway, and new chemistries can be judged favorably based on this ratio (Table 92).

[1436] In this study, the PC Ratio for the two chemical modifications, pseudouridine and N1-methyl-pseudouridine, both with 5-methy cytosine was 4742/141=34 as compared to 9944/1=9944 for the cytokine IFN-alpha. For the cytokine, TNF-alpha, the two chemistries had PC Ratios of 153 and 1243, respectively suggesting that for either cytokine, the N1-methyl-pseudouridine is the superior modification. In Tables 90 and 91, “NT” means not tested.

TABLE 90
G-CSF
G-CSF: 3 Donor Average (pg/ml)

| | |
|---|---|
| G-CSF | 4742 |
| 5-methylcytosine/ | |
| pseudouridine | |
| G-CSF | 9944 |
| 5-methylcytosine/ | |
| N1-methyl-pseudouridine | |
| Luciferase | 18 |
| LF2000 | 16 |

TABLE 91
IFN-alpha and TNF-alpha

| | IFN-alpha: 3 | TNF-alpha: 3 |
|---|---|---|
| | Donor Average | Donor Average |
| | (pg/ml) | (pg/ml) |
| G-CSF | 141 | 31 |
| 5-methylcytosine/ | | |
| pseudouridine | | |
| G-CSF | 1 | 8 |
| 5-methylcytosine/ | | |
| N1-methyl-pseudouridine | | |
| P(I)P(C) | 1104 | NT |
| R-848 | NT | 1477 |
| LF2000 | 17 | 25 |

TABLE 92
G-CSF to Cytokine Ratios

| | G-CSF/IFN-alpha (ratio) | | G-CSF/TNF-alpha (ratio) | |
|---|---|---|---|---|
| | | 5-methyl- | | 5-methyl- |
| | 5-methyl- | cytosine/ | 5-methyl- | cytosine/ |
| | cytosine/ | N1-methyl- | cytosine/ | N1-methyl- |
| | pseudouridine | pseudouridine | pseudouridine | pseudouridine |
| PC | 34 | 9944 | 153 | 1243 |
| Ratio | | | | |

### Example 63. In Vitro PBMC Studies: Percent Modification

[1437] 480 ng of G-CSF mRNA modified with 5-methylcytosine (5 mC) and pseudouridine (pseudoU) or unmodified G-CSF mRNA was transfected with 0.4 uL of Lipofectamine 2000 into peripheral blood mononuclear cells (PBMC) from three normal blood donors (D1, D2, and D3). The G-CSF mRNA (mRNA sequence shown in SEQ ID NO: 31907; polyA tail of approximately 160 nucleotides not shown in sequence; 5′cap, Cap1) was completely modified with 5 mC and pseudoU (100% modification), not modified with 5 mC and pseudoU (0% modification) or was partially modified with 5 mC and pseudoU so the mRNA would contain 75% modification, 50% modification or 25% modification. A control sample of Luciferase (mRNA sequence shown in SEQ ID NO: 31917; polyA tail of approximately 160 nucleotides not shown in sequence; 5′cap, Cap1; fully modified 5meC and pseudoU) was also analyzed for G-CSF expression. For TNF-alpha and IFN-alpha control samples of Lipofectamine2000, LPS, R-848, Luciferase (mRNA sequence shown in SEQ ID NO: 31917; polyA tail of approximately 160 nucleotides not shown in sequence; 5′cap, Cap1; fully modified 5 mC and pseudo), and P(I)P(C) were also analyzed. The supernatant was harvested and run by ELISA 22 hours after transfection to determine the protein expression. The expression of G-CSF is shown in Table 93 and the expression of IFN-alpha and TNF-alpha is shown in Table 94. The expression of IFN-alpha and TNF-alpha may be a secondary effect from the transfection of the G-CSF mRNA. Tables 93 and 94 show that the amount of chemical modification of G-CSF, interferon alpha (IFN-alpha) and tumor necrosis factor-alpha (TNF-alpha) is titratable when the mRNA is not fully modified and the titratable trend is not the same for each target.

[1438] By using PBMC as an in vitro assay system it is possible to establish a correlation between translation (in this case G-CSF protein production) and cytokine production (in this case exemplified by IFN-alpha protein production). Better protein production is correlated with lower induction of innate immune activation pathway, and the percentage modification of a chemistry can be judged favorably based on this ratio (Table 95). As calculated from Tables 93 and 94 and shown in Table 95, full modification with 5-methylcytidine and pseudouridine shows a much better ratio of protein/cytokine production than without any modification (natural G-CSF mRNA) (100-fold for IFN-alpha and 27-fold for TNF-alpha). Partial modification shows a linear relationship with increasingly less modification resulting in a lower protein/cytokine ratio.

TABLE 93
G-CSF Expression

| | G-CSF Expression (pg/ml) | | |
|---|---|---|---|
| | D1 | D2 | D3 |
| 100% modification | 1968.9 | 2595.6 | 2835.7 |
| 75% modification | 566.7 | 631.4 | 659.5 |
| 50% modification | 188.9 | 187.2 | 191.9 |
| 25% modification | 139.3 | 126.9 | 102.0 |
| 0% modification | 194.8 | 182.0 | 183.3 |
| Luciferase | 90.2 | 0.0 | 22.1 |

TABLE 94
IFN-alpha and TNF-alpha Expression

| | IFN-alpha Expression | | | TNF-alpha Expression | | |
|---|---|---|---|---|---|---|
| | (pg/ml) | | | (pg/ml) | | |
| | D1 | D2 | D3 | D1 | D2 | D3 |
| 100% | 336.5 | 78.0 | 46.4 | 115.0 | 15.0 | 11.1 |
| modification | | | | | | |
| 75% | 339.6 | 107.6 | 160.9 | 107.4 | 21.7 | 11.8 |
| modification | | | | | | |
| 50% | 478.9 | 261.1 | 389.7 | 49.6 | 24.1 | 10.4 |
| modification | | | | | | |
| 25% | 564.3 | 400.4 | 670.7 | 85.6 | 26.6 | 19.8 |
| modification | | | | | | |
| 0% | 1421.6 | 810.5 | 1260.5 | 154.6 | 96.8 | 45.9 |
| modification | | | | | | |
| LPS | 0.0 | 0.6 | 0.0 | 0.0 | 12.6 | 4.3 |
| R-848 | 0.5 | 3.0 | 14.1 | 655.2 | 989.9 | 420.4 |
| P(I)P(C) | 130.8 | 297.1 | 585.2 | 765.8 | 2362.7 | 1874.4 |
| Lipid only | 1952.2 | 866.6 | 855.8 | 248.5 | 82.0 | 60.7 |

TABLE 95
PC Ratio and Effect of Percentage of Modification

| | Average | Average | Average | G-CSF/IFN- | G-CSF/TNF- |
|---|---|---|---|---|---|
| % | G-CSF | IFN-a | TNF-a | alpha | alpha |
| Modification | (pg/ml) | (pg/ml) | (pg/ml) | (PC ratio) | (PC ratio) |
| 100 | 2466 | 153 | 47 | 16 | 52 |
| 75 | 619 | 202 | 47 | 3.1 | 13 |
| 50 | 189 | 376 | 28 | 0.5 | 6.8 |
| 25 | 122 | 545 | 44 | 0.2 | 2.8 |
| 0 | 186 | 1164 | 99 | 0.16 | 1.9 |

### Example 64. Modified RNA Transfected in PBMC

[1439] 500 ng of G-CSF mRNA modified with 5-methylcytosine (5 mC) and pseudouridine (pseudoU) or unmodified G-CSF mRNA was transfected with 0.4 uL of Lipofectamine 2000 into peripheral blood mononuclear cells (PBMC) from three normal blood donors (D1, D2, and D3). The G-CSF mRNA (mRNA sequence shown in SEQ ID NO: 31907; polyA tail of approximately 160 nucleotides not shown in sequence; 5′cap, Cap1) was completely modified with 5 mC and pseudoU (100% modification), not modified with 5 mC and pseudoU (0% modification) or was partially modified with 5 mC and pseudoU so the mRNA would contain 50% modification, 25% modification, 10% modification, %5 modification, 1% modification or 0.1% modification. A control sample of mCherry (mRNA sequence shown in SEQ ID NO: 31908; polyA tail of approximately 160 nucleotides not shown in sequence; 5′cap, Cap1; fully modified 5meC and pseudouridine), G-CSF fully modified with 5-methylcytosine and pseudouridine (Control G-CSF) and an untreated control was also analyzed for expression of G-CSF, tumor necrosis factor-alpha (TNF-alpha) and interferon-alpha (IFN-alpha). The supernatant was harvested 6 hours and 18 hours after transfection and run by ELISA to determine the protein expression. The expression of G-CSF, IFN-alpha, and TNF-alpha for Donor 1 is shown in Table 96, Donor 2 is shown in Table 97 and Donor 3 is shown in Table 98.

[1440] Full 100% modification with 5-methylcytidine and pseudouridine resulted in the most protein translation (G-CSF) and the least amount of cytokine produced across all three human PBMC donors. Decreasing amounts of modification results in more cytokine production (IFN-alpha and TNF-alpha), thus further highlighting the importance of fully modification to reduce cytokines and to improve protein translation (as evidenced here by G-CSF production).

TABLE 96
Donor 1

| | | | | | TNF-alpha | |
|---|---|---|---|---|---|---|
| | G-CSF (pg/mL) | | IFN-alpha (pg/mL) | | (pg/mL) | |
| | 6 hours | 18 hours | 6 hours | 18 hours | 6 hours | 18 hours |
| 100% Mod | 1815 | 2224 | 1 | 13 | 0 | 0 |
| 75% Mod | 591 | 614 | 0 | 89 | 0 | 0 |
| 50% Mod | 172 | 147 | 0 | 193 | 0 | 0 |
| 25% Mod | 111 | 92 | 2 | 219 | 0 | 0 |
| 10% Mod | 138 | 138 | 7 | 536 | 18 | 0 |
| 1% Mod | 199 | 214 | 9 | 660 | 18 | 3 |
| 0.1% Mod | 222 | 208 | 10 | 597 | 0 | 6 |
| 0% Mod | 273 | 299 | 10 | 501 | 10 | 0 |
| Control | 957 | 1274 | 3 | 123 | 18633 | 1620 |
| G-CSF | | | | | | |
| mCherry | 0 | 0 | 0 | 10 | 0 | 0 |
| Untreated | N/A | N/A | 0 | 0 | 1 | 1 |

TABLE 97
Donor 2

| | | | | | TNF-alpha | |
|---|---|---|---|---|---|---|
| | G-CSF(pg/mL) | | IFN-alpha (pg/mL) | | (pg/mL) | |
| | 6 hours | 18 hours | 6 hours | 18 hours | 6 hours | 18 hours |
| 100% Mod | 2184 | 2432 | 0 | 7 | 0 | 11 |
| 75% Mod | 935 | 958 | 3 | 130 | 0 | 0 |
| 50% Mod | 192 | 253 | 2 | 625 | 7 | 23 |
| 25% Mod | 153 | 158 | 7 | 464 | 6 | 6 |
| 10% Mod | 203 | 223 | 25 | 700 | 22 | 39 |
| 1% Mod | 288 | 275 | 27 | 962 | 51 | 66 |
| 0.1% Mod | 318 | 288 | 33 | 635 | 28 | 5 |
| 0% Mod | 389 | 413 | 26 | 748 | 1 | 253 |
| Control | 1461 | 1634 | 1 | 59 | 481 | 814 |
| G-CSF | | | | | | |
| mCherry | 0 | 7 | 0 | 1 | 0 | 0 |
| Untreated | N/A | N/A | 1 | 0 | 0 | 0 |

TABLE 98
Donor 3

| | | | | | TNF-alpha | |
|---|---|---|---|---|---|---|
| | G-CSF (pg/mL) | | IFN-alpha (pg/mL) | | (pg/mL) | |
| | 6 hours | 18 hours | 6 hours | 18 hours | 6 hours | 18 hours |
| 100% Mod | 6086 | 7549 | 7 | 658 | 11 | 11 |
| 75% Mod | 2479 | 2378 | 23 | 752 | 4 | 35 |
| 50% Mod | 667 | 774 | 24 | 896 | 22 | 18 |
| 25% Mod | 480 | 541 | 57 | 1557 | 43 | 115 |
| 10% Mod | 838 | 956 | 159 | 2755 | 144 | 123 |
| 1% Mod | 1108 | 1197 | 235 | 3415 | 88 | 270 |
| 0.1% Mod | 1338 | 1177 | 191 | 2873 | 37 | 363 |
| 0% Mod | 1463 | 1666 | 215 | 3793 | 74 | 429 |
| Control | 3272 | 3603 | 16 | 1557 | 731 | 9066 |
| G-CSF | | | | | | |
| mCherry | 0 | 0 | 2 | 645 | 0 | 0 |
| Untreated | N/A | N/A | 1 | 1 | 0 | 8 |

### Example 65. Innate Immune Response Study in BJ Fibroblasts

[1441] A. Single Transfection

[1442] Human primary foreskin fibroblasts (BJ fibroblasts) were obtained from American Type Culture Collection (ATCC) (catalog #CRL-2522) and grown in Eagle's Minimum Essential Medium (ATCC, catalog #30-2003) supplemented with 10% fetal bovine serum at 37° C., under 5% CO₂. BJ fibroblasts were seeded on a 24-well plate at a density of 300,000 cells per well in 0.5 ml of culture medium. 250 ng of modified G-CSF mRNA (mRNA sequence shown in SEQ ID NO: 31907; polyA tail of approximately 140 nucleotides not shown in sequence; 5′cap, Cap1) fully modified with 5-methylcytosine and pseudouridine (Gen1) or fully modified with 5-methylcytosine and N1-methyl-pseudouridine (Gen2) having Cap0, Cap1 or no cap was transfected using Lipofectamine 2000 (Invitrogen, catalog #11668-019), following manufacturer's protocol. Control samples of poly I:C (PIC), Lipofectamine 2000 (Lipo), natural luciferase mRNA (mRNA sequence shown in SEQ ID NO: 31917; polyA tail of approximately 160 nucleotides not shown in sequence; 5′cap, Cap1) and natural G-CSF mRNA were also transfected. The cells were harvested after 18 hours, the total RNA was isolated and DNASE® treated using the RNeasy micro kit (catalog #74004) following the manufacturer's protocol. 100 ng of total RNA was used for cDNA synthesis using High Capacity cDNA Reverse Transcription kit (catalog #4368814) following the manufacturer's protocol. The cDNA was then analyzed for the expression of innate immune response genes by quantitative real time PCR using SybrGreen in a Biorad CFX 384 instrument following manufacturer's protocol. Table 99 shows the expression level of innate immune response transcripts relative to house-keeping gene HPRT (hypoxanthine phosphoribosytransferase) and is expressed as fold-induction relative to HPRT. In the table, the panel of standard metrics includes: RIG-I is retinoic acid inducible gene 1, IL6 is interleukin-6, OAS-1 is oligoadenylate synthetase 1, IFNb is interferon-beta, AIM2 is absent in melanoma-2, IFIT-1 is interferon-induced protein with tetratricopeptide repeats 1, PKR is protein kinase R, TNFa is tumor necrosis factor alpha and IFNa is interferon alpha.

TABLE 99
Innate Immune Response Transcript Levels

| Formulation | RIG-I | IL6 | OAS-1 | IFNb | AIM2 | IFIT-1 | PKR | TNFa | IFNa |
|---|---|---|---|---|---|---|---|---|---|
| Natural | 71.5 | 20.6 | 20.778 | 11.404 | 0.251 | 151.218 | 16.001 | 0.526 | 0.067 |
| Luciferase | | | | | | | | | |
| Natural | 73.3 | 47.1 | 19.359 | 13.615 | 0.264 | 142.011 | 11.667 | 1.185 | 0.153 |
| G-CSF | | | | | | | | | |
| PIC | 30.0 | 2.8 | 8.628 | 1.523 | 0.100 | 71.914 | 10.326 | 0.264 | 0.063 |
| G-CSF | 0.81 | 0.22 | 0.080 | 0.009 | 0.008 | 2.220 | 1.592 | 0.090 | 0.027 |
| Gen1-UC | | | | | | | | | |
| G-CSF | 0.54 | 0.26 | 0.042 | 0.005 | 0.008 | 1.314 | 1.568 | 0.088 | 0.038 |
| Gen1-Cap0 | | | | | | | | | |
| G-CSF | 0.58 | 0.30 | 0.035 | 0.007 | 0.006 | 1.510 | 1.371 | 0.090 | 0.040 |
| Gen1-Cap1 | | | | | | | | | |
| G-CSF | 0.21 | 0.20 | 0.002 | 0.007 | 0.007 | 0.603 | 0.969 | 0.129 | 0.005 |
| Gen2-UC | | | | | | | | | |
| G-CSF | 0.23 | 0.21 | 0.002 | 0.0014 | 0.007 | 0.648 | 1.547 | 0.121 | 0.035 |
| Gen2-Cap0 | | | | | | | | | |
| G-CSF | 0.27 | 0.26 | 0.011 | 0.004 | 0.005 | 0.678 | 1.557 | 0.099 | 0.037 |
| Gen2-Cap1 | | | | | | | | | |
| Lipo | 0.27 | 0.53 | 0.001 | 0 | 0.007 | 0.954 | 1.536 | 0.158 | 0.064 |

[1443] B. Repeat Transfection

[1444] Human primary foreskin fibroblasts (BJ fibroblasts) were obtained from American Type Culture Collection (ATCC) (catalog #CRL-2522) and grown in Eagle's Minimum Essential Medium (ATCC, catalog #30-2003) supplemented with 10% fetal bovine serum at 37° C., under 5% CO₂. BJ fibroblasts were seeded on a 24-well plate at a density of 300,000 cells per well in 0.5 ml of culture medium. 250 ng of modified G-CSF mRNA (mRNA sequence shown in SEQ ID NO: 31907; polyA tail of approximately 140 nucleotides not shown in sequence; 5′cap, Cap1) unmodified, fully modified with 5-methylcytosine and pseudouridine (Gen1) or fully modified with 5-methylcytosine and N1-methyl-pseudouridine (Gen2) was transfected daily for 5 days following manufacturer's protocol. Control samples of Lipofectamine 2000 (L2000) and mCherry mRNA (mRNA sequence shown in SEQ ID NO: 31908; polyA tail of approximately 160 nucleotides not shown in sequence; 5′cap, Cap1; fully modified with 5-methylcytidine and pseudouridine) were also transfected daily for 5 days. The results are shown in Table 100.

[1445] Unmodified mRNA showed a cytokine response in interferon-beta (IFN-beta) and interleukin-6 (IL-6) after one day. mRNA modified with at least pseudouridine showed a cytokine response after 2-3 days whereas mRNA modified with 5-methylcytosine and N1-methyl-pseudouridine showed a reduced response after 3-5 days.

TABLE 100
Cytokine Response

| Formulation | Transfection | IFN-beta (pg/ml) | IL-6 (pg/ml) |
|---|---|---|---|
| G-CSF unmodified | 6 hours | 0 | 3596 |
| | Day 1 | 1363 | 15207 |
| | Day 2 | 238 | 12415 |
| | Day 3 | 225 | 5017 |
| | Day 4 | 363 | 4267 |
| | Day 5 | 225 | 3094 |
| G-CSF Gen 1 | 6 hours | 0 | 3396 |
| | Day 1 | 38 | 3870 |
| | Day 2 | 1125 | 16341 |
| | Day 3 | 100 | 25983 |
| | Day 4 | 75 | 18922 |
| | Day 5 | 213 | 15928 |
| G-CSF Gen 2 | 6 hours | 0 | 3337 |
| | Day 1 | 0 | 3733 |
| | Day 2 | 150 | 974 |
| | Day 3 | 213 | 4972 |
| | Day 4 | 1400 | 4122 |
| | Day 5 | 350 | 2906 |
| mCherry | 6 hours | 0 | 3278 |
| | Day 1 | 238 | 3893 |
| | Day 2 | 113 | 1833 |
| | Day 3 | 413 | 25539 |
| | Day 4 | 413 | 29233 |
| | Day 5 | 213 | 20178 |
| L2000 | 6 hours | 0 | 3270 |
| | Day 1 | 13 | 3933 |
| | Day 2 | 388 | 567 |
| | Day 3 | 338 | 1517 |
| | Day 4 | 475 | 1594 |
| | Day 5 | 263 | 1561 |

### Example 66. In Vivo Detection of Innate Immune Response

[1446] In an effort to distinguish the importance of different chemical modification of mRNA on in vivo protein production and cytokine response in vivo, female BALB/C mice (n=5) are injected intramuscularly with G-CSF mRNA (G-CSF mRNA unmod) (mRNA sequence shown in SEQ ID NO: 31907; polyA tail of approximately 160 nucleotides not shown in sequence) with a 5′cap of Cap1, G-CSF mRNA fully modified with 5-methylcytosine and pseudouridine (G-CSF mRNA mc/pU), G-CSF mRNA fully modified with 5-methylcytosine and N5-methyl-pseudouridine with (G-CSF mRNA mc/N1pU) or without a 5′ cap (G-CSF mRNA 5mc/N1 pU no cap) or a control of either R848 or 500 sucrose as described in Table 101.

TABLE 101
Dosing Chart

| Formulation | Route | Dose (ug/mouse) | Dose (ul) |
|---|---|---|---|
| G-CSF mRNA | I.M. | 200 | 50 |
| unmod | | | |
| G-CSF mRNA | I.M. | 200 | 50 |
| 5mc/pU | | | |
| G-CSF mRNA | I.M. | 200 | 50 |
| 5mc/N1pU | | | |
| G-CSF mRNA | I.M. | 200 | 50 |
| 5mc/N1pU no cap | | | |
| R848 | I.M. | 75 | 50 |
| 5% sucrose | I.M. | — | 50 |
| Untreated | I.M. | — | — |

[1447] Blood is collected at 8 hours after dosing. Using ELISA the protein levels of G-CSF, TNF-alpha and IFN-alpha is determined by ELISA. 8 hours after dosing, muscle is collected from the injection site and quantitative real time polymerase chain reaction (QPCR) is used to determine the mRNA levels of RIG-I, PKR, AIM-2, IFIT-1, OAS-2, MDA-5, IFN-beta, TNF-alpha, IL-6, G-CSF, CD45 in the muscle.

### Example 67. In Vivo Detection of Innate Immune Response Study

[1448] Female BALB/C mice (n=5) were injected intramuscularly with G-CSF mRNA (G-CSF mRNA unmod) (mRNA sequence shown in SEQ ID NO: 31907; polyA tail of approximately 160 nucleotides not shown in sequence) with a 5′cap of Cap1, G-CSF mRNA fully modified with 5-methylcytosine and pseudouridine (G-CSF mRNA 5mc/pU), G-CSF mRNA fully modified with 5-methylcytosine and N1-methyl-pseudouridine with (G-CSF mRNA 5mc/N1pU) or without a 5′ cap (G-CSF mRNA 5mc/N1 pU no cap) or a control of either R848 or 5% sucrose as described in Table 102. Blood is collected at 8 hours after dosing and using ELISA the protein levels of G-CSF and interferon-alpha (IFN-alpha) is determined by ELISA and are shown in Table 102.

[1449] As shown in Table 102, unmodified, 5mc/pU, and 5mc/N1pU modified G-CSF mRNA resulted in human G-CSF expression in mouse serum. The uncapped 5 mC/N1pU modified G-CSF mRNA showed no human G-CSF expression in serum, highlighting the importance of having a 5′ cap structure for protein translation.

[1450] As expected, no human G-CSF protein was expressed in the R848, 5% sucrose only, and untreated groups. Importantly, significant differences were seen in cytokine production as measured by mouse IFN-alpha in the serum. As expected, unmodified G-CSF mRNA demonstrated a robust cytokine response in vivo (greater than the R848 positive control). The 5mc/pU modified G-CSF mRNA did show a low but detectable cytokine response in vivo, while the 5mc/N1pU modified mRNA showed no detectable IFN-alpha in the serum (and same as vehicle or untreated animals).

[1451] Also, the response of 5mc/N1pU modified mRNA was the same regardless of whether it was capped or not. These in vivo results reinforce the conclusion that 1) that unmodified mRNA produce a robust innate immune response, 2) that this is reduced, but not abolished, through 100% incorporation of 5mc/pU modification, and 3) that incorporation of 5mc/N1pU modifications results in no detectable cytokine response.

[1452] Lastly, given that these injections are in 5% sucrose (which has no effect by itself), these result should accurately reflect the immunostimulatory potential of these modifications.

[1453] From the data it is evident that N1pU modified molecules produce more protein while concomitantly having little or no effect on IFN-alpha expression. It is also evident that capping is required for protein production for this chemical modification. The Protein: Cytokine Ratio of 748 as compared to the PC Ratio for the unmodified mRNA (PC=9) means that this chemical modification is far superior as related to the effects or biological implications associated with IFN-alpha.

TABLE 102
Human G-CSF and Mouse IFN-alpha in serum

| | | | | G-CSF | IFN-alpha | |
|---|---|---|---|---|---|---|
| | | Dose (ug/ | Dose | protein | expression | PC |
| Formulation | Route | mouse) | (ul) | (pg/ml) | (pg/ml) | Ratio |
| G-CSF mRNA | I.M. | 200 | 50 | 605.6 | 67.01 | 9 |
| unmod | | | | | | |
| G-CSF mRNA | I.M. | 200 | 50 | 356.5 | 8.87 | 40 |
| 5mc/pU | | | | | | |
| G-CSF | I.M. | 200 | 50 | 748.1 | 0 | 748 |
| mRNA5mc/N1pU | | | | | | |
| G-CSF | I.M. | 200 | 50 | 6.5 | 0 | 6.5 |
| mRNA5mc/N1pU | | | | | | |
| no cap | | | | | | |
| R848 | I.M. | 75 | 50 | 3.4 | 40.97 | .08 |
| 5% sucrose | I.M. | — | 50 | 0 | 1.49 | 0 |
| Untreated | I.M. | — | — | 0 | 0 | 0 |

### Example 68: In Vivo Delivery of Modified RNA

[1454] Protein production of modified mRNA was evaluated by delivering modified G-CSF mRNA or modified Factor IX mRNA to female Sprague Dawley rats (n=6). Rats were injected with 400 ug in 100 ul of G-CSF mRNA (mRNA sequence shown in SEQ ID NO: 31907; polyA tail of approximately 160 nucleotides not shown in sequence; 5′cap, Cap1) fully modified with 5-methylcytosine and pseudouridine (G-CSF Gen1), G-CSF mRNA fully modified with 5-methylcytosine and N1-methyl-pseudouridine (G-CSF Gen2) or Factor IX mRNA (mRNA sequence shown in SEQ ID NO: 31911; polyA tail of approximately 160 nucleotides not shown in sequence; 5′cap, Cap1) fully modified with 5-methylcytosine and pseudouridine (Factor IX Gen1) reconstituted from the lyophilized form in 5% sucrose. Blood was collected 8 hours after injection and the G-CSF protein level in serum was measured by ELISA. Table 103 shows the G-CSF protein levels in serum after 8 hours.

[1455] These results demonstrate that both G-CSF Gen 1 and G-CSF Gen 2 modified mRNA can produce human G-CSF protein in a rat following a single intramuscular injection, and that human G-CSF protein production is improved when using Gen 2 chemistry over Gen 1 chemistry.

TABLE 103
G-CSF Protein in Rat Serum (I.M. Injection Route)

| Formulation | G-CSF protein (pg/ml) |
|---|---|
| G-CSF Gen1 | 19.37 |
| G-CSF Gen2 | 64.72 |
| Factor IX Gen 1 | 2.25 |

### Example 69. Chemical Modification: In Vitro Studies

[1456] A. In Vitro Screening in PBMC

[1457] 500 ng of G-CSF (mRNA sequence shown in SEQ ID NO: 31907; polyA tail of approximately 160 nucleotides not shown in sequence; 5′cap, Cap1) mRNA fully modified with the chemical modification outlined Tables 104 and 105 was transfected with 0.4 uL Lipofectamine 2000 into peripheral blood mononuclear cells (PBMC) from three normal blood donors. Control samples of LPS, R848, P(I)P(C) and mCherry (mRNA sequence shown in SEQ ID NO: 31908; polyA tail of approximately 160 nucleotides not shown in sequence, 5′cap, Cap1; fully modified with 5-methylcytosine and pseudouridine) were also analyzed. The supernatant was harvested and stored frozen until analyzed by ELISA to determine the G-CSF protein expression, and the induction of the cytokines interferon-alpha (IFN-α) and tumor necrosis factor alpha (TNF-α). The protein expression of G-CSF is shown in Table 104, the expression of IFN-α and TNF-α is shown in Table 105.

[1458] The data in Table 104 demonstrates that many, but not all, chemical modifications can be used to productively produce human G-CSF in PBMC. Of note, 100% N1-methyl-pseudouridine substitution demonstrates the highest level of human G-CSF production (almost 10-fold higher than pseudouridine itself). When N1-methyl-pseudouridine is used in combination with 5-methylcytidine a high level of human G-CSF protein is also produced (this is also higher than when pseudouridine is used in combination with 5 methylcytidine).

[1459] Given the inverse relationship between protein production and cytokine production in PBMC, a similar trend is also seen in Table 105, where 100% substitution with N1-methyl-pseudouridine results no cytokine induction (similar to transfection only controls) and pseudouridine shows detectable cytokine induction which is above background.

[1460] Other modifications such as N6-methyladenosine and alpha-thiocytidine appear to increase cytokine stimulation.

TABLE 104
Chemical Modifications and G-CSF Protein Expression

| | G-CSF Protein Expression | | |
|---|---|---|---|
| | (pg/ml) | | |
| | Donor | Donor | Donor |
| Chemical Modifications | 1 | 2 | 3 |
| Pseudouridine | 2477 | 1,909 | 1,498 |
| 5-methyluridine | 318 | 359 | 345 |
| N1-methyl-pseudouridine | 21,495 | 16,550 | 12,441 |
| 2-thiouridine | 932 | 1,000 | 600 |
| 4-thiouridine | 5 | 391 | 218 |
| 5-methoxyuridine | 2,964 | 1,832 | 1,800 |
| 5-methylcytosine and pseudouridine (1^{st} set) | 2,632 | 1,955 | 1,373 |
| 5-methylcytosine and N1-methyl- | 10,232 | 7,245 | 6,214 |
| pseudouridine (1^{st} set) | | | |
| 2′Fluoroguanosine | 59 | 186 | 177 |
| 2′Fluorouridine | 118 | 209 | 191 |
| 5-methylcytosine and pseudouridine (2^{nd} set) | 1,682 | 1,382 | 1,036 |
| 5-methylcytosine and N1-methyl- | 9,564 | 8,509 | 7,141 |
| pseudouridine (2^{nd} set) | | | |
| 5-bromouridine | 314 | 482 | 291 |
| 5-(2-carbomethoxyvinyl)uridine | 77 | 286 | 177 |
| 5-[3(1-E-propenylamino)uridine | 541 | 491 | 550 |
| α-thiocytidine | 105 | 264 | 245 |
| 5-methylcytosine and pseudouridine (3^{rd} set) | 1,595 | 1,432 | 955 |
| N1-methyladenosine | 182 | 177 | 191 |
| N6-methyladenosine | 100 | 168 | 200 |
| 5-methylcytidine | 291 | 277 | 359 |
| N4-acetylcytidine | 50 | 136 | 36 |
| 5-formylcytidine | 18 | 205 | 23 |
| 5-methylcytosine and pseudouridine (4^{th} set) | 264 | 350 | 182 |
| 5-methylcytosine and N1-methyl- | 9,505 | 6,927 | 5,405 |
| pseudouridine (4^{th} set) | | | |
| LPS | 1,209 | 786 | 636 |
| mCherry | 5 | 168 | 164 |
| R848 | 709 | 732 | 636 |
| P(I)P(C) | 5 | 186 | 182 |

TABLE 105
Chemical Modifications and Cytokine Expression

| Chemical | IFN-α Expression (pg/ml) | | | TNF-α Expression (pg/ml) | | |
|---|---|---|---|---|---|---|
| Modifications | Donor 1 | Donor 2 | Donor 3 | Donor 1 | Donor 2 | Donor 3 |
| Pseudouridine | 120 | 77 | 171 | 36 | 81 | 126 |
| 5-methyluridine | 245 | 135 | 334 | 94 | 100 | 157 |
| N1-methyl- | 26 | 75 | 138 | 101 | 106 | 134 |
| pseudouridine | | | | | | |
| 2-thiouridine | 100 | 108 | 154 | 133 | 133 | 141 |
| 4-thiouridine | 463 | 258 | 659 | 169 | 126 | 254 |
| 5-methoxyuridine | 0 | 64 | 133 | 39 | 74 | 111 |
| 5-methylcytosine and | 88 | 94 | 148 | 64 | 89 | 121 |
| pseudouridine (1^{st} set) | | | | | | |
| 5-methylcytosine and | 0 | 60 | 136 | 54 | 79 | 126 |
| N1-methyl- | | | | | | |
| pseudouridine (1^{st} set) | | | | | | |
| 2′Fluoroguanosine | 107 | 97 | 194 | 91 | 94 | 141 |
| 2′Fluorouridine | 158 | 103 | 178 | 164 | 121 | 156 |
| 5-methylcytosine and | 133 | 92 | 167 | 99 | 111 | 150 |
| pseudouridine (2^{nd} set) | | | | | | |
| 5-methylcytosine and | 0 | 66 | 140 | 54 | 97 | 149 |
| N1-methyl- | | | | | | |
| pseudouridine (2^{nd} set) | | | | | | |
| 5-bromouridine | 95 | 86 | 181 | 87 | 106 | 157 |
| 5-(2- | 0 | 61 | 130 | 40 | 81 | 116 |
| carbomethoxyvinyl)uridine | | | | | | |
| 5-[3(1-E- | 0 | 58 | 132 | 71 | 90 | 119 |
| propenylamino)uridine | | | | | | |
| α-thiocytidine | 1,138 | 565 | 695 | 300 | 273 | 277 |
| 5-methylcytosine and | 88 | 75 | 150 | 84 | 89 | 130 |
| pseudouridine (3^{rd} set) | | | | | | |
| N1-methyladenosine | 322 | 255 | 377 | 256 | 157 | 294 |
| N6-methyladenosine | 1,935 | 1,065 | 1,492 | 1,080 | 630 | 857 |
| 5-methylcytidine | 643 | 359 | 529 | 176 | 136 | 193 |
| N4-acetylcytidine | 789 | 593 | 431 | 263 | 67 | 207 |
| 5-formylcytidine | 180 | 93 | 88 | 136 | 30 | 40 |
| 5-methylcytosine and | 131 | 28 | 18 | 53 | 24 | 29 |
| pseudouridine (4^{th} set) | | | | | | |
| 5-methylcytosine and | 0 | 0 | 0 | 36 | 14 | 13 |
| N1-methyl- | | | | | | |
| pseudouridine (4^{th} set) | | | | | | |
| LPS | 0 | 67 | 146 | 7,004 | 3,974 | 4,020 |
| mCherry | 100 | 75 | 143 | 67 | 100 | 133 |
| R848 | 674 | 619 | 562 | 11,179 | 8,546 | 9,907 |
| P(I)P(C) | 470 | 117 | 362 | 249 | 177 | 197 |

[1461] B. In Vitro Screening in HeLa Cells

[1462] The day before transfection, 20,000 HeLa cells (ATCC no. CCL-2; Manassas, VA) were harvested by treatment with Trypsin-EDTA solution (LifeTechnologies, Grand Island, NY) and seeded in a total volume of 100 ul EMVIEM medium (supplemented with 100% FCS and 1× Glutamax) per well in a 96-well cell culture plate (Corning, Manassas, VA). The cells were grown at 37oG in 5% CO₂ atmosphere overnight. Next day, 83 ng of Luciferase modified RNA (mRNA sequence shown in SEQ ID NO: 31917; polyA tail of approximately 160 nucleotides not shown in sequence; 5′cap, Cap 1) with the chemical modification described in Table 106, were diluted in 10 ul final volume of OPTI-MEM (LifeTechnologies, Grand Island, NY).

[1463] Lipofectamine 2000 (LifeTechnologies, Grand Island, NY) was used as transfection reagent and 0.2 ul were diluted in 10 ul final volume of OPTI-MEM. After 5 minutes of incubation at room temperature, both solutions were combined and incubated an additional 15 minute at room temperature. Then the 20 ul combined solution was added to the 100 ul cell culture medium containing the HeLa cells and incubated at room temperature.

[1464] After 18 to 22 hours of incubation cells expressing luciferase were lysed with 100 ul of Passive Lysis Buffer (Promega, Madison, WI) according to manufacturer instructions. Aliquots of the lysates were transferred to white opaque polystyrene 96-well plates (Corning, Manassas, VA) and combined with 100 ul complete luciferase assay solution (Promega, Madison, WI). The lysate volumes were adjusted or diluted until no more than 2 mio relative light units (RLU) per well were detected for the strongest signal producing samples and the RLUs for each chemistry tested are shown in Table 106. The plate reader was a BioTek Synergy H1 (BioTek, Winooski, VT). The background signal of the plates without reagent was about 200 relative light units per well.

[1465] These results demonstrate that many, but not all, chemical modifications can be used to productively produce human G-CSF in HeLa cells. Of note, 100% N1-methyl-pseudouridine substitution demonstrates the highest level of human G-CSF production.

TABLE 106
Relative Light Units of Luciferase

| Chemical Modification | RLU |
|---|---|
| N6-methyladenosine (m6a) | 534 |
| 5-methylcytidine (m5c) | 138,428 |
| N4-acetylcytidine (ac4c) | 235,412 |
| 5-formylcytidine (f5c) | 436 |
| 5-methylcytosine/pseudouridine, test A1 | 48,659 |
| 5-methylcytosine/N1-methyl-pseudouridine, test A1 | 190,924 |
| Pseudouridine | 655,632 |
| 1-methylpseudouridine (m1u) | 1,517,998 |
| 2-thiouridine (s2u) | 3387 |
| 5-methoxyuridine (mo5u) | 253,719 |
| 5-methylcytosine/pseudouridine, test B1 | 317,744 |
| 5-methylcytosine/N1-methyl-pseudouridine, test B1 | 265,871 |
| 5-Bromo-uridine | 43,276 |
| 5 (2 carbovinyl) uridine | 531 |
| 5 (3-1E propenyl Amino) uridine | 446 |
| 5-methylcytosine/pseudouridine, test A2 | 295,824 |
| 5-methylcytosine/N1-methyl-pseudouridine, test A2 | 233,921 |
| 5-methyluridine | 50,932 |
| α-Thio-cytidine | 26,358 |
| 5-methylcytosine/pseudouridine, test B2 | 481,477 |
| 5-methylcytosine/N1-methyl-pseudouridine, test B2 | 271,989 |
| 5-methylcytosine/pseudouridine, test A3 | 438,831 |
| 5-methylcytosine/N1-methyl-pseudouridine, test A3 | 277,499 |
| Unmodified Luciferase | 234,802 |

[1466] C. In Vitro Screening in Rabbit Reticulocyte Lysates

[1467] Luciferase mRNA (mRNA sequence shown in SEQ ID NO: 31917; polyA tail of approximately 160 nucleotides not shown in sequence; 5′cap, Cap1) was modified with the chemical modification listed in Table 107 and were diluted in sterile nuclease-free water to a final amount of 250 ng in 10 ul. The diluted luciferase was added to 40 ul of freshly prepared Rabbit Reticulocyte Lysate and the in vitro translation reaction was done in a standard 1.5 mL polypropylene reaction tube (Thermo Fisher Scientific, Waltham, MA) at 30° C. in a dry heating block. The translation assay was done with the Rabbit Reticulocyte Lysate (nuclease-treated) kit (Promega, Madison, WI) according to the manufacturer's instructions. The reaction buffer was supplemented with a one-to-one blend of provided amino acid stock solutions devoid of either Leucine or Methionine resulting in a reaction mix containing sufficient amounts of both amino acids to allow effective in vitro translation.

[1468] After 60 minutes of incubation, the reaction was stopped by placing the reaction tubes on ice. Aliquots of the in vitro translation reaction containing luciferase modified RNA were transferred to white opaque polystyrene 96-well plates (Corning, Manassas, VA) and combined with 100 ul complete luciferase assay solution (Promega, Madison, WI). The volumes of the in vitro translation reactions were adjusted or diluted until no more than 2 mio relative light units (RLUs) per well were detected for the strongest signal producing samples and the RLUs for each chemistry tested are shown in Table 107. The plate reader was a BioTek Synergy H1 (BioTek, Winooski, VT). The background signal of the plates without reagent was about 200 relative light units per well.

[1469] These cell-free translation results very nicely correlate with the protein production results in HeLa, with the same modifications generally working or not working in both systems. One notable exception is 5-formylcytidine modified luciferase mRNA which worked in the cell-free translation system, but not in the HeLa cell-based transfection system. A similar difference between the two assays was also seen with 5-formylcytidine modified G-CSF mRNA.

TABLE 107
Relative Light Units of Luciferase

| Chemical Modification | RLU |
|---|---|
| N6-methyladenosine (m6a) | 398 |
| 5-methylcytidine (m5c) | 152,989 |
| N4-acetylcytidine (ac4c) | 60,879 |
| 5-formylcytidine (f5c) | 55,208 |
| 5-methylcytosine/pseudouridine, test A1 | 349,398 |
| 5-methylcytosine/N1-methyl-pseudouridine, test A1 | 205,465 |
| Pseudouridine | 587,795 |
| 1-methylpseudouridine (m1u) | 589,758 |
| 2-thiouridine (s2u) | 708 |
| 5-methoxyuridine (mo5u) | 288,647 |
| 5-methylcytosine/pseudouridine, test B1 | 454,662 |
| 5-methylcytosine/N1-methyl-pseudouridine, test B1 | 223,732 |
| 5-Bromo-uridine | 221,879 |
| 5 (2 carbovinyl) uridine | 225 |
| 5 (3-1E propenyl Amino) uridine | 211 |
| 5-methylcytosine/pseudouridine, test A2 | 558,779 |
| 5-methylcytosine/N1-methyl-pseudouridine, test A2 | 333,082 |
| 5-methyluridine | 214,680 |
| α-Thio-cytidine | 123,878 |
| 5-methylcytosine/pseudouridine, test B2 | 487,805 |
| 5-methylcytosine/N1-methyl-pseudouridine, test B2 | 154,096 |
| 5-methylcytosine/pseudouridine, test A3 | 413,535 |
| 5-methylcytosine/N1-methyl-pseudouridine, test A3 | 292,954 |
| Unmodified Luciferase | 225,986 |

### Example 70. Chemical Modification: In Vivo Studies

[1470] A. In Vivo Screening of G-CSF Modified mRNA

[1471] Balb-C mice (n=4) are intramuscularly injected in each leg with modified G-CSF mRNA (mRNA sequence shown in SEQ ID NO: 31907; polyA tail of approximately 160 nucleotides not shown in sequence; 5′ cap, Cap 1), fully modified with the chemical modifications outlined in Table 108, is formulated in 1xPBS. A control of luciferase modified mRNA (mRNA sequence shown in SEQ ID NO: 31917; polyA tail of approximately 160 nucleotides not shown in sequence; 5′cap, Cap1; fully modified with pseudouridine and 5-methylcytosine) and a control of PBS are also tested. After 8 hours serum is collected to determine G-CSF protein levels cytokine levels by ELISA.

TABLE 108
G-CSF

| mRNA | Chemical Modifications |
|---|---|
| G-CSF | Pseudouridine |
| G-CSF | 5-methyluridine |
| G-CSF | 2-thiouridine |
| G-CSF | 4-thiouridine |
| G-CSF | 5-methoxyuridine |
| G-CSF | 2′-fluorouridine |
| G-CSF | 5-bromouridine |
| G-CSF | 5-[3(1-E-propenylamino)uridine) |
| G-CSF | alpha-thio-cytidine |
| G-CSF | 5-methylcytidine |
| G-CSF | N4-acetylcytidine |
| G-CSF | Pseudouridine and 5-methylcytosine |
| G-CSF | N1-methyl-pseudouridine and 5-methylcytosine |
| Luciferase | Pseudouridine and 5-methylcytosine |
| PBS | None |

[1472] B. In Vivo Screening of Luciferase Modified mRNA

[1473] Balb-C mice (n=4) were subcutaneously injected with 200 ul containing 42 to 103 ug of modified luciferase mRNA (mRNA sequence shown in SEQ ID NO: 31917; polyA tail of approximately 160 nucleotides not shown in sequence; 5′cap, Cap1), fully modified with the chemical modifications outlined in Table 109, was formulated in 1xPBS. A control of PBS was also tested. The dosages of the modified luciferase mRNA is also outlined in Table 109. 8 hours after dosing the mice were imaged to determine luciferase expression. Twenty minutes prior to imaging, mice were injected intraperitoneally with a D-luciferin solution at 150 mg/kg. Animals were then anesthetized and images were acquired with an IVIS Lumina II imaging system (Perkin Elmer). Bioluminescence was measured as total flux (photons/second) of the entire mouse.

[1474] As demonstrated in Table 109, all luciferase mRNA modified chemistries demonstrated in vivo activity, with the exception of 2′-fluorouridine. In addition 1-methylpseudouridine modified mRNA demonstrated very high expression of luciferase (5-fold greater expression than pseudouridine containing mRNA).

TABLE 109
Luciferase Screening

| | | Dose | Dose | Luciferase |
|---|---|---|---|---|
| | Chemical | (ug) of | volume | expression |
| mRNA | Modifications | mRNA | (ml) | (photon/second) |
| Luciferase | 5-methylcytidine | 83 | 0.72 | 1.94E+07 |
| Luciferase | N4-acetylcytidine | 76 | 0.72 | 1.11E07 |
| Luciferase | Pseudouridine | 95 | 1.20 | 1.36E+07 |
| Luciferase | 1- | 103 | 0.72 | 7.40E+07 |
| | methylpseudouridine | | | |
| Luciferase | 5-methoxyuridine | 95 | 1.22 | 3.32+07 |
| Luciferase | 5-methyluridine | 94 | 0.86 | 7.42E+06 |
| Luciferase | 5-bromouridine | 89 | 1.49 | 3.75E+07 |
| Luciferase | 2′-fluoroguanosine | 42 | 0.72 | 5.88E+05 |
| Luciferase | 2′-fluorocytidine | 47 | 0.72 | 4.21E+05 |
| Luciferase | 2′-flurorouridine | 59 | 0.72 | 3.47E+05 |
| PBS | None | — | 0.72 | 3.16E+05 |

### Example 71. In Vivo Screening of Combination Luciferase Modified mRNA

[1475] Balb-C mice (n=4) were subcutaneously injected with 200 ul of 100 ug of modified luciferase mRNA (mRNA sequence shown in SEQ ID NO: 31917; polyA tail of approximately 160 nucleotides not shown in sequence; 5′cap, Cap1), fully modified with the chemical modifications outlined in Table 110, was formulated in 1× PBS. A control of PBS was also tested. 8 hours after dosing the mice were imaged to determine luciferase expression. Twenty minutes prior to imaging, mice were injected intraperitoneally with a D-luciferin solution at 150 mg/kg. Animals were then anesthetized and images were acquired with an IVIS Lumina II imaging system (Perkin Elmer). Bioluminescence was measured as total flux (photons/second) of the entire mouse.

[1476] As demonstrated in Table 110, all luciferase mRNA modified chemistries (in combination) demonstrated in vivo activity. In addition the presence of N1-methyl-pseudouridine in the modified mRNA (with N4-acetylcytidine or 5 methylcytidine) demonstrated higher expression than when the same combinations where tested using with pseudouridine. Taken together, these data demonstrate that N1-methyl-pseudouridine containing luciferase mRNA results in improved protein expression in vivo whether used alone (Table 109) or when used in combination with other modified nulceotides (Table 110).

TABLE 110
Luciferase Screening Combinations

| | | Luciferase |
|---|---|---|
| | | expression |
| | | (photon/ |
| mRNA | Chemical Modifications | second) |
| Luciferase | N4-acetylcytidine/pseudouridine | 4.18E+06 |
| Luciferase | N4-acetylcytidine/N1-methyl-pseudouridine | 2.88E+07 |
| Luciferase | 5-methylcytidine/5-methoxyuridine | 3.48E+07 |
| Luciferase | 5-methylcytidine/5-methyluridine | 1.44E+07 |
| Luciferase | 5-methylcytidine/where 50% of the uridine | 2.39E+06 |
| | is replaced with 2-thiouridine | |
| Luciferase | 5-methylcytidine/pseudouridine | 2.36E+07 |
| Luciferase | 5-methylcytidine/N1-methyl-pseudouridine | 4.15E+07 |
| PBS | None | 3.59E+05 |

### Example 72. Innate Immune Response in BJ Fibroblasts

[1477] Human primary foreskin fibroblasts (BJ fibroblasts) are obtained from American Type Culture Collection (ATCC) (catalog #CRL-2522) and grown in Eagle's Minimum Essential Medium (ATCC, cat #30-2003) supplemented with 10% fetal bovine serum at 37° C., under 5% CO2. BJ fibroblasts are seeded on a 24-well plate at a density of 130,000 cells per well in 0.5 ml of culture medium. 250 ng of modified G-CSF mRNA (mRNA sequence shown in SEQ ID NO: 31907; polyA tail of approximately 160 nucleotides not shown in sequence; 5′cap, Cap1) fully modified with 5-methylcytosine and pseudouridine (Gen1) or fully modified with 5-methylcytosine and N1-methyl-pseudouridine (Gen2) is transfected using Lipofectamine 2000 (Invitrogen, cat #11668-019), following manufacturer's protocol. Control samples of Lipofectamine 2000 and unmodified G-CSF mRNA (natural G-CSF) are also transfected. The cells are transfected for five consecutive days. The transfection complexes are removed four hours after each round of transfection.

[1478] The culture supernatant is assayed for secreted G-CSF (R&D Systems, catalog #DCS50), tumor necrosis factor-alpha (TNF-alpha) and interferon alpha (IFN-alpha by ELISA every day after transfection following manufacturer's protocols. The cells are analyzed for viability using CELL TITER GLO® (Promega, catalog #G7570) 6 hrs and 18 hrs after the first round of transfection and every alternate day following that. At the same time from the harvested cells, total RNA is isolated and treated with DNASE® using the RNAEASY micro kit (catalog #74004) following the manufacturer's protocol. 100 ng of total RNA is used for cDNA synthesis using the High Capacity cDNA Reverse Transcription kit (Applied Biosystems, cat #4368814) following the manufacturer's protocol. The cDNA is then analyzed for the expression of innate immune response genes by quantitative real time PCR using SybrGreen in a Biorad CFX 384 instrument following the manufacturer's protocol.

### Example 73. In Vitro Transcription with Wild-Type T7 Polymerase

[1479] Luciferase mRNA (mRNA sequence shown in SEQ ID NO: 31917; polyA tail of approximately 160 nucleotides not shown in sequence; 5′cap, Cap1) and G-CSF mRNA (mRNA sequence shown in SEQ ID NO: 31907; polyA tail of approximately 160 nucleotides not shown in sequence; 5′cap, Cap1) were fully modified with different chemistries and chemistry combinations listed in Tables 111-114 using wild-type T7 polymerase as previously described.

[1480] The yield of the translation reactions was determined by spectrophometric measurement (OD260) and the yield for Luciferase is shown in Table 111 and G-CSF is shown in Table 113.

[1481] The luciferase and G-CSF modified mRNA were also subjected to an enzymatic capping reaction and each modified mRNA capping reaction was evaluated for yield by spectrophometic measurement (OD260) and correct size assessed using bioanalyzer. The yield from the capping reaction for luciferase is shown in Table 112 and G-CSF is shown in Table 114.

TABLE 111
In vitro transcription chemistry for Luciferase

| Chemical Modification | Yield (mg) |
|---|---|
| N6-methyladenosine | 0.99 |
| 5-methylcytidine | 1.29 |
| N4-acetylcytidine | 1.0 |
| 5-formylcytidine | 0.55 |
| Pseudouridine | 2.0 |
| N1-methyl-pseudouridine | 1.43 |
| 2-thiouridine | 1.56 |
| 5-methoxyuridine | 2.35 |
| 5-methyluridine | 1.01 |
| α-Thio-cytidine | 0.83 |
| 5-Br-uridine (5Bru) | 1.96 |
| 5 (2 carbomethoxyvinyl) uridine | 0.89 |
| 5 (3-1E propenyl Amino) uridine | 2.01 |
| N4-acetylcytidine/pseudouridine | 1.34 |
| N4-acetylcytidine/N1-methyl-pseudouridine | 1.26 |
| 5-methylcytidine/5-methoxyuridine | 1.38 |
| 5-methylcytidine/5-bromouridine | 0.12 |
| 5-methylcytidine/5-methyluridine | 2.97 |
| 5-methylcytidine/half of the uridines | 1.59 |
| are modified with 2-thiouridine | |
| 5-methylcytidine/2-thiouridine | 0.90 |
| 5-methylcytidine/pseudouridine | 1.83 |
| 5-methylcytidine/N1-methyl-pseudouridine | 1.33 |

TABLE 112
Capping chemistry and yield for Luciferase modified mRNA

| Chemical Modification | Yield (mg) |
|---|---|
| 5-methylcytidine | 1.02 |
| N4-acetylcytidine | 0.93 |
| 5-formylcytidine | 0.55 |
| Pseudouridine | 2.07 |
| N1-methyl-pseudouridine | 1.27 |
| 2-thiouridine | 1.44 |
| 5-methoxyuridine | 2 |
| 5-methyluridine | 0.8 |
| α-Thio-cytidine | 0.74 |
| 5-Br-uridine (5Bru) | 1.29 |
| 5 (2 carbomethoxyvinyl) uridine | 0.54 |
| 5 (3-1E propenyl Amino) uridine | 1.39 |
| N4-acetylcytidine/pseudouridine | 0.99 |
| N4-acetylcytidine/N1-methyl-pseudouridine | 1.08 |
| 5-methylcytidine/5-methoxyuridine | 1.13 |
| 5-methylcytidine/5-methyluridine | 1.08 |
| 5-methylcytidine/half of the uridines | 1.2 |
| are modified with 2-thiouridine | |
| 5-methylcytidine/2-thiouridine | 1.27 |
| 5-methylcytidine/pseudouridine | 1.19 |
| 5-methylcytidine/N1-methyl-pseudouridine | 1.04 |

TABLE 113
In vitro transcription chemistry
and yield for G-CSF modified mRNA

| Chemical Modification | Yield (mg) |
|---|---|
| N6-methyladenosine | 1.57 |
| 5-methylcytidine | 2.05 |
| N4-acetylcytidine | 3.13 |
| 5-formylcytidine | 1.41 |
| Pseudouridine | 4.1 |
| N1-methyl-pseudouridine | 3.24 |
| 2-thiouridine | 3.46 |
| 5-methoxyuridine | 2.57 |
| 5-methyluridine | 4.27 |
| 4-thiouridine | 1.45 |
| 2′-F-uridine | 0.96 |
| α-Thio-cytidine | 2.29 |
| 2′-F-guanosine | 0.6 |
| N-1-methyladenosine | 0.63 |
| 5-Br-uridine (5Bru) | 1.08 |
| 5 (2 carbomethoxyvinyl) uridine | 1.8 |
| 5 (3-1E propenyl Amino) uridine | 2.09 |
| N4-acetylcytidine/pseudouridine | 1.72 |
| N4-acetylcytidine/N1-methyl-pseudouridine | 1.37 |
| 5-methylcytidine/5-methoxyuridine | 1.85 |
| 5-methylcytidine/5-methyluridine | 1.56 |
| 5-methylcytidine/half of the uridines | 1.84 |
| are modified with 2-thiouridine | |
| 5-methylcytidine/2-thiouridine | 2.53 |
| 5-methylcytidine/pseudouridine | 0.63 |
| N4-acetylcytidine/2-thiouridine | 1.3 |
| N4-acetylcytidine/5-bromouridine | 1.37 |
| 5-methylcytidine/N1-methyl-pseudouridine | 1.25 |
| N4-acetylcytidine/pseudouridine | 2.24 |

TABLE 114
Capping chemistry and yield for G-CSF modified mRNA

| Chemical Modification | Yield (mg) |
|---|---|
| N6-methyladenosine | 1.04 |
| 5-methylcytidine | 1.08 |
| N4-acetylcytidine | 2.73 |
| 5-formylcytidine | 0.95 |
| Pseudouridine | 3.88 |
| N1-methyl-pseudouridine | 2.58 |
| 2-thiouridine | 2.57 |
| 5-methoxyuridine | 2.05 |
| 5-methyluridine | 3.56 |
| 4-thiouridine | 0.91 |
| 2′-F-uridine | 0.54 |
| α-Thio-cytidine | 1.79 |
| 2′-F-guanosine | 0.14 |
| 5-Br-uridine (5Bru) | 0.79 |
| 5 (2 carbomethoxyvinyl) uridine | 1.28 |
| 5 (3-1E propenyl Amino) uridine | 1.78 |
| N4-acetylcytidine/pseudouridine | 0.29 |
| N4-acetylcytidine/N1-methyl-pseudouridine | 0.33 |
| 5-methylcytidine/5-methoxyuridine | 0.91 |
| 5-methylcytidine/5-methyluridine | 0.61 |
| 5-methylcytidine/half of the uridines | 1.24 |
| are modified with 2-thiouridine | |
| 5-methylcytidine/pseudouridine | 1.08 |
| N4-acetylcytidine/2-thiouridine | 1.34 |
| N4-acetylcytidine/5-bromouridine | 1.22 |
| 5-methylcytidine/N1-methyl-pseudouridine | 1.56 |

### Example 74. In Vitro Transcription with Mutant T7 Polymerase

[1482] Luciferase mRNA (mRNA sequence shown in SEQ ID NO: 31917; polyA tail of approximately 160 nucleotides not shown in sequence; 5′cap, Cap 1) and G-CSF mRNA (mRNA sequence shown in SEQ ID NO: 31907; polyA tail of approximately 160 nucleotides not shown in sequence; 5′cap, Cap1) were fully modified with different chemistries and chemistry combinations listed in Tables 115-118 using a mutant T7 polymerase (Durascribe® T7 Transcription kit (Cat. No. DS010925) (Epicentre®, Madison, WI).

[1483] The yield of the translation reactions was determined by spectrophometric measurement (OD260) and the yield for Luciferase is shown in Tables 115 and G-CSF is shown in Tables 117.

[1484] The luciferase and G-CSF modified mRNA were also subjected to an enzymatic capping reaction and each modified mRNA capping reaction was evaluated for yield by spectrophometic measurement (OD260) and correct size assessed using bioanalyzer. The yield from the capping reaction for luciferase is shown in Table 116 and G-CSF is shown in Table 118.

TABLE 115
In vitro transcription chemistry and
yield for Luciferase modified mRNA

| Chemical Modification | Yield (ug) |
|---|---|
| 2′Fluorocytosine | 71.4 |
| 2′Fluorouridine | 57.5 |
| 5-methylcytosine/pseudouridine, test A | 26.4 |
| 5-methylcytosine/N1-methyl-pseudouridine, test A | 73.3 |
| N1-acetylcytidine/2-fluorouridine | 202.2 |
| 5-methylcytidine/2-fluorouridine | 131.9 |
| 2-fluorocytosine/pseudouridine | 119.3 |
| 2-fluorocytosine/N1-methyl-pseudouridine | 107.0 |
| 2-fluorocytosine/2-thiouridine | 34.7 |
| 2-fluorocytosine/5-bromouridine | 81.0 |
| 2-fluorocytosine/2-fluorouridine | 80.4 |
| 2-fluoroguanine/5-methylcytosine | 61.2 |
| 2-fluoroguanine/5-methylcytosine/pseudouridine | 65.0 |
| 2-fluoroguanine/5-methylcytidine/N1-methyl-pseudouridine | 41.2 |
| 2-fluoroguanine/pseudouridine | 79.1 |
| 2-fluoroguanine/N1-methyl-pseudouridine | 74.6 |
| 5-methylcytidine/pseudouridine, test B | 91.8 |
| 5-methylcytidine/N1-methyl-pseudouridine, test B | 72.4 |
| 2′fluoroadenosine | 190.98 |

TABLE 116
Capping chemistry and yield for Luciferase modified mRNA

| Chemical Modification | Yield (ug) |
|---|---|
| 2′Fluorocytosine | 19.2 |
| 2′Fluorouridine | 16.7 |
| 5-methylcytosine/pseudouridine, test A | 7.0 |
| 5-methylcytosine/N1-methyl-pseudouridine, test A | 21.5 |
| N1-acetylcytidine/2-fluorouridine | 47.5 |
| 5-methylcytidine/2-fluorouridine | 53.2 |
| 2-fluorocytosine/pseudouridine | 58.4 |
| 2-fluorocytosine/N1-methyl-pseudouridine | 26.2 |
| 2-fluorocytosine/2-thiouridine | 12.9 |
| 2-fluorocytosine/5-bromouridine | 26.5 |
| 2-fluorocytosine/2-fluorouridine | 35.7 |
| 2-fluoroguanine/5-methylcytosine | 24.7 |
| 2-fluoroguanine/5-methylcytosine/pseudouridine | 32.3 |
| 2-fluoroguanine/5-methylcytidine/N1-methyl-pseudouridine | 31.3 |
| 2-fluoroguanine/pseudouridine | 20.9 |
| 2-fluoroguanine/N1-methyl-pseudouridine | 29.8 |
| 5-methylcytidine/pseudouridine, test B | 58.2 |
| 5-methylcytidine/N1-methyl-pseudouridine, test B | 44.4 |

TABLE 117
In vitro transcription chemistry
and yield for G-CSF modified mRNA

| Chemical Modification | Yield (ug) |
|---|---|
| 2′Fluorocytosine | 56.5 |
| 2′Fluorouridine | 79.4 |
| 5-methylcytosine/pseudouridine, test A | 21.2 |
| 5-methylcytosine/N1-methyl-pseudouridine, test A | 77.1 |
| N1-acetylcytidine/2-fluorouridine | 168.6 |
| 5-methylcytidine/2-fluorouridine | 134.7 |
| 2-fluorocytosine/pseudouridine | 97.8 |
| 2-fluorocytosine/N1-methyl-pseudouridine | 103.1 |
| 2-fluorocytosine/2-thiouridine | 58.8 |
| 2-fluorocytosine/5-bromouridine | 88.8 |
| 2-fluorocytosine/2-fluorouridine | 93.9 |
| 2-fluoroguanine/5-methylcytosine | 97.3 |
| 2-fluoroguanine/5-methylcytosine/pseudouridine | 96.0 |
| 2-fluoroguanine/5-methylcytidine/N1-methyl-pseudouridine | 82.0 |
| 2-fluoroguanine/pseudouridine | 68.0 |
| 2-fluoroguanine/N1-methyl-pseudouridine | 59.3 |
| 5-methylcytidine/pseudouridine, test B | 58.7 |
| 5-methylcytidine/N1-methyl-pseudouridine, test B | 78.0 |

TABLE 118
Capping chemistry and yield for G-CSF modified mRNA

| Chemical Modification | Yield (ug) |
|---|---|
| 2′Fluorocytosine | 16.9 |
| 2′Fluorouridine | 17.0 |
| 5-methylcytosine/pseudouridine, test A | 10.6 |
| 5-methylcytosine/N1-methyl-pseudouridine, test A | 22.7 |
| N1-acetylcytidine/2-fluorouridine | 19.9 |
| 5-methylcytidine/2-fluorouridine | 21.3 |
| 2-fluorocytosine/pseudouridine | 65.2 |
| 2-fluorocytosine/N1-methyl-pseudouridine | 58.9 |
| 2-fluorocytosine/2-thiouridine | 41.2 |
| 2-fluorocytosine/5-bromouridine | 35.8 |
| 2-fluorocytosine/2-fluorouridine | 36.7 |
| 2-fluoroguanine/5-methylcytosine | 36.6 |
| 2-fluoroguanine/5-methylcytosine/pseudouridine | 37.3 |
| 2-fluoroguanine/5-methylcytidine/N1-methyl-pseudouridine | 30.7 |
| 2-fluoroguanine/pseudouridine | 29.0 |
| 2-fluoroguanine/N1-methyl-pseudouridine | 22.7 |
| 5-methylcytidine/pseudouridine, test B | 60.4 |
| 5-methylcytidine/N1-methyl-pseudouridine, test B | 33.0 |

### Example 75. 2′O-Methyl and 2′Fluoro Compounds

[1485] Luciferase mRNA (mRNA sequence shown in SEQ ID NO: 31917; polyA tail of approximately 160 nucleotides not shown in sequence; 5′cap, Cap1) were produced as fully modified versions with the chemistries in Table 119 and transcribed using mutant T7 polymerase (Durascribe® T7 Transcription kit (Cat. No. DS010925) (Epicentre®, Madison, WI). 2′ fluoro-containing mRNA were made using Durascribe T7, however, 2′Omethyl-containing mRNA could not be transcribed using Durascribe T7.

[1486] Incorporation of 2′Omethyl modified mRNA might possibly be accomplished using other mutant T7 polymerases (Nat Biotechnol. (2004) 22:1155-1160; Nucleic Acids Res. (2002) 30:e138) or U.S. Pat. No. 7,309,570, the contents of each of which are incorporated herein by reference in their entirety. Alternatively, 2′OMe modifications could be introduced post-transcriptionally using enzymatic means.

[1487] Introduction of modifications on the 2′ group of the sugar has many potential advantages. 2′OMe substitutions, like 2′ fluoro substitutions are known to protect against nucleases and also have been shown to abolish innate immune recognition when incorporated into other nucleic acids such as siRNA and anti-sense (incorporated in its entirety, Crooke, ed. Antisense Drug Technology, 2^{nd} edition; Boca Raton: CRC press).

[1488] The 2′Fluoro-modified mRNA were then transfected into HeLa cells to assess protein production in a cell context and the same mRNA were also assessed in a cell-free rabbit reticulocyte system. A control of unmodified luciferase (natural luciferase) was used for both transcription experiments, a control of untreated and mock transfected (Lipofectamine 2000 alone) were also analyzed for the HeLa transfection and a control of no RNA was analyzed for the rabbit reticulysates.

[1489] For the HeLa transfection experiments, the day before transfection, 20,000 HeLa cells (ATCC no. CCL-2; Manassas, VA) were harvested by treatment with Trypsin-EDTA solution (LifeTechnologies, Grand Island, NY) and seeded in a total volume of 100 ul EMEM medium (supplemented with 10% FCS and 1× Glutamax) per well in a 96-well cell culture plate (Corning, Manassas, VA). The cells were grown at 37oG in 5% CO₂ atmosphere overnight. Next day, 83 ng of the 2′fluoro-containing luciferase modified RNA (mRNA sequence shown in SEQ ID NO: 31917; polyA tail of approximately 160 nucleotides not shown in sequence; 5′cap, Cap1) with the chemical modification described in Table 119, were diluted in 10 ul final volume of OPTI-MEM (LifeTechnologies, Grand Island, NY). Lipofectamine 2000 (LifeTechnologies, Grand Island, NY) was used as transfection reagent and 0.2 ul were diluted in 10 ul final volume of OPTI-MEM. After 5 minutes of incubation at room temperature, both solutions were combined and incubated an additional 15 minute at room temperature. Then the 20 ul combined solution was added to the 100 ul cell culture medium containing the HeLa cells and incubated at room temperature. After 18 to 22 hours of incubation cells expressing luciferase were lysed with 100 ul of Passive Lysis Buffer (Promega, Madison, WI) according to manufacturer instructions. Aliquots of the lysates were transferred to white opaque polystyrene 96-well plates (Corning, Manassas, VA) and combined with 100 ul complete luciferase assay solution (Promega, Madison, WI). The lysate volumes were adjusted or diluted until no more than 2 mio relative light units (RLU) per well were detected for the strongest signal producing samples and the RLUs for each chemistry tested are shown in Table 119. The plate reader was a BioTek Synergy H1 (BioTek, Winooski, VT). The background signal of the plates without reagent was about 200 relative light units per well.

[1490] For the rabbit reticulocyte lysate assay, 2′-fluoro-containing luciferase mRNA were diluted in sterile nuclease-free water to a final amount of 250 ng in 10 ul and added to 40 ul of freshly prepared Rabbit Reticulocyte Lysate and the in vitro translation reaction was done in a standard 1.5 mL polypropylene reaction tube (Thermo Fisher Scientific, Waltham, MA) at 30° C. in a dry heating block. The translation assay was done with the Rabbit Reticulocyte Lysate (nuclease-treated) kit (Promega, Madison, WI) according to the manufacturer's instructions. The reaction buffer was supplemented with a one-to-one blend of provided amino acid stock solutions devoid of either Leucine or Methionine resulting in a reaction mix containing sufficient amounts of both amino acids to allow effective in vitro translation. After 60 minutes of incubation, the reaction was stopped by placing the reaction tubes on ice.

[1491] Aliquots of the in vitro translation reaction containing luciferase modified RNA were transferred to white opaque polystyrene 96-well plates (Corning, Manassas, VA) and combined with 100 ul complete luciferase assay solution (Promega, Madison, WI). The volumes of the in vitro translation reactions were adjusted or diluted until no more than 2 mio relative light units (RLUs) per well were detected for the strongest signal producing samples and the RLUs for each chemistry tested are shown in Table 120. The plate reader was a BioTek Synergy H1 (BioTek, Winooski, VT). The background signal of the plates without reagent was about 160 relative light units per well.

[1492] As can be seen in Table 119 and 120, multiple 2′Fluoro-containing compounds are active in vitro and produce luciferase protein.

TABLE 119
HeLa Cells

| | Concentration | Volume | Yield | |
|---|---|---|---|---|
| Chemical Modification | (ug/ml) | (ul) | (ug) | RLU |
| 2′Fluoroadenosine | 381.96 | 500 | 190.98 | 388.5 |
| 2′Fluorocytosine | 654.56 | 500 | 327.28 | 2420 |
| 2′Fluoroguanine | 541.795 | 500 | 270.90 | 11,705.5 |
| 2′Flurorouridine | 944.005 | 500 | 472.00 | 6767.5 |
| Natural luciferase | N/A | N/A | N/A | 133,853.5 |
| Mock | N/A | N/A | N/A | 340 |
| Untreated | N/A | N/A | N/A | 238 |

TABLE 120
Rabbit Reticulysates

| Chemical Modification | RLU |
|---|---|
| 2′Fluoroadenosine | 162 |
| 2′Fluorocytosine | 208 |
| 2′Fluoroguanine | 371,509 |
| 2′Flurorouridine | 258 |
| Natural luciferase | 2,159,968 |
| No RNA | 156 |

### Example 76. Luciferase in HeLa Cells Using a Combination of Modifications

[1493] To evaluate using of 2′fluoro-modified mRNA in combination with other modification a series of mRNA were transcribed using either wild-type T7 polymerase (non-fluoro-containing compounds) or using mutant T7 polymerases (fluyoro-containing compounds) as described in Example 75. All modified mRNA were tested by in vitro transfection in HeLa cells.

[1494] The day before transfection, 20,000 HeLa cells (ATCC no. CCL-2; Manassas, VA) were harvested by treatment with Trypsin-EDTA solution (LifeTechnologies, Grand Island, NY) and seeded in a total volume of 100 ul EMEM medium (supplemented with 10% FCS and 1× Glutamax) per well in a 96-well cell culture plate (Corning, Manassas, VA). The cells were grown at 37oG in 5% CO₂ atmosphere overnight. Next day, 83 ng of Luciferase modified RNA (mRNA sequence shown in SEQ ID NO: 31917; polyA tail of approximately 160 nucleotides not shown in sequence; 5′cap, Cap1) with the chemical modification described in Table 121, were diluted in 10 ul final volume of OPTI-MEM (LifeTechnologies, Grand Island, NY). Lipofectamine 2000 (LifeTechnologies, Grand Island, NY) was used as transfection reagent and 0.2 ul were diluted in 10 ul final volume of OPTI-MEM. After 5 minutes of incubation at room temperature, both solutions were combined and incubated an additional 15 minute at room temperature. Then the 20 ul combined solution was added to the 100 ul cell culture medium containing the HeLa cells and incubated at room temperature.

[1495] After 18 to 22 hours of incubation cells expressing luciferase were lysed with 100 ul of Passive Lysis Buffer (Promega, Madison, WI) according to manufacturer instructions. Aliquots of the lysates were transferred to white opaque polystyrene 96-well plates (Corning, Manassas, VA) and combined with 100 ul complete luciferase assay solution (Promega, Madison, WI). The lysate volumes were adjusted or diluted until no more than 2 mio relative light units (RLU) per well were detected for the strongest signal producing samples and the RLUs for each chemistry tested are shown in Table 121. The plate reader was a BioTek Synergy H1 (BioTek, Winooski, VT). The background signal of the plates without reagent was about 200 relative light units per well.

[1496] As evidenced in Table 121, most combinations of modifications resulted in mRNA which produced functional luciferase protein, including all the non-flouro containing compounds and many of the combinations containing 2′fluro modifications.

TABLE 121
Luciferase

| Chemical Modification | RLU |
|---|---|
| N4-acetylcytidine/pseudouridine | 113,796 |
| N4-acetylcytidine/N1-methyl-pseudouridine | 316,326 |
| 5-methylcytidine/5-methoxyuridine | 24,948 |
| 5-methylcytidine/5-methyluridine | 43,675 |
| 5-methylcytidine/half of the uridines modified with 50% | 41,601 |
| 2-thiouridine | |
| 5-methylcytidine/2-thiouridine | 1,102 |
| 5-methylcytidine/pseudouridine | 51,035 |
| 5-methylcytidine/N1-methyl-pseudouridine | 152,151 |
| N4-acetylcytidine/2′Fluorouridine triphosphate | 288 |
| 5-methylcytidine/2′Fluorouridine triphosphate | 269 |
| 2′Fluorocytosine triphosphate/pseudouridine | 260 |
| 2′Fluorocytosine triphosphate/N1-methyl-pseudouridine | 412 |
| 2′Fluorocytosine triphosphate/2-thiouridine | 427 |
| 2′Fluorocytosine triphosphate/5-bromouridine | 253 |
| 2′Fluorocytosine triphosphate/2′Fluorouridine triphosphate | 184 |
| 2′Fluoroguanine triphosphate/5-methylcytidine | 321 |
| 2′Fluoroguanine triphosphate/5-methylcytidine/Pseudouridine | 207 |
| 2′Fluoroguanine/5-methylcytidine/N1-methyl-psuedouridine | 235 |
| 2′Fluoroguanine/pseudouridine | 218 |
| 2′Fluoroguanine/N1-methyl-psuedouridine | 247 |
| 5-methylcytidine/pseudouridine, test A | 13,833 |
| 5-methylcytidine/N1-methyl-pseudouridine, test A | 598 |
| 2′Fluorocytosine triphosphate | 201 |
| 2′Fluorouridine triphosphate | 305 |
| 5-methylcytidine/pseudouridine, test B | 115,401 |
| 5-methylcytidine/N1-methyl-pseudouridine, test B | 21,034 |
| Natural luciferase | 30,801 |
| Untreated | 344 |
| Mock | 262 |

### Example 77. G-CSF In Vitro Transcription

[1497] To assess the activity of all our different chemical modifications in the context of a second open reading frame, we replicated experiments previously conducted using luciferase mRNA, with human G-CSF mRNA. G-CSF mRNA (mRNA sequence shown in SEQ ID NO: 31907; polyA tail of approximately 160 nucleotides not shown in sequence; 5′cap, Cap 1) were fully modified with the chemistries in Tables 122 and 123 using wild-type T7 polymerase (for all non-fluoro-containing compounds) or mutant T7 polymerase (for all fluoro-containing compounds). The mutant T7 polymerase was obtained commercially (Durascribe® T7 Transcription kit (Cat. No. DS010925) (Epicentre®, Madison, WI).

[1498] The modified RNA in Tables 122 and 123 were transfected in vitro in HeLa cells or added to rabbit reticulysates (250 ng of modified mRNA) as indicated. A control of untreated, mock transfected (transfection reagent alone), G-CSF fully modified with 5-methylcytosine and N1-methyl-pseudouri dine or luciferase control (mRNA sequence shown in SEQ ID NO: 31917; polyA tail of approximately 160 nucleotides not shown in sequence; 5′cap, Cap1) fully modified with 5-methylcytosine and N1-methyl-pseudouridine were also analyzed. The expression of G-CSF protein was determined by ELISA and the values are shown in Tables 122 and 123. In Table 122, “NT” means not tested.

[1499] As shown in Table 123, many, but not all, chemical modifications resulted in human G-CSF protein production. These results from cell-based and cell-free translation systems correlate very nicely with the same modifications generally working or not working in both systems. One notable exception is 5-formylcytidine modified G-CSF mRNA which worked in the cell-free translation system, but not in the HeLa cell-based transfection system. A similar difference between the two assays was also seen with 5-formylcytidine modified luciferase mRNA.

[1500] As demonstrated in Table 123, many, but not all, G-CSF mRNA modified chemistries (when used in combination) demonstrated in vivo activity. In addition the presence of N1-methyl-pseudouridine in the modified mRNA (with N4-acetylcytidine or 5 methylcytidine) demonstrated higher expression than when the same combinations where tested using with pseudouridine. Taken together, these data demonstrate that N1-methyl-pseudouridine containing G-CSF mRNA results in improved protein expression in vitro.

TABLE 122
G-CSF Expression

| | | G-CSF protein |
|---|---|---|
| | G-CSF protein | (pg/ml) Rabbit |
| | (pg/ml) | reticulysates |
| Chemical Modification | HeLa cells | cells |
| Pseudouridine | 1,150,909 | 147,875 |
| 5-methyluridine | 347,045 | 147,250 |
| 2-thiouridine | 417,273 | 18,375 |
| N1-methyl-pseudouridine | NT | 230,000 |
| 4-thiouridine | 107,273 | 52,375 |
| 5-methoxyuridine | 1,715,909 | 201,750 |
| 5-methylcytosine/pseudouridine, | 609,545 | 119,750 |
| Test A | | |
| 5-methylcytosine/N1-methyl- | 1,534,318 | 110,500 |
| pseudouridine, Test A | | |
| 2′-Fluoro-guanosine | 11,818 | 0 |
| 2′-Fluoro-uridine | 60,455 | 0 |
| 5-methylcytosine/pseudouridine, | 358,182 | 57,875 |
| Test B | | |
| 5-methylcytosine/N1-methyl- | 1,568,636 | 76,750 |
| pseudouridine, Test B | | |
| 5-Bromo-uridine | 186,591 | 72,000 |
| 5-(2carbomethoxyvinyl) uridine | 1,364 | 0 |
| 5-[3(1-E-propenylamino) uridine | 27,955 | 32,625 |
| α-thio-cytidine | 120,455 | 42,625 |
| 5-methylcytosine/pseudouridine, | 882,500 | 49,250 |
| Test C | | |
| N1-methyl-adenosine | 4,773 | 0 |
| N6-methyl-adenosine | 1,591 | 0 |
| 5-methyl-cytidine | 646,591 | 79,375 |
| N4-acetylcytidine | 39,545 | 8,000 |
| 5-formyl-cytidine | 0 | 24,000 |
| 5-methylcytosine/pseudouridine, | 87,045 | 47,750 |
| Test D | | |
| 5-methylcytosine/N1-methyl- | 1,168,864 | 97,125 |
| pseudouridine, Test D | | |
| Mock | 909 | 682 |
| Untreated | 0 | 0 |
| 5-methylcytosine/N1-methyl- | 1,106,591 | NT |
| pseudouridine, Control | | |
| Luciferase control | NT | 0 |

TABLE 123
Combination Chemistries in HeLa cells

| | G-CSF protein |
|---|---|
| | (pg/ml) |
| Chemical Modification | HeLa cells |
| N4-acetylcytidine/pseudouridine | 537,273 |
| N4-acetylcytidine/N1-methyl-pseudouridine | 1,091,818 |
| 5-methylcytidine/5-methoxyuridine | 516,136 |
| 5-methylcytidine/5-bromouridine | 48,864 |
| 5-methylcytidine/5-methyluridine | 207,500 |
| 5-methylcytidine/2-thiouridine | 33,409 |
| N4-acetylcytidine/5-bromouridine | 211,591 |
| N4-acetylcytidine/2-thiouridine | 46,136 |
| 5-methylcytosine/pseudouridine | 301,364 |
| 5-methylcytosine/N1-methyl-pseudouridine | 1,017,727 |
| N4-acetylcytidine/2′Fluorouridine triphosphate | 62,273 |
| 5-methylcytidine/2′Fluorouridine triphosphate | 49,318 |
| 2′Fluorocytosine triphosphate/pseudouridine | 7,955 |
| 2′Fluorocytosine triphosphate/N1-methyl- | 1,364 |
| pseudouridine | |
| 2′Fluorocytosine triphosphate/2-thiouridine | 0 |
| 2′Fluorocytosine triphosphate/5-bromouridine | 1,818 |
| 2′Fluorocytosine triphosphate/2′Fluorouridine | 909 |
| triphosphate | |
| 2′Fluoroguanine triphosphate/5-methylcytidine | 0 |
| 2′Fluoroguanine triphosphate/5-methylcytidine/ | 0 |
| pseudouridine | |
| 2′Fluoroguanine triphosphate/5-methylcytidine/ | 1,818 |
| N1 methylpseudouridine | |
| 2′Fluoroguanine triphosphate/pseudouridine | 1,136 |
| 2′Fluoroguanine triphosphate/2′Fluorocytosine | 0 |
| triphosphate/N1-methyl-pseudouridine | |
| 5-methylcytidine/pseudouridine | 617,727 |
| 5-methylcytidine/N1-methyl-pseudouridine | 747,045 |
| 5-methylcytidine/pseudouridine | 475,455 |
| 5-methylcytidine/N1-methyl-pseudouridine | 689,091 |
| 5-methylcytosine/N1-methyl-pseudouridine, | 848,409 |
| Control 1 | |
| 5-methylcytosine/N1-methyl-pseudouridine, | 581,818 |
| Control 2 | |
| Mock | 682 |
| Untreated | 0 |
| Luciferase 2′Fluorocytosine triphosphate | 0 |
| Luciferase 2′Fluorouridine triphosphate | 0 |

### Example 78. Screening of Chemistries

[1501] The tables listed in below (Tables 124-126) summarize much of the in vitro and in vitro screening data with the different compounds presented in the previous examples. A good correlation exists between cell-based and cell-free translation assays. The same chemistry substitutions generally show good concordance whether tested in the context of luciferase or G-CSF mRNA. Lastly, N1-methyl-pseudouridine containing mRNA show a very high level of protein expression with little to no detectable cytokine stimulation in vitro and in vivo, and is superior to mRNA containing pseudouridine both in vitro and in vivo.

[1502] Luciferase mRNA (mRNA sequence shown in SEQ ID NO: 31917; polyA tail of approximately 160 nucleotides not shown in sequence; 5′cap, Cap1) and G-CSF mRNA (mRNA sequence shown in SEQ ID NO: 31907; polyA tail of approximately 160 nucleotides not shown in sequence; 5′cap, Cap1) were modified with naturally and non-naturally occurring chemistries described in Tables 124 and 125 or combination chemistries described in Table 126 and tested using methods described herein.

[1503] In Tables 125 and 126, “*” refers to in vitro transcription reaction using a mutant T7 polymerase (Durascribe® T7 Transcription kit (Cat. No. DS010925) (Epicentre®, Madison, WI); “**” refers to the second result in vitro transcription reaction using a mutant T7 polymerase (Durascribe® T7 Transcription kit (Cat. No. DS010925) (Epicentre®, Madison, WI); “***” refers to production seen in cell free translations (rabbit reticulocyte lysates); the protein production of HeLa is judged by “+,” “+/−” and “−”; when referring to G-CSF PBMC “++++” means greater than 6,000 μg/ml G-CSF, “+++” means greater than 3,000 μg/ml G-CSF, “++” means greater than 1,500 μg/ml G-CSF, “+” means greater than 300 μg/ml G-CSF, “+/−” means 150-300 μg/ml G-CSF and the background was about 110 μg/ml; when referring to cytokine PBMC “++++” means greater than 1,000 μg/ml interferon-alpha (IFN-alpha), “+++” means greater than 600 pg/ml IFN-alpha, “C++” means greater than 300 pg/ml IFN-alpha, “+” means greater than 100 pg/ml IFN-alpha, “−” means less than 100 p/ml and the background was about 70 pg/ml; and “NT” means not tested. In Table 125, the protein production was evaluated using a mutant T7 polymerase (Durascribe® T7 Transcription kit (Cat. No. DS010925) (Epicentre®, Madison, WI).

TABLE 124
Naturally Occurring

| | | | | Protein | Protein | Cytokines | | In Vivo |
|---|---|---|---|---|---|---|---|---|
| | | IVT | Protein | (G- | (G- | (G- | In Vivo | Protein |
| Common Name | IVT | (G- | (Luc; | CSF; | CSF; | CSF; | Protein | (G- |
| (symbol) | (Luc) | CSF) | HeLa) | HeLa) | PBMC) | PBMC) | (Luc) | CSF) |
| 1-methyladenosine | Fail | Pass | NT | − | +/− | ++ | NT | NT |
| (m¹A) | | | | | | | | |
| N⁶-methyladenosine | Pass | Pass | − | − | +/− | ++++ | NT | NT |
| (m⁶A) | | | | | | | | |
| 2′-O- | Fail* | Not | NT | NT | NT | NT | NT | NT |
| methyladenosine | | Done | | | | | | |
| (Am) | | | | | | | | |
| 5-methylcytidine | Pass | Pass | + | + | + | ++ | + | NT |
| (m⁵C) | | | | | | | | |
| 2′-O-methylcytidine | Fail* | Not | NT | NT | NT | NT | NT | NT |
| (Cm) | | Done | | | | | | |
| 2-thiocytidine (s²C) | Fail | Fail | NT | NT | NT | NT | NT | NT |
| N⁴-acetylcytidine | Pass | Pass | + | + | +/− | +++ | + | NT |
| (ac⁴C) | | | | | | | | |
| 5-formylcytidine | Pass | Pass | −*** | −*** | − | + | NT | NT |
| (f⁵C) | | | | | | | | |
| 2′-O- | Fail* | Not | NT | NT | NT | NT | NT | NT |
| methylguanosine | | Done | | | | | | |
| (Gm) | | | | | | | | |
| inosine (I) | Fail | Fail | NT | NT | NT | NT | NT | NT |
| pseudouridine (Y) | Pass | Pass | + | + | ++ | + | + | NT |
| 5-methyluridine | Pass | Pass | + | + | +/− | + | NT | NT |
| (m⁵U) | | | | | | | | |
| 2′-O-methyluridine | Fail* | Not | NT | NT | NT | NT | NT | NT |
| (Um) | | Done | | | | | | |
| 1- | Pass | Pass | + | Not | ++++ | − | + | NT |
| methylpseudouridine | | | | Done | | | | |
| (m¹Y) | | | | | | | | |
| 2-thiouridine (s²U) | Pass | Pass | − | + | + | + | NT | NT |
| 4-thiouridine (s⁴U) | Fail | Pass | | + | +/− | ++ | NT | NT |
| 5-methoxyuridine | Pass | Pass | + | + | ++ | − | + | NT |
| (mo⁵U) | | | | | | | | |
| 3-methyluridine | Fail | Fail | NT | NT | NT | NT | NT | NT |
| (m³U) | | | | | | | | |

TABLE 125
Non-Naturally Occurring

| | | | | | | | | In |
|---|---|---|---|---|---|---|---|---|
| | | | | Protein | Protein | Cytokines | | Vivo |
| | | IVT | Protein | (G- | (G- | (G- | In Vivo | Protein |
| Common | IVT | (G- | (Luc; | CSF; | CSF; | CSF; | Protein | (G- |
| Name | (Luc) | CSF) | HeLa) | HeLa) | PBMC) | PBMC) | (Luc) | CSF) |
| 2′-F-ara- | Fail | Fail | NT | NT | NT | NT | NT | NT |
| guanosine | | | | | | | | |
| 2′-F-ara- | Fail | Fail | NT | NT | NT | NT | NT | NT |
| adenosine | | | | | | | | |
| 2′-F-ara- | Fail | Fail | NT | NT | NT | NT | NT | NT |
| cytidine | | | | | | | | |
| 2′-F-ara- | Fail | Fail | NT | NT | NT | NT | NT | NT |
| uridine | | | | | | | | |
| 2′-F- | Fail/ | Pass/ | +** | +/− | − | + | + | NT |
| guanosine | Pass** | Fail** | | | | | | |
| 2′-F-adenosine | Fail/ | Fail/ | −** | NT | NT | NT | NT | NT |
| | Pass** | Fail** | | | | | | |
| 2′-F-cytidine | Fail/ | Fail/ | +** | NT | NT | NT | + | NT |
| | Pass** | Pass** | | | | | | |
| 2′-F-uridine | Fail/ | Pass/ | +** | + | +/− | + | − | NT |
| | Pass** | Pass** | | | | | | |
| 2′-OH-ara- | Fail | Fail | NT | NT | NT | NT | NT | NT |
| guanosine | | | | | | | | |
| 2′-OH-ara- | Not | Not | NT | NT | NT | NT | NT | NT |
| adenosine | Done | Done | | | | | | |
| 2′-OH-ara- | Fail | Fail | NT | NT | NT | NT | NT | NT |
| cytidine | | | | | | | | |
| 2′-OH-ara- | Fail | Fail | NT | NT | NT | NT | NT | NT |
| uridine | | | | | | | | |
| 5-Br-Uridine | Pass | Pass | + | + | + | + | + | |
| 5-(2- | Pass | Pass | − | − | +/− | − | | |
| carbomethoxy- | | | | | | | | |
| vinyl) Uridine | | | | | | | | |
| 5-[3-(1-E- | Pass | Pass | − | + | + | − | | |
| Propenylamino) | | | | | | | | |
| Uridine | | | | | | | | |
| (aka Chem 5) | | | | | | | | |
| N6-(19- | Fail | Fail | NT | NT | NT | NT | NT | NT |
| Amino- | | | | | | | | |
| pentaoxanonadecyl) | | | | | | | | |
| A | | | | | | | | |
| 2- | Fail | Fail | NT | NT | NT | NT | NT | NT |
| Dimethylamino | | | | | | | | |
| guanosine | | | | | | | | |
| 6-Aza- | Fail | Fail | NT | NT | NT | NT | NT | NT |
| cytidine | | | | | | | | |
| a-Thio- | Pass | Pass | + | + | +/− | +++ | NT | NT |
| cytidine | | | | | | | | |
| Pseudo- | NT | NT | NT | NT | NT | NT | NT | NT |
| isocytidine | | | | | | | | |
| 5-Iodo-uridine | NT | NT | NT | NT | NT | NT | NT | NT |
| a-Thio-uridine | NT | NT | NT | NT | NT | NT | NT | NT |
| 6-Aza-uridine | NT | NT | NT | NT | NT | NT | NT | NT |
| Deoxy- | NT | NT | NT | NT | NT | NT | NT | NT |
| thymidine | | | | | | | | |
| a-Thio | NT | NT | NT | NT | NT | NT | NT | NT |
| guanosine | | | | | | | | |
| 8-Oxo- | NT | NT | NT | NT | NT | NT | NT | NT |
| guanosine | | | | | | | | |
| O6-Methyl- | NT | NT | NT | NT | NT | NT | NT | NT |
| guanosine | | | | | | | | |
| 7-Deaza- | NT | NT | NT | NT | NT | NT | NT | NT |
| guanosine | | | | | | | | |
| 6-Chloro- | NT | NT | NT | NT | NT | NT | NT | NT |
| purine | | | | | | | | |
| a-Thio- | NT | NT | NT | NT | NT | NT | NT | NT |
| adenosine | | | | | | | | |
| 7-Deaza- | NT | NT | NT | NT | NT | NT | NT | NT |
| adenosine | | | | | | | | |
| 5-iodo- | NT | NT | NT | NT | NT | NT | NT | NT |
| cytidine | | | | | | | | |

[1504] In Table 126, the protein production of HeLa is judged by “+,” “+/−” and “−”; when referring to G-CSF PBMC “++++” means greater than 6,000 μg/ml G-CSF, “+++” means greater than 3,000 μg/ml G-CSF, “++” means greater than 1,500 μg/ml G-CSF, “+” means greater than 300 μg/ml G-CSF, “+/−” means 150-300 μg/ml G-CSF and the background was about 110 μg/ml; when referring to cytokine PBMC “++++” means greater than 1,000 μg/ml interferon-alpha (TFN-alpha), “+++” means greater than 600 μg/ml TFN-alpha, “++” means greater than 300 pg/ml IFN-alpha, “+” means greater than 100 μg/ml TFN-alpha, “−” means less than 100 μg/ml and the background was about 70 μg/ml; “WT” refers to the wild type T7 polymerase, “MT” refers to mutant T7 polymerase (Durascribe® T7 Transcription kit (Cat. No. DS010925) (Epicentre®, Madison, WI) and “NT” means not tested.

TABLE 126
Combination Chemistry

| | | | | | | Protein | Protein | Cytokines | In |
|---|---|---|---|---|---|---|---|---|---|
| | | | | IVT | Protein | (G- | (G- | (G- | Vivo |
| Cytidine | Uridine | | IVT | (G- | (Luc; | CSF; | CSF; | CSF; | Protein |
| analog | analog | Purine | Luc | CSF) | HeLa) | HeLa) | PBMC) | PBMC) | (Luc) |
| N4- | pseudouridine | A, G | Pass | Pass | + | + | NT | NT | + |
| acetylcytidine | | | WT | WT | | | | | |
| N4- | N1- | A, G | Pass | Pass | + | + | NT | NT | + |
| acetylcytidine | methyl- | | WT | WT | | | | | |
| | pseudouridine | | | | | | | | |
| 5- | 5- | A, G | Pass | Pass | + | + | NT | NT | + |
| methylcytidine | methoxyuridine | | WT | WT | | | | | |
| 5- | 5- | A, G | Pass | Pass | Not | + | NT | NT | |
| methylcytidine | bromouridine | | WT | WT | Done | | | | |
| 5- | 5- | A, G | Pass | Pass | + | + | NT | NT | + |
| methylcytidine | methyluridine | | WT | WT | | | | | |
| 5- | 50% 2- | A, G | Pass | Pass | + | NT | NT | NT | + |
| methylcytidine | thiouridine; | | WT | WT | | | | | |
| | 50% | | | | | | | | |
| | uridine | | | | | | | | |
| 5- | 100% | A, G | Pass | Pass | − | + | NT | NT | |
| methylcytidine | 2- | | WT | WT | | | | | |
| | thiouridine | | | | | | | | |
| 5- | pseudo | A, G | Pass | Pass | + | + | ++ | + | + |
| methylcytidine | uridine | | WT | WT | | | | | |
| 5- | N1- | A, G | Pass | Pass | + | + | ++++ | − | + |
| methylcytidine | methyl- | | WT | WT | | | | | |
| | pseudouridine | | | | | | | | |
| N4- | 2- | A, G | Not | Pass | Not | + | NT | NT | NT |
| acetylcytidine | thiouridine | | Done | WT | Done | | | | |
| N4- | 5- | A, G | Not | Pass | Not | + | NT | NT | NT |
| acetylcytidine | bromouridine | | Done | WT | Done | | | | |
| N4- | 2 | A, G | Pass | Pass | − | + | NT | NT | NT |
| acetylcytidine | Fluorouridine | | | | | | | | |
| | triphosphate | | | | | | | | |
| 5- | 2 | A, G | Pass | Pass | − | + | NT | NT | NT |
| methylcytidine | Fluorouridine | | | | | | | | |
| | triphosphate | | | | | | | | |
| 2 | pseudouridine | A, G | Pass | Pass | − | + | NT | NT | NT |
| Fluorocytosine | | | | | | | | | |
| triphosphate | | | | | | | | | |
| 2 | N1- | A, G | Pass | Pass | − | +/− | NT | NT | NT |
| Fluorocytosine | methyl- | | | | | | | | |
| triphosphate | pseudouridine | | | | | | | | |
| 2 | 2- | A, G | Pass | Pass | − | − | NT | NT | NT |
| Fluorocytosine | thiouridine | | | | | | | | |
| triphosphate | | | | | | | | | |
| 2 | 5- | A, G | Pass | Pass | − | +/− | NT | NT | NT |
| Fluorocytosine | bromouridine | | | | | | | | |
| triphosphate | | | | | | | | | |
| 2 | 2 | A, G | Pass | Pass | − | +/− | NT | NT | NT |
| Fluorocytosine | Fluorouridine | | | | | | | | |
| triphosphate | triphosphate | | | | | | | | |
| 5- | uridine | A, 2 | Pass | Pass | − | − | NT | NT | NT |
| methylcytidine | | Fluoro | | | | | | | |
| | | GTP | | | | | | | |
| 5- | pseudouridine | A, 2 | Pass | Pass | − | − | NT | NT | NT |
| methylcytidine | | Fluoro | | | | | | | |
| | | GTP | | | | | | | |
| 5- | N1- | A, 2 | Pass | Pass | − | +/− | NT | NT | NT |
| methylcytidine | methyl- | Fluoro | | | | | | | |
| | pseudouridine | GTP | | | | | | | |
| 2 | pseudouridine | A, 2 | Pass | Pass | − | +/− | NT | NT | NT |
| Fluorocytosine | | Fluoro | | | | | | | |
| triphosphate | | GTP | | | | | | | |
| 2 | N1- | A, 2 | Pass | Pass | − | − | NT | NT | NT |
| Fluorocytosine | methyl- | Fluoro | | | | | | | |
| triphosphate | pseudouridine | GTP | | | | | | | |

### Example 79. 2′Fluoro Chemistries in PBMC

[1505] The ability of G-CSF modified mRNA (mRNA sequence shown in SEQ ID NO: 31907; polyA tail of approximately 160 nucleotides not shown in sequence; 5′cap, Cap 1) to trigger innate an immune response was determined by measuring interferon-alpha (IFN-alpha) and tumor necrosis factor-alpha (TNF-alpha) production. Use of in vitro PBMC cultures is an accepted way to measure the immunostimulatory potential of oigonucleotides (Robbins et al., Oligonucleotides 2009 19:89-102) and transfection methods are described herein. Shown in Table 127 are the average from 2 or 3 separate PBMC donors of the interferon-alpha (IFN-alpha) and tumor necrosis factor alpha (TNF-alpha) production over time as measured by specific ELISA. Controls of R848, P(J)P(C), LPS and Lipofectamine 2000 (L2000) were also analyzed.

[1506] With regards to innate immune recognition, while both modified mRNA chemistries largely prevented IFN-alpha and TINE-alpha production relative to positive controls (R848, P(I)P(C)), 2′fluoro compounds reduce IFN-alpha and T4N-alpha production even lower than other combinations and N4-acetylcytidine combinations raised the cytokine profile.

TABLE 127
IFN-alpha and TNF-alpha

| | IFN-alpha: | TNF-alpha: |
|---|---|---|
| | 3 Donor | 2 Donor |
| | Average | Average |
| | (pg/ml) | (pg/ml) |
| L2000 | 1 | 361 |
| P(I)P(C) | 482 | 544 |
| R848 | 45 | 8,235 |
| LPS | 0 | 6,889 |
| N4-acetylcytidine/pseudouridine | 694 | 528 |
| N4-acetylcytidine/N1-methyl-pseudouridine | 307 | 283 |
| 5-methylcytidine/5-methoxyuridine | 0 | 411 |
| 5-methylcytidine/5-bromouridine | 0 | 270 |
| 5-methylcytidine/5-methyluridine | 456 | 428 |
| 5-methylcytidine/2-thiouridine | 274 | 277 |
| N4-acetylcytidine/2-thiouridine | 0 | 285 |
| N4-acetylcytidine/5-bromouridine | 44 | 403 |
| 5-methylcytidine/pseudouridine | 73 | 332 |
| 5-methylcytidine/N1-methyl-pseudouridine | 31 | 280 |
| N4-acetylcytidine/2′fluorouridine triphosphate | 35 | 32 |
| 5-methylcytodine/2′fluorouridine triphosphate | 24 | 0 |
| 2′fluorocytidine triphosphate/N1-methyl- | 0 | 11 |
| pseudouridine | | |
| 2′fluorocytidine triphosphate/2-thiouridine | 0 | 0 |
| 2′fluorocytidine/triphosphate5-bromouridine | 12 | 2 |
| 2′fluorocytidine triphosphate/2′fluorouridine | 11 | 0 |
| triphosphate | | |
| 2′fluorocytidine triphosphate/5-methylcytidine | 14 | 23 |
| 2′fluorocytidine triphosphate/5- | 6 | 21 |
| methylcytidine/pseudouridine | | |
| 2′fluorocytidine triphosphate/5- | 3 | 15 |
| methylcytidine/N1-methyl-pseudouridine | | |
| 2′fluorocytidine triphosphate/pseudouridine | 0 | 4 |
| 2′fluorocytidine triphosphate/N1-methyl- | 6 | 20 |
| pseudouridine | | |
| 5-methylcytidine/pseudouridine | 82 | 18 |
| 5-methylcytidine/N1-methyl-pseudouridine | 35 | 3 |

### Example 80. Modified mRNA with a Tobacco Etch Virus 5′UTR

[1507] A 5′ untranslated region (UTR) may be provided as a flanking region. Multiple 5′ UTRs may be included in the flanking region and may be the same or of different sequences. Any portion of the flanking regions, including none, may be codon optimized and any may independently contain one or more different structural or chemical modifications, before and/or after codon optimization.

[1508] The 5′ UTR may comprise the 5′UTR from the tobacco etch virus (TEV). Variants of 5′ UTRs may be utilized wherein one or more nucleotides are added or removed to the termini, including A, T, C or G.

### Example 81. Expression of PLGA Formulated mRNA

[1509] A. Synthesis and Characterization of Luciferase PLGA Microspheres

[1510] Luciferase mRNA (mRNA sequence shown in SEQ ID NO: 31917; polyA tail of approximately 140 nucleotides not shown in sequence; 5′cap, Cap1) fully modified with 5-methylcytosine and N1-methyl-pseudouridine, modified with 25% of uridine replaced with 2-thiouridine and 25% of cytosine replaced with 5-methylcytosine, fully modified with N1-methyl-pseudouridine, or fully modified with pseudouridine was reconstituted in 1× TE buffer and then formulated in PLGA microspheres. PLGA microspheres were synthesized using the water/oil/water double emulsification methods known in the art using PLGA-ester cap (Lactel, Cat #B6010-2, inherent viscosity 0.55-0.75, 50:50 LA:GA), polyvinylalcohol (PVA) (Sigma, Cat #348406-25G, MW 13-23 k) dichloromethane and water. Briefly, 0.4 ml of mRNA in TE buffer at 4 mg/ml (W1) was added to 2 ml of PLGA dissolved in dichloromethane (DCM) (O1) at a concentration of 200 mg/ml of PLGA. The W1/O1 emulsion was homogenized (IKA Ultra-Turrax Homogenizer, T18) for 30 seconds at speed 5 (˜19,000 rpm). The W1/01 emulsion was then added to 250 ml 1% PVA (W2) and homogenized for 1 minute at speed 5 (˜19,000 rpm). Formulations were left to stir for 3 hours, then passed through a 100 μm nylon mesh strainer (Fisherbrand Cell Strainer, Cat #22-363-549) to remove larger aggregates, and finally washed by centrifugation (10 min, 9,250 rpm, 4° C.). The supernatant was discarded and the PLGA pellets were resuspended in 5-10 ml of water, which was repeated 2×. After washing and resuspension with water, 100-200 μl of a PLGA microspheres sample was used to measure particle size of the formulations by laser diffraction (Malvern Mastersizer2000). The washed formulations were frozen in liquid nitrogen and then lyophilized for 2-3 days.

[1511] After lyophilization, ˜10 mg of PLGA MS were weighed out in 2 ml eppendorf tubes and deformulated by adding 1 ml of DCM and letting the samples shake for 2-6 hrs. The mRNA was extracted from the deformulated PLGA micropsheres by adding 0.5 ml of water and shaking the sample overnight. Unformulated luciferase mRNA in TE buffer (unformulated control) was spiked into DCM and went through the deformulation process (deformulation control) to be used as controls in the transfection assay. The encapsulation efficiency, weight percent loading and particle size are shown in Table 128. Encapsulation efficiency was calculated as mg of mRNA from deformulation of PLGA microspheres divided by the initial amount of mRNA added to the formulation. Weight percent loading in the formulation was calculated as mg of mRNA from deformulation of PLGA microspheres divided by the initial amount of PLGA added to the formulation.

TABLE 128
PLGA Characteristics

| | | | Theoretical | Actual | |
|---|---|---|---|---|---|
| | | Encapsulation | mRNA | mRNA | Particle |
| | | Efficiency | Loading | Loading | Size |
| Chemical Modifications | Sample ID | (%) | (wt %) | (wt %) | (D50, um) |
| Fully modified with 5- | 43-66A | 45.8 | 0.4 | 0.18 | 33.4 |
| methylcytosine and N1- | 43-66B | 29.6 | | 0.12 | 27.7 |
| methyl-pseudouridine | 43-66C | 25.5 | | 0.10 | 27.1 |
| 25% of uridine replaced | 43-67A | 34.6 | 0.4 | 0.14 | 29.9 |
| with 2-thiouridine and | 43-67B | 22.8 | | 0.09 | 30.2 |
| 25% of cytosine replaced | 43-67C | 23.9 | | 0.10 | 25.1 |
| with 5-methylcytosine | | | | | |
| Fully modified with N1- | 43-69A | 55.8 | 0.4 | 0.22 | 40.5 |
| methyl-pseudouridine | 43-69B | 31.2 | | 0.12 | 41.1 |
| | 43-69C | 24.9 | | 0.10 | 46.1 |
| Fully modified with | 43-68-1 | 49.3 | 0.4 | 0.20 | 34.8 |
| pseudouridine | 43-68-2 | 37.4 | | 0.15 | 35.9 |
| | 43-68-3 | 45.0 | | 0.18 | 36.5 |

[1512] B. Protein Expression of Modified mRNA Encapsulated in PLGA Microspheres

[1513] The day before transfection, 20,000 HeLa cells (ATCC no. CCL-2; Manassas, VA) were harvested by treatment with Trypsin-EDTA solution (LifeTechnologies, Grand Island, NY) and seeded in a total volume of 100 ul EMEM medium (supplemented with 10% FCS and 1× Glutamax) per well in a 96-well cell culture plate (Corning, Manassas, VA). The cells were grown at 37° C. in a 5% CO2 atmosphere overnight. The next day, 83 ng of the deformulated luciferase mRNA PLGA microsphere samples, deformulated luciferase mRNA control (Deform control), or unformulated luciferase mRNA control (Unfomul control) was diluted in a 10 ul final volume of OPTI-MEM (LifeTechnologies, Grand Island, NY). Lipofectamine 2000 (LifeTechnologies, Grand Island, NY) was used as a transfection reagent and 0.2 ul was diluted in a 10 ul final volume of OPTI-MEM. After 5 min of incubation at room temperature, both solutions were combined and incubated an additional 15 min at room temperature. Then 20 ul of the combined solution was added to 100 ul of cell culture medium containing the HeLa cells. The plates were then incubated as described before.

[1514] After an 18 to 22 hour incubation, cells expressing luciferase were lysed with 100 ul Passive Lysis Buffer (Promega, Madison, WI) according to manufacturer instructions. Aliquots of the lysates were transferred to white opaque polystyrene 96-well plates (Corning, Manassas, VA) and combined with 100 ul complete luciferase assay solution (Promega, Madison, WI). The background signal of the plates without reagent was about 200 relative light units per well. The plate reader was a BioTek Synergy H1 (BioTek, Winooski, VT).

[1515] Cells were harvested and the bioluminescence (in relative light units, RLU) for each sample is shown in Table 129. Transfection of these samples confirmed that the varied chemistries of luciferase mRNA is still able to express luciferase protein after PLGA microsphere formulation.

TABLE 129
Chemical Modifications

| Chemical | | Biolum. |
|---|---|---|
| Modifications | Sample ID | (RLU) |
| Fully modified with | Deform contol | 164266.5 |
| 5-methylcytosine | Unformul control | 113714 |
| and N1-methyl- | 43-66A | 25174 |
| pseudouridine | 43-66B | 25359 |
| | 43-66C | 20060 |
| 25% of uridine | Deform contol | 90816.5 |
| replaced with 2- | Unformul control | 129806 |
| thiouridine and 25% | 43-67A | 38329.5 |
| of cytosine replaced | 43-67B | 8471.5 |
| with 5- | 43-67C | 10991.5 |
| methylcytosine | | |
| Fully modified with | Deform contol | 928093.5 |
| N1-methyl- | Unformul control | 1512273.5 |
| pseudouridine | 43-69A | 1240299.5 |
| | 43-69B | 748667.5 |
| | 43-69C | 1193314 |
| Fully modified with | Deform contol | 154168 |
| pseudouridine | Unformul control | 151581 |
| | 43-68-1 | 120974.5 |
| | 43-68-2 | 107669 |
| | 43-68-3 | 97226 |

### Example 82. In Vitro Studies of Factor IX

[1516] A. Serum-Free Media

[1517] Human Factor IX mRNA (mRNA sequence shown in SEQ ID NO: 31911; polyA tail of approximately 160 nucleotides not shown in sequence; 5′cap, Cap1; fully modified with 5-methylcytosine and pseudouridine) was transfected in serum-free media. The cell culture supernatant was collected and subjected to trypsin digestion before undergoing 2-dimensional HPLC separation of the peptides. Matrix-assisted laser desorption/ionization was used to detect the peptides. 8 peptides were detected and 7 of the detected peptides are unique to Factor IX. These results indicate that the mRNA transfected in the serum-free media was able to express full-length Factor IX protein.

[1518] B. Human Embryonic Kidney (HEK) 293A Cells

[1519] 250 ng of codon optimized Human Factor IX mRNA (mRNA sequence shown in SEQ ID NO: 31911; fully modified with 5-methylcytosine and pseudouridine; polyA tail of approximately 160 nucleotides not shown in sequence; 5′cap, Cap1) was transfected into HEK 293A cells (150,000 cells/well) using Lipofectamine 2000 in DMEM in presence of 10% FBS. The transfection complexes were removed 3 hours after transfection. Cells were harvested at 3, 6, 9, 12, 24, 48 and 72 hours after transfection. Total RNA was isolated and used for cDNA synthesis. The cDNA was subjected to analysis by quantitative Real-Time PCR using codon optimized Factor IX specific primer set. Human hypoxanthine phosphoribosyltransfersase 1 (HPRT) level was used for normalization. The data is plotted as a percent of detectable mRNA considering the mRNA level as 100% at the 3 hour time point. The half-life of Factor IX modified mRNA fully modified with 5-methylcytosine and pseudouridine in human embryonic kidney 293 (HEK293) cells is about 8-10 hours.

### Example 83. Saline Formulation: Subcutaneous Administration

[1520] Human G-CSF modified mRNA (mRNA sequence shown in SEQ ID NO: 31907; polyA tail of approximately 160 nucleotides not shown in sequence; 5′cap, Cap1; fully modified with 5-methylcytosine and pseudouridine) and human EPO modified mRNA (mRNA sequence shown in SEQ ID NO: 31910; polyA tail of approximately 160 nucleotides not shown in sequence; 5′cap, Cap1; fully modified with 5-methylcytosine and pseudouridine), were formulated in saline and delivered to mice via intramuscular (IM) injection at a dose of 100 ug.

[1521] Controls included Luciferase (mRNA sequence shown in SEQ ID NO: 31917; polyA tail of approximately 160 nucleotides not shown in sequence; 5′cap, Cap1; fully modified with 5-methylcytosine and pseudouridine)) or the formulation buffer (F.Buffer). The mice were bled at 13 hours after the injection to determine the concentration of the human polypeptide in serum in pg/mL. (G-CSF groups measured human G-CSF in mouse serum and EPO groups measured human EPO in mouse serum). The data are shown in Table 130.

[1522] mRNA degrades rapidly in serum in the absence of formulation suggesting the best method to deliver mRNA to last longer in the system is by formulating the mRNA. As shown in Table 130, mRNA can be delivered subcutaneously using only a buffer formulation.

TABLE 130
Dosing Regimen

| | | | | Average Protein |
|---|---|---|---|---|
| | | Dose Vol. | Dosing | Product pg/mL, |
| Group | Treatment | (μl/mouse) | Vehicle | serum |
| G-CSF | G-CSF | 100 | F. buffer | 45 |
| G-CSF | Luciferase | 100 | F. buffer | 0 |
| G-CSF | F. buffer | 100 | F. buffer | 2.2 |
| EPO | EPO | 100 | F. buffer | 72.03 |
| EPO | Luciferase | 100 | F. buffer | 26.7 |
| EPO | F. buffer | 100 | F. buffer | 13.05 |

### Example 84. Intravitreal Delivery

[1523] mCherry modified mRNA (mRNA sequence shown in SEQ ID NO: 31908; polyA tail of approximately 160 nucleotides not shown in sequence; 5′cap, Cap1; fully modified with 5-methylcytosine and pseudouridine) and luciferase modified mRNA (mRNA sequence shown in SEQ ID NO: 31917; polyA tail of approximately 160 nucleotides not shown in sequence; 5′cap, Cap1; fully modified with 5-methylcytosine and pseudouridine) formulated in saline was delivered intravitreally in rats as described in Table 131. The sample was compared against a control of saline only delivered intravitreally.

TABLE 131
Dosing Chart

| | Dose Level | Dose | Treatment | |
|---|---|---|---|---|
| | (μg modified | volume | Right Eye | Left Eye |
| Group No. | RNA/eye) | (μL/eye) | (OD) | (OS) |
| Control | 0 | 5 | Delivery | Delivery |
| | | | buffer only | buffer only |
| Modified RNA in | 10 | 5 | mCherry | Luciferase |
| delivery buffer | | | | |

[1524] The formulation will be administered to the left or right eye of each animal on day 1 while the animal is anesthetized. On the day prior to administration gentamicin ophthalmic ointment or solution was applied to both eyes twice. The gentamicin ophthalmic ointment or solution was also applied immediately following the injection and on the day following the injection. Prior to dosing, mydriatic drops (1% tropicamide and/or 2.5% phenylephrine) are applied to each eye.

[1525] 18 hours post dosing the eyes receiving the dose of mCherry and delivery buffer are enucleated and each eye was separately placed in a tube containing 10 mL 4% paraformaldehyde at room temperature for overnight tissue fixation. The following day, eyes will be separately transferred to tubes containing 10 mL of 30% sucurose and stored at 21° C. until they were processed and sectioned. The slides prepared from different sections were evaluated under F-microscopy. Positive expression was seen in the slides prepared with the eyes administered mCherry modified mRNA and the control showed no expression.

### Example 85. In Vivo Cytokine Expression Study

[1526] Mice were injected intramuscularly with 200 ug of G-CSF modified mRNA (mRNA sequence shown in SEQ ID NO: 31907; polyA tail of approximately 160 nucleotides not shown in sequence) which was unmodified with a 5′cap, Cap1 (unmodified), fully modified with 5-methylcytosine and pseudouridine and a 5′cap, Cap1 (Gen1) or fully modified with 5-methylcytosine and N1-methyl-pseudouridine and a 5′cap, Cap1 (Gen2 cap) or no cap (Gen2 uncapped). Controls of R-848, 5% sucrose and untreated mice were also analyzed. After 8 hours serum was collected from the mice and analyzed for interferon-alpha (IFN-alpha) expression. The results are shown in Table 132.

TABLE 132
IFN-alpha Expression

| Formulation | IFN-alpha (pg/ml) |
|---|---|
| G-CSF unmodified | 67.012 |
| G-CSF Gen1 | 8.867 |
| G-CSF Gen2 cap | 0 |
| G-CSF Gen2 uncapped | 0 |
| R-848 | 40.971 |
| 5% sucrose | 1.493 |
| Untreated | 0 |

### Example 86. In Vitro Expression of VEGF Modified mRNA

[1527] HEK293 cells were transfected with modified mRNA (mmRNA) VEGF-A (mRNA sequence shown in SEQ ID NO: 31920; polyA tail of approximately 160 nucleotides not shown in sequence; 5′cap, Cap1; fully modified with 5-methylcytosine and pseudouridine) which had been complexed with Lipofectamine2000 from Invitrogen (Carlsbad, CA) at the concentration shown in Table 133. The protein expression was detected by ELISA and the protein (pg/ml) is shown in Table 133 and FIG. 7.

TABLE 134
Protein Expression

| | Amount Transfected | | | | | | | |
|---|---|---|---|---|---|---|---|---|
| | 10 ng | 2.5 ng | 625 pg | 156 pg | 39 pg | 10 pg | 2 pg | 610 fg |
| Protein | 10495 | 10038 | 2321.23 | 189.6 | 0 | 0 | 0 | 0 |
| (pg/ml) | | | | | | | | |

### Example 87. In Vitro Screening in HeLa Cells of GFP

[1528] The day before transfection, 20,000 HeLa cells (ATCC no. CCL-2; Manassas, VA) were harvested by treatment with Trypsin-EDTA solution (LifeTechnologies, Grand Island, NY) and seeded in a total volume of 100 ul EMEM medium (supplemented with 10% FCS and 1× Glutamax) per well in a 96-well cell culture plate (Corning, Manassas, VA). The cells were grown at 37° C. in 5% CO₂ atmosphere overnight. Next day, 37.5 ng or 75 ng of Green Fluroescent protein (GFP) modified RNA (mRNA sequence shown in SEQ ID NO: 31919; polyA tail of approximately 160 nucleotides not shown in sequence; 5′cap, Cap1) with the chemical modification described in Table 134, were diluted in 10 ul final volume of OPTI-MEM (LifeTechnologies, Grand Island, NY). Lipofectamine 2000 (LifeTechnologies, Grand Island, NY) was used as transfection reagent and 0.2 ul were diluted in 10 ul final volume of OPTI-MEM. After 5 minutes of incubation at room temperature, both solutions were combined and incubated an additional 15 minute at room temperature. Then the 20 ul combined solution was added to the 100 ul cell culture medium containing the HeLa cells and incubated at room temperature.

[1529] After an 18 to 22 hour incubation cells expressing luciferase were lysed with 100 ul of Passive Lysis Buffer (Promega, Madison, WI) according to manufacturer instructions. Aliquots of the lysates were transferred to white opaque polystyrene 96-well plates (Corning, Manassas, VA) and combined with 100 ul complete luciferase assay solution (Promega, Madison, WI). The median fluorescence intensity (MFI) was determined for each chemistry and is shown in Table 134.

[1530] These results demonstrate that GFP fully modified with N1-methyl-pseudouridine and 5-methylcytosine produces more protein in HeLa cells compared to the other chemistry. Additionally the higher dose of GFP administered to the cells resulted in the highest MFI value.

TABLE 134
Mean Fluorescence Intensity

| | 37.5 ng | 75 ng |
|---|---|---|
| Chemistry | MFI | MFI |
| No modifications | 97400 | 89500 |
| 5-methylcytosine/pseudouridine | 324000 | 715000 |
| 5-methylcytosine/N1-methyl-pseudouridine | 643000 | 1990000 |

### Example 88. Homogenization

[1531] Different luciferase mRNA solutions (as described in Table 135 where “X” refers to the solution containing that component) (mRNA sequence shown in SEQ ID NO: 31917; polyA tail of approximately 160 nucleotides not shown in sequence; 5′cap, Cap1; fully modified with 5-methylcytosine and pseudouridine) were evaluated to test the percent yield of the different solutions, the integrity of the mRNA by bioanalyzer, and the protein expression of the mRNA by in vitro transfection. The mRNA solutions were prepared in water, 1× TE buffer at 4 mg/ml as indicated in Table 135, and added to either dichloromethane (DCM) or DCM containing 200 mg/ml of poly(lactic-co-glycolic acid) (PLGA) (Lactel, Cat #B6010-2, inherent viscosity 0.55-0.75, 50:50 LA:GA) to achieve a final mRNA concentration of 0.8 mg/ml. The solutions requiring homogenization were homogenized for 30 seconds at speed 5 (approximately 19,000 rpm) (IKA Ultra-Turrax Homogenizer, T18). The mRNA samples in water, dicloromethane and poly(lactic-co-glycolic acid) (PLGA) were not recoverable (NR). All samples, except the NR samples, maintained integrity of the mRNA as determined by bioanalyzer (Bio-rad Experion).

[1532] The day before transfection, 20,000 HeLa cells (ATCC no. CCL-2; Manassas, VA) were harvested by treatment with Trypsin-EDTA solution (LifeTechnologies, Grand Island, NY) and seeded in a total volume of 100 ul EMEM medium (supplemented with 10% FCS and 1× Glutamax) per well in a 96-well cell culture plate (Corning, Manassas, VA). The cells were grown at 37° C. in a 5% CO2 atmosphere overnight. The next day, 250 ng of luciferase mRNA from the recoverable samples was diluted in a 10 ul final volume of OPTI-MEM (LifeTechnologies, Grand Island, NY). Lipofectamine 2000 (LifeTechnologies, Grand Island, NY) was used as a transfection reagent and 0.2 ul was diluted in a 10 ul final volume of OPTI-MEM. After 5 minutes of incubation at room temperature, both solutions were combined and incubated an additional 15 minutes at room temperature. Then 20 ul of the combined solution was added to 100 ul of cell culture medium containing the HeLa cells. The plates were then incubated as described before. Controls luciferase mRNA (luciferase mRNA formulated in saline) (Control) and untreated cells (Untreat.) were also evaluated. Cells were harvested and the bioluminescence average (in photons/second) (biolum. (p/s)) for each signal is also shown in Table 135. The recoverable samples all showed activity of luciferase mRNA when analyzed.

[1533] After an 18 to 22 hour incubation, cells expressing luciferase were lysed with 100 ul Passive Lysis Buffer (Promega, Madison, WI) according to manufacturer instructions. Aliquots of the lysates were transferred to white opaque polystyrene 96-well plates (Corning, Manassas, VA) and combined with 100 ul complete luciferase assay solution (Promega, Madison, WI). The background signal of the plates without reagent was about 200 relative light units per well. The plate reader was a BioTek Synergy H1 (BioTek, Winooski, VT).

[1534] Cells were harvested and the bioluminescence average (in relative light units, RLU) (biolum. (RLU)) for each signal is also shown in Table 135. The recoverable samples all showed activity of luciferase mRNA when analyzed.

TABLE 135
Solutions

| Solution | | 1x TE | | | | Yield | Biolum. |
|---|---|---|---|---|---|---|---|
| No. | Water | Buffer | DCM | DCM/PLGA | Homogenizer | (%) | (RLU) |
| 1 | X | | | | | 96 | 5423780 |
| 2 | | X | | | X | 95 | 4911950 |
| 3 | X | | | | X | 92 | 2367230 |
| 4 | | X | | | X | 90 | 4349410 |
| 5 | X | | X | | X | 66 | 4145340 |
| 6 | | X | X | | X | 71 | 3834440 |
| 7 | X | | | X | X | NR | n/a |
| 8 | | X | | X | X | 24 | 3182080 |
| 9 | X | | | X | | NR | n/a |
| 10 | | X | | X | | 79 | 3276800 |
| 11 | X | | X | | | 79 | 5563550 |
| 12 | | X | X | | | 79 | 4919100 |
| Control | | | | | | | 2158060 |
| Untreat. | | | | | | | 3530 |

### Example 89. TE Buffer and Water Evaluation

[1535] Luciferase mRNA (mRNA sequence shown in SEQ ID NO: 31917; polyA tail of approximately 160 nucleotides not shown in sequence; 5′cap, Cap1; fully modified with 5-methylcytosine and pseudouridine) was reconstituted in water or TE buffer as outlined in Table 136 and then formulated in PLGA microspheres. PLGA microspheres were synthesized using the water/oil/water double emulsification methods known in the art using PLGA (Lactel, Cat #B6010-2, inherent viscosity 0.55-0.75, 50:50 LA:GA), polyvinylalcohol (PVA) (Sigma, Cat #348406-25G, MW 13-23 k) dichloromethane and water. Briefly, 0.2 to 0.6 ml of mRNA in water or TE buffer at a concentration of 2 to 6 mg/ml (W1) was added to 2 ml of PLGA dissolved in dichloromethane (DCM) (O1) at a concentration of 100 mg/ml of PLGA. The W1/O1 emulsion was homogenized (IKA Ultra-Turrax Homogenizer, T18) for 30 seconds at speed 5 (˜19,000 rpm). The W1/01 emulsion was then added to 250 ml 1% PVA (W2) and homogenized for 1 minute at speed 5 (˜19,000 rpm).

[1536] Formulations were left to stir for 3 hours, then passed through a 100 μm nylon mesh strainer (Fisherbrand Cell Strainer, Cat #22-363-549) to remove larger aggregates, and finally washed by centrifugation (10 min, 9,250 rpm, 4° C.). The supernatant was discarded and the PLGA pellets were resuspended in 5-10 ml of water, which was repeated 2×. The washed formulations were frozen in liquid nitrogen and then lyophilized for 2-3 days. After lyophilization, ˜10 mg of PLGA MS were weighed out in 2 ml eppendorf tubes and deformulated by adding 1 ml of DCM and letting the samples shake for 2-6 hrs. mRNA was extracted from the deformulated PLGA micropsheres by adding 0.5 ml of water and shaking the sample overnight. Unformulated luciferase mRNA in water or TE buffer (deformulation controls) was spiked into DCM and went through the deformulation process to be used as controls in the transfection assay.

[1537] The day before transfection, 20,000 HeLa cells (ATCC no. CCL-2; Manassas, VA) were harvested by treatment with Trypsin-EDTA solution (LifeTechnologies, Grand Island, NY) and seeded in a total volume of 100 ul EMEM medium (supplemented with 10% FCS and 1× Glutamax) per well in a 96-well cell culture plate (Corning, Manassas, VA). The cells were grown at 37° C. in a 5% CO2 atmosphere overnight. The next day, 100 ng of the deformulated luciferase mRNA samples was diluted in a 10 ul final volume of OPTI-MEM (LifeTechnologies, Grand Island, NY). Lipofectamine 2000 (LifeTechnologies, Grand Island, NY) was used as a transfection reagent and 0.2 ul was diluted in a 10 ul final volume of OPTI-MEM. After 5 minutes of incubation at room temperature, both solutions were combined and incubated an additional 15 minutes at room temperature. Then 20 ul of the combined solution was added to 100 ul of cell culture medium containing the HeLa cells. The plates were then incubated as described before.

[1538] After 18 to 22 hour incubation, cells expressing luciferase were lysed with 100 ul Passive Lysis Buffer (Promega, Madison, WI) according to manufacturer instructions. Aliquots of the lysates were transferred to white opaque polystyrene 96-well plates (Corning, Manassas, VA) and combined with 100 ul complete luciferase assay solution (Promega, Madison, WI). The background signal of the plates without reagent was about 200 relative light units per well. The plate reader was a BioTek Synergy H1 (BioTek, Winooski, VT). To determine the activity of the luciferase mRNA from each formulation, the relative light units (RLU) for each formulation was divided by the RLU of the appropriate mRNA deformulation control (mRNA in water or TE buffer). Table 136 shows the activity of the luciferase mRNA. The activity of the luciferase mRNA in the PLGA microsphere formulations (Form.) was substantitally improved by formulating in TE buffer versus water.

TABLE 136
Formulations

| | | W1 | | Theoretical | Actual | | Activity |
|---|---|---|---|---|---|---|---|
| | mRNA | Solvent | Total | mRNA | mRNA | | (% of |
| | conc. | volume | mRNA | Loading | Loading | W1 | deformulation |
| Form. | (mg/ml) | (ul) | (ug) | (wt %) | (wt %) | Solvent | control) |
| PLGA A | 4 | 400 | 1600 | 0.80 | 0.14 | Water | 12.5% |
| PLGA B | 4 | 200 | 800 | 0.40 | 0.13 | Water | 1.3% |
| PLGA C | 4 | 600 | 2400 | 1.20 | 0.13 | Water | 12.1% |
| PLGA D | 2 | 400 | 800 | 0.40 | 0.07 | Water | 1.3% |
| PLGA E | 6 | 400 | 2400 | 1.20 | 0.18 | TE Buffer | 38.9% |
| PLGA F | 4 | 400 | 1600 | 0.80 | 0.16 | TE Buffer | 39.7% |
| PLGA G | 4 | 400 | 1600 | 0.80 | 0.10 | TE Buffer | 26.6% |

### Example 90. Chemical Modifications on mRNA

[1539] The day before transfection, 20,000 HeLa cells (ATCC no. CCL-2; Manassas, VA) were harvested by treatment with Trypsin-EDTA solution (Life Technologies, Grand Island, NY) and seeded in a total volume of 100 ul EMEM medium (supplemented with 10% FCS and 1× Glutamax) per well in a 96-well cell culture plate (Corning, Manassas, VA). The cells were grown at 37° C. in 5% CO₂ atmosphere overnight. The next day, 83 ng of Luciferase modified RNA (mRNA sequence shown SEQ ID NO: 31917; polyA tail of approximately 140 nucleotides not shown in sequence; 5′cap, Cap1) with the chemical modification described in Table 137, were diluted in 10 ul final volume of OPTI-MEM (LifeTechnologies, Grand Island, NY). Lipofectamine 2000 (LifeTechnologies, Grand Island, NY) was used as transfection reagent and 0.2 ul were diluted in 10 ul final volume of OPTI-MEM. After 5 minutes of incubation at room temperature, both solutions were combined and incubated an additional 15 minute at room temperature. Then the 20 ul combined solution was added to the 100 ul cell culture medium containing the HeLa cells and incubated at room temperature.

[1540] After 18 to 22 hours of incubation cells expressing luciferase were lysed with 100 ul of Passive Lysis Buffer (Promega, Madison, WI) according to manufacturer instructions. Aliquots of the lysates were transferred to white opaque polystyrene 96-well plates (Corning, Manassas, VA) and combined with 100 ul complete luciferase assay solution (Promega, Madison, WI). The lysate volumes were adjusted or diluted until no more than 2 mio relative light units (RLU) per well were detected for the strongest signal producing samples and the RLUs for each chemistry tested are shown in Table 137. The plate reader was a BioTek Synergy H1 (BioTek, Winooski, VT). The background signal of the plates without reagent was about 200 relative light units per well.

TABLE 137
Chemical Modifications

| Sample | RLU |
|---|---|
| Untreated | 336 |
| Unmodified Luciferase | 33980 |
| 5-methylcytosine and pseudouridine | 1601234 |
| 5-methylcytosine and N1-methyl-pseudouridine | 421189 |
| 25% cytosines replaced with 5-methylcytosine | 222114 |
| and 25% of uridines replaced with 2-thiouridine | |
| N1-methyl-pseudouridine | 3068261 |
| Pseudouridine | 140234 |
| N4-Acetylcytidine | 1073251 |
| 5-methoxyuridine | 219657 |
| 5-Bromouridine | 6787 |
| N4-Acetylcytidine and N1-methyl-pseudouridine | 976219 |
| 5-methylcytosine and 5-methoxyuridine | 66621 |
| 5-methylcytosine and 2′fluorouridine | 11333 |

### Example 91. Intramuscular and Subcutaneous Administration of Modified mRNA

[1541] Luciferase modified mRNA (mRNA sequence shown in SEQ ID NO: 31917; polyA tail of approximately 140 nucleotides not shown in sequence; 5′cap, Cap1) fully modified with 5-methylcytosine and pseudouridine (5 mC/pU), fully modified with 5-methylcytosine and N1-methyl-pseudouridine (5 mC/N1 mpU), fully modified with pseudouridine (pU), fully modified with N1-methyl-pseudouridine (N1 mpU) or modified where 25% of the cytosines replaced with 5-methylcytosine and 25% of the uridines replaced with 2-thiouridine (5 mC/s2U) formulated in PBS (pH 7.4) was administered to Balb-C mice intramuscularly or subcutaneously at a dose of 2.5 mg/kg. The mice were imaged at 2 hours, 8 hours, 24 hours, 48 hours, 72 hours, 96 hours, 120 hours and 144 hours for intramuscular delivery and 2 hours, 8 hours, 24 hours, 48 hours, 72 hours, 96 hours and 120 hours for subcutaneous delivery. Twenty minutes prior to imaging, mice were injected intraperitoneally with a D-luciferin solution at 150 mg/kg. Animals were then anesthetized and images were acquired with an IVIS Lumina II imaging system (Perkin Elmer). Bioluminescence was measured as total flux (photons/second) of the entire mouse. The average total flux (photons/second) for intramuscular administration is shown in Table 138 and the average total flux (photons/second) for subcutaneous administration is shown in Table 139. The background signal was 3.79E+05 (p/s). The peak expression for intramuscular administration was seen between 24 and 48 hours for all chemistry and expression was still detected at 144 hours. For subcutaneous delivery the peak expression was seen at 2-8 hours and expression was detected at 72 hours.

TABLE 138
Intramuscular Administration

| | 5mC/ | 5mC/ | 5mC/ | | |
|---|---|---|---|---|---|
| | pU | N1mpU | s2U | pU | N1mpU |
| | Flux | Flux | Flux | Flux | Flux |
| | (p/s) | (p/s) | (p/s) | (p/s) | (p/s) |
| 2 hours | 1.98E+07 | 4.65E+06 | 4.68E+06 | 2.33E+06 | 3.66E+07 |
| 8 hours | 1.42E+07 | 3.64E+06 | 3.78E+06 | 8.07E+06 | 7.21E+07 |
| 24 hours | 2.92E+07 | 1.22E+07 | 3.35E+07 | 1.01E+07 | 1.75E+08 |
| 48 hours | 2.64E+07 | 1.01E+07 | 5.06E+07 | 7.46E+06 | 3.42E+08 |
| 72 hours | 2.18E+07 | 8.59E+06 | 3.42E+07 | 4.08E+06 | 5.83E+07 |
| 96 hours | 2.75E+07 | 2.70E+06 | 2.38E+07 | 4.35E+06 | 7.15E+07 |
| 120 hours | 2.19E+07 | 1.60E+06 | 1.54E+07 | 1.25E+06 | 3.87E+07 |
| 144 hours | 9.17E+06 | 2.19E+06 | 1.14E+07 | 1.86E+06 | 5.04E+07 |

TABLE 139
Subcutaneous Administration

| | 5mC/ | 5mC/ | 5mC/ | | |
|---|---|---|---|---|---|
| | pU | N1mpU | s2U | pU | N1mpU |
| | Flux | Flux | Flux | Flux | Flux |
| | (p/s) | (p/s) | (p/s) | (p/s) | (p/s) |
| 2 hours | 5.26E+06 | 4.54E+06 | 9.34E+06 | 2.43E+06 | 2.80E+07 |
| 8 hours | 2.32E+06 | 8.75E+05 | 8.15E+06 | 2.12E+06 | 3.09E+07 |
| 24 hours | 2.67E+06 | 5.49E+06 | 3.80E+06 | 2.24E+06 | 1.48E+07 |
| 48 hours | 1.22E+06 | 1.77E+06 | 3.07E+06 | 1.58E+06 | 1.24E+07 |
| 72 hours | 1.12E+06 | 8.00E+05 | 8.53E+05 | 4.80E+05 | 2.29E+06 |
| 96 hours | 5.16E+05 | 5.33E+05 | 4.30E+05 | 4.30E+05 | 6.62E+05 |
| 120 hours | 3.80E+05 | 4.09E+05 | 3.21E+05 | 6.82E+05 | 5.05E+05 |

### Example 92. Osmotic Pump Study

[1542] Prior to implantation, an osmotic pump (ALZET® Osmotic Pump 2001D, DURECT Corp. Cupertino, CA) is loaded with the 0.2 ml of 1×PBS (pH 7.4) (PBS loaded pump) or 0.2 ml of luciferase modified mRNA (mRNA sequence shown in SEQ ID NO: 31917; polyA tail of approximately 140 nucleotides not shown in sequence; 5′cap, Cap1; fully modified with 5-methylcytosine and N1-methyl-pseudouridine) at 1 mg/ml in 1× PBS (pH 7.4) (Luciferase loaded pump) and incubated overnight in 1× PBS (pH 7.4) at 37° C.

[1543] Balb-C mice (n=3) are implanted subcutaneously with either the PBS loaded pump or the luciferase loaded pump and imaged at 2 hours, 8 hours and 24 hours. As a control a PBS loaded pump is implanted subcutaneously and the mice are injected subcutaneously with luciferase modified mRNA in 1× PBS (PBS loaded pump; SC Luciferase) or an osmotic pump is not implanted and the mice are injected subcutaneously with luciferase modified mRNA in 1× PBS (SC Luciferase). The luciferase formulations are outlined in Table 140.

TABLE 140
Luciferase Formulations

| | | Conc | Inj. Vol. | Amt | Dose |
|---|---|---|---|---|---|
| Group | Vehicle | (mg/ml) | (ul) | (ug) | (mg/kg) |
| PBS loaded pump; | PBS | 1.00 | 50 | 50 | 2.5 |
| SC Luciferase | | | | | |
| Luciferase loaded | PBS | 1.00 | — | 200 | 10.0 |
| pump | | | | | |
| PBS loaded pump | PBS | — | — | — | — |
| SC Luciferase | PBS | 1.00 | 50 | 50 | 2.5 |

### Example 93. External Osmotic Pump Study

[1544] An external osmotic pump (ALZET® Osmotic Pump 2001D, DURECT Corp. Cupertino, CA) is loaded with the 0.2 ml of 1×PBS (pH 7.4) (PBS loaded pump) or 0.2 ml of luciferase modified mRNA (mRNA sequence shown in SEQ ID NO: 31917; polyA tail of approximately 140 nucleotides not shown in sequence; 5′cap, Cap1; fully modified with 5-methylcytosine and N1-methyl-pseudouridine) at 1 mg/ml in 1× PBS (pH 7.4) (luciferase loaded pump) and incubated overnight in 1× PBS (pH 7.4) at 37° C.

[1545] Using a catheter connected to the external PBS loaded pump or the luciferase loaded pump Balb-C mice (n=3) are administered the formulation. The mice are imaged at 2 hours, 8 hours and 24 hours. As a control an external PBS loaded pump is used and the mice are injected subcutaneously with luciferase modified mRNA in 1× PBS (PBS loaded pump; SC Luciferase) or the external pump is not used and the mice are only injected subcutaneously with luciferase modified mRNA in 1× PBS (SC Luciferase). Twenty minutes prior to imaging, mice are injected intraperitoneally with a D-luciferin solution at 150 mg/kg. Animals are then anesthetized and images are acquired with an IVIS Lumina II imaging system (Perkin Elmer). Bioluminescence is measured as total flux (photons/second) of the entire mouse. The luciferase formulations are outlined in Table 141 and the average total flux (photons/second).

TABLE 141
Luciferase Formulations

| | | Conc | Inj. Vol. | Amt | Dose |
|---|---|---|---|---|---|
| Group | Vehicle | (mg/ml) | (ul) | (ug) | (mg/kg) |
| PBS loaded pump; | PBS | 1.00 | 50 | 50 | 2.5 |
| SC Luciferase | | | | | |
| Luciferase loaded | PBS | 1.00 | — | 200 | 10.0 |
| pump | | | | | |
| PBS loaded pump | PBS | — | — | — | — |
| SC Luciferase | PBS | 1.00 | 50 | 50 | 2.5 |

### Example 94. Fibrin Sealant Study

[1546] Fibrin sealant, such as Tisseel (Baxter Healthcare Corp., Deerfield, IL), is composed of fibrinogen and thrombin in a dual-barreled syringe. Upon mixing, fibrinogen is converted to fibrin to form a fibrin clot in about 10 to 30 seconds. This clot can mimic the natural clotting mechanism of the body. Additionally a fibrin hydrogel is a three dimensional structure that can potentially be used in sustained release delivery. Currently, fibrin sealant is approved for application in hemostasis and sealing to replace conventional surgical techniques such as suture, ligature and cautery.

[1547] The thrombin and fibrinogen components were loaded separately into a dual barreled syringe. Balb-C mice (n=3) were injected subcutaneously with 50 ul of fibrinogen, 50 ul of thrombin and they were also injected at the same site with modified luciferase mRNA (mRNA sequence shown in SEQ ID NO: 31917; polyA tail of approximately 140 nucleotides not shown in sequence; 5′cap, Cap1; fully modified with 5-methylcytosine and N1-methyl-pseudouridine) (Tisseel+Luciferase), 50 ul of fibrinogen and 50 ul thrombin (Tisseel) or modified luciferase mRNA (Luciferase). The injection of fibrinogen and thrombin was done simultaneously using the dual-barreled syringe. The SC injection of luciferase was done 15 minutes after the fibrinogen/thrombin injection to allow the fibrin hydrogel to polymerize (Tisseel+Luciferase group). A control group of untreated mice were also evaluated. The mice were imaged at 5 hours and 24 hours. Twenty minutes prior to imaging, mice were injected intraperitoneally with a D-luciferin solution at 150 mg/kg. Animals were then anesthetized and images were acquired with an IVIS Lumina II imaging system (Perkin Elmer). Bioluminescence was measured as total flux (photons/second) of the entire mouse. The luciferase formulations are outlined in Table 142 and the average total flux (photons/second) is shown in Table 143. The fibrin sealant was found to not interfere with imaging and the injection of luciferase and Tisseel showed expression of luciferase.

TABLE 142
Luciferase Formulations

| | | Conc | Inj. Vol. | Amt | Dose |
|---|---|---|---|---|---|
| Group | Vehicle | (mg/ml) | (ul) | (ug) | (mg/kg) |
| Tisseel + | PBS | 1.00 | 50 | 50 | 2.5 |
| Luciferase | | | | | |
| Tisseel | — | — | — | — | — |
| Luciferase | PBS | 1.00 | 50 | 50 | 2.5 |
| Untreated | — | — | — | — | — |

TABLE 143
Total Flux

| | 5 Hours | 24 Hours |
|---|---|---|
| Group | Flux (p/s) | Flux (p/s) |
| Tisseel + Luciferase | 4.59E+05 | 3.39E+05 |
| Tisseel | 1.99E+06 | 1.06E+06 |
| Luciferase | 9.94E+05 | 7.44E+05 |
| Untreated | 3.90E+05 | 3.79E+05 |

### Example 95. Fibrin Containing mRNA Sealant Study

[1548] A. Modified mRNA and Calcium Chloride

[1549] Prior to reconstitution, luciferase mRNA (mRNA sequence shown in SEQ ID NO: 31917; polyA tail of approximately 140 nucleotides not shown in sequence; 5′cap, Cap1) fully modified with 5-methylcytosine and N1-methyl-pseudouridine or fully modified with N1-methyl-pseudouridine is added to calcium chloride. The calcium chloride is then used to reconstitute thrombin. Fibrinogen is reconstituted with fibrinolysis inhibitor solution per the manufacturer's instructions. The reconstituted thrombin containing modified mRNA and fibrinogen is loaded into a dual barreled syringe. Mice are injected subcutaneously with 50 ul of fibrinogen and 50 ul of thrombin containing modified mRNA or they were injected with 50 ul of PBS containing an equivalent dose of modified luciferase mRNA. A control group of untreated mice is also evaluated. The mice are imaged at predetermined intervals to determine the average total flux (photons/second).

[1550] B. Lipid Nanoparticle Formulated Modified mRNA and Calcium Chloride

[1551] Prior to reconstitution, luciferase mRNA (mRNA sequence shown in SEQ ID NO: 31917; polyA tail of approximately 140 nucleotides not shown in sequence; 5′cap, Cap1) fully modified with 5-methylcytosine and N1-methyl-pseudouridine or fully modified with N1-methyl-pseudouridine is formulated in a lipid nanoparticle is added to calcium chloride. The calcium chloride is then used to reconstitute thrombin. Fibrinogen is reconstituted with fibrinolysis inhibitor solution per the manufacturer's instructions. The reconstituted thrombin containing modified mRNA and fibrinogen is loaded into a dual barreled syringe. Mice are injected subcutaneously with 50 ul of fibrinogen and 50 ul of thrombin containing modified mRNA or they were injected with 50 ul of PBS containing an equivalent dose of modified luciferase mRNA. A control group of untreated mice is also evaluated. The mice are imaged at predetermined intervals to determine the average total flux (photons/second).

[1552] C. Modified mRNA and Fibrinogen

[1553] Prior to reconstitution, luciferase mRNA (mRNA sequence shown in SEQ ID NO: 31917; polyA tail of approximately 140 nucleotides not shown in sequence; 5′cap, Cap1) fully modified with 5-methylcytosine and N1-methyl-pseudouridine or fully modified with N1-methyl-pseudouridine is added to the fibrinolysis inhibitor solution. The fibrinolysis inhibitor solution is then used to reconstitute fibrinogen. Thrombin is reconstituted with the calcium chloride solution per the manufacturer's instructions. The reconstituted fibrinogen containing modified mRNA and thrombin is loaded into a dual barreled syringe. Mice are injected subcutaneously with 50 ul of thrombin and 50 ul of fibrinogen containing modified mRNA or they were injected with 50 ul of PBS containing an equivalent dose of modified luciferase mRNA. A control group of untreated mice is also evaluated. The mice are imaged at predetermined intervals to determine the average total flux (photons/second).

[1554] D. Lipid Nanoparticle Formulated Modified mRNA and Fibrinogen

[1555] Prior to reconstitution, luciferase mRNA (mRNA sequence shown in SEQ ID NO: 31917; polyA tail of approximately 140 nucleotides not shown in sequence; 5′cap, Cap1) fully modified with 5-methylcytosine and N1-methyl-pseudouridine or fully modified with N1-methyl-pseudouridine is formulated in a lipid nanoparticle is added to the fibrinolysis inhibitor solution. The fibrinolysis inhibitor solution is then used to reconstitute fibrinogen. Thrombin is reconstituted with the calcium chloride solution per the manufacturer's instructions. The reconstituted fibrinogen containing modified mRNA and thrombin is loaded into a dual barreled syringe. Mice are injected subcutaneously with 50 ul of thrombin and 50 ul of fibrinogen containing modified mRNA or they were injected with 50 ul of PBS containing an equivalent dose of modified luciferase mRNA. A control group of untreated mice is also evaluated. The mice are imaged at predetermined intervals to determine the average total flux (photons/second).

[1556] E. Modified mRNA and Thrombin

[1557] Prior to reconstitution, luciferase mRNA (mRNA sequence shown in SEQ ID NO: 31917; polyA tail of approximately 140 nucleotides not shown in sequence; 5′cap, Cap1) fully modified with 5-methylcytosine and N1-methyl-pseudouridine or fully modified with N1-methyl-pseudouridine is added to the reconstituted thrombin after it is reconstituted with the calcium chloride per the manufacture's instructions. The fibrinolysis inhibitor solution is then used to reconstitute fibrinogen per the manufacturer's instructions. The reconstituted fibrinogen and thrombin containing modified mRNA is loaded into a dual barreled syringe. Mice are injected subcutaneously with 50 ul of thrombin containing modified mRNA and 50 ul of fibrinogen or they were injected with 50 ul of PBS containing an equivalent dose of modified luciferase mRNA. A control group of untreated mice is also evaluated. The mice are imaged at predetermined intervals to determine the average total flux (photons/second).

[1558] F. Lipid Nanoparticle Formulated Modified mRNA and Thrombin

[1559] Prior to reconstitution, luciferase mRNA (mRNA sequence shown in SEQ ID NO: 31917; polyA tail of approximately 140 nucleotides not shown in sequence; 5′cap, Cap1) fully modified with 5-methylcytosine and N1-methyl-pseudouridine or fully modified with N1-methyl-pseudouridine is formulated in a lipid nanoparticle is added to the reconstituted thrombin after it is reconstituted with the calcium chloride per the manufacture's instructions. The fibrinolysis inhibitor solution is then used to reconstitute fibrinogen per the manufacturer's instructions. The reconstituted fibrinogen and thrombin containing modified mRNA is loaded into a dual barreled syringe. Mice are injected subcutaneously with 50 ul of thrombin containing modified mRNA and 50 ul of fibrinogen or they were injected with 50 ul of PBS containing an equivalent dose of modified luciferase mRNA. A control group of untreated mice is also evaluated. The mice are imaged at predetermined intervals to determine the average total flux (photons/second).

### Example 96. Cationic Lipid Formulation of 5-Methylcytosine and N1-Methyl-Pseudouridine Modified mRNA

[1560] Luciferase mRNA (mRNA sequence shown in SEQ ID NO: 31917; polyA tail of approximately 140 nucleotides not shown in sequence; 5′cap, Cap1) fully modified with 5-methylcytosine and N1-methyl-pseudouridine was formulated in the cationic lipids described in Table 144. The formulations were administered intravenously (I.V.), intramuscularly (I.M.) or subcutaneously (S.C.) to Balb-C mice at a dose of 0.05 mg/kg.

TABLE 144
Cationic Lipid Formulations

| Formulation | NPA-126-1 | NPA-127-1 | NPA-128-1 | NPA-129-1 | 111612-B |
|---|---|---|---|---|---|
| Lipid | DLin-MC3- | DLin-KC2- | C12-200 | DLinDMA | DODMA |
| | DMA | DMA | | | |
| Lipid/mRNA | 20:1 | 20:1 | 20:1 | 20:1 | 20:1 |
| ratio (wt/wt) | | | | | |
| Mean Size | 122 nm | 114 nm | 153 nm | 137 nm | 223.2 nm |
| | PDI: 0.13 | PDI: 0.10 | PDI: 0.17 | PDI: 0.09 | PDI: 0.142 |
| Zeta at pH 7.4 | −1.4 mV | −0.5 mV | −1.4 mV | 2.0 mV | −3.09 mV |
| Encaps. | 95% | 77% | 69% | 80% | 64% |
| (RiboGr) | | | | | |

[1561] Twenty minutes prior to imaging, mice were injected intraperitoneally with a D-luciferin solution at 150 mg/kg. Animals were then anesthetized and images were acquired with an IVIS Lumina II imaging system (Perkin Elmer). Bioluminescence was measured as total flux (photons/second) of the entire mouse. The mice were imaged at 2 hours, 8 hours and 24 hours after dosing and the average total flux (photons/second) was measured for each route of administration and cationic lipid formulation. The background flux was about 4.17E+05 p/s. The results of the imaging are shown in Table 145. In Table 145, “NT” means not tested.

TABLE 145
Flux

| | | | DLin- | DLin- | | | |
|---|---|---|---|---|---|---|---|
| | | | MC3- | KC2- | | | |
| | | | DMA | DMA | C12-200 | DLinDMA | DODMA |
| Route | Time Point | | Flux (p/s) | Flux (p/s) | Flux (p/s) | Flux (p/s) | Flux (p/s) |
| I.V. | 2 | hrs | 1.92E+08 | 2.91E+08 | 1.08E+08 | 2.53E+07 | 8.40E+06 |
| I.V. | 8 | hrs | 1.47E+08 | 2.13E+08 | 3.72E+07 | 3.82E+07 | 5.62E+06 |
| I.V. | 24 | hrs | 1.32E+07 | 2.41E+07 | 5.35E+06 | 4.20E+06 | 8.97E+05 |
| I.M. | 2 | hrs | 8.29E+06 | 2.37E+07 | 1.80E+07 | 1.51E+06 | NT |
| I.M. | 8 | hrs | 5.83E+07 | 2.12E+08 | 2.60E+07 | 1.99E+07 | NT |
| I.M. | 24 | hrs | 4.30E+06 | 2.64E+07 | 3.01E+06 | 9.46E+05 | NT |
| S.C. | 2 | hrs | 1.90E+07 | 5.16E+07 | 8.91E+07 | 4.66E+06 | 9.61E+06 |
| S.C. | 8 | hrs | 7.74E+07 | 2.00E+08 | 4.58E+07 | 9.67E+07 | 1.90E+07 |
| S.C. | 24 | hrs | 7.49E+07 | 2.47E+07 | 6.96E+06 | 6.50E+06 | 1.28E+06 |

### Example 97. Lipid Nanoparticle Intravenous Study

[1562] Luciferase mRNA (mRNA sequence shown in SEQ ID NO: 31917; polyA tail of approximately 160 nucleotides not shown in sequence; 5′cap, Cap1; fully modified with 5-methylcytosine and pseudouridine) was formulated in a lipid nanoparticle containing 50% DLin-MC3-DMA OR DLin-KC2-DMA as described in Table 146, 38.5% cholesterol, 10% DSPC and 1.5% PEG. The formulation was administered intravenously (I.V.) to Balb-C mice at a dose of 0.5 mg/kg, 0.05 mg/kg, 0.005 mg/kg or 0.0005 mg/kg. Twenty minutes prior to imaging, mice were injected intraperitoneally with a D-luciferin solution at 150 mg/kg. Animals were then anesthetized and images were acquired with an IVIS Lumina II imaging system (Perkin Elmer). Bioluminescence was measured as total flux (photons/second) of the entire mouse.

TABLE 146
Formulations

| Formulation | NPA-098-1 | NPA-100-1 |
|---|---|---|
| Lipid | DLin-KC2-DMA | DLin-MC3-DMA |
| Lipid/mRNA ratio (wt/wt) | 20:1 | 20:1 |
| Mean Size | 135 nm | 152 nm |
| | PDI: 0.08 | PDI: 0.08 |
| Zeta at pH 7.4 | −0.6 mV | −1.2 mV |
| Encaps. (RiboGr) | 91% | 94% |

[1563] For DLin-KC2-DMA the mice were imaged at 2 hours, 8 hours, 24 hours, 72 hours, 96 hours and 168 hours after dosing and the average total flux (photons/second) was measured for each route of administration and cationic lipid formulation. The background flux was about 3.66E+05 p/s. The results of the imaging are shown in Table 147. Organs were imaged at 8 hours and the average total flux (photons/second) was measured for the liver, spleen, lung and kidney. A control for each organ was also analyzed. The results are shown in Table 149. The peak signal for all dose levels was at 8 hours after administration. Also, distribution to the various organs (liver, spleen, lung, and kidney) may be able to be controlled by increasing or decreasing the LNP dose.

TABLE 147
Flux

| | | 0.5 mg/kg | 0.05 mg/kg | 0.005 mg/kg | 0.0005 mg/kg |
|---|---|---|---|---|---|
| Time Point | | Flux (p/s) | Flux (p/s) | Flux (p/s) | Flux (p/s) |
| 2 | hrs | 3.54E+08 | 1.75E+07 | 2.30E+06 | 4.09E+05 |
| 8 | hrs | 1.67E+09 | 1.71E+08 | 9.81E+06 | 7.84E+05 |
| 24 | hrs | 2.05E+08 | 2.67E+07 | 2.49E+06 | 5.51E+05 |
| 72 | hrs | 8.17E+07 | 1.43E+07 | 1.01E+06 | 3.75E+05 |
| 96 | hrs | 4.10E+07 | 9.15E+06 | 9.58E+05 | 4.29E+05 |
| 168 | hrs | 3.42E+07 | 9.15E+06 | 1.47E+06 | 5.29E+05 |

TABLE 148
Organ Flux

| | | Liver | Spleen | Lung | Kidney |
|---|---|---|---|---|---|
| | | Flux (p/s) | Flux (p/s) | Flux (p/s) | Flux (p/s) |
| 0.5 | mg/kg | 1.42E+08 | 4.86E+07 | 1.90E+05 | 3.20E+05 |
| 0.05 | mg/kg | 7.45E+06 | 4.62E+05 | 6.86E+04 | 9.11E+04 |
| 0.005 | mg/kg | 3.32E+05 | 2.97E+04 | 1.42E+04 | 1.15E+04 |
| 0.0005 | mg/kg | 2.34E+04 | 1.08E+04 | 1.87E+04 | 9.78E+03 |

| | | | | |
|---|---|---|---|---|
| Untreated | 1.88E+04 | 1.02E+04 | 1.41E+04 | 9.20E+03 |

[1564] For DLin-MC3-DMA the mice were imaged at 2 hours, 8 hours, 24 hours, 48 hours, 72 hours and 144 hours after dosing and the average total flux (photons/second) was measured for each route of administration and cationic lipid formulation. The background flux was about 4.51E+05 p/s. The results of the imaging are shown in Table 149. Organs were imaged at 8 hours and the average total flux (photons/second) was measured for the liver, spleen, lung and kidney. A control for each organ was also analyzed. The results are shown in Table 150. The peak signal for all dose levels was at 8 hours after administration. Also, distribution to the various organs (liver, spleen, lung, and kidney) may be able to be controlled by increasing or decreasing the LNP dose.

TABLE 149
Flux

| | | 0.5 mg/kg | 0.05 mg/kg | 0.005 mg/kg | 0.0005 mg/kg |
|---|---|---|---|---|---|
| Time Point | | Flux (p/s) | Flux (p/s) | Flux (p/s) | Flux (p/s) |
| 2 | hrs | 1.23E+08 | 7.76E+06 | 7.66E+05 | 4.88E+05 |
| 8 | hrs | 1.05E+09 | 6.79E+07 | 2.75E+06 | 5.61E+05 |
| 24 | hrs | 4.44E+07 | 1.00E+07 | 1.06E+06 | 5.71E+05 |
| 48 | hrs | 2.12E+07 | 4.27E+06 | 7.42E+05 | 4.84E+05 |
| 72 | hrs | 1.34E+07 | 5.84E+06 | 6.90E+05 | 4.38E+05 |
| 144 | hrs | 4.26E+06 | 2.25E+06 | 4.58E+05 | 3.99E+05 |

TABLE 150
Organ Flux

| | | Liver | Spleen | Lung | Kidney |
|---|---|---|---|---|---|
| | | Flux (p/s) | Flux (p/s) | Flux (p/s) | Flux (p/s) |
| 0.5 | mg/kg | 1.19E+08 | 9.66E+07 | 1.19E+06 | 1.85E+05 |
| 0.05 | mg/kg | 1.10E+07 | 1.79E+06 | 7.23E+04 | 5.82E+04 |
| 0.005 | mg/kg | 3.58E+05 | 6.04E+04 | 1.33E+04 | 1.33E+04 |
| 0.0005 | mg/kg | 2.25E+04 | 1.88E+04 | 2.05E+04 | 1.65E+04 |

| | | | | |
|---|---|---|---|---|
| Untreated | 1.91E+04 | 1.66E+04 | 2.63E+04 | 2.14E+04 |

### Example 98. Lipid Nanoparticle Subcutaneous Study

[1565] Luciferase mRNA (mRNA sequence shown in SEQ ID NO: 31917; polyA tail of approximately 160 nucleotides not shown in sequence; 5′cap, Cap1; fully modified with 5-methylcytosine and pseudouridine) was formulated in a lipid nanoparticle containing 50% DLin-KC2-DMA as described in Table 151, 385% cholesterol, 10% DSPC and 1.5% PEG. The formulation was administered subcutaneously (S.C.) to Balb-C mice at a dose of 0.5 mg/kg, 0.05 mg/kg or 0.005 mg/kg.

TABLE 151
DLin-KC2-DMA Formulation

| Formulation | NPA-098-1 |
|---|---|
| Lipid | DLin-KC2-DMA |
| Lipid/mRNA ratio (wt/wt) | 20:1 |
| Mean Size | 135 nm |
| | PDI: 0.08 |
| Zeta at pH 7.4 | −0.6 mV |
| Encaps. (RiboGr) | 91% |

[1566] Twenty minutes prior to imaging, mice were injected intraperitoneally with a D-luciferin solution at 150 mg/kg. Animals were then anesthetized and images were acquired with an IVIS Lumina II imaging system (Perkin Elmer). Bioluminescence was measured as total flux (photons/second) of the entire mouse. The mice were imaged at 2 hours, 8 hours, 24 hours, 48 hours, 72 hours and 144 hours after dosing and the average total flux (photons/second) was measured for each route of administration and cationic lipid formulation. The lower limit of detection was about 3E+05 p/s. The results of the imaging are shown in Table 152. Organs were imaged at 8 hours and the average total flux (photons/second) was measured for the liver, spleen, lung and kidney. A control for each organ was also analyzed. The results are shown in Table 153. The peak signal for all dose levels was at 8 hours after administration. Also, distribution to the various organs (liver, spleen, lung, and kidney) may be able to be controlled by increasing or decreasing the LNP dose. At high doses, the LNP formulations migrates outside of the subcutaneous injection site, as high levels of luciferase expression are detected in the liver, spleen, lung, and kidney.

TABLE 152
Flux

| | 0.5 mg/kg | 0.05 mg/kg | 0.005 mg/kg |
|---|---|---|---|
| Time Point | Flux (p/s) | Flux (p/s) | Flux (p/s) |

| | | | | |
|---|---|---|---|---|
| 2 | hrs | 3.18E+07 | 7.46E+06 | 8.94E+05 |
| 8 | hrs | 5.15E+08 | 2.18E+08 | 1.34E+07 |
| 24 | hrs | 1.56E+08 | 5.30E+07 | 7.16E+06 |
| 48 | hrs | 5.22E+07 | 8.75E+06 | 9.06E+05 |
| 72 | hrs | 8.87E+06 | 1.50E+06 | 2.98E+05 |
| 144 | hrs | 4.55E+05 | 3.51E+05 | 2.87E+05 |

TABLE 153
Organ Flux

| | | Liver | Spleen | Lung | Kidney |
|---|---|---|---|---|---|
| | | Flux (p/s) | Flux (p/s) | Flux (p/s) | Flux (p/s) |
| 0.5 | mg/kg | 1.01E+07 | 7.43E+05 | 9.75E+04 | 1.75E+05 |
| 0.05 | mg/kg | 1.61E+05 | 3.94E+04 | 4.04E+04 | 3.29E+04 |
| 0.005 | mg/kg | 2.84E+04 | 2.94E+04 | 2.42E+04 | 9.79E+04 |

| | | | | |
|---|---|---|---|---|
| Untreated | 1.88E+04 | 1.02E+04 | 1.41E+04 | 9.20E+03 |

### Example 99. Cationic Lipid Nanoparticle Subcutaneous Study

[1567] Luciferase mRNA (mRNA sequence shown in SEQ ID NO: 31917; polyA tail of approximately 160 nucleotides not shown in sequence; 5′cap, Cap1; fully modified with 5-methylcytosine and pseudouridine) is formulated in a lipid nanoparticle containing 50% DLin-MC3-DMA, 38.5% cholesterol, 10% DSPC and 1.5% PEG. The formulation is administered subcutaneously (S.C.) to Balb-C mice at a dose of 0.5 mg/kg, 0.05 mg/kg or 0.005 mg/kg.

[1568] The mice are imaged at 2 hours, 8 hours, 24 hours, 48 hours, 72 hours and 144 hours after dosing and the average total flux (photons/second) was measured for each route of administration and cationic lipid formulation. Organs are imaged at 8 hours and the average total flux (photons/second) is measured for the liver, spleen, lung and kidney. A control for each organ is also analyzed.

### Example 100. Luciferase Lipoplex Study

[1569] Lipoplexed luciferase mRNA (mRNA sequence shown in SEQ ID NO: 31917; polyA tail of approximately 140 nucleotides not shown in sequence; 5′cap, Cap1) fully modified with 5-methylcytosine and pseudouridine (5 mC/pU), fully modified with 5-methylcytosine and N1-methyl-pseudouridine (5 mC/N1 mpU) or modified where 25% of the cytosines replaced with 5-methylcytosine and 25% of the uridines replaced with 2-thiouridine (5 mC/s2U). The formulation was administered intravenously (I.V.), intramuscularly (I.M.) or subcutaneously (S.C.) to Balb-C mice at a dose of 0.10 mg/kg.

[1570] Twenty minutes prior to imaging, mice were injected intraperitoneally with a D-luciferin solution at 150 mg/kg. Animals were then anesthetized and images were acquired with an IVIS Lumina II imaging system (Perkin Elmer). Bioluminescence was measured as total flux (photons/second) of the entire mouse. The mice were imaged at 8 hours, 24 hours and 48 hours after dosing and the average total flux (photons/second) was measured for each route of administration and chemical modification. The background signal was about 3.91E+05 p/s. The results of the imaging are shown in Table 154. Organs were imaged at 6 hours and the average total flux (photons/second) was measured for the liver, spleen, lung and kidney. A control for each organ was also analyzed. The results are shown in Table 155.

TABLE 154
Flux

| | | | 5mC/pU | 5mC/N1mpU | 5mC/s2U |
|---|---|---|---|---|---|
| Route | Time Point | | Flux (p/s) | Flux (p/s) | Flux (p/s) |
| I.V. | 8 | hrs | 5.76E+06 | 1.78E+06 | 1.88E+06 |
| I.V. | 24 | hrs | 1.02E+06 | 7.13E+05 | 5.28E+05 |
| I.V. | 48 | hrs | 4.53E+05 | 3.76E+05 | 4.14E+05 |
| I.M. | 8 | hrs | 1.90E+06 | 2.53E+06 | 1.29E+06 |
| I.M. | 24 | hrs | 9.33E+05 | 7.84E+05 | 6.48E+05 |
| I.M. | 48 | hrs | 8.51E+05 | 6.59E+05 | 5.49E+05 |
| S.C. | 8 | hrs | 2.85E+06 | 6.48E+06 | 1.14E+06 |
| S.C. | 24 | hrs | 6.66E+05 | 7.15E+06 | 3.93E+05 |
| S.C. | 48 | hrs | 3.24E+05 | 3.20E+06 | 5.45E+05 |

TABLE 155
Organ Flux

| | | Liver | Spleen | Lung | Kidney | Inj. Site |
|---|---|---|---|---|---|---|
| Route | Chemistry | Flux (p/s) | Flux (p/s) | Flux (p/s) | Flux (p/s) | Flux (p/s) |
| I.V. | 5mC/pU | 5.26E+05 | 2.04E+07 | 4.28E+06 | 1.77E+04 | n/a |
| I.V. | 5mC/N1mpU | 1.48E+05 | 5.00E+06 | 1.93E+06 | 1.77E+04 | n/a |
| I.V. | 5mC/s2U | 2.14E+04 | 3.29E+06 | 5.48E+05 | 2.16E+04 | n/a |
| I.M. | 5mC/pU | 2.46E+04 | 1.38E+04 | 1.50E+04 | 1.44E+04 | 1.15E+06 |
| I.M. | 5mC/N1mpU | 1.72E+04 | 1.76E+04 | 1.99E+04 | 1.56E+04 | 1.20E+06 |
| I.M. | 5mC/s2U | 1.28E+04 | 1.36E+04 | 1.33E+04 | 1.07E+04 | 7.60E+05 |
| S.C. | 5mC/pU | 1.55E+04 | 1.67E+04 | 1.45E+04 | 1.69E+04 | 4.46E+04 |
| S.C. | 5mC/N1mpU | 1.20E+04 | 1.46E+04 | 1.38E+04 | 1.14E+04 | 8.29E+04 |
| S.C. | 5mC/s2U | 1.22E+04 | 1.31E+04 | 1.45E+04 | 1.08E+04 | 5.62E+04 |
| | Untreated | 2.59E+04 | 1.34E+04 | 1.26E+04 | 1.22E+04 | n/a |

### Example 101. Cationic Lipid Formulation of Modified mRNA

[1571] Luciferase mRNA (mRNA sequence shown in SEQ ID NO: 31917; polyA tail of approximately 140 nucleotides not shown in sequence; 5′cap, Cap1) modified where 25% of the cytosines replaced with 5-methylcytosine and 25% of the uridines replaced with 2-thiouridine (5 mC/s2U) was formulated in the cationic lipids described in Table 156. The formulations were administered intravenously (I.V.), intramuscularly (I.M.) or subcutaneously (S.C.) to Balb-C mice at a dose of 0.05 mg/kg.

TABLE 156
Cationic Lipid Formulations

| Formulation | NPA-130-1 | NPA-131-1 | NPA-132-1 | NPA-133-1 | 111612-C |
|---|---|---|---|---|---|
| Lipid | DLin-MC3- | DLin-KC2- | C12-200 | DLinDMA | DODMA |
| | DMA | DMA | | | |
| Lipid/mRNA | 20:1 | 20:1 | 20:1 | 20:1 | 20:1 |
| ratio (wt/wt) | | | | | |
| Mean Size | 120 nm | 105 nm | 122 nm | 105 nm | 221.3 nm |
| | PDI: 0.10 | PDI: 0.11 | PDI: 0.13 | PDI: 0.14 | PDI: 0.063 |
| Zeta at pH 7.4 | 0.2 mV | −0.6 mV | −0.5 mV | −0.3 mV | −3.10 mV |
| Encaps. | 100% | 100% | 93% | 93% | 60% |
| (RiboGr) | | | | | |

[1572] Twenty minutes prior to imaging, mice were injected intraperitoneally with a D-luciferin solution at 150 mg/kg. Animals were then anesthetized and images were acquired with an IVIS Lumina II imaging system (Perkin Elmer). Bioluminescence was measured as total flux (photons/second) of the entire mouse. The mice were imaged at 2 hours, 8 hours and 24 hours after dosing and the average total flux (photons/second) was measured for each route of administration and cationic lipid formulation. The background flux was about 3.31E+05 p/s. The results of the imaging are shown in Table 157. In Table 157, “NT” means not tested. Untreated mice showed an average flux of 3.14E+05 at 2 hours, 3.33E+05 at 8 hours and 3.46E+05 at 24 hours. Peak expression was seen for all three routes tested at 8 hours. DLin-KC2-DMA has better expression than DLin-MC3-DMA and DODMA showed expression for all routes evaluated.

TABLE 157
Flux

| | | | DLin- | DLin- | | | |
|---|---|---|---|---|---|---|---|
| | | | MC3- | KC2- | | | |
| | Time | | DMA | DMA | C12-200 | DLinDMA | DODMA |
| Route | Point | | Flux (p/s) | Flux (p/s) | Flux (p/s) | Flux (p/s) | Flux (p/s) |
| I.V. | 2 | hrs | 9.88E+06 | 6.98E+07 | 9.18E+06 | 3.98E+06 | 5.79E+06 |
| I.V. | 8 | hrs | 1.21E+07 | 1.23E+08 | 1.02E+07 | 5.98E+06 | 6.14E+06 |
| I.V. | 24 | hrs | 2.02E+06 | 1.05E+07 | 1.25E+06 | 1.35E+06 | 5.72E+05 |
| I.M. | 2 | hrs | 6.72E+05 | 3.66E+06 | 3.25E+06 | 7.34E+05 | 4.42E+05 |
| I.M. | 8 | hrs | 7.78E+06 | 2.85E+07 | 4.29E+06 | 2.22E+06 | 1.38E+05 |
| I.M. | 24 | hrs | 4.22E+05 | 8.79E+05 | 5.95E+05 | 8.48E+05 | 4.80E+05 |
| S.C. | 2 | hrs | 2.37E+06 | 4.77E+06 | 4.44E+06 | 1.07E+06 | 1.05E+06 |
| S.C. | 8 | hrs | 3.65E+07 | 1.17E+08 | 3.71E+06 | 9.33E+06 | 2.57E+06 |
| S.C. | 24 | hrs | 4.47E+06 | 1.28E+07 | 6.39E+05 | 8.89E+05 | 4.27E+05 |

### Example 102. Formulation of 5-Methylcytosine and N1-Methyl-pseudouridine Modified mRNA

[1573] Luciferase mRNA (mRNA sequence shown in SEQ ID NO: 31917; polyA tail of approximately 140 nucleotides not shown in sequence; 5′cap, Cap1) fully modified with 5-methylcytosine and N1-methyl-pseudouridine was formulated in PBS (pH of 7.4). The formulations were administered intramuscularly (I.M.) or subcutaneously (S.C.) to Balb-C mice at a dose of 2.5 mg/kg.

[1574] Twenty minutes prior to imaging, mice were injected intraperitoneally with a D-luciferin solution at 150 mg/kg. Animals were then anesthetized and images were acquired with an IVIS Lumina II imaging system (Perkin Elmer). Bioluminescence was measured as total flux (photons/second) of the entire mouse. The mice were imaged at 5 minutes, 30 minutes, 60 minutes and 120 minutes after dosing and the average total flux (photons/second) was measured for each route of administration and cationic lipid formulation. The background flux was about 3.78E+05 p/s. The results of the imaging are shown in Table 158. Expression of luciferase was already seen at 30 minutes with both routes of delivery. Peak expression from subcutaneous administration appears between 30 to 60 minutes. Intramuscular expression was still increasing at 120 minutes.

TABLE 158
Flux

| | | PBS (pH 7.4) |
|---|---|---|
| Route | Time Point | Flux (p/s) |

| | | | |
|---|---|---|---|
| I.M. | 5 | min | 4.38E+05 |
| I.M. | 30 | min | 1.09E+06 |
| I.M. | 60 | min | 1.18E+06 |
| I.M. | 120 | min | 2.86E+06 |
| S.C. | 5 | min | 4.19E+05 |
| S.C. | 30 | min | 6.38E+06 |
| S.C. | 60 | min | 5.61E+06 |
| S.C. | 120 | min | 2.66E+06 |

### Example 103. Intramuscular and Subcutaneous Administration of Chemically Modified mRNA

[1575] Luciferase modified mRNA (mRNA sequence shown in SEQ ID NO: 31917; polyA tail of approximately 140 nucleotides not shown in sequence; 5′cap, Cap1) fully modified with N4-acetylcytidine, fully modified with 5-methoxyuridine, fully modified with N4-acetylcytidine and N1-methyl-pseudouridine or fully modified 5-methylcytosine and 5-methoxyuridine formulated in PBS (pH 7.4) was administered to Balb-C mice intramuscularly or subcutaneously at a dose of 2.5 mg/kg. Twenty minutes prior to imaging, mice were injected intraperitoneally with a D-luciferin solution at 150 mg/kg. Animals were then anesthetized and images were acquired with an IVIS Lumina II imaging system (Perkin Elmer). Bioluminescence was measured as total flux (photons/second) of the entire mouse. The mice were imaged at 2 hours, 8 hours and 24 hours. The average total flux (photons/second) for intramuscular administration is shown in Table 159 and the average total flux (photons/second) for subcutaneous administration is shown in Table 160. The background signal was 3.84E+05 (p/s). The peak expression for intramuscular administration was seen between 24 and 48 hours for all chemistry and expression was still detected at 120 hours. For subcutaneous delivery the peak expression was seen at 2-8 hours and expression was detected at 72 hours.

TABLE 159
Intramuscular Administration

| | 2 hours | 8 hours | 24 hours |
|---|---|---|---|
| | Flux (p/s) | Flux (p/s) | Flux (p/s) |
| N4-acetylcytidine | 1.32E+07 | 2.15E+07 | 4.01E+07 |
| 5-methoxyuridine | 4.93E+06 | 1.80E+07 | 4.53E+07 |
| N4-acetylcytidine/ | 2.02E+07 | 1.93E+07 | 1.63E+08 |
| N1-methyl-pseudouridine | | | |
| 5-methylcytosine/5- | 6.79E+06 | 4.55E+07 | 3.44E+07 |
| methoxyuridine | | | |

TABLE 160
Subcutaneous Administration

| | 2 hours | 8 hours | 24 hours |
|---|---|---|---|
| | Flux (p/s) | Flux (p/s) | Flux (p/s) |
| N4-acetylcytidine | 3.07E+07 | 1.23E+07 | 1.28E+07 |
| 5-methoxyuridine | 7.10E+06 | 9.38E+06 | 1.32E+07 |
| N4-acetylcytidine/ | 7.12E+06 | 3.07E+06 | 1.03E+07 |
| N1-methyl-pseudouridine | | | |
| 5-methylcytosine/5- | 7.15E+06 | 1.25E+07 | 1.11E+07 |
| methoxyuridine | | | |

### Example 104. In Vivo Study

[1576] Luciferase modified mRNA containing at least one chemical modification is formulated as a lipid nanoparticle (LNP) using the syringe pump method and characterized by particle size, zeta potential, and encapsulation.

[1577] As outlined in Table 161, the luciferase LNP formulation is administered to Balb-C mice intramuscularly (I.M.), intravenously (I.V.) and subcutaneously (S.C.). As a control luciferase modified RNA formulated in PBS is administered intravenously to mice.

TABLE 161
Luciferase Formulations

| | | | | Injection | Amount of | |
|---|---|---|---|---|---|---|
| | | | Concentration | Volume | modified | Dose |
| Formulation | Vehicle | Route | (mg/ml) | (ul) | RNA (ug) | (mg/kg) |
| Luc-LNP | PBS | S.C. | 0.2000 | 50 | 10 | 0.5000 |
| Luc-LNP | PBS | S.C. | 0.0200 | 50 | 1 | 0.0500 |
| Luc-LNP | PBS | S.C. | 0.0020 | 50 | 0.1 | 0.0050 |
| Luc-LNP | PBS | S.C. | 0.0002 | 50 | 0.01 | 0.0005 |
| Luc-LNP | PBS | I.V. | 0.2000 | 50 | 10 | 0.5000 |
| Luc-LNP | PBS | I.V. | 0.0200 | 50 | 1 | 0.0500 |
| Luc-LNP | PBS | I.V. | 0.0020 | 50 | 0.1 | 0.0050 |
| Luc-LNP | PBS | I.V. | 0.0002 | 50 | 0.01 | 0.0005 |
| Luc-LNP | PBS | I.M. | 0.2000 | 50 | 10 | 0.5000 |
| Luc-LNP | PBS | I.M. | 0.0200 | 50 | 1 | 0.0500 |
| Luc-LNP | PBS | I.M. | 0.0020 | 50 | 0.1 | 0.0050 |
| Luc-LNP | PBS | I.M. | 0.0002 | 50 | 0.01 | 0.0005 |
| Luc-PBS | PBS | I.V. | 0.20 | 50 | 10 | 0.50 |

[1578] The mice are imaged at 2, 8, 24, 48, 120 and 192 hours to determine the bioluminescence (measured as total flux (photons/second) of the entire mouse). At 8 hours or 192 hours the liver, spleen, kidney and injection site for subcutaneous and intramuscular administration are imaged to determine the bioluminescence.

### Example 105. Cationic Lipid Formulation Studies of Chemically Modified mRNA

[1579] Luciferase mRNA (mRNA sequence shown in SEQ ID NO: 31917; polyA tail of approximately 140 nucleotides not shown in sequence; 5′cap, Cap1) fully modified with 5-methylcytosine and pseudouridine (5 mC/pU), pseudouridine (pU) or N1-methyl-pseudouridine (N1 mpU) was formulated in the cationic lipids described in Table 162. The formulations were administered intravenously (I.V.), intramuscularly (I.M.) or subcutaneously (S.C.) to Balb-C mice at a dose of 0.05 mg/kg.

TABLE 162
Cationic Lipid Formulations

| Formulation | NPA-137-1 | NPA-134-1 | NPA-135-1 | NPA-136-1 | 111612-A |
|---|---|---|---|---|---|
| Lipid | DLin-MC3- | DLin-MC3- | DLin-KC2- | C12-200 | DODMA |
| | DMA | DMA | DMA | | |
| Lipid/mRNA | 20:1 | 20:1 | 20:1 | 20:1 | 20:1 |
| ratio (wt/wt) | | | | | |
| Mean Size | 111 nm | 104 nm | 95 nm | 143 nm | 223.2 nm |
| | PDI: 0.15 | PDI: 0.13 | PDI: 0.11 | PDI: 0.12 | PDI: 0.142 |
| Zeta at pH 7.4 | −4.1 mV | −1.9 mV | −1.0 mV | 0.2 mV | −3.09 mV |
| Encaps. | 97% | 100% | 100% | 78% | 64% |
| (RiboGr) | | | | | |
| Chemistry | pU | N1mpU | N1mpU | N1mpU | 5mC/pU |

[1580] Twenty minutes prior to imaging, mice were injected intraperitoneally with a D-luciferin solution at 150 mg/kg. Animals were then anesthetized and images were acquired with an IVIS Lumina II imaging system (Perkin Elmer). Bioluminescence was measured as total flux (photons/second) of the entire mouse. The mice were imaged at 2 hours, 8 hours and 24 hours after dosing and the average total flux (photons/second) was measured for each route of administration and cationic lipid formulation. The background flux was about 4.11E+05 p/s. The results of the imaging are shown in Table 163. Peak expression was seen for all three routes tested at 8 hours.

TABLE 163
Flux

| | | | DLin- | DLin- | DLin- | | |
|---|---|---|---|---|---|---|---|
| | | | MC3- | MC3- | KC2- | | |
| | | | DMA | DMA | DMA | C12-200 | DODMA |
| | Time | | (pU) | (N1mpU) | (N1mpU) | (N1mpU) | (5mC/pU) |
| Route | Point | | Flux (p/s) | Flux (p/s) | Flux (p/s) | Flux (p/s) | Flux (p/s) |
| I.V. | 2 | hrs | 3.21E+08 | 1.24E+09 | 1.01E+09 | 9.00E+08 | 3.90E+07 |
| I.V. | 8 | hrs | 1.60E+09 | 3.22E+09 | 2.38E+09 | 1.11E+09 | 1.17E+07 |
| I.V. | 24 | hrs | 1.41E+08 | 3.68E+08 | 3.93E+08 | 8.06E+07 | 1.11E+07 |
| I.M. | 2 | hrs | 2.09E+07 | 3.29E+07 | 8.32E+07 | 9.43E+07 | 4.66E+06 |
| I.M. | 8 | hrs | 2.16E+08 | 6.14E+08 | 1.00E+09 | 8.77E+07 | 7.05E+06 |
| I.M. | 24 | hrs | 1.23E+07 | 1.40E+08 | 5.09E+08 | 1.36E+07 | 1.14E+06 |
| S.C. | 2 | hrs | 2.32E+07 | 3.60E+07 | 2.14E+08 | 1.01E+08 | 3.11E+07 |
| S.C. | 8 | hrs | 5.55E+08 | 9.80E+08 | 4.93E+09 | 1.01E+09 | 8.04E+07 |
| S.C. | 24 | hrs | 1.81E+08 | 2.74E+08 | 2.12E+09 | 4.74E+07 | 1.34E+07 |

### Example 106. Studies of Chemical Modified mRNA

[1581] Luciferase mRNA (mRNA sequence shown in SEQ ID NO: 31917; polyA tail of approximately 140 nucleotides not shown in sequence; 5′cap, Cap1) fully modified with N4-acetylcytidine (N4-acetyl), fully modified with 5-methoxyuridine (5meth), fully modified with N4-acetylcytidine and N1-methyl-pseudouridine (N4-acetyl/N1 mpU) or fully modified with 5-methylcytosine and 5-methoxyuridine (5 mC/5-meth) was formulated in DLin-MC3-DMA as described in Table 164.

[1582] The formulations were administered intravenously (I.V.), intramuscularly (I.M.) or subcutaneously (S.C.) to Balb-C mice at a dose of 0.05 mg/kg.

TABLE 164
Cationic Lipid Formulations

| Formulation | NPA-141-1 | NPA-142-1 | NPA-143-1 | NPA-144-1 |
|---|---|---|---|---|
| Lipid | DLin-MC3- | DLin-MC3- | DLin-MC3- | DLin-MC3- |
| | DMA | DMA | DMA | DMA |
| Lipid/mRNA | 20:1 | 20:1 | 20:1 | 20:1 |
| ratio (wt/wt) | | | | |
| Mean Size | 138 nm | 116 nm | 144 nm | 131 nm |
| | PDI: 0.16 | PDI: 0.15 | PDI: 0.15 | PDI: 0.15 |
| Zeta at pH 7.4 | −2.8 mV | −2.8 mV | −4.3 mV | −5.0 mV |
| Encaps. | 97% | 100% | 75% | 72% |
| (RiboGr) | | | | |
| Chemistry | N4-acetyl | 5meth | N4-acetyl/ | 5mC/5-meth |
| | | | N1mpU | |

[1583] Twenty minutes prior to imaging, mice were injected intraperitoneally with a D-luciferin solution at 150 mg/kg. Animals were then anesthetized and images were acquired with an IVIS Lumina II imaging system (Perkin Elmer). Bioluminescence was measured as total flux (photons/second) of the entire mouse. The mice were imaged at 2 hours, 6 hours and 24 hours after dosing and the average total flux (photons/second) was measured for each route of administration and cationic lipid formulation. The background flux was about 2.70E+05 p/s. The results of the imaging are shown in Table 165.

TABLE 165
Flux

| | | | | | N4-acetyl/ | 5mC/5- |
|---|---|---|---|---|---|---|
| | | | N4-acetyl | 5meth | N1mpU | meth |
| Route | Time Point | | Flux (p/s) | Flux (p/s) | Flux (p/s) | Flux (p/s) |
| I.V. | 2 | hrs | 9.17E+07 | 3.19E+06 | 4.21E+07 | 1.88E+06 |
| I.V. | 6 | hrs | 7.70E+08 | 9.28E+06 | 2.34E+08 | 7.75E+06 |
| I.V. | 24 | hrs | 6.84E+07 | 1.04E+06 | 3.55E+07 | 3.21E+06 |
| I.M. | 2 | hrs | 8.59E+06 | 7.86E+05 | 5.30E+06 | 5.11E+05 |
| I.M. | 6 | hrs | 1.27E+08 | 8.88E+06 | 3.82E+07 | 3.17E+06 |
| I.M. | 24 | hrs | 4.46E+07 | 1.38E+06 | 2.00E+07 | 1.39E+06 |
| S.C. | 2 | hrs | 1.83E+07 | 9.67E+05 | 4.45E+06 | 1.01E+06 |
| S.C. | 6 | hrs | 2.89E+08 | 1.78E+07 | 8.91E+07 | 1.29E+07 |
| S.C. | 24 | hrs | 6.09E+07 | 6.40E+06 | 2.08E+08 | 6.63E+06 |

### Example 107. Lipid Nanoparticle Containing a Plurality of Modified mRNAs

[1584] EPO mRNA (mRNA sequence shown in SEQ ID NO: 31910; polyA tail of approximately 140 nucleotides not shown in sequence; 5′cap, Cap1; fully modified with 5-methylcytosine and N1-methyl-pseudouridine), G-CSF mRNA (mRNA sequence shown in SEQ ID NO: 31907; polyA tail of approximately 140 nucleotides not shown in sequence; 5′cap, Cap1; fully modified with 5-methylcytosine and N1-methyl-pseudouridine) and Factor IX mRNA (mRNA sequence shown in SEQ ID NO: 31911; polyA tail of approximately 140 nucleotides not shown in sequence; 5′cap, Cap1; fully modified with 5-methylcytosine and N1-methyl-pseudouridine), is formulated in DLin-MC3-DMA as described in Table 166. The formulations are administered intravenously (I.V.), intramuscularly (I.M.) or subcutaneously (S.C.) to Balb-C mice at a dose of 0.05 mg/kg. Control LNP formulations containing only one mRNA are also administered at an equivalent dose.

TABLE 166
DLin-MC3-DMA Formulation

| Formulation | NPA-157-1 |
|---|---|
| Lipid | DLin-MC3-DMA |
| Lipid/mRNA | 20:1 |
| ratio (wt/wt) | |
| Mean Size | 89 nm |
| | PDI: 0.08 |
| Zeta at pH 7.4 | 1.1 mV |
| Encaps. | 97% |
| (RiboGr) | |

[1585] Serum is collected from the mice at 8 hours, 24 hours, 72 hours and/or 7 days after administration of the formulation. The serum is analyzed by ELISA to determine the protein expression of EPO, G-CSF, and Factor IX.

### Example 108. Cationic Lipid Formulation Studies of 5-Methylcytosine and N1-Methyl-Pseudouridine Modified mRNA

[1586] EPO mRNA (mRNA sequence shown in SEQ ID NO: 31910; polyA tail of approximately 140 nucleotides not shown in sequence; 5′cap, Cap1; fully modified with 5-methylcytosine and N1-methyl-pseudouridine) or G-CSF mRNA (mRNA sequence shown in SEQ ID NO: 31907; polyA tail of approximately 140 nucleotides not shown in sequence; 5′cap, Cap1; fully modified with 5-methylcytosine and N1-methyl-pseudouridine) is formulated in DLin-MC3-DMA and DLin-KC2-DMA as described in Table 167. The formulations are administered intravenously (IV), intramuscularly (I.M.) or subcutaneously (S.C.) to Balb-C mice at a dose of 0.05 mg/kg.

TABLE 167
DLin-MC3-DMA and DLin-KC2-DMA Formulations

| Formulation | NPA-147-1 | NPA-148-1 | NPA-150-1 | NPA-151-1 |
|---|---|---|---|---|
| mRNA | EPO | EPO | G-CSF | G-CSF |
| Lipid | DLin-MC3- | DLin-KC2- | DLin-MC3- | DLin-KC2- |
| | DMA | DMA | DMA | DMA |
| Lipid/mRNA | 20:1 | 20:1 | 20:1 | 20:1 |
| ratio (wt/wt) | | | | |
| Mean Size | 117 nm | 82 nm | 119 nm | 88 nm |
| | PDI: 0.14 | PDI: 0.08 | PDI: 0.13 | PDI: 0.08 |
| Zeta at pH 7.4 | −1.7 mV | 0.6 mV | 3.6 mV | 2.2 mV |
| Encaps. | 100% | 96% | 100% | 100% |
| (RiboGr) | | | | |

[1587] Serum is collected from the mice at 8 hours, 24 hours, 72 hours and/or 7 days after administration of the formulation. The serum is analyzed by ELISA to determine the protein expression of EPO and G-CSF.

### Example 109. In Vitro VEGF PBMC Study

[1588] 500 ng of VEGF mRNA (mRNA sequence shown in SEQ ID NO: 31920 polyA tail of approximately 160 nucleotides not shown in sequence; 5′cap, Cap1) fully modified with 5-methylcytosine and pseudouridine (VEGF 5 mC/pU), fully modified with 5-methylcytosine and N1-methyl-pseudouridine (VEGF 5 mC/N1 mpU) or unmodified (VEGF unmod) was transfected with 0.4 uL of Lipofectamine 2000 into peripheral blood mononuclear cells (PBMC) from three normal blood donors (D1, D2, and D3). Cells were also untreated for each donor as a control. The supernatant was harvested and run by ELISA 22 hours after transfection to determine the protein expression and cytokine induction. The expression of VEGF and IFN-alpha induction is shown in Table 168 and FIGS. 8A and 8B.

TABLE 168
Protein and Cytokine levels

| | VEGF Expression | | | IFN-alpha Induction | | |
|---|---|---|---|---|---|---|
| | (pg/ml) | | | (pg/ml) | | |
| | D1 | D2 | D3 | D1 | D2 | D3 |
| VEGF unmod | 2 | 0 | 0 | 5400 | 3537 | 4946 |
| VEGF 5mC/pU | 424 | 871 | 429 | 145 | 294 | 106 |
| VEGF 5mC/N1mpU | 5088 | 10331 | 6183 | 205 | 165 | 6 |

### Example 110. In Vitro Expression of Modified mRNA

[1589] HEK293 cells were transfected EPO modified mRNA (mRNA sequence shown in SEQ ID NO:31910; polyA tail of approximately 160 nucleotides not shown in sequence; 5′cap, Cap1; fully modified with 5-methylcytosine and pseudouridine), HeLa cells were forward transfected with Transforming growth factor beta (TGF-beta) modified mRNA (mRNA sequence shown in SEQ ID NO: 31921; poly A tail of approximately 160 nucleotides not shown in sequence; 5′cap, Cap1; fully modified with 5-methylcytosine and pseudouridine) and HepG2 cells were transfected with bactericidal/permeability-increasing protein (rBPI-21) modified mRNA (mRNA sequence shown in SEQ ID NO: 31922; poly A tail of approximately 160 nucleotides not shown in sequence; 5′cap, Cap1; fully modified with 5-methylcytosine and pseudouridine) which had been complexed with Lipofectamine2000 from Invitrogen (Carlsbad, CA) at the concentrations shown in Table 169, 170 and 171 using the procedures described herein. The protein expression was detected by ELISA and the protein (pg/ml) is also shown in Table 169, 170 and 171. In Table 169, “>” means greater than. For TGF-beta a control of untreated cells and a mock transfection of Lipofectamine2000 was also tested.

TABLE 169
EPO Protein Expression

| | Amount Transfected | | | | | | | |
|---|---|---|---|---|---|---|---|---|
| | 5 ng | 1 ng | 200 pg | 40 pg | 8 pg | 1.6 pg | 320 fg | 64 fg |
| Protein | >2000 | 609.486 | 114.676 | 0 | 0 | 0 | 0 | 0 |
| (pg/ml) | | | | | | | | |

TABLE 170
TGF-beta Protein Expression

| | Amount Transfected | | | | |
|---|---|---|---|---|---|
| | 750 ng | 250 ng | 83 ng | Mock | Untreated |
| Protein | 5058 | 4325 | 3210 | 2 | 0 |
| (pg/ml) | | | | | |

TABLE 171
rBPI-21 Protein Expression

| | Amount Transfected | | | | | | | |
|---|---|---|---|---|---|---|---|---|
| | 2 ug | 400 ng | 80 ng | 16 ng | 3.2 ng | 640 pg | 128 pg | 26 pg |
| Protein | 20.683 | 9.269 | 4.768 | 0 | 0 | 0 | 0 | 0 |
| (pg/ml) | | | | | | | | |

### Example 111. Bicistronic Modified mRNA

[1590] Human embryonic kidney epithelial (HEK293) were seeded on 96-well plates (Greiner Bio-one GmbH, Frickenhausen, Germany) HEK293 were seeded at a density of 30,000 in 100 μl cell culture medium (DMEM, 10% FCS, adding 2 mM L-Glutamine, 1 mM Sodiumpyruvate and 1× non-essential amino acids (Biochrom AG, Berlin, Germany) and 1.2 mg/ml Sodiumbicarbonate (Sigma-Aldrich, Munich, Germany)) 75 ng of the bi-cistronic modified mRNA (mCherry-2A-GFP) (SEQ ID NO: 31923; polyA tail of approximately 160 nucleotides not shown in sequence; 5′cap, Cap1; fully modified with 5-methylcytosine and pseudouridine), mCherry modified mRNA (mRNA SEQ ID NO: 31908; polyA tail of approximately 160 nucleotides not shown in sequence; 5′cap, Cap1; fully modified with 5-methylcytosine and pseudouridine) or green fluorescent protein (GFP) modified mRNA (mRNA sequence shown in SEQ ID NO: 31919; polyA tail of approximately 160 nucleotides not shown in sequence; 5′cap, Cap1; fully modified with 5-methylcytosine and pseudouridine) were added after seeding the cells and incubated. A control of untreated cells was also evaluated. mCherry-2A-GFP refers to a modified mRNA sequence comprising the coding region of mCherry, the 2A peptide and the coding region of GFP.

[1591] Cells were harvested by transferring the culture media supernatants to a 96-well Pro-Bind U-bottom plate (Beckton Dickinson GmbH, Heidelberg, Germany). Cells were trypsinized with 1/2 volume Trypsin/EDTA (Biochrom AG, Berlin, Germany), pooled with respective supernatants and fixed by adding one volume PBS/2% FCS (both Biochrom AG, Berlin, Germany)/0.5% formaldehyde (Merck, Darmstadt, Germany). Samples then were submitted to a flow cytometer measurement with a 532 nm excitation laser and the 610/20 filter for PE-Texas Red in a LSRII cytometer (Beckton Dickinson GmbH, Heidelberg, Germany). The mean fluorescence intensity (MFI) of all events is shown in Table 172. Cells transfected with the bi-cistronic modified mRNA were able to express both mCherry and GFP.

TABLE 172
MFI of Modified mRNA

| Modified mRNA | mCherry MFI | GFP MFI |
|---|---|---|
| mCherry | 17746 | 427 |
| GFP | 427 | 20019 |
| mCherry-2A-GFP | 5742 | 6783 |
| Untreated | 427 | 219 |

### Example 112. Cationic Lipid Formulation Studies of 5-Methylcytosine and N1-Methyl-Pseudouridine Modified mRNA to Produce an Antibody

[1592] Herceptin heavy chain (HC) mRNA (mRNA sequence shown in SEQ ID NO: 31924; polyA tail of approximately 140 nucleotides not shown in sequence; 5′cap, Cap1; fully modified with 5-methylcytosine and N1-methyl-pseudouridine) and Herceptin light chain (LC) modified mRNA (mRNA sequence shown in SEQ ID NO: 31925; polyA tail of approximately 140 nucleotides not shown in sequence; 5′cap, Cap1; fully modified with 5-methylcytosine and N1-methyl-pseudouridine) are formulated in DLin-MC3-DMA and DLin-KC2-DMA as described in Table 173. The formulations are administered intravenously (IV) to Balb-C mice at a dose of 0.500, 0.050, and 0.005 mg/kg.

TABLE 173
DLin-MC3-DMA and DLin-KC2-DMA Formulations

| Formulation | NPA-158-1 | NPA-159-1 |
|---|---|---|
| Herceptin HC:LC | 2:1 | 2:1 |
| Ratio (wt/wt) | | |
| Lipid | DLin-MC3- | DLin-KC2- |
| | DMA | DMA |
| Lipid/Total mRNA | 20:1 | 20:1 |
| ratio (wt/wt) | | |
| Mean Size | 129 mm | 100 mm |
| | PDI: 0.14 | PDI: 0.10 |
| Zeta at pH 7.4 | 0.9 mV | 1.9 mV |
| Encaps. (RiboGr) | 100% | 100% |

[1593] Serum was collected from the mice at 8 hours, 24 hours, 72 hours and/or 7 days after administration of the formulation. The serum was analyzed by ELISA to determine the protein expression of Herceptin.

### Example 113. Directed SAR of Pseudouridine and N1-Methyl-Pseudouridine

[1594] With the recent focus on the pyrimidine nucleoside pseudouridine, a series of structure-activity studies were designed to investigate mRNA containing modifications to pseudouridine or N1-methyl-pseudourdine.

[1595] The study was designed to explore the effect of chain length, increased lipophilicity, presence of ring structures, and alteration of hydrophobic or hydrophilic interactions when modifications were made at the N1 position, C6 position, the 2-position, the 4-position and on the phosphate backbone. Stability is also investigated.

[1596] To this end, modifications involving alkylation, cycloalkylation, alkyl-cycloalkylation, arylation, alkyl-arylation, alkylation moieties with amino groups, alkylation moieties with carboxylic acid groups, and alkylation moieties containing amino acid charged moieties are investigated. The degree of alkylation is generally C₁-C₆. Examples of the chemistry modifications include those listed in Table 174 and Table 175.

TABLE 174
Pseudouridine and N1-methylPseudouridine SAR

| | Compound | Naturally |
|---|---|---|
| Chemistry Modification | # | occuring |
| N1-Modifications | | |
| N1-Ethyl-pseudo-UTP | 1 | N |
| N1-Propyl-pseudo-UTP | 2 | N |
| N1-iso-propyl-pseudo-UTP | 3 | N |
| N1-(2,2,2-Trifluoroethyl)-pseudo- | 4 | N |
| UTP | | |
| N1-Cyclopropyl-pseudo-UTP | 5 | N |
| Nl-Cyclopropylmethyl-pseudo- | 6 | N |
| UTP | | |
| N1-Phenyl-pseudo-UTP | 7 | N |
| N1-Benzyl-pseudo-UTP | 8 | N |
| N1-Aminomethyl-pseudo-UTP | 9 | N |
| P seudo-UTP-N1-2-ethanoic acid | 10 | N |
| N1-(3-Amino-3- | 11 | N |
| carboxypropyl)pseudo-UTP | | |
| N1-Methyl-3-(3-amino-3- | 12 | Y |
| carboxypropyl)pseudo-UTP | | |
| C-6 Modifications | | |
| 6-Methyl-pseudo-UTP | 13 | N |
| 6-Trifluoromethyl-pseudo-UTP | 14 | N |
| 6-Methoxy-pseudo-UTP | 15 | N |
| 6-Phenyl-pseudo-UTP | 16 | N |
| 6-Iodo-pseudo-UTP | 17 | N |
| 6-Bromo-pseudo-UTP | 18 | N |
| 6-Chloro-pseudo-UTP | 19 | N |
| 6-Fluoro-pseudo-UTP | 20 | N |
| 2- or 4-position Modifications | | |
| 4-Thio-pseudo-UTP | 21 | N |
| 2-Thio-pseudo-UTP | 22 | N |
| Phosphate backbone | | |
| Modifications | | |
| Alpha-thio-pseudo-UTP | 23 | N |
| N1-Me-alpha-thio-pseudo-UTP | 24 | N |

TABLE 175
Pseudouridine and N1-methyl-Pseudouridine SAR

| | Compound | Naturally |
|---|---|---|
| Chemistry Modification | # | occurring |
| N1-Methyl-pseudo-UTP | 1 | Y |
| N1-Butyl-pseudo-UTP | 2 | N |
| N1-tert-Butyl-pseudo-UTP | 3 | N |
| N1-Pentyl-pseudo-UTP | 4 | N |
| N1-Hexyl-pseudo-UTP | 5 | N |
| N1-Trifluoromethyl-pseudo-UTP | 6 | Y |
| N1-Cyclobutyl-pseudo-UTP | 7 | N |
| N1-Cyclopentyl-pseudo-UTP | 8 | N |
| N1-Cyclohexyl-pseudo-UTP | 9 | N |
| N1-Cycloheptyl-pseudo-UTP | 10 | N |
| N1-Cyclooctyl-pseudo-UTP | 11 | N |
| N1-Cyclobutylmethyl-pseudo-UTP | 12 | N |
| N1-Cyclopentylmethyl-pseudo-UTP | 13 | N |
| N1-Cyclohexylmethyl-pseudo-UTP | 14 | N |
| N1-Cycloheptylmethyl-pseudo-UTP | 15 | N |
| N1-Cyclooctylmethyl-pseudo-UTP | 16 | N |
| N1-p-tolyl-pseudo-UTP | 17 | N |
| N1-(2,4,6-Trimethyl-phenyl)pseudo-UTP | 18 | N |
| N1-(4-Methoxy-phenyl)pseudo-UTP | 19 | N |
| N1-(4-Amino-phenyl)pseudo-UTP | 20 | N |
| N1(4-Nitro-phenyl)pseudo-UTP | 21 | N |
| Pseudo-UTP-N1-p-benzoic acid | 22 | N |
| N1-(4-Methyl-benzyl)pseudo-UTP | 24 | N |
| N1-(2,4,6-Trimethyl-benzyl)pseudo-UTP | 23 | N |
| N1-(4-Methoxy-benzyl)pseudo-UTP | 25 | N |
| N1-(4-Amino-benzyl)pseudo-UTP | 26 | N |
| N1-(4-Nitro-benzyl)pseudo-UTP | 27 | N |
| Pseudo-UTP-N1-methyl-p-benzoic acid | 28 | N |
| N1-(2-Amino-ethyl)pseudo-UTP | 29 | N |
| N1-(3-Amino-propyl)pseudo-UTP | 30 | N |
| N1-(4-Amino-butyl)pseudo-UTP | 31 | N |
| N1-(5-Amino-pentyl)pseudo-UTP | 32 | N |
| N1-(6-Amino-hexyl)pseudo-UTP | 33 | N |
| Pseudo-UTP-N1-3-propionic acid | 34 | N |
| Pseudo-UTP-N1-4-butanoic acid | 35 | N |
| Pseudo-UTP-N1-5-pentanoic acid | 36 | N |
| Pseudo-UTP-N1-6-hexanoic acid | 37 | N |
| Pseudo-UTP-N1-7-heptanoic acid | 38 | N |
| N1-(2-Amino-2-carboxyethyl)pseudo-UTP | 39 | N |
| N1-(4-Amino-4-carboxybutyl)pseudo-UTP | 40 | N |
| N3-Alkyl-pseudo-UTP | 41 | N |
| 6-Ethyl-pseudo-UTP | 42 | N |
| 6-Propyl-pseudo-UTP | 43 | N |
| 6-iso-Propyl-pseudo-UTP | 44 | N |
| 6-Butyl-pseudo-UTP | 45 | N |
| 6-tert-Butyl-pseudo-UTP | 46 | N |
| 6-(2,2,2-Trifluoroethyl)-pseudo-UTP | 47 | N |
| 6-Ethoxy-pseudo-UTP | 48 | N |
| 6-Trifluoromethoxy-pseudo-UTP | 49 | N |
| 6-Phenyl-pseudo-UTP | 50 | N |
| 6-(Substituted-Phenyl)-pseudo-UTP | 51 | N |
| 6-Cyano-pseudo-UTP | 52 | N |
| 6-Azido-pseudo-UTP | 53 | N |
| 6-Amino-pseudo-UTP | 54 | N |
| 6-Ethylcarboxylate-pseudo-UTP | 54b | N |
| 6-Hydroxy-pseudo-UTP | 55 | N |
| 6-Methylamino-pseudo-UTP | 55b | N |
| 6-Dimethylamino-pseudo-UTP | 57 | N |
| 6-Hydroxyamino-pseudo-UTP | 59 | N |
| 6-Formyl-pseudo-UTP | 60 | N |
| 6-(4-Morpholino)-pseudo-UTP | 61 | N |
| 6-(4-Thiomorpholino)-pseudo-UTP | 62 | N |
| N1-Me-4-thio-pseudo-UTP | 63 | N |
| N1-Me-2-thio-pseudo-UTP | 64 | N |
| 1,6-Dimethyl-pseudo-UTP | 65 | N |
| 1-Methyl-6-trifluoromethyl-pseudo-UTP | 66 | N |
| 1-Methyl-6-ethyl-pseudo-UTP | 67 | N |
| 1-Methyl-6-propyl-pseudo-UTP | 68 | N |
| 1-Methyl-6-iso-propyl-pseudo-UTP | 69 | N |
| 1-Methyl-6-butyl-pseudo-UTP | 70 | N |
| 1-Methyl-6-tert-butyl-pseudo-UTP | 71 | N |
| 1-Methyl-6-(2,2,2-Trifluoroethyl)pseudo- | 72 | N |
| UTP | | |
| 1-Methyl-6-iodo-pseudo-UTP | 73 | N |
| 1-Methyl-6-bromo-pseudo-UTP | 74 | N |
| 1-Methyl-6-chloro-pseudo-UTP | 75 | N |
| 1-Methyl-6-fluoro-pseudo-UTP | 76 | N |
| 1-Methyl-6-methoxy-pseudo-UTP | 77 | N |
| 1-Methyl-6-ethoxy-pseudo-UTP | 78 | N |
| 1-Methyl-6-trifluoromethoxy-pseudo-UTP | 79 | N |
| 1-Methyl-6-phenyl-pseudo-UTP | 80 | N |
| 1-Methyl-6-(substituted phenyl)pseudo-UTP | 81 | N |
| 1-Methyl-6-cyano-pseudo-UTP | 82 | N |
| 1-Methyl-6-azido-pseudo-UTP | 83 | N |
| 1-Methyl-6-amino-pseudo-UTP | 84 | N |
| 1-Methyl-6-ethylcarboxylate-pseudo-UTP | 85 | N |
| 1-Methyl-6-hydroxy-pseudo-UTP | 86 | N |
| 1-Methyl-6-methylamino-pseudo-UTP | 87 | N |
| 1-Methyl-6-dimethylamino-pseudo-UTP | 88 | N |
| 1-Methyl-6-hydroxyamino-pseudo-UTP | 89 | N |
| 1-Methyl-6-formyl-pseudo-UTP | 90 | N |
| 1-Methyl-6-(4-morpholino)-pseudo-UTP | 91 | N |
| 1-Methyl-6-(4-thiomorpholino)-pseudo-UTP | 92 | N |
| 1-Alkyl-6-vinyl-pseudo-UTP | 93 | N |
| 1-Alkyl-6-allyl-pseudo-UTP | 94 | N |
| 1-Alkyl-6-homoallyl-pseudo-UTP | 95 | N |
| 1-Alkyl-6-ethynyl-pseudo-UTP | 96 | N |
| 1-Alkyl-6-(2-propynyl)-pseudo-UTP | 97 | N |
| 1-Alkyl-6-(1-propynyl)-pseudo-UTP | 98 | N |

### Example 114. Incorporation of Naturally and Non-Naturally Occurring Nucleosides

[1597] Naturally and non-naturally occurring nucleosides are incorporated into mRNA encoding a polypeptide of interest. Examples of these are given in Tables 176 and 177. Certain commercially available nucleoside triphosphates (NTPs) are investigated in the polynucleotides of the invention. A selection of these are given in Table 176. The resultant mRNA are then examined for their ability to produce protein, induce cytokines, and/or produce a therapeutic outcome.

TABLE 176
Naturally and non-naturally occurring nucleosides

| | Compound | Naturally |
|---|---|---|
| Chemistry Modification | # | occuring |
| N4-Methyl-Cytosine | 1 | Y |
| N4,N4-Dimethyl-2′-OMe-Cytosine | 2 | Y |
| 5-Oxyacetic acid-methyl ester-Uridine | 3 | Y |
| N3-Methyl-pseudo-Uridine | 4 | Y |
| 5-Hydroxymethyl-Cytosine | 5 | Y |
| 5-Trifluoromethyl-Cytosine | 6 | N |
| 5-Trifluoromethyl-Uridine | 7 | N |
| 5-Methyl-amino-methyl-Uridine | 8 | Y |
| 5-Carboxy-methyl-amino-methyl-Uridine | 9 | Y |
| 5-Carboxymethylaminomethyl-2′-OMe- | 10 | Y |
| Uridine | | |
| 5-Carboxymethylaminomethyl-2-thio- | 11 | Y |
| Uridine | | |
| 5-Methylaminomethyl-2-thio-Uridine | 12 | Y |
| 5-Methoxy-carbonyl-methyl-Uridine | 13 | Y |
| 5-Methoxy-carbonyl-methyl-2′-OMe- | 14 | Y |
| Uridine | | |
| 5-Oxyacetic acid-Uridine | 15 | Y |
| 3-(3-Amino-3-carboxypropyl)-Uridine | 16 | Y |
| 5-(carboxyhydroxymethyl)uridine methyl | 17 | Y |
| ester | | |
| 5-(carboxyhydroxymethyl)uridine | 18 | Y |

TABLE 177
Non-naturally occurring nucleoside triphosphates

| | Compound | Naturally |
|---|---|---|
| Chemistry Modification | # | occuring |
| N1-Me-GTP | 1 | N |
| 2′-OMe-2-Amino-ATP | 2 | N |
| 2′-OMe-pseudo-UTP | 3 | Y |
| 2′-OMe-6-Me-UTP | 4 | N |
| 2′-Azido-2′-deoxy-ATP | 5 | N |
| 2′-Azido-2′-deoxy-GTP | 6 | N |
| 2′-Azido-2′-deoxy-UTP | 7 | N |
| 2′-Azido-2′-deoxy-CTP | 8 | N |
| 2′-Amino-2′-deoxy-ATP | 9 | N |
| 2′-Amino-2′-deoxy-GTP | 10 | N |
| 2′-Amino-2′-deoxy-UTP | 11 | N |
| 2′-Amino-2′-deoxy-CTP | 12 | N |
| 2-Amino-ATP | 13 | N |
| 8-Aza-ATP | 14 | N |
| Xanthosine-5′-TP | 15 | N |
| 5-Bromo-CTP | 16 | N |
| 2′-F-5-Methyl-2′-deoxy-UTP | 17 | N |
| 5-Aminoallyl-CTP | 18 | N |
| 2-Amino-riboside-TP | 19 | N |

### Example 115. Incorporation of Modifications to the Nucleobase and Carbohydrate (Sugar)

[1598] Naturally and non-naturally occurring nucleosides are incorporated into mRNA encoding a polypeptide of interest. Commercially available nucleosides and NTPs having modifications to both the nucleobase and carbohydrate (sugar) are examined for their ability to be incorporated into mRNA and to produce protein, induce cytokines, and/or produce a therapeutic outcome. Examples of these nucleosides are given in Tables 178 and 179.

TABLE 178
Combination modifications

| | Compound |
|---|---|
| Chemistry Modification | # |
| 5-iodo-2′-fluoro-deoxyuridine | 1 |
| 5-iodo-cytidine | 6 |
| 2′-bromo-deoxyuridine | 7 |
| 8-bromo-adenosine | 8 |
| 8-bromo-guanosine | 9 |
| 2,2′-anhydro-cytidine hydrochloride | 10 |
| 2,2′-anhydro-uridine | 11 |
| 2′-Azido-deoxyuridine | 12 |
| 2-amino-adenosine | 13 |
| N4-Benzoyl-cytidine | 14 |
| N4-Amino-cytidine | 15 |
| 2′-O-Methyl-N4-Acetyl-cytidine | 16 |
| 2′Fluoro-N4-Acetyl-cytidine | 17 |
| 2′Fluor-N4-Bz-cytidine | 18 |
| 2′O-methyl-N4-Bz-cytidine | 19 |
| 2′O-methyl-N6-Bz-deoxyadenosine | 20 |
| 2′Fluoro-N6-Bz-deoxyadenosine | 21 |
| N2-isobutyl-guanosine | 22 |
| 2′Fluro-N2-isobutyl-guanosine | 23 |
| 2′O-methyl-N2-isobutyl-guanosine | 24 |

TABLE 179
Naturally occuring combinations

| | Compound | Naturally |
|---|---|---|
| Name | # | occurring |
| 5-Methoxycarbonylmethyl-2-thiouridine TP | 1 | Y |
| 5-Methylaminomethyl-2-thiouridine TP | 2 | Y |
| 5-Crbamoylmethyluridine TP | 3 | Y |
| 5-Carbamoylmethyl-2′-O-methyluridine TP | 4 | Y |
| 1-Methyl-3-(3-amino-3-carboxypropyl) | 5 | Y |
| pseudouridine TP | | |
| 5-Methylaminomethyl-2-selenouridine TP | 6 | Y |
| 5-Carboxymethyluridine TP | 7 | Y |
| 5-Methyldihydrouridine TP | 8 | Y |
| lysidine TP | 9 | Y |
| 5-Taurinomethyluridine TP | 10 | Y |
| 5-Taurinomethyl-2-thiouridine TP | 11 | Y |
| 5-(iso-Pentenylaminomethyl)uridine TP | 12 | Y |
| 5-(iso-Pentenylaminomethyl)-2-thiouridine | 13 | Y |
| TP | | |
| 5-(iso-Pentenylaminomethyl)-2′-O- | 14 | Y |
| methyluridine TP | | |
| N4-Acetyl-2′-O-methylcytidine TP | 15 | Y |
| N4,2′-O-Dimethylcytidine TP | 16 | Y |
| 5-Formyl-2′-O-methylcytidine TP | 17 | Y |
| 2′-O-Methylpseudouridine TP | 18 | Y |
| 2-Thio-2′-O-methyluridine TP | 19 | Y |
| 3,2′-O-Dimethyluridine TP | 20 | Y |

[1599] In the tables “UTP” stands for uridine triphosphate, “GTP” stands for guanosine triphosphate, “ATP” stands for adenosine triphosphate, “CTP” stands for cytosine triphosphate, “TP” stands for triphosphate and “Bz” stands for benzyl.

### Example 116. Protein Production of Vascular Endothelial Growth Factor in HeLa Cells

[1600] The day before transfection, 20,000 HeLa cells (ATCC no. CCL-2; Manassas, VA) were harvested by treatment with Trypsin-EDTA solution (LifeTechnologies, Grand Island, NY) and seeded in a total volume of 100 ul EMVEM medium (supplemented with 100% FCS and 1× Glutamax) per well in a 96-well cell culture plate (Corning, Manassas, VA). The cells were grown at 37° C. in 500 CO₂ atmosphere overnight. The next day, 250 ng of vascular endothelial growth factor (VEGF) modified RNA (mRNA sequence shown in SEQ ID NO: 31920; polyA tail of approximately 160 nucleotides not shown in sequence; 5′cap, Cap1) with the chemical modification described in Table 180, was diluted in 10 ul final volume of OPTI-MVEM (LifeTechnologies, Grand Island, NY). Lipofectamine 2000 (LifeTechnologies, Grand Island, NY) was used as transfection reagent and 0.2 ul of lipofectamine 2000 was diluted to 10 ul final volume of OPTI-MEM. After 5 minutes of incubation at room temperature, both solutions were combined and incubated an additional 15 minute at room temperature. Then the 20 ul combined solution was added to the 100 ul cell culture medium containing the HeLa cells and incubated at room temperature. A second set of HeLa cells was also evaluated with the VEGF mRNA according to the procedure set out above. A control of untreated cells and cells treated with just lipofecatamine 2000 was also analyzed for the first set of HeLa cells.

[1601] After an 18 to 22 hour incubation cell culture supernatants of cells expressing VEGF were collected and centrifuged at 10.000 rcf for 2 minutes. The cleared supernatants were then analyzed with a VEGF-specific ELISA kit (R & D Systems, Minneapolis, MN) according to the manufacturer instructions. All samples were diluted until the determined values were within the linear range of the ELISA standard curve. The amount of protein produced is shown in Table 180.

[1602] These results demonstrate that VEGF fully modified with 1-methylpseudouridine produced more protein in HeLa cells compared to the other chemistry.

TABLE 180
Protein Production

| | VEGF set 1 | VEGF set 2 |
|---|---|---|
| Sample | (pg/ml) | (pg/ml) |
| 5-methylcytosince and pseudouridine (5mC | 25,455 | 50,341 |
| and pU) | | |
| 5-methylcytosine and 1-methylpsudouridine | 5,795 | 8,523 |
| (5mC and 1mpU) | | |
| 25% of uridine modified with 2-thiouridine | 27,045 | 27,045 |
| and 25% of cytosine modified with 5- | | |
| methylcytosine (s2U and 5mC) | | |
| Pseudouridine (pU) | 216,023 | 345,114 |
| 1-methylpseudouridine (1mpU) | 32,614 | 38,523 |
| Unmodified | 409,318 | 447,273 |
| Lipofectamine 2000 (L2000) | 0 | N/A |
| Untreated | 0 | N/A |

### Example 117. Comparison of Protein Production of Chemically Modified Vascular Endothelial Growth Factor in HeLa Cells

[1603] The day before transfection, 20,000 HeLa cells (ATCC no. CCL-2; Manassas, VA) were harvested by treatment with Trypsin-EDTA solution (LifeTechnologies, Grand Island, NY) and seeded in a total volume of 100 ul EMEM medium (supplemented with 10% FCS and 1× Glutamax) per well in a 96-well cell culture plate (Corning, Manassas, VA). The cells were grown at 37° C. in 5% CO₂ atmosphere overnight. Next day, 250 ng of vascular endothelial growth factor (VEGF) modified RNA (mRNA sequence shown in SEQ ID NO: 31920; polyA tail of approximately 160 nucleotides not shown in sequence; 5′cap, Cap1) with the chemical modification described in Table 181, were diluted in 10 ul final volume of OPTI-MEM (LifeTechnologies, Grand Island, NY). Lipofectamine 2000 (LifeTechnologies, Grand Island, NY) was used as transfection reagent and 0.2 ul of lipofectamine 2000 was diluted to 10 ul final volume of OPTI-MEM. After 5 minutes of incubation at room temperature, both solutions were combined and incubated an additional 15 minute at room temperature. Then the 20 ul combined solution was added to the 100 ul cell culture medium containing the HeLa cells and incubated at room temperature. A control of untreated cells was also analyzed.

[1604] After an 18 to 22 hour incubation cell culture supernatants of cells expressing VEGF were collected and centrifuged at 10.000 rcf for 2 minutes. The cleared supernatants were then analyzed with a VEGF-specific ELISA kit (R & D Systems, Minneapolis, MN) according to the manufacturer instructions. All samples were diluted until the determined values were within the linear range of the ELISA standard curve. The amount of protein produced is shown in Table 181 and FIG. 9.

[1605] These results demonstrate that VEGF fully modified with 1-methylpseudouridine produced more protein in HeLa cells compared to the other chemistry.

TABLE 181
Protein Production

| | VEGF |
|---|---|
| Sample | (pg/ml) |
| Unmodified | 121,176 |
| 5-methylcytosine and 1-methylpsudouridine (5mC and lmpU) | 760,000 |
| 1-methylpseudouridine (1mpU) | 1,393,824 |
| Untreated | 0 |

### Example 118. Production of Vascular Endothelial Growth Factor Protein in Mammals

[1606] Lipoplexed vascular endothelial growth factor (VEGF) mRNA (mRNA sequence shown in SEQ ID NO: 31920; polyA tail of approximately 160 nucleotides not shown in sequence; 5′cap, Cap1) unmodified, fully modified with 5-methylcytosine and pseudouridine (5 mC/pU), fully modified with 5-methylcytosine and 1-methylpseudouridine (5 mC/1 mpU), modified where 25% of the cytosines replaced with 5-methylcytosine and 25% of the uridines replaced with 2-thiouridine (5 mC/s2U), fully modified with 1-methylpseudouridine (1 mpU) or fully modified with pseudouridine (pU). The formulation was administered intravenously to mice at a dose of 2 ug of mRNA per mouse. As a control, a group of mice were untreated. Serum from the mice is measured by specific VEGF ELISA 3 hours after administration for VEGF protein expression. The results are shown in Table 182 and FIG. 10.

TABLE 182
Protein Production

| | VEGF |
|---|---|
| Sample | (pg/ml) |
| Unmodified | 34 |
| 5-methylcytosine and pseudouridine (5mC and pU) | 40 |
| 5-methylcytosine and 1-methylpsudouridine (5mC and | 11 |
| 1mpU) | |
| 25% of uridine modified with 2-thiouridine and 25% of | 53 |
| cytosine modified with 5-methylcytosine (s2U and 5mC) | |
| Pseudouridine (pU) | 86 |
| 1-methyl-pseudouridine (1mpU) | 51 |
| Untreated | 0 |

### Example 119. Protein Production of Granulocyte Colony Stimulating Factor in HeLa Cells

[1607] The day before transfection, 20,000 HeLa cells (ATCC no. CCL-2; Manassas, VA) were harvested by treatment with Trypsin-EDTA solution (LifeTechnologies, Grand Island, NY) and seeded in a total volume of 100 ul EMEM medium (supplemented with 10% FCS and 1× Glutamax) per well in a 96-well cell culture plate (Corning, Manassas, VA). The cells were grown at 37° C. in 5% CO₂ atmosphere overnight. The next day, 250 ng of granulocyte colony stimulating factor (G-CSF) modified RNA (mRNA sequence shown in SEQ ID NO: 31907; polyA tail of approximately 160 nucleotides not shown in sequence; 5′cap, Cap1) with the chemical modification described in Table 183, was diluted in 10 ul final volume of OPTI-MEM (LifeTechnologies, Grand Island, NY). Lipofectamine 2000 (LifeTechnologies, Grand Island, NY) was used as transfection reagent and 0.2 ul of lipofectamine 2000 was diluted to 10 ul final volume of OPTI-MEM. After 5 minutes of incubation at room temperature, both solutions were combined and incubated an additional 15 minute at room temperature. Then the 20 ul combined solution was added to the 100 ul cell culture medium containing the HeLa cells and incubated at room temperature. A control of untreated cells and cells treated with just lipofecatamine 2000 was also analyzed.

[1608] After an 18 to 22 hour incubation cell culture supernatants of cells expressing G-CSF were collected and centrifuged at 10.000 rcf for 2 minutes. The cleared supernatants were then analyzed with a G-CSF-specific ELISA kit (R & D Systems, Minneapolis, MN) according to the manufacturer instructions. All samples were diluted until the determined values were within the linear range of the ELISA standard curve. The amount of protein produced is shown in Table 183 and FIG. 11.

TABLE 183
Protein Production

| | G-CSF |
|---|---|
| Sample | (pg/ml) |
| 5-methylcytosine and pseudouridine (5mC and pU) | 704,250 |
| 5-methylcytosine and 1-methylpsudouridine (5mC | 1,523,750 |
| and 1mpU) | |
| 25% of uridine modified with 2-thiouridine and 25% | 89,000 |
| of cytosine modified with 5-methylcytosine (s2U | |
| and 5mC) | |
| Pseudouridine (pU) | 408,250 |
| 1-methylpseudouridine (1mpU) | 1,391,250 |
| Lipofectamine 2000 (L2000) | 0 |
| Untreated | 0 |

### Example 120. Protein Production of Chemically Modified Factor IX in HeLa Cell Supernatant

[1609] The day before transfection, 15,000 HeLa cells (ATCC no. CCL-2; Manassas, VA) were harvested by treatment with Trypsin-Ethylenediaminetetraacetic acid (EDTA) solution (LifeTechnologies, Grand Island, NY) and seeded in a total volume of 100 ul Eagle's minimal essential medium (EMEM) (supplemented with 10% fetal calf serum (FCS) and 1× Glutamax) per well in a 24-well cell culture plate (Corning, Manassas, VA). The cells were grown at 37° C. in 5% CO₂ atmosphere overnight. Next day, 250 ng of factor IX modified RNA (mRNA sequence shown in SEQ ID NO: 31911; polyA tail of approximately 140 nucleotides not shown in sequence; 5′cap, Cap1) fully modified with 5-methylcytosine and pseudouridine (5 mC/pU), fully modified with 5-methylcytosine and 1-methylpseudouridine (5 mC/1 mpU), modified where 25% of the cytosines replaced with 5-methylcytosine and 25% of the uridines replaced with 2-thiouridine (s2U/5 mC), fully modified with 1-methylpseudouridine (1 mpU) or fully modified with pseudouridine (pU) were diluted in 10 ul final volume of OPTI-MEM® (LifeTechnologies, Grand Island, NY). Lipofectamine 2000 (LifeTechnologies, Grand Island, NY) was used as transfection reagent and 0.2 ul of lipofectamine 2000 was diluted to 10 ul final volume of OPTI-MEM®. After 5 minutes of incubation at room temperature, both solutions were combined and incubated an additional 15 minute at room temperature. Then the 20 ul combined solution was added to the 100 ul cell culture medium containing the HeLa cells and incubated at room temperature. A control of untreated was also analyzed.

[1610] After an 18 hour incubation cell culture supernatants of cells expressing factor IX were collected by lysing cells with immuno-precipitation (IP) buffer from Pierce Biotechnology (Thermo Scientific, Rockford, IL) and centrifuged at 10.000 rcf for 2 minutes. The cleared supernatants were diluted 1:2 (1 ml lysate/2 wells/24 well plate) or 1:5 (1 ml lysate/5 wells/24 well plate) then analyzed with a factor IX-specific ELISA kit according to the manufacturer instructions. All samples were diluted until the determined values were within the linear range of the ELISA standard curve. The amount of protein produced in both studies is shown in Table 184 and FIG. 12.

TABLE 184
Protein Production

| | Factor IX |
|---|---|
| Sample | (ng/ml) |
| 5-methylcytosine and pseudouridine (5mC/pU) | 45.8 |
| 5-methylcytosine and 1-methylpseudouridine (5mC/1mpU) | 147.1 |
| 25% of the cytosines replaced with 5-methylcytosine and | 7.4 |
| 25% of the uridines replaced with 2-thiouridine (s2U/5mC) | |
| Pseudouridine (pU) | 17.0 |
| 1-methylpseudouridine (1mpU) | 32.0 |
| Untreated | 0 |

### Example 121. Intranasal Lung Delivery of 1-Methylpseudouridine or 5-Methylcytosine and 1-Methylpseudouridine Modified Luciferase mRNA Formulated in Cationic Lipid Nanoparticle

[1611] Luciferase modified mRNA (mRNA sequence shown in SEQ ID NO: 31917; polyA tail of approximately 140 nucleotides not shown in sequence; 5′cap, Cap1) fully modified with 1-methylpseudouridine (Luc-G5-LNP-KC2) or fully modified with 1-methylpseudouridine and 5-methylcytosine (Luc-G2-LNP-KC2) were formulated in the cationic Lipid Nanoparticle (LNP-KC) as described in Table 185.

TABLE 185
Formulation

| Formulation | NPA-127-1 | NPA-135-1 |
|---|---|---|
| Lipid | DLin-KC2-DMA | DLin-KC2-DMA |
| Lipid/mRNA | 20:1 | 20:1 |
| ratio (wt/wt) | | |
| Mean Size | 114 nm | 95 nm |
| | PDI: 0.10 | PDI: 0.11 |
| Zeta at pH 7.4 | −0.5 mV | −1.0 mV |
| Encaps. (RiboGr) | 77% | 100% |

[1612] The formulations were administered intranasally (I.N.) to Balb-C mice at a dose of 0.3 mg/kg. Twenty minutes prior to imaging, mice were injected intraperitoneally with a D-luciferin solution at 150 mg/kg. Animals were then anesthetized and images were acquired with an IVIS Lumina II imaging system (Perkin Elmer). Bioluminescence was measured as total flux (photons/second) of the entire mouse. The mice were imaged at 2 hours, 8 hours, 48, and 72 hours after dosing and the average total flux (photons/second) was measured. The background flux was about 6.3+05 p/s. The results of the imaging of Luc-G5-LNP-KC2 or Luc-G5-LNP-KC2 vs. Vehicle are shown in the Table 186, “NT” means not tested.

TABLE 186
Luciferase expression after intranasal dosing

| | | Luc-G5- | Luc-G2- | |
|---|---|---|---|---|
| | Time | LNP-KC2 | LNP-KC2 | Vehicle (PBS) |
| Route | Point | Flux (p/s) | Flux (p/s) | Flux (p/s) |
| I.N. | 2 hrs | 1.53E+06 | 5.81E+05 | 3.87E+05 |
| I.N. | 8 hrs | 1.09E+07 | 9.35E+05 | 5.57E+05 |
| I.N. | 24 hrs | 5.93E+06 | 5.33E+05 | 4.89E+05 |
| I.N. | 28 hrs | 1.22E+06 | 7.63E+05 | 8.81E+05 |
| I.N. | 72 hrs | 8.43E+05 | NT | 8.17E+05 |

### Example 122. Intranasal Lung Delivery of 1-Methylpseudouridine or 5-Methylcytosine and 1-Methylpseudouridine Modified Luciferase mRNA Lipoplexed in Lipofectamine 2000

[1613] Luciferase modified mRNA (mRNA sequence shown in SEQ ID NO: 31917; polyA tail of approximately 140 nucleotides not shown in sequence; 5′cap, Cap1) fully modified with 1-methylpseudouridine (Luc-G5-Lipoplex) or fully modified with 1-methylpseudouridine and 5-methylcytosine (Luc-G2-Lipoplex) were lipoplexed in two steps, first step was the dilution of 16.6 ul from 3 mg/ml of 1-methylpseudouridine or 1-methylpseudouridine and 5-methylcytosine modified luciferase mRNA in 108.5 ul DMEM and the second step was the dilution of 100 ul LF2000 in 25 ul DMEM then both mixed together gently to make 250 ul total mixer which incubated 5-10 min at RT to form a Lipid-mRNA complex before injection. The lipoplex from both Luciferase mRNA fully modified with 1-methylpseudouridine or 1-methylpseudouridine and 5-methylcytosine were administered intranasally (I.N.) to Balb-C mice at a dose of 0.5 mg/kg.

[1614] Twenty minutes prior to imaging, mice were injected intraperitoneally with a D-luciferin solution at 150 mg/kg. Animals were then anesthetized and images were acquired with an IVIS Lumina II imaging system (Perkin Elmer). Bioluminescence was measured as total flux (photons/second) of the entire mouse. The mice were imaged at 2 hours, 8 hours and 24 hours after dosing and the average total flux (photons/second) was measured. The background signal was about 4.8+05 p/s. The background flux was about 6.3+05 p/s. The results of the imaging of Luc-G5-Lipoplex or Luc-G2-Lipoplex vs. Vehicle are shown in the Table 187.

TABLE 187
Luciferase expression after intranasal dosing

| | | | | Vehicle |
|---|---|---|---|---|
| | Time | Luc-G5-Lipoplex | Luc-G2-Lipoplex | (PBS) |
| Route | Point | Flux (p/s) | Flux (p/s) | Flux (p/s) |
| I.N. | 2 hrs | 8.37E+05 | 9.58E+05 | 3.87E+05 |
| I.N. | 8 hrs | 8.42E+05 | 7.11E+05 | 5.57E+05 |
| I.N. | 24 hrs | 5.74E+05 | 5.53E+05 | 4.89E+05 |

### Example 123. Intranasal Lung Delivery of 1-Methylpseudouridine or 5-Methylcytosine and 1-Methylpseudouridine Modified Luciferase mRNA Formulated in PBS

[1615] Luciferase modified mRNA (mRNA sequence shown in SEQ ID NO: 31917; polyA tail of approximately 140 nucleotides not shown in sequence; 5′cap, Cap1) fully modified with 1-methylpseudouridine (Luc-G5-Buffer(PBS)) or fully modified with 1-methylpseudouridine and 5-methylcytosine (Luc-G2-Buffer(PBS)) formulated in PBS (pH 7.4) were administered intranasally (I.N.) to Balb-C mice at a dose of 7.5 mg/kg.

[1616] Twenty minutes prior to imaging, mice were injected intraperitoneally with a D-luciferin solution at 150 mg/kg. Animals were then anesthetized and images were acquired with an IVIS Lumina II imaging system (Perkin Elmer). Bioluminescence was measured as total flux (photons/second) of the entire mouse. The mice were imaged at 2 hours, 8 hours and 24 hours after dosing and the average total flux (photons/second) was measured. The background flux was about 4.8+05 p/s. The background flux was about 6.3+05 p/s. The results of the imaging of Luc-G5-in Buffer vs. Vehicle are shown in the Table 188.

TABLE 188
Luciferase expression after intranasal dosing

| | | Luc-G5-in | Luc-G2-in Buffer | |
|---|---|---|---|---|
| | | Buffer (PBS) | (PBS) | Vehicle (PBS) |
| Route | Time Point | Flux [p/s] | Flux [p/s] | Flux (p/s) |
| I.N. | 2 hrs | 4.50E+05 | 9.58E+05 | 3.87E+05 |
| I.N. | 8 hrs | 7.12E+05 | 7.11E+05 | 5.57E+05 |
| I.N. | 24 hrs | 4.47E+05 | 5.53E+05 | 4.89E+05 |

[1617] It is to be understood that the words which have been used are words of description rather than limitation, and that changes may be made within the purview of the appended claims without departing from the true scope and spirit of the invention in its broader aspects.

[1618] While the present invention has been described at some length and with some particularity with respect to the several described embodiments, it is not intended that it should be limited to any such particulars or embodiments or any particular embodiment, but it is to be construed with references to the appended claims so as to provide the broadest possible interpretation of such claims in view of the prior art and, therefore, to effectively encompass the intended scope of the invention.

[1619] All publications, patent applications, patents, and other references mentioned herein are incorporated by reference in their entirety. In case of conflict, the present specification, including definitions, will control. In addition, section headings, the materials, methods, and examples are illustrative only and not intended to be limiting.

The application's sequence listing, which the Patent Office published only in electronic form, follows.

SEQUENCE LISTING (31925 sequences)

SEQ ID NO: 1 - DNA, 47 bp, Homo sapiens
  source 1..47: mol_type = genomic DNA
gggaaataagagagaaaagaagagtaagaagaaatataagagccacc

SEQ ID NO: 2 - DNA, 47 bp, Homo sapiens
  source 1..47: mol_type = genomic DNA
gggagatcagagagaaaagaagagtaagaagaaatataagagccacc

SEQ ID NO: 3 - DNA, 145 bp, Homo sapiens
  source 1..145: mol_type = genomic DNA
ggaataaaagtctcaacacaacatatacaaaacaaacgaatctcaagcaatcaagcattctacttctattgcagcaatttaaatcatttcttttaaagcaaaagcaattttctgaaaattttcaccatttacgaacgatagcaac

SEQ ID NO: 4 - RNA, 42 nt, Homo sapiens
  source 1..42: mol_type = genomic RNA
gggagacaagcttggcattccggtactgttggtaaagccacc

SEQ ID NO: 5 - DNA, 371 bp, Homo sapiens
  source 1..371: mol_type = genomic DNA
gcgcctgcccacctgccaccgactgctggaacccagccagtgggagggcctggcccaccagagtcctgctccctcactcctcgccccgccccctgtcccagagtcccacctgggggctctctccacccttctcagagttccagtttcaaccagagttccaaccaatgggctccatcctctggattctggccaatgaaatatctccctggcagggtcctcttcttttcccagagctccaccccaaccaggagctctagttaatggagagctcccagcacactcggagcttgtgctttgtctccacgcaaagcgataaataaaagcattggtggcctttggtctttgaataaagcctgagtaggaagtctaga

SEQ ID NO: 6 - DNA, 568 bp, Homo sapiens
  source 1..568: mol_type = genomic DNA
gcccctgccgctcccacccccacccatctgggccccgggttcaagagagagcggggtctgatctcgtgtagccatatagagtttgcttctgagtgtctgctttgtttagtagaggtgggcaggaggagctgaggggctggggctggggtgttgaagttggctttgcatgcccagcgatgcgcctccctgtgggatgtcatcaccctgggaaccgggagtggcccttggctcactgtgttctgcatggtttggatctgaattaattgtcctttcttctaaatcccaaccgaacttcttccaacctccaaactggctgtaaccccaaatccaagccattaactacacctgacagtagcaattgtctgattaatcactggccccttgaagacagcagaatgtccctttgcaatgaggaggagatctgggctgggcgggccagctggggaagcatttgactatctggaacttgtgtgtgcctcctcaggtatggcagtgactcacctggttttaataaaacaacctgcaacatctcatggtctttgaataaagcctgagtaggaagtctaga

SEQ ID NO: 7 - DNA, 289 bp, Homo sapiens
  source 1..289: mol_type = genomic DNA
acacactccacctccagcacgcgacttctcaggacgacgaatcttctcaatgggggggcggctgagctccagccaccccgcagtcactttctttgtaacaacttccgttgctgccatcgtaaactgacacagtgtttataacgtgtacatacattaacttattacctcattttgttatttttcgaaacaaagccctgtggaagaaaatggaaaacttgaagaagcattaaagtcattctgttaagctgcgtaaatggtctttgaataaagcctgagtaggaagtctaga

SEQ ID NO: 8 - DNA, 379 bp, Homo sapiens
  source 1..379: mol_type = genomic DNA
catcacatttaaaagcatctcagcctaccatgagaataagagaaagaaaatgaagatcaaaagcttattcatctgtttttctttttcgttggtgtaaagccaacaccctgtctaaaaaacataaatttctttaatcattttgcctcttttctctgtgcttcaattaataaaaaatggaaagaatctaatagagtggtacagcactgttatttttcaaagatgtgttgctatcctgaaaattctgtaggttctgtggaagttccagtgttctctcttattccacttcggtagaggatttctagtttcttgtgggctaattaaataaatcattaatactcttctaatggtctttgaataaagcctgagtaggaagtctaga

SEQ ID NO: 9 - DNA, 118 bp, Mus sp.
  source 1..118: mol_type = genomic DNA
gctgccttctgcggggcttgccttctggccatgcccttcttctctcccttgcacctgtacctcttggtctttgaataaagcctgagtaggaaggcggccgctcgagcatgcatctaga

SEQ ID NO: 10 - DNA, 908 bp, Homo sapiens
  source 1..908: mol_type = genomic DNA
gccaagccctccccatcccatgtatttatctctatttaatatttatgtctatttaagcctcatatttaaagacagggaagagcagaacggagccccaggcctctgtgtccttccctgcatttctgagtttcattctcctgcctgtagcagtgagaaaaagctcctgtcctcccatcccctggactgggaggtagataggtaaataccaagtatttattactatgactgctccccagccctggctctgcaatgggcactgggatgagccgctgtgagcccctggtcctgagggtccccacctgggacccttgagagtatcaggtctcccacgtgggagacaagaaatccctgtttaatatttaaacagcagtgttccccatctgggtccttgcacccctcactctggcctcagccgactgcacagcggcccctgcatccccttggctgtgaggcccctggacaagcagaggtggccagagctgggaggcatggccctggggtcccacgaatttgctggggaatctcgtttttcttcttaagacttttgggacatggtttgactcccgaacatcaccgacgcgtctcctgtttttctgggtggcctcgggacacctgccctgcccccacgagggtcaggactgtgactctttttagggccaggcaggtgcctggacatttgccttgctggacggggactggggatgtgggagggagcagacaggaggaatcatgtcaggcctgtgtgtgaaaggaagctccactgtcaccctccacctcttcaccccccactcaccagtgtcccctccactgtcacattgtaactgaacttcaggataataaagtgtttgcctccatggtctttgaataaagcctgagtaggaaggcggccgctcgagcatgcatctaga

SEQ ID NO: 11 - DNA, 835 bp, Homo sapiens
  source 1..835: mol_type = genomic DNA
actcaatctaaattaaaaaagaaagaaatttgaaaaaactttctctttgccatttcttcttcttcttttttaactgaaagctgaatccttccatttcttctgcacatctacttgcttaaattgtgggcaaaagagaaaaagaaggattgatcagagcattgtgcaatacagtttcattaactccttcccccgctcccccaaaaatttgaatttttttttcaacactcttacacctgttatggaaaatgtcaacctttgtaagaaaaccaaaataaaaattgaaaaataaaaaccataaacatttgcaccacttgtggcttttgaatatcttccacagagggaagtttaaaacccaaacttccaaaggtttaaactacctcaaaacactttcccatgagtgtgatccacattgttaggtgctgacctagacagagatgaactgaggtccttgttttgttttgttcataatacaaaggtgctaattaatagtatttcagatacttgaagaatgttgatggtgctagaagaatttgagaagaaatactcctgtattgagttgtatcgtgtggtgtattttttaaaaaatttgatttagcattcatattttccatcttattcccaattaaaagtatgcagattatttgcccaaatcttcttcagattcagcatttgttctttgccagtctcattttcatcttcttccatggttccacagaagctttgtttcttgggcaagcagaaaaattaaattgtacctattttgtatatgtgagatgtttaaataaattgtgaaaaaaatgaaataaagcatgtttggttttccaaaagaacatat

SEQ ID NO: 12 - DNA, 297 bp, Homo sapiens
  source 1..297: mol_type = genomic DNA
cgccgccgcccgggccccgcagtcgagggtcgtgagcccaccccgtccatggtgctaagcgggcccgggtcccacacggccagcaccgctgctcactcggacgacgccctgggcctgcacctctccagctcctcccacggggtccccgtagccccggcccccgcccagccccaggtctccccaggccctccgcaggctgcccggcctccctccccctgcagccatcccaaggctcctgacctacctggcccctgagctctggagcaagccctgacccaataaaggctttgaacccat

SEQ ID NO: 13 - DNA, 602 bp, Homo sapiens
  source 1..602: mol_type = genomic DNA
ggggctagagccctctccgcacagcgtggagacggggcaaggaggggggttattaggattggtggttttgttttgctttgtttaaagccgtgggaaaatggcacaactttacctctgtgggagatgcaacactgagagccaaggggtgggagttgggataatttttatataaaagaagtttttccactttgaattgctaaaagtggcatttttcctatgtgcagtcactcctctcatttctaaaatagggacgtggccaggcacggtggctcatgcctgtaatcccagcactttgggaggccgaggcaggcggctcacgaggtcaggagatcgagactatcctggctaacacggtaaaaccctgtctctactaaaagtacaaaaaattagctgggcgtggtggtgggcacctgtagtcccagctactcgggaggctgaggcaggagaaaggcatgaatccaagaggcagagcttgcagtgagctgagatcacgccattgcactccagcctgggcaacagtgttaagactctgtctcaaatataaataaataaataaataaataaataaataaataaaaataaagcgagatgttgccctcaaa

SEQ ID NO: 14 - DNA, 785 bp, Homo sapiens
  source 1..785: mol_type = genomic DNA
ggccctgccccgtcggactgcccccagaaagcctcctgccccctgccagtgaagtccttcagtgagcccctccccagccagcccttccctggccccgccggatgtataaatgtaaaaatgaaggaattacattttatatgtgagcgagcaagccggcaagcgagcacagtattatttctccatcccctccctgcctgctccttggcacccccatgctgccttcagggagacaggcagggagggcttggggctgcacctcctaccctcccaccagaacgcaccccactgggagagctggtggtgcagccttcccctccctgtataagacactttgccaaggctctcccctctcgccccatccctgcttgcccgctcccacagcttcctgagggctaattctgggaagggagagttctttgctgcccctgtctggaagacgtggctctgggtgaggtaggcgggaaaggatggagtgttttagttcttgggggaggccaccccaaaccccagccccaactccaggggcacctatgagatggccatgctcaacccccctcccagacaggccctccctgtctccagggcccccaccgaggttcccagggctggagacttcctctggtaaacattcctccagcctcccctcccctggggacgccaaggaggtgggccacacccaggaagggaaagcgggcagccccgttttggggacgtgaacgttttaataatttttgctgaattcctttacaactaaataacacagatattgttataaataaaattgt

SEQ ID NO: 15 - DNA, 3001 bp, Homo sapiens
  source 1..3001: mol_type = genomic DNA
atattaaggatcaagctgttagctaataatgccacctctgcagttttgggaacaggcaaataaagtatcagtatacatggtgatgtacatctgtagcaaagctcttggagaaaatgaagactgaagaaagcaaagcaaaaactgtatagagagatttttcaaaagcagtaatccctcaattttaaaaaaggattgaaaattctaaatgtctttctgtgcatattttttgtgttaggaatcaaaagtattttataaaaggagaaagaacagcctcattttagatgtagtcctgttggattttttatgcctcctcagtaaccagaaatgttttaaaaaactaagtgtttaggatttcaagacaacattatacatggctctgaaatatctgacacaatgtaaacattgcaggcacctgcattttatgttttttttttcaacaaatgtgactaatttgaaacttttatgaacttctgagctgtccccttgcaattcaaccgcagtttgaattaatcatatcaaatcagttttaattttttaaattgtacttcagagtctatatttcaagggcacattttctcactactattttaatacattaaaggactaaataatctttcagagatgctggaaacaaatcatttgctttatatgtttcattagaataccaatgaaacatacaacttgaaaattagtaatagtatttttgaagatcccatttctaattggagatctctttaatttcgatcaacttataatgtgtagtactatattaagtgcacttgagtggaattcaacatttgactaataaaatgagttcatcatgttggcaagtgatgtggcaattatctctggtgacaaaagagtaaaatcaaatatttctgcctgttacaaatatcaaggaagacctgctactatgaaatagatgacattaatctgtcttcactgtttataatacggatggattttttttcaaatcagtgtgtgttttgaggtcttatgtaattgatgacatttgagagaaatggtggctttttttagctacctctttgttcatttaagcaccagtaaagatcatgtctttttatagaagtgtagattttctttgtgactttgctatcgtgcctaaagctctaaatataggtgaatgtgtgatgaatactcagattatttgtctctctatataattagtttggtactaagtttctcaaaaaattattaacacatgaaagacaatctctaaaccagaaaaagaagtagtacaaattttgttactgtaatgctcgcgtttagtgagtttaaaacacacagtatcttttggttttataatcagtttctattttgctgtgcctgagattaagatctgtgtatgtgtgtgtgtgtgtgtgtgcgtttgtgtgttaaagcagaaaagacttttttaaaagttttaagtgataaatgcaatttgttaattgatcttagatcactagtaaactcagggctgaattataccatgtatattctattagaagaaagtaaacaccatctttattcctgccctttttcttctctcaaagtagttgtagttatatctagaaagaagcaattttgatttcttgaaaaggtagttcctgcactcagtttaaactaaaaataatcatacttggattttatttatttttgtcatagtaaaaattttaatttatatatatttttatttagtattatcttattctttgctatttgccaatcctttgtcatcaattgtgttaaatgaattgaaaattcatgccctgttcattttattttactttattggttaggatatttaaaggatttttgtatatataatttcttaaattaatattccaaaaggttagtggacttagattataaattatggcaaaaatctaaaaacaacaaaaatgatttttatacattctatttcattattcctctttttccaataagtcatacaattggtagatatgacttattttatttttgtattattcactatatctttatgatatttaagtataaataattaaaaaaatttattgtaccttatagtctgtcaccaaaaaaaaaaaattatctgtaggtagtgaaatgctaatgttgatttgtctttaagggcttgttaactatcctttattttctcatttgtcttaaattaggagtttgtgtttaaattactcatctaagcaaaaaatgtatataaatcccattactgggtatatacccaaaggattataaatcatgctgctataaagacacatgcacacgtatgtttattgcagcactattcacaatagcaaagacttggaaccaacccaaatgtccatcaatgatagacttgattaagaaaatgtgcacatatacaccatggaatactatgcagccataaaaaaggatgagttcatgtcctttgtagggacatggataaagctggaaaccatcattctgagcaaactattgcaaggacagaaaaccaaacactgcatgttctcactcataggtgggaattgaacaatgagaacacttggacacaaggtggggaacaccacacaccagggcctgtcatggggtggggggagtggggagggatagcattaggagatatacctaatgtaaatgatgagttaatgggtgcagcacaccaacatggcacatgtatacatatgtagcaaacctgcacgttgtgcacatgtaccctagaacttaaagtataattaaaaaaaaaaagaaaacagaagctatttataaagaagttatttgctgaaataaatgtgatctttcccattaaaaaaataaagaaattttggggtaaaaaaacacaatatattgtattcttgaaaaattctaagagagtggatgtgaagtgttctcaccacaaaagtgataactaattgaggtaatgcacatattaattagaaagattttgtcattccacaatgtatatatacttaaaaatatgttatacacaataaatacatacattaaaaaataagtaaatgta

SEQ ID NO: 16 - DNA, 1037 bp, Homo sapiens
  source 1..1037: mol_type = genomic DNA
cccaccctgcacgccggcaccaaaccctgtcctcccacccctccccactcatcactaaacagagtaaaatgtgatgcgaattttcccgaccaacctgattcgctagattttttttaaggaaaagcttggaaagccaggacacaacgctgctgcctgctttgtgcagggtcctccggggctcagccctgagttggcatcacctgcgcagggccctctggggctcagccctgagctagtgtcacctgcacagggccctctgaggctcagccctgagctggcgtcacctgtgcagggccctctggggctcagccctgagctggcctcacctgggttccccaccccgggctctcctgccctgccctcctgcccgccctccctcctgcctgcgcagctccttccctaggcacctctgtgctgcatcccaccagcctgagcaagacgccctctcggggcctgtgccgcactagcctccctctcctctgtccccatagctggtttttcccaccaatcctcacctaacagttactttacaattaaactcaaagcaagctcttctcctcagcttggggcagccattggcctctgtctcgttttgggaaaccaaggtcaggaggccgttgcagacataaatctcggcgactcggccccgtctcctgagggtcctgctggtgaccggcctggaccttggccctacagccctggaggccgctgctgaccagcactgaccccgacctcagagagtactcgcaggggcgctggctgcactcaagaccctcgagattaacggtgctaaccccgtctgctcctccctcccgcagagactggggcctggactggacatgagagccccttggtgccacagagggctgtgtcttactagaaacaacgcaaacctctccttcctcagaatagtgatgtgttcgacgttttatcaaaggccccctttctatgttcatgttagttttgctccttctgtgtttttttctgaaccatatccatgttgctgacttttccaaataaaggttttcactcctctc

SEQ ID NO: 17 - DNA, 577 bp, Homo sapiens
  source 1..577: mol_type = genomic DNA
agaggcctgcctccagggctggactgaggcctgagcgctcctgccgcagagctggccgcgccaaataatgtctctgtgagactcgagaactttcatttttttccaggctggttcggatttggggtggattttggttttgttcccctcctccactctcccccaccccctccccgcccttttttttttttttttttaaactggtattttatctttgattctccttcagccctcacccctggttctcatctttcttgatcaacatcttttcttgcctctgtccccttctctcatctcttagctcccctccaacctggggggcagtggtgtggagaagccacaggcctgagatttcatctgctctccttcctggagcccagaggagggcagcagaagggggtggtgtctccaaccccccagcactgaggaagaacggggctcttctcatttcacccctccctttctcccctgcccccaggactgggccacttctgggtggggcagtgggtcccagattggctcacactgagaatgtaagaactacaaacaaaatttctattaaattaaattttgtgtctcc

SEQ ID NO: 18 - DNA, 2212 bp, Homo sapiens
  source 1..2212: mol_type = genomic DNA
ctccctccatcccaacctggctccctcccacccaaccaactttccccccaacccggaaacagacaagcaacccaaactgaaccccctcaaaagccaaaaaatgggagacaatttcacatggactttggaaaatatttttttcctttgcattcatctctcaaacttagtttttatctttgaccaaccgaacatgaccaaaaaccaaaagtgcattcaaccttaccaaaaaaaaaaaaaaaaaaagaataaataaataactttttaaaaaaggaagcttggtccacttgcttgaagacccatgcgggggtaagtccctttctgcccgttgggcttatgaaaccccaatgctgccctttctgctcctttctccacaccccccttggggcctcccctccactccttcccaaatctgtctccccagaagacacaggaaacaatgtattgtctgcccagcaatcaaaggcaatgctcaaacacccaagtggcccccaccctcagcccgctcctgcccgcccagcacccccaggccctgggggacctggggttctcagactgccaaagaagccttgccatctggcgctcccatggctcttgcaacatctccccttcgtttttgagggggtcatgccgggggagccaccagcccctcactgggttcggaggagagtcaggaagggccacgacaaagcagaaacatcggatttggggaacgcgtgtcaatcccttgtgccgcagggctgggcgggagagactgttctgttccttgtgtaactgtgttgctgaaagactacctcgttcttgtcttgatgtgtcaccggggcaactgcctgggggcggggatgggggcagggtggaagcggctccccattttataccaaaggtgctacatctatgtgatgggtggggtggggagggaatcactggtgctatagaaattgagatgcccccccaggccagcaaatgttcctttttgttcaaagtctatttttattccttgatatttttctttttttttttttttttttgtggatggggacttgtgaatttttctaaaggtgctatttaacatgggaggagagcgtgtgcggctccagcccagcccgctgctcactttccaccctctctccacctgcctctggcttctcaggcctctgctctccgacctctctcctctgaaaccctcctccacagctgcagcccatcctcccggctccctcctagtctgtcctgcgtcctctgtccccgggtttcagagacaacttcccaaagcacaaagcagtttttccccctaggggtgggaggaagcaaaagactctgtacctattttgtatgtgtataataatttgagatgtttttaattattttgattgctggaataaagcatgtggaaatgacccaaacataatccgcagtggcctcctaatttccttctttggagttgggggaggggtagacatggggaaggggctttggggtgatgggcttgccttccattcctgccctttccctccccactattctcttctagatccctccataaccccactcccctttctctcacccttcttataccgcaaacctttctacttcctctttcattttctattcttgcaatttccttgcaccttttccaaatcctcttctcccctgcaataccatacaggcaatccacgtgcacaacacacacacacactcttcacatctggggttgtccaaacctcatacccactccccttcaagcccatccactctccaccccctggatgccctgcacttggtggcggtgggatgctcatggatactgggagggtgaggggagtggaacccgtgaggaggacctgggggcctctccttgaactgacatgaagggtcatctggcctctgctcccttctcacccacgctgacctcctgccgaaggagcaacgcaacaggagaggggtctgctgagcctggcgagggtctgggagggaccaggaggaaggcgtgctccctgctcgctgtcctggccctgggggagtgagggagacagacacctgggagagctgtggggaaggcactcgcaccgtgctcttgggaaggaaggagacctggccctgctcaccacggactgggtgcctcgacctcctgaatccccagaacacaacccccctgggctggggtggtctggggaaccatcgtgcccccgcctcccgcctactcctttttaagctt

SEQ ID NO: 19 - DNA, 729 bp, Homo sapiens
  source 1..729: mol_type = genomic DNA
ttggccaggcctgaccctcttggacctttcttctttgccgacaaccactgcccagcagcctctgggacctcggggtcccagggaacccagtccagcctcctggctgttgacttcccattgctcttggagccaccaatcaaagagattcaaagagattcctgcaggccagaggcggaacacacctttatggctggggctctccgtggtgttctggacccagcccctggagacaccattcacttttactgctttgtagtgactcgtgctctccaacctgtcttcctgaaaaaccaaggcccccttcccccacctcttccatggggtgagacttgagcagaacaggggcttccccaagttgcccagaaagactgtctgggtgagaagccatggccagagcttctcccaggcacaggtgttgcaccagggacttctgcttcaagttttggggtaaagacacctggatcagactccaagggctgccctgagtctgggacttctgcctccatggctggtcatgagagcaaaccgtagtcccctggagacagcgactccagagaacctcttgggagacagaagaggcatctgtgcacagctcgatcttctacttgcctgtggggaggggagtgacaggtccacacaccacactgggtcaccctgtcctggatgcctctgaagagagggacagaccgtcagaaactggagagtttctattaaaggtcatttaaacca

SEQ ID NO: 20 - DNA, 847 bp, Homo sapiens
  source 1..847: mol_type = genomic DNA
tcctccgggaccccagccctcaggattcctgatgctccaaggcgactgatgggcgctggatgaagtggcacagtcagcttccctgggggctggtgtcatgttgggctcctggggcgggggcacggcctggcatttcacgcattgctgccaccccaggtccacctgtctccactttcacagcctccaagtctgtggctcttcccttctgtcctccgaggggcttgccttctctcgtgtccagtgaggtgctcagtgatcggcttaacttagagaagcccgccccctccccttctccgtctgtcccaagagggtctgctctgagcctgcgttcctaggtggctcggcctcagctgcctgggttgtggccgccctagcatcctgtatgcccacagctactggaatccccgctgctgctccgggccaagcttctggttgattaatgagggcatggggtggtccctcaagaccttcccctaccttttgtggaaccagtgatgcctcaaagacagtgtcccctccacagctgggtgccaggggcaggggatcctcagtatagccggtgaaccctgataccaggagcctgggcctccctgaacccctggcttccagccatctcatcgccagcctcctcctggacctcttggcccccagccccttccccacacagccccagaagggtcccagagctgaccccactccaggacctaggcccagcccctcagcctcatctggagcccctgaagaccagtcccacccacctttctggcctcatctgacactgctccgcatcctgctgtgtgtcctgttccatgttccggttccatccaaatacactttctggaacaaa

SEQ ID NO: 21 - DNA, 110 bp, Homo sapiens
  source 1..110: mol_type = genomic DNA
gctggagcctcggtggccatgcttcttgccccttgggcctccccccagcccctcctccccttcctgcacccgtacccccgtggtctttgaataaagtctgagtgggcggc

SEQ ID NO: 22 - DNA, 27 bp, Homo sapiens
  source 1..27: mol_type = genomic DNA
ttggaccctcgtacagaagctaatacg

SEQ ID NO: 23 - DNA, 189 bp, Homo sapiens
  source 1..189: mol_type = genomic DNA
ttttttttttttttttttttttttttttttttttttttttttttttttttttttttttttttttttttttttttttttttttttttttttttttttttttttttttttttttttttttttttttttttttttttttttttttttttttttttttttttttcttcctactcaggctttattcaaagacca

SEQ ID NO: 24 - DNA, 20 bp, Homo sapiens
  source 1..20: mol_type = genomic DNA
ccttgaccttctggaacttc

SEQ ID NO: 25 - DNA, 20 bp, Homo sapiens
  source 1..20: mol_type = genomic DNA
ccaagcactgaaacggatat

SEQ ID NO: 26 - DNA, 20 bp, Homo sapiens
  source 1..20: mol_type = genomic DNA
gatgaaaagtgctccaagga

SEQ ID NO: 27 - DNA, 20 bp, Homo sapiens
  source 1..20: mol_type = genomic DNA
aaccgtgatgaaaaggtacc

SEQ ID NO: 28 - DNA, 20 bp, Homo sapiens
  source 1..20: mol_type = genomic DNA
tcatgcagattggaaaggtc

SEQ ID NO: 29 - DNA, 20 bp, Homo sapiens
  source 1..20: mol_type = genomic DNA
cttcttggactgtccagagg

SEQ ID NO: 30 - DNA, 20 bp, Homo sapiens
  source 1..20: mol_type = genomic DNA
gcagtccctgatacaagaac

SEQ ID NO: 31 - DNA, 20 bp, Homo sapiens
  source 1..20: mol_type = genomic DNA
gattgaaggtggctcgctac

SEQ ID NO: 32 - DNA, 75 bp, Homo sapiens
  source 1..75: mol_type = genomic DNA
atgatgccatcctcagtctcatggggtattttgctcttggcgggtctgtgctgtctcgtgccggtgtcgctcgca

SEQ ID NO: 33 - DNA, 90 bp, Homo sapiens
  source 1..90: mol_type = genomic DNA
atggccggaccggcgactcagtcgcccatgaaactcatggccctgcagttgttgctttggcactcagccctctggaccgtccaagaggcg

SEQ ID NO: 34 - DNA, 137 bp, Homo sapiens
  source 1..137: mol_type = genomic DNA
atgcagagagtgaacatgattatggccgagtccccatcgctcatcacaatctgcctgcttggtacctgctttccgccgaatgcactgtctttctggatcacgagaatgcgaataagatcttgaaccgacccaaacgg

SEQ ID NO: 35 - DNA, 63 bp, Homo sapiens
  source 1..63: mol_type = genomic DNA
atgaaaggatcattgctgttgctcctcgtgtcgaaccttctgctttgccagtccgtagccccc

SEQ ID NO: 36 - DNA, 72 bp, Homo sapiens
  source 1..72: mol_type = genomic DNA
atgaaatgggtgacgttcatctcactgttgtttttgttctcgtccgcctactccaggggagtattccgccga

SEQ ID NO: 37 - DNA, 63 bp, Homo sapiens
  source 1..63: mol_type = genomic DNA
atgtggtggcggctctggtggctgctcctgttgctcctcttgctgtggcccatggtgtgggca

SEQ ID NO: 38 - DNA, 95 bp, Homo sapiens
  source 1..95: mol_type = genomic DNA
tgctctttaacctccgcatcctgttgaataacgctgcgttccgaaatgggcataacttcatggtacgcaacttcagatgcggccagccactccag

SEQ ID NO: 39 - DNA, 87 bp, Homo sapiens
  source 1..87: mol_type = genomic DNA
atgtccgtcttgacacccctgctcttgagagggctgacggggtccgctagacgcctgccggtaccgcgagcgaagatccactccctg

SEQ ID NO: 40 - DNA, 87 bp, Homo sapiens
  source 1..87: mol_type = genomic DNA
atgagcgtgctcactccgttgcttcttcgagggcttacgggatcggctcggaggttgcccgtcccgagagcgaagatccattcgttg

SEQ ID NO: 41 - DNA, 175 bp, unidentified
  source 1..175: mol_type = unassigned DNA; note = Bacterial signal sequence
tgacaaaaataactttatctccccagaattttagaatccaaaaacaggaaaccacactactaaaagaaaaatcaaccgagaaaaattctttagcaaaaagtattctcgcagtaaaaatcacttcatcgaattaaggtcaaaattatcggaacgttttatttcgcataagaacact

SEQ ID NO: 42 - DNA, 69 bp, unidentified
  source 1..69: mol_type = unassigned DNA; note = Viral signal sequence
atgctgagctttgtggatacccgcaccctgctgctgctggcggtgaccagctgcctggcgacctgccag

SEQ ID NO: 43 - DNA, 96 bp, unidentified
  source 1..96: mol_type = unassigned DNA; note = Viral signal sequence
atgggcagcagccaggcgccgcgcatgggcagcgtgggcggccatggcctgatggcgctgctgatggcgggcctgattctgccgggcattctggcg

SEQ ID NO: 44 - DNA, 51 bp, unidentified
  source 1..51: mol_type = unassigned DNA; note = Viral signal sequence
atggcgggcattttttattttctgtttagctttctgtttggcatttgcgat

SEQ ID NO: 45 - DNA, 66 bp, unidentified
  source 1..66: mol_type = unassigned DNA; note = Viral signal sequence
atggaaaaccgcctgctgcgcgtgtttctggtgtgggcggcgctgaccatggatggcgcgagcgcg

SEQ ID NO: 46 - DNA, 81 bp, unidentified
  source 1..81: mol_type = unassigned DNA; note = Viral signal sequence
atggcgcgccagggctgctttggcagctatcaggtgattagcctgtttacctttgcgattggcgtgaacctgtgcctgggc

SEQ ID NO: 47 - DNA, 57 bp, unidentified
  source 1..57: mol_type = unassigned DNA; note = Bacterial signal sequence
atgagccgcctgccggtgctgctgctgctgcagctgctggtgcgcccgggcctgcag

SEQ ID NO: 48 - DNA, 87 bp, unidentified
  source 1..87: mol_type = unassigned DNA; note = Bacterial signal sequence
atgaaacagcagaaacgcctgtatgcgcgcctgctgaccctgctgtttgcgctgatttttctgctgccgcatagcagcgcgagcgcg

SEQ ID NO: 49 - DNA, 78 bp, Homo sapiens
  source 1..78: mol_type = genomic DNA
atggcgacgccgctgcctccgccctccccgcggcacctgcggctgctgcggctgctgctctccgccctcgtcctcggc

SEQ ID NO: 50 - DNA, 54 bp, Homo sapiens
  source 1..54: mol_type = genomic DNA
atgaaggctccgggtcggctcgtgctcatcatcctgtgctccgtggtcttctct

SEQ ID NO: 51 - DNA, 45 bp, Homo sapiens
  source 1..45: mol_type = genomic DNA
atgcttcagctttggaaacttgttctcctgtgcggcgtgctcact

SEQ ID NO: 52 - DNA, 39 bp, Homo sapiens
  source 1..39: mol_type = genomic DNA
atgctttatctccagggttggagcatgcctgctgtggca

SEQ ID NO: 53 - DNA, 144 bp, Homo sapiens
  source 1..144: mol_type = genomic DNA
atggataacgtgcagccgaaaataaaacatcgccccttctgcttcagtgtgaaaggccacgtgaagatgctgcggctggatattatcaactcactggtaacaacagtattcatgctcatcgtatctgtgttggcactgatacca

SEQ ID NO: 54 - DNA, 96 bp, Homo sapiens
  source 1..96: mol_type = genomic DNA
atgccctgcctagaccaacagctcactgttcatgccctaccctgccctgcccagccctcctctctggccttctgccaagtggggttcttaacagca

SEQ ID NO: 55 - DNA, 138 bp, Homo sapiens
  source 1..138: mol_type = genomic DNA
atgaaaaccttgttcaatccagcccctgccattgctgacctggatccccagttctacaccctctcagatgtgttctgctgcaatgaaagtgaggctgagattttaactggcctcacggtgggcagcgctgcagatgct

SEQ ID NO: 56 - DNA, 57 bp, Homo sapiens
  source 1..57: mol_type = genomic DNA
atgaagcctctccttgttgtgtttgtctttcttttcctttgggatccagtgctggca

SEQ ID NO: 57 - DNA, 63 bp, Homo sapiens
  source 1..63: mol_type = genomic DNA
atgtcctgttccctaaagtttactttgattgtaatttttttttactgttggctttcatccagc

SEQ ID NO: 58 - DNA, 210 bp, Homo sapiens
  source 1..210: mol_type = genomic DNA
atggttcttactaaacctcttcaaagaaatggcagcatgatgagctttgaaaatgtgaaagaaaagagcagagaaggagggccccatgcacacacacccgaagaagaattgtgtttcgtggtaacacactaccctcaggttcagaccacactcaacctgtttttccatatattcaaggttcttactcaaccactttcccttctgtggggt

SEQ ID NO: 59 - DNA, 96 bp, Homo sapiens
  source 1..96: mol_type = genomic DNA
atggccaccccgccattccggctgataaggaagatgttttccttcaaggtgagcagatggatggggcttgcctgcttccggtccctggcggcatcc

SEQ ID NO: 60 - DNA, 87 bp, Homo sapiens
  source 1..87: mol_type = genomic DNA
atgagctttttccaactcctgatgaaaaggaaggaactcattcccttggtggtgttcatgactgtggcggcgggtggagcctcatct

SEQ ID NO: 61 - DNA, 123 bp, Homo sapiens
  source 1..123: mol_type = genomic DNA
atggtctcagctctgcggggagcacccctgatcagggtgcactcaagccctgtttcttctccttctgtgagtggaccacggaggctggtgagctgcctgtcatcccaaagctcagctctgagc

SEQ ID NO: 62 - DNA, 60 bp, Homo sapiens
  source 1..60: mol_type = genomic DNA
atgatggggtccccagtgagtcatctgctggccggcttctgtgtgtgggtcgtcttgggc

SEQ ID NO: 63 - DNA, 69 bp, Homo sapiens
  source 1..69: mol_type = genomic DNA
atggcaagcatggctgccgtgctcacctgggctctggctcttctttcagcgttttcggccacccaggca

SEQ ID NO: 64 - DNA, 135 bp, Homo sapiens
  source 1..135: mol_type = genomic DNA
atggtgctcatgtggaccagtggtgacgccttcaagacggcctacttcctgctgaagggtgcccctctgcagttctccgtgtgcggcctgctgcaggtgctggtggacctggccatcctggggcaggcctacgcc

SEQ ID NO: 65 - DNA, 204 bp, Homo sapiens
  source 1..204: mol_type = genomic DNA
atggattttgtcgctggagccatcggaggcgtctgcggtgttgctgtgggctaccccctggacacggtgaaggtcaggatccagacggagccaaagtacacaggcatctggcactgcgtccgggatacgtatcaccgagagcgcgtgtggggcttctaccggggcctctcgctgcccgtgtgcacggtgtccctggtatcttcc

SEQ ID NO: 66 - DNA, 147 bp, Homo sapiens
  source 1..147: mol_type = genomic DNA
atggagaagcccctcttcccattagtgcctttgcattggtttggctttggctacacagcactggttgtttctggtgggatcgttggctatgtaaaaacaggcagcgtgccgtccctggctgcagggctgctcttcggcagtctagcc

SEQ ID NO: 67 - DNA, 45 bp, Homo sapiens
  source 1..45: mol_type = genomic DNA
atgggtctgctccttcccctggcactctgcatcctagtcctgtgc

SEQ ID NO: 68 - DNA, 78 bp, Homo sapiens
  source 1..78: mol_type = genomic DNA
atggggatccagacgagccccgtcctgctggcctccctgggggtggggctggtcactctgctcggcctggctgtgggc

SEQ ID NO: 69 - DNA, 75 bp, Homo sapiens
  source 1..75: mol_type = genomic DNA
atgtcggacctgctactactgggcctgattgggggcctgactctcttactgctgctgacgctgctagcctttgcc

SEQ ID NO: 70 - DNA, 87 bp, Homo sapiens
  source 1..87: mol_type = genomic DNA
atggagactgtggtgattgttgccataggtgtgctggccaccatgtttctggcttcgtttgcagccttggtgctggtttgcaggcag

SEQ ID NO: 71 - DNA, 105 bp, Homo sapiens
  source 1..105: mol_type = genomic DNA
atgcgcggctctgtggagtgcacctggggttgggggcactgtgcccccagccccctgctcctttggactctacttctgtttgcagccccatttggcctgctgggg

SEQ ID NO: 72 - DNA, 171 bp, Homo sapiens
  source 1..171: mol_type = genomic DNA
atgatgccgtcccgtaccaacctggctactggaatccccagtagtaaagtgaaatattcaaggctctccagcacagacgatggctacattgaccttcagtttaagaaaacccctcctaagatcccttataaggccatcgcacttgccactgtgctgtttttgattggcgcc

SEQ ID NO: 73 - DNA, 108 bp, Homo sapiens
  source 1..108: mol_type = genomic DNA
atggccctgccccagatgtgtgacgggagccacttggcctccaccctccgctattgcatgacagtcagcggcacagtggttctggtggccgggacgctctgcttcgct

SEQ ID NO: 74 - DNA, 63 bp, unidentified
  source 1..63: mol_type = unassigned DNA; note = Bacterial signal sequence
tgaaaaagtggttcgttgctgccggcatcggcgctgccggactcatgctctccagcgccgcca

SEQ ID NO: 75 - DNA, 63 bp, unidentified
  source 1..63: mol_type = unassigned DNA; note = Bacterial signal sequence
atgaaacagagcaccattgcgctggcgctgctgccgctgctgtttaccccggtgaccaaagcg

SEQ ID NO: 76 - DNA, 63 bp, unidentified
  source 1..63: mol_type = unassigned DNA; note = Bacterial signal sequence
atgaaaaaaaccgcgattgcgattgcggtggcgctggcgggctttgcgaccgtggcgcaggcg

SEQ ID NO: 77 - DNA, 63 bp, unidentified
  source 1..63: mol_type = unassigned DNA; note = Bacterial signal sequence
atgaaaaaactgatgctggcgattttttttagcgtgctgagctttccgagctttagccagagc

SEQ ID NO: 78 - DNA, 69 bp, unidentified
  source 1..69: mol_type = unassigned DNA; note = Bacterial signal sequence
atgaaaaaaaacattgcgtttctgctggcgagcatgtttgtgtttagcattgcgaccaacgcgtatgcg

SEQ ID NO: 79 - DNA, 96 bp, Homo sapiens
  source 1..96: mol_type = genomic DNA
atgtttgcgaaacgctttaaaaccagcctgctgccgctgtttgcgggctttctgctgctgtttcatctggtgctggcgggcccggcggcggcgagc

SEQ ID NO: 80 - DNA, 57 bp, Homo sapiens
  source 1..57: mol_type = genomic DNA
atgcgctttccgagcatttttaccgcggtgctgtttgcggcgagcagcgcgctggcg

SEQ ID NO: 81 - DNA, 57 bp, Homo sapiens
  source 1..57: mol_type = genomic DNA
atgcgctttccgagcatttttaccaccgtgctgtttgcggcgagcagcgcgctggcg

SEQ ID NO: 82 - DNA, 57 bp, Homo sapiens
  source 1..57: mol_type = genomic DNA
atgcgctttccgagcatttttaccagcgtgctgtttgcggcgagcagcgcgctggcg

SEQ ID NO: 83 - DNA, 57 bp, Homo sapiens
  source 1..57: mol_type = genomic DNA
atgcgctttccgagcatttttacccatgtgctgtttgcggcgagcagcgcgctggcg

SEQ ID NO: 84 - DNA, 57 bp, Homo sapiens
  source 1..57: mol_type = genomic DNA
atgcgctttccgagcatttttaccattgtgctgtttgcggcgagcagcgcgctggcg

SEQ ID NO: 85 - DNA, 57 bp, Homo sapiens
  source 1..57: mol_type = genomic DNA
atgcgctttccgagcatttttacctttgtgctgtttgcggcgagcagcgcgctggcg

SEQ ID NO: 86 - DNA, 57 bp, Homo sapiens
  source 1..57: mol_type = genomic DNA
atgcgctttccgagcatttttaccgaagtgctgtttgcggcgagcagcgcgctggcg

SEQ ID NO: 87 - DNA, 57 bp, Homo sapiens
  source 1..57: mol_type = genomic DNA
atgcgctttccgagcatttttaccggcgtgctgtttgcggcgagcagcgcgctggcg

SEQ ID NO: 88 - DNA, 63 bp, Homo sapiens
  source 1..63: mol_type = genomic DNA
atgcgttcctcccccctcctccgctccgccgttgtggccgccctgccggtgttggcccttgcc

SEQ ID NO: 89 - DNA, 66 bp, Homo sapiens
  source 1..66: mol_type = genomic DNA
atgggcgcggcggccgtgcgctggcacttgtgcgtgctgctggccctgggcacacgcgggcggctg

SEQ ID NO: 90 - DNA, 53 bp, synthetic construct
  source 1..53: mol_type = other DNA; note = Synthetic signal sequence
atgaggagctcccttgtgctgttctttgtctctgcgtggacggccttggccag

SEQ ID NO: 91 - DNA, 96 bp, Homo sapiens
  source 1..96: mol_type = genomic DNA
atgctcaggggtccgggacccgggcggctgctgctgctagcagtcctgtgcctggggacatcggtgcgctgcaccgaaaccgggaagagcaagagg

SEQ ID NO: 92 - DNA, 69 bp, Homo sapiens
  source 1..69: mol_type = genomic DNA
atgcttaggggtccggggcccgggctgctgctgctggccgtccagctggggacagcggtgccctccacg

SEQ ID NO: 93 - DNA, 93 bp, Homo sapiens
  source 1..93: mol_type = genomic DNA
atgcgccggggggccctgaccgggctgctcctggtcctgtgcctgagtgttgtgctacgtgcagccccctctgcaacaagcaagaagcgcagg

SEQ ID NO: 94 - protein, 24 aa, Homo sapiens
MMPSSVSWGILLAGLCCLVPVSLA

SEQ ID NO: 95 - protein, 30 aa, Homo sapiens
MAGPATQSPMKLMALQLLLWHSALWTVQEA

SEQ ID NO: 96 - protein, 46 aa, Homo sapiens
MQRVNMIMAESPSLITICLLGYLLSAECTVFLDHENANKILNRPKR

SEQ ID NO: 97 - protein, 21 aa, Homo sapiens
MKGSLLLLLVSNLLLCQSVAP

SEQ ID NO: 98 - protein, 24 aa, Homo sapiens
MKWVTFISLLFLFSSAYSRGVFRR

SEQ ID NO: 99 - protein, 19 aa, Homo sapiens
MWWRLWWLLLLLLLLPMWA

SEQ ID NO: 100 - protein, 32 aa, Homo sapiens
MLFNLRILLNNAAFRNGHNFMVRNFRCGQPLQ

SEQ ID NO: 101 - protein, 29 aa, Homo sapiens
MSVLTPLLLRGLTGSARRLPVPRAKIHSL

SEQ ID NO: 102 - protein, 29 aa, Homo sapiens
MSVLTPLLLRGLTGSARRLPVPRAKIHSL

SEQ ID NO: 103 - protein, 59 aa, unidentified
  source 1..59: note = Bacterial signal sequence
VTKITLSPQNFRIQKQETTLLKEKSTEKNSLAKSILAVKNHFIELRSKLSERFISHKNT

SEQ ID NO: 104 - protein, 23 aa, unidentified
  source 1..23: note = Viral signal sequence
MLSFVDTRTLLLLAVTSCLATCQ

SEQ ID NO: 105 - protein, 32 aa, unidentified
  source 1..32: note = Viral signal sequence
MGSSQAPRMGSVGGHGLMALLMAGLILPGILA

SEQ ID NO: 106 - protein, 17 aa, unidentified
  source 1..17: note = Viral signal sequence
MAGIFYFLFSFLFGICD

SEQ ID NO: 107 - protein, 22 aa, unidentified
  source 1..22: note = Viral signal sequence
MENRLLRVFLVWAALTMDGASA

SEQ ID NO: 108 - protein, 27 aa, unidentified
  source 1..27: note = Viral signal sequence
MARQGCFGSYQVISLFTFAIGVNLCLG

SEQ ID NO: 109 - protein, 19 aa, unidentified
  source 1..19: note = Bacterial signal sequence
MSRLPVLLLLQLLVRPGLQ

SEQ ID NO: 110 - protein, 29 aa, unidentified
  source 1..29: note = Bacterial signal sequence
MKQQKRLYARLLTLLFALIFLLPHSSASA

SEQ ID NO: 111 - protein, 22 aa, Homo sapiens
MATPLPPPSPRHLRLLRLLLSG

SEQ ID NO: 112 - protein, 18 aa, Homo sapiens
MKAPGRLVLIILCSVVFS

SEQ ID NO: 113 - protein, 13 aa, Homo sapiens
MLQLWKLLCGVLT

SEQ ID NO: 114 - protein, 13 aa, Homo sapiens
MLYLQGWSMPAVA

SEQ ID NO: 115 - protein, 48 aa, Homo sapiens
MDNVQPKIKHRPFCFSVKGHVKMLRLDIINSLVTTVFMLIVSVLALIP

SEQ ID NO: 116 - protein, 32 aa, Homo sapiens
MPCLDQQLTVHALPCPAQPSSLAFCQVGFLTA

SEQ ID NO: 117 - protein, 46 aa, Homo sapiens
MKTLFNPAPAIADLDPQFYTLSDVFCCNESEAEILTGLTVGSAADA

SEQ ID NO: 118 - protein, 19 aa, Homo sapiens
MKPLLVVFVFLFLWDPVLA

SEQ ID NO: 119 - protein, 21 aa, Homo sapiens [sequence omitted]

SEQ ID NO: 120 - protein, 70 aa, Homo sapiens
MVLTKPLQRNGSMMSFENVKEKSREGGPHAHTPEEELCFVVTHTPQVQTTLNLFFHIFKVLTQPLSLLWG

SEQ ID NO: 121 - protein, 32 aa, Homo sapiens
MATPPFRLIRKMFSFKVSRWMGLACFRSLAAS

SEQ ID NO: 122 - protein, 29 aa, Homo sapiens
MSFFQLLMKRKELIPLVVFMTVAAGGASS

SEQ ID NO: 123 - protein, 41 aa, Homo sapiens
MVSALRGAPLIRVHSSPVSSPSVSGPAALVSCLSSQSSALS

SEQ ID NO: 124 - protein, 20 aa, Homo sapiens
MMGSPVSHLLAGFCVWVVLG

SEQ ID NO: 125 - protein, 23 aa, Homo sapiens
MASMAAVLTWALALLSAFSATQA

SEQ ID NO: 126 - protein, 45 aa, Homo sapiens
MVLMWTSGDAFKTAYFLLKGAPLQFSVCGLLQVLVDLAILGQATA

SEQ ID NO: 127 - protein, 68 aa, Homo sapiens
MDFVAGAIGGVCGVAVGYPLDTVKVRIQTEPLYTGIWHCVRDTYHRERVWGFYRGLSLPVCTVSLVSS

SEQ ID NO: 128 - protein, 49 aa, Homo sapiens
MEKPLFPLVPLHWFGFGYTALVVSGGIVGYVKTGSVPSLAAGLLFGSLA

SEQ ID NO: 129 - protein, 15 aa, Homo sapiens
MGLLLPLALCILVLC

SEQ ID NO: 130 - protein, 26 aa, Homo sapiens
MGIQTSPVLLASLGVGLVTLLGLAVG

SEQ ID NO: 131 - protein, 25 aa, Homo sapiens
MSDLLLLGLIGGLTLLLLLTLLAFA

SEQ ID NO: 132 - protein, 29 aa, Homo sapiens
METVVIVAIGVLATIFLASFAALVLVCRQ

SEQ ID NO: 133 - protein, 35 aa, Homo sapiens
MAGSVECTWGWGHCAPSPLLLWTLLLFAAPFGLLG

SEQ ID NO: 134 - protein, 57 aa, Homo sapiens
MMPSRTNLATGIPSSKVKYSRLSSTDDGYIDLQFKKTPPKIPYKAIALATVLFLIGA

SEQ ID NO: 135 - protein, 36 aa, Homo sapiens
MALPQMCDGSHLASTLRYCMTVSGTVVLVAGTLCFA

SEQ ID NO: 136 - protein, 21 aa, Homo sapiens
MKKWFVAAGIGAGLLMLSSAA

SEQ ID NO: 137 - protein, 21 aa, Homo sapiens
MKQSTIALALLPLLFTPVTKA

SEQ ID NO: 138 - protein, 21 aa, Homo sapiens
MKKTAIAIAVALAGFATVAQA

SEQ ID NO: 139 - protein, 21 aa, unidentified
  source 1..21: note = Bacterial signal sequence
MKKLMLAIFFSVLSFPSFSQS

SEQ ID NO: 140 - protein, 23 aa, unidentified
  source 1..23: note = Bacterial signal sequence
MKKNIAFLLASMFVFSIATNAYA

SEQ ID NO: 141 - protein, 32 aa, Homo sapiens
MFAKRFKTSLLPLFAGFLLLFHLVLAGPAAAS

SEQ ID NO: 142 - protein, 19 aa, Homo sapiens
MRFPSIFTAVLFAASSALA

SEQ ID NO: 143 - protein, 19 aa, Homo sapiens
MRFPSIFTTVLFAASSALA

SEQ ID NO: 144 - protein, 19 aa, Homo sapiens
MRFPSIFTSVLFAASSALA

SEQ ID NO: 145 - protein, 19 aa, Homo sapiens
MRFPSIFTHVLFAASSALA

SEQ ID NO: 146 - protein, 19 aa, Homo sapiens
MRFPSIFTIVLFAASSALA

SEQ ID NO: 147 - protein, 19 aa, Homo sapiens
MRFPSIFTFVLFAASSALA

SEQ ID NO: 148 - protein, 19 aa, Homo sapiens
MRFPSIFTEVLFAASSALA

SEQ ID NO: 149 - protein, 19 aa, Homo sapiens
MRFPSIFTGVLFAASSALA

SEQ ID NO: 150 - protein, 21 aa, Homo sapiens
MRSSPLLRSAVVAALPVLALA

SEQ ID NO: 151 - protein, 22 aa, Homo sapiens
MGAAAVRWHLCVLLALGTRGRL

SEQ ID NO: 152 - protein, 17 aa, synthetic construct
  source 1..17: note = Synthetic signal sequence
MRSSLVLFFVSAWTALA

SEQ ID NO: 153 - protein, 32 aa, Homo sapiens
MLRGPGPGRLLLLAVLCLGTSVRCTETGKSKR

SEQ ID NO: 154 - protein, 26 aa, Homo sapiens
MLRGPGPGLLLLAVQCLGTAVPSTGA

SEQ ID NO: 155 - protein, 31 aa, Homo sapiens
MRRGALTGLLLVLCLSVVLRAAPSATSKKRR

SEQ ID NO: 156 - DNA, 2267 bp, Homo sapiens
  source 1..2267: mol_type = genomic DNA
gagccgctcctgacccacctaccccagctctcgcgccgcgtgcagaggtgctcaagcctcctcgcggtccgcagtcagtgccgccgcgcccggcctcccgcacgccccgcaggtagcgcccccgcccgcggcccagagtgcgctcgcgccggcaccagctcccggataaacggcgcgccgcgcggagatgacagccgaggagatgaaggcgaccgagagcggggcgcagtcggcgccgctgcccatggagggagtggacatcagccccaaacaggacgaaggcgtgctgaaggtcatcaagagagagggcacaggtacagagatgcccatgattggggaccgagtctttgtccactacactggctggctattagatggcacaaagtttgactccagtctggatcgcaaggacaaattctcctttgacctgggaaaaggggaggtcatcaaggcttgggacattgccatagccaccatgaaggtgggggaggtgtgccacatcacctgcaaaccagaatatgcctacggttcagcaggcagtcctccaaagattccccccaatgccacgcttgtatttgaggtggagttgtttgagtttaagggagaagatctgacggaagaggaagatggcggaatcattcgcagaatacagactcgcggtgaaggctatgctaagcccaatgagggtgctatcgtggaggttgcactggaagggtactacaaggacaagctctttgaccagcgggagctccgctttgagattggcgagggggagaacctggatctgccttatggtctggagagggccattcagcgcatggagaaaggagaacattccatcgtgtacctcaagcccagctatgcttttggcagtgttgggaaggaaaagttccaaatcccaccaaatgctgagctgaaatatgaattacacctcaagagttttgaaaaggccaaggagtcttgggagatgaattcagaagagaagctggaacagagcaccatagtgaaagagcggggcactgtgtacttcaaggaaggtaaatacaagcaagctttactacagtataagaagatcgtgtcttggctggaatatgagtctagtttttccaatgaggaagcacagaaagcacaggcccttcgactggcctctcacctcaacctggccatgtgtcatctgaaactacaggccttctctgctgccattgaaagctgtaacaaggccctagaactggacagcaacaacgagaagggcctcttccgccggggagaggcccacctggccgtgaatgactttgaactggcacgggctgatttccagaaggtcctgcagctctaccccaacaacaaagccgccaagacccagctggctgtgtgccagcagcggatccgaaggcagcttgcccgggagaagaagctctatgccaatatgtttgagaggctggctgaggaggagaacaaggccaaggcagaggcttcctcaggagaccatcccactgacacagagatgaaggaggagcagaagagcaacacggcagggagccagtctcaggtggagacagaagcatagcccctctccaccagccctactcctgcggctgcctgccccccagtctccccactccaccctgttagttttgtaaaaactgaagaattttgagtgaattagacctttatttttctatctggttggatggtggctttaggggaagggggaaaggtgtaggctgggggattgaggtggggaatcattttagctggtgtcagcccctcttcccttcctccattgcacatgaacatatgtccatccatatatattcatcagaatgttaatttattttgctccctctgttaggtccattttctaagggtagaagaggcaagtggtagggatgaggtctgataagaacccagggtggagagggagactcctgggcagccgttttcctcatcctttccctctcccagtccatttccaaatgtggcctccatgtgggtgctagggacatgggaaaaaccactgctatgccatttcttctctctgttcccttcctcacccccgacggtgtggctgatgatgtcttctggtgtcatggtgaccaccccctgttccctgttctggtatttcccctgtcagtttcccctctcggccaggttgtgtcccaaaatcccctcagcctcttctctgcacgttgctgaaggtccaggcttgcctcaagttccatgcttgagcaataaagtggaaacaataaaacctgggtgtcagacaa

SEQ ID NO: 157 - DNA, 2079 bp, Homo sapiens
  source 1..2079: mol_type = genomic DNA
gccgcggccccccggttgctgccccgatgcgctgcgcccggagccggggccgagtcgctgccgcagctgttggggcgcccgggccaggcgacgccgccgtcgcccgtgcccctcccagaccgcaccggccgcatggagcccccggagggcgccggcaccggagagatcgttaaggaggctgaggtgccgcaggctgcgctgggcgtcccagcccaggggacaggggacaatggccacacgcctgtggaggaggaggtcgggggcatcccagtaccagcaccggggctcctgcaggtcacggagaggaggcagcctctgagcagcgtctcctctctggaggtccacttcgacctcctggacctcactgagctcaccgacatgtcggaccaggagctggccgaggtctttgctgactcggacgacgagaacctcaacaccgagtccccagcaggtctgcacccgctgccccgggccggctacctgcgctccccttcctggacgaggacaagggctgagcagagccacgagaagcagcccctaggcgaccccgagcggcaggccacagtcctggacacgtttctcactgtggagaggccccaggaggactagaccatctccacctgccccagctcctgcagggatggggtccgaacacgatggcagatctgggcagtgctgacccagcagacacacttcacccgcccacgaggctccagccgtcacctcctgacacacaccctgggggcagctctctgccagccccgagaccggccttgtctgctgggcacgggtcttcgcctcacttggagaccagccggctttcctgggggacacacggggcccccggatgcctctgggagccccagcacaagcacagcccagtggccttacgtccagctcgttcctgggccccgagtcaggaagacagcgtcacggagtcactgccaggaacgtgctgaggaatggagtggcccacggcggccttggggtgaaggggacccaggcctgtgacagccactccaggaactcctgggggtgctccaacctccgcgttttcctgtgctgccaagctcagaagccagaggcgggtttggtagtggctaatgggacaatgtgctgtccagcaaagcacacatggagaagcggccccaaaattcccaccttgatttccatcctgccccttcttctactccacggaggcgctgtctcactagggtcccctccccaaggctcagctctaagacctgcacctgcttctcttggcccctgcgtgacagacaagtccattccctccttagctcagaacaccaaatatcaccagactgcctaagagacttgatgacacctcccggaatgctctcggggtggggttcacctctccttgtcctgcacccactgctaggccacattctcgtttctgctcacatcccattgcccggctacaaggcctgcccacggcccttaaacttgctgggcaggtttggagcccatgggaccccgtgggtctctgtccaggagcagcagaggaggctgacaggccctgctccctctgctctgggggtgtctgggagccccagctcacaccctcccaatgcttatatgctgaagctcacagaatgggcttcttgcctgacagcaagtcaaagaatgagtttaatatcaaagtgtaagcttactttccatccccaagccagcctgccccctgccccatttcccatgagcacacttctggggaaggaaaacaggctcctggccttcactctcagcagagctttggagatgccccaggcatgccctgagctccttctgtgtacctgctcccacttctgagccacccgctgcccctccgcactgctggcaaacccagttcctgcctcagccaggtctccttccctggtttccagtcacacagagcccagcagctttctctttcagtcccataagggcagccttgtgtccctggccacacttccacccgccagggtcttcctccccatctttccatccttcctgctgagcttccacagagctcgtttgcaaacagggggattaaagcatcactgcgcattcgaaggcctg

SEQ ID NO: 158 - DNA, 2224 bp, Homo sapiens
  source 1..2224: mol_type = genomic DNA
tatttgataggaaaatttaaaatgctaaaggaaaaattttcttagcaatttcacaggaaaacctaagttttaagagaggttatcattctgactgggaactgaactattatgactaggtctataatttaataacaagtcacaatatctctctttcttgacatcaatttaaggtgacttttcacatagtagagagaatggcttcagttatacctgcctccaataggtccatgagatctgacaggaatacatatgttggaaaaaggtttgttcacgttaaaaatccttacttggatttgatggatgaagacattctctatcacttggatttgggaacaaaaacacacaacctaccagcaatgtttggagatgtaaagtttgtctgtgtcggtgggagccccaacagaatgaaagcatttgcactgtttatgcacaaggagctcgggtttgaggaagctgaagaagacataaaagacatctgtgctgggacagacagatactgtatgtacaaaaccgggcctgtgctcgccatcagtcacggcatgggcatcccctccatttctattatgcttcatgaactcatcaaattactccaccatgcacggtgctgcgatgtcaccattattagaatcggtacatcagggggaatagggattgcaccagggactgttgtaataacggatatagctgtagactccttctttaagccccggtttgaacaggtcattttggacaacattgtcacccgaagtactgaactggacaaagaactgtctgaagaactgttcaactgtagcaaagaaatccccaacttcccaaccctcgttggacatacaatgtgtacctatgatttttatgaaggccaaggccgactagatggagcactgtgctccttttccagagaaaaaaagttagactacttgaagagagcatttaaagctggtgtcaggaatattgaaatggaatctacagtgtttgcagctatgtgtggactctgtggtctaaaagctgctgtggtctgtgtgacacttctcgacagactcgactgtgatcagatcaacttgcctcatgatgtcctggtggagtaccagcaacggcctcagctcctaatctccaacttcatcagacggcggcttggactttgtgactagacgtcctaactgggcagcccaaccctcccctgcaagtttgtagctcaagttgtaatgtgaaagtcatattttatttgtggcatttttatatagttctcatccacatgctaaatggaaagactttatgaaatccttctctcttaaaaaggaatttattgtaaaagaatactcacactaaattaaattcaaatttcattttagaataagttaactaaatcagtctaataattaaaattttaaaactcctggattatgacatttggagtttcatatgcagcattaattaagctcacatcaaaatagaccagccatttgcacatagttaccagtcactctgtttctgaaaccaatccagaaattcatgttagaacattgtcaggcacttctaggtattggacaagtgacagaaactgatcatccatattcaaaatatttacagaaaaaagtgtcagtgaaatgtaggtctatatggaaaagttaccattaggaaaatatggccatactgcttttttacccctgcactatttcagtgcaccacagaataggattcgagatttacatatgcctgtttgtgattttatctcagaatataacaactctggattacattttcctctcaactgaaaaccctcagtaatgcaaagaaaggccttcctttttcttcagaatcacaagtgactaaattgccttctagccattttttcttgtaaaaaaagtgttttgaggaggctgtattttttattccatttcaatattaaccaaataggctgagaaattcatagcaattgaattaagacttgagttcaagatgttaaaggaatccttttgtatgacttgtccagaccggcctattgccctacccgtttgattctctgggaggcatggtgctcctcctggctgcacatgctctctgtgaactgatcgcatcttgggttcttctcaatttgacatacttgggagtcggaatgactggatgggggatgggtagaggatgactggcacacttgtatagtatgtaatgttgtgtacatattatttatatggttgtggctcaaataaagtttaattccaacaca

SEQ ID NO: 159 - DNA, 1583 bp, Homo sapiens
  source 1..1583: mol_type = genomic DNA
gagccggggggaggggccggggcggtggcggctgtggccggtactggacccggcgggatgagcgaggtggaggcggcagcgggggctacagcggtccccgcggcgacggtgcccgcgacggcggcaggggtggtagcggtggtggtaccggtgcccgcaggggagccgcagaaaggcggcggggcgggcggcgggggcggagccgcctcgggccccgctgctgggaccccctcggcgccgggctcccgcacccctggcaatccggcgacggcggtctcgggaacccccgcccccccggcccggagtcaggcggacaagccggtgctggcaatccaagtcctgggcactgtcaaatggttcaacgtccggaatggttacggattcatcaacaggaatgacaccaaggaagatgtctttgttcaccagacagctattaaaagaaacaaccccaggaagtttctgcgcagcgttggagatggggagactgtggaatttgatgtcgtggaaggagagaagggcgcagaagccactaatgtaactgggcctgggggagtacccgtgaagggcagccgttatgcccccaaccgacgtaagtcccgccgattcatcccccggcctccctcagttgccccaccacccatggtggcagagatcccctcggcggggacaggacctggcagtaaaggggagcgggctgaagactctgggcaacggccccgacgatggtgccccccacccttcttctaccgacggcggtttgtgcgaggcccccggcctcccaaccagcagcagcctatagagggcactgacagggtagaacccaaagagacagccccattggaggggcaccaacagcagggagatgagcgagtccccccgcccagattccggcccaggtaccgaaggcctttccgccccaggccacgccagcagcctaccacagaaggtggggatggtgagaccaagcccagccaaggtcccgctgatggttcccggcctgagccccagcgcccacgaaaccgcccctacttccagcggagacggcagcaggcccctggcccccagcaggcccctggcccccggcagcccgcagcccctgagacctcagcccctgtcaacagtggggaccccaccaccaccatcctggagtgattccaactcaactcagaggacacccagagctgccatctggtatctgccagtttttccaaatgacctgtaccctacccagtaccctgctccccctttcccataattcatgacatcaaaacaccagcttttcaccttttccttgagactcaggaggaccaaagcagcagccttttgctttttcttttttcttccctccccttatcaagggttgaaggaagggagccatccttactgttcagagacagcaactccctcccgtaactcaggctgagaaggaaccagccagctcttacctcctcctggttgcttttcttgcccccaccccaagtttatttttgttttcccccggccccctacctctgaagccattttatgatctgtcatgtgccacctgagcctccagtaaaaacaaaaacaggctttcctgtggt

SEQ ID NO: 160 - DNA, 9913 bp, Homo sapiens
  source 1..9913: mol_type = genomic DNA
gcttgcttgcccggctcgctcacgggtcgttgaggccggtgacatgtctgtgagctgcggaggctgcggcccccagatctttctctttgacactttgcaataaaaaagggcagtgagattgaataggtgttttgtggattaactcttcattgattatatacaacaaaaaatagttatggcgactttcagaaacaatcacatgaagactaaagcatctgtcagaaaaagcttcagtgaagatgtgttccagtctgtaaagtctttattgcagagtcagaaggaactatgcagtgtaacagcagaggactgtttacagcaggatgagcatgccaatttaactgaggtcacatttctgggttttaatgaagagacagatgctgctcatatacaggatttagctgcagtttctttggaacttccagatattctgaattcactccacttctgcagtctaaatgaaaatgaaattatttgtatgaagaatataaataaaccattagatataagcagtgatcctctaaatcagagtcatccttctggaatgctttgtgtcatgagagtgtcacctacatcaccaagacttaggattgattttatctttagtctcctaagtaaatatgctactggtataaggtacaccttggacacattcttgcatcagaagcaccaacttgagaccactgatgaagatgatgatgatactaaccagtctgtgtcatccatagaggatgactttgtcactgcttttgagcacttagaagaggaagagacttcaaagccatacaatgatggaatgaacattactgtgctaaggagccagtgtgatgctgcttcccagacggttactggtcatcatttagaaacccatgatttaaagattctcattagctctggacagcagaagtcattggctaaaccctcaacttcctcagtgaatgtcctgggacataaagaactaccttctgtgaaaacttcagtcacaacatcaatttcagagccttggacccaaaggagtttctataggtcatctaatgcttcagataaagatagtgatttacagaaaacatttttttcgtcttctcctgcctactcatctgaatcagaatgttcaagtccaagtcctgttattttcttggatgaagagggatatcaaaaaagcttaaaagcaaaacttgagctgcctaaaattcctgtgatgaaagatgatatagaggattcagactcagaagtaagtgaattttttgatagttttgatcagtttgatgaactagaacaaactttagagacttgcctgtttaacaaagatcccgtcatagggaagtcatcgcagaggaaagggcacaaacatggaaagtcatgtatgaatcctcaaaaattcaagtttgatcgtccagctctcccagctaatgttagaaagccaactcctcgtaaaccagaatctccatatggtaacctgtgtgatgctccggattctcctcgcccagtgaaggcatcaagggaagatagtggtttatttagtcctattcgatcctctgcttttagtcctcttggaggctgtactccagctgaatgtttttgccaaacagatattggtggagataggattcatgaaaatcatgattctgtttattacacctatgaagactatgcaaaaagcatttcatgtgaagtactaggctcagttcttcgtacccaccatactaataccctatcaaatattaacagtattaaacatggagaaaataaaactgtaacttttaagcatggaaaccttgatcaaaaaaataaatctaaaaataaatccttaatgattaaagatagcattcaaaaatttgcagcagatcttgtggaaaaaagttttggcagtgcatttaaagacttacagaaaggagtctcttcatgtaccaatgctttgtaccacttagccatcaaattgacatcatctgttttgcagatggcatttgatgagctgagaaggcagcgtgcattttcactaaaagaacgtgccattagtggcctggctaactttttggtgagtgaagctttatcaaatgccttaaaagatttacagtatgtaaagaagcagatattcacaaacacagttgctaggtttgctgcagatcttgctgaagagcttgtttttgaaggcatcatggaggtgtgtcagttttcatatcctcaaacgcctgcatctccacagtgtgggtcgtttgactttgaagacaaagtagtgaagttgtatgcaaaagatttgtctgaatctgtaatacaggaagcattcattgagctatcacaagttgatgtgacctttacaacaaaggcagcagttagtgtctctacggataatatcaagtatgtgagtgcagaaagtgtagtgccatcgacacaggctgtcacgttttccccttcttttcacaatcaagcaattatggtgacaaaaccagtgcaggaatataaaaaggaatacacagtgcagcaggccttgttttgtacttctggaattgttacttctataccggtgcccttggcaggaagtgcccttctcccatatcatatttcatctactgcatgtcaggccaaggctcatctgtcatctgatgatagtaattcaaatggtgattctgcccaagtgcatattgccacaaaaaacagagaagaaaaagcagcttgtctcagaaatatttgtttaccttcagaacacaatccaggtaatcagaatgattttaaaccaactaatgacgatattgaaatgcagagttcctcaaaattaccaaatgatcctgcaattattagcaacttttctgcagcagtggtgcatacgatagtaaatgaaactttagagtcaatgacatcattggaagttacaaaaatggttgatgaacgtacagattatttaactaaatctttaaaggagaaaacccctccattttcccactgtgatcaggcagtgctgcaatgcagtgaagctagtagcaataaggacatgtttgctgaccggttatctaaatctattattaaacattccatagataagagcaaatcagtgatcccaaatatagataaaaatgcagtatacaaggaaagcttgcctgtttctggagaagaatcacagttgacaccagaaaagtctcccaaatttcctgactctcagaatcagttaactcactgctcactttcagctgcaaaggattgtgttccagaatgtaaagtttctatggttcatggatcctccctagagacactgccatcttgtccagctgtgacaggtcagaaatctgacttgaaggaatctgctaaggatcaaccactgaaaaagcataacttgaatagtacatcacttgaggccttgtcttttggacaggaaaacccctttcctcattcacatactttctcatctacagcacttacctgtgtagatggtttgcatgtggaagataaacagaaagtcagagacagaaatgtaatacctgatactcctccatcaactcctctagtaccatcccgggctagttctgaatgggatatcaagaagttaactaaaaagctcaagggagaattagccaaagagtttgcacctgctacaccaccttctactccacacaactcatctgttggtagtttgtctgagaatgaacaaaatactatagaaaaagaagagttcatgttgaaactcatgcgatctctttctgaagaagttgagagtagtgaaagtggagagctcccagaagtggatgtgaagtcggagcactcagggaagaaggttcagtttgcagaagcattagctacacacatcctttctcttgcaactgaaatggcagcttcccatttagataacaaaataattcaagaacccaaggttaaaaacccttgcttaaatgtgcaaagtcaaagaagtgtgtcgcctacttttttaaacccctcagacgaaaatttgaaaacattatgcaattttgcgggtgatctggcagcagaagtcattacagaagctgagaaaatagcaaaagtccgaaattgtatgcttttcaagcaaaagaagaacagttgttatgctgatggtgacgaagattataaagtagaagagaagttggatatagaggctgtagtgcacccaagagaagtggatccgtttattctttcattaccaccaagttcttgtatgtcaggtctgatgtataagtatcccagctgtgaaagtgtgacagatgaatatgcaggtcaccttattcagatactaaaacaggaaggtggtaatagtgagttgataatggatcagtatgccaataggcttgcctaccgatctgttaaatcaggattacaggaagcagctaagacaaccaaagtgcagtgcaactcaagaatgttccctgtgccaagttcacaagtgaaaacaaacaaggaactgttaatgttttcaaacaaagagcaccaccaagaagcagacaaaaagagacaaagtaaaagaaatgaaggttacttttgtaaaaatcaaacttgtgaaaggaccctggatccatatagaaatgaggtctcccaactgtatagtttttcaacctctctggttcacagcataacaaaagatgctaaggaagagttgacagcctctctagttggcctaccaaaatccttaacagattcttgcttgtttgaaaaatctggatatgaagaagataatgagtgtcacgttacaccagaattgcctaagtctcttcagccttcctcacaaaatcacaggttttaccacagcactggcagtttaaatggatatggttgtggagacaatgttgttcaagctgtagaacagtatgccaaaaaagtagtggatgacactctagagctaactctaggatctacagtgttccgagtgtctgagaccacaaaatcagcagacagggtcacttatgcagaaaagttgtcacctcttacaggtcaagcttgcagatactgtgaccttaaagaactccacaattgcactggaaattcatctcagcactttttcagacagggttctctcgccagtagtaagccagcttctaatccaaaatttagcagccgctatcagaaatctaggatttttcatctcagtgtccctcagattcatgttaatcttgataagaaggcagtgcttgctgagaagatagttgctgaagccattgaaaaagctgagcgagagctgagcagtaccagcctggcagccgacagtgggatcggacaggagggtgccagctttgctgaaagccttgccacagaaaccatgacagcagctgtcacaaatgttgggcatgctgttagcagttcaaaagaaatagaagactttcagtcaaccgagtctgtcagtagccagcagatgaacctcagtattggtgatgacagcactggtagctggtccaatttaagttttgaagatgaacaccaagatgaaagcagcagttttcatcatctaagtgaaagtaatggtaacagcagtagctggagcagtcttggtttagaaggagatttgtatgaggacaatttatcctttccaacatcagacagtgatggaccagatgataaagatgaagagcatgaggacgaagtagaaggtttggggcaagatggaaagacactgctaattacgaatattgacatggagccatgcacggtagacccccagctaaggattattcttcagtggctcattgcctctgaggctgaagttgcagaactttattttcatgactctgcaaataaggagtttatgctactttcaaaacaattacaagagaaaggatggaaagtgggagacctcctgcaggctgtgcttcaatactatgaagtgatggaaaaagcttccagtgaggagagatgcaagtcgctgtttgattggctcttggaaaatgcatagagcaaaccccaaaccagtatattttagtatttgtttggggaggggaacaagccaataaagatgtttaggataaaatttgaatagtgaatattaacatcgtaagtcagttgggaggcaagtaaatatagctttctgagcgctttgtgttatcactcggtgtatatagttcatacttttgtaatctgtcaaaatactaccttcatttattcttctatacacatgtgtagtgtgtcaagaccctaagaacatgtatttgaaggaaggtctaaccagggggttttcaggggcattgtctgaccacattctttttgtatccaaatagtgctgctagaaactgcactgaagtggctgaggataggttccagtgatagagttataattttgctcctttgcaaacaaatggtatctaattaataactagtctgacatcagaaaataaaattgaggctgatttttaaaaatttctagtagatttttggcctttcctgtttttaaaaatcagtttcattttcatatttcatagatcagctattggtagctttttgatttccccaaactatttaatttcttagcagaaacattagtattttaggtttctataaacactataagtgatagtttcccccatcctttcattgacattatttgccaatgctgccagtcattctggcatgaaaggtgtgtgtgtgtgtgtgtgtgtgtgtgtgtgtgtgtgtgtgtgtaagggagtactttaaccttgccagtttgttccctcttttattttactgttttctttttagaaacccactgttaaaatttaaaaaggtgctttaaaataaaacgcctataaagattgtgcagtaagaatttttattgacaataattaaaattttttttgacaattttgggttcccaacttatcttacaagtgaaaacttaaattgtaaaacatgttgaaattttaaaaattaatgttaatatggaaatgcatttagagaagcccagtagtttttattgttggatttttgaaaaaacctctaccaagaatgtggtgttttttttgtttgtttgtttgtttgttttagaaaaattgggatttccccccaccccgccccacccagataaactatatctacactgtctcgtcaagttctctgacacgatctttctgggctctacatttcctactagtttgtgtccagaaactgcaagttgacatgaatagaggacaaaggttgtgtcttgcttttgtctctctcttccctccctgcaactctctctcccctcctcccactctcttccccctcccccctcctcccactgtctctcacctcccccaccccccactctctctcatctctcgctgtgtcctgtgtatgtgtgggtgtgtgtgtatttgggtgtgtaaatgttggttcttccactactggattttgtaatctaggataaatcactttttttggggactttgattttgctccattacgttttcattttttctgagcactgactgttctgaaagctgcacaaaacgtagaaagaagacatagcgcctgccagggaataggaaatgagggcacttacacattaatgtgaattagtaattgtggtatagaaatgttttatagtgaaagattcaaatttgcttttcaagaaaaatgccaaaagctatttaaataattcgaggttacatcgtaggttttgatttttctcaatttaagatacagaaatacagcaagccttaatataaagtttcctaaagtttcttcaagtattttttaaggtggagaaatgcaggaattgtataaccagaattgttcctgcctttagcttttcagaacttgagatgtggcagcactggactgggtttttttaaatgttaggactaggaatgtttgctcttgttaattatgaattaattgattattaagtttagaatgcatttttacaagtatctaactatcaaattgtgtttagtaacttgagtgtatgcacaagtttgatcaacagcaaaatagagttctgaatttcttttaaagtgatgatatattattttgtgaaactttgtgtttgaaaatgtttatttctgtttatggtgtaatcattctgaggtgaggcttttcttatttcctttgcattttgctagagctgtgctgagttcagcatttgcttatttaaccactacataatgacagaccagttattaggtattagcatgtgtggtaataataatagtggaacttcacacttacatcaattcagtgcaggggcatagaataaaatattaaatattggcagatgtatgaaaagaagtgtgagttaaaaatattgaatattggcaggtgtgaaaacaagtgtcaaaattcctcatatagagaaaataattttgagtttagagtattatcttttaattaagtgtagtctaaacttaactttctgtaaaggcactttgtggtttttccaaagatgttctagatctatttggttgctctatagtcaaacagctcttttgaagacaactgtcttattttattacaaattggcttgacatatttatactgtaacattgtaatattgctgtgctgtacattttggcccttacgaaatacgtctttttcagaactgttaaagttttgatgtacatcgagctgaattctgtttttaccagtttcaaaaccttcaagtgatatgtggaaaaaagtgaatgagacctctgatagggggttttcagaaccttgttcacaccaaaatgtgacagttctttcatgttttcctaaaccaagttaaaattacatgtatattttggtgttaaggttgatttttaagatacttctgatttgtacaaaaggaatgtttcctttataaatcacagaagaaaatgacaatatctgttggatatttgatataatttaatggtgttataaaacctttaagaggattcatggtgaatatatgtgataacatctttatactttgaaaaatgttccacttacccttcagatatttgttgtaagttaattcaattcttaatactttaattttgctccaacaagggctttatgttgctggtaagagaatttatttactaaatgcactatgtataaagtgaaagatagtttacttatctgactttgatattagatggctgacattagtgcacataatgcagagtttaaccttgattcttcaacagagtccagatttaaatgtctacttagttaattagttagctgatattcttccacaattaatatattcaatttcccatcagtatatcactttaaattttatgtttttctaaggaaactttccacagaattttaaacaactgatgcatccatactcagggtgtagggagaatactttgcatttaaaaaccctgtccacctgtcaccagcacaagagaattagagcttcagtgagaatttagaaaaattatactaaagtgagatgcattttttctcattttcagcaagactcctctaagcatttactcatttactgtattcctgctctgaagatgtggatacagaattagtcactcttgtcactttatttatttattggtttttttttaaccatctgtgtacattcctttcatagggtagagttctagttctagaagttcttattttgtttttgttgtaatgtttgaatactatttaatatccggttttaatattgctggatttgctacctttggttacttgtgcagtgttaaaagtaatccactttcttgtttaatataccagatacatagcaaaagcagcttggaataattatagctgtttatttggctgtgctcagttactatattaagatcttgtactgtgtaacagtaactcttttttgcttttcagtaatttaatatgttcacttaacaaaatacgaactttgagatgcactaaagttttgtttcagcagtggctcaaaaaatttcagaaattacttttgtaattatttgcaattaattgttcttttatcttacaattgtttaagcctgtgatctttcttctcccagctaagagttcttcaataaatttaagaaat

SEQ ID NO: 161 - DNA, 1810 bp, Homo sapiens
  source 1..1810: mol_type = genomic DNA
gggcggtgagggggcgggcccgtacgccgattccatatgggcgccggcgcggagcgccgcggggcagcgcggggtcgccatggctgagctgcagcagctccgggtgcaggaggcggtggagtccatggtgaagagtctggaaagagagaacatccggaagatgcagggtctcatgttccggtgcagcgccagctgttgtgaggacagccaggcctccatgaagcaggtgcaccagtgcatcgagcgctgccatgtgcctctggctcaagcccaggctttggtcaccagtgagctggagaagttccaggaccgcctggcccggtgcaccatgcattgcaacgacaaagccaaagattcaatagatgctgggagtaaggagcttcaggtgaagcagcagctggacagttgtgtgaccaagtgtgtggatgaccacatgcacctcatcccaactatgaccaagaagatgaaggaggctctcttatcaattggaaaataaaagtatttgccagtggccatcagggctgagggcaagaatatattttttataaggaattgggaattttagtcttttaagcaaagtttacgaatgaagaaatgaaggatggccacaagcgtaaggcatatgtcacttgcctctggacactggttattttatgtttcagtccctaaaaaatgaaatggaaaaaagtggtgctaaatcgagtcagagatattacaggagagttttagagcttattatttcctgtggccagtgcttgtcctggcagtaaggctttcccctgtaacaagccagagccctccaaggtaccagactcttcttactacacaggtactaacaggctggcaggttagagttggtggagtctgaggagagatattttctctttgttgccaacatcctgtttaccaaaagtgtcaccccaccatcttccataagctgtgaaacaaaatcaatgaggtcactaacttagaagggaaagaaagttttctgggtctttgttttcttgatttggggtaatttatacaagggcatacaagttgattttaagatgtggaactgggaggtagactagtttggataagaactttgaaatgttccttgtggatccccatttctggtcatcaagatgtggatgtacatttcttaaaattattacatgctgcatctttcagcctggagactgtgcagaaacatgagaggtgatgacacactaattatgggaagcagaattactggctgatggcccctgaggctgtgtgtaacaaaatgacaggacaatcttgcagtaacactttccccttgaagagaagggggttttgattgtgatatatactagtatctaggaatgaacagtaaaagaggagcagttggctacttgattacaacagagtaaatgaagtactggatttgggaaaacctggttttattagaacatatggaatgaaagcctacacctagcattgcctacttagccccctgaattaacagagcccaattgagacaaacccctggcaacaggaaattcaagggagaaaaagtaagcaacttgggctaggatgagctgactcccttagagcaaaggagagacagcccccattaccaaataccatttttgcctggggcttgtgcagctggcagtgttcctgccccagcatggcaccttattgttttgatagcaacttcgttgaattttcaccaacttattacttgaaattataatatagcctgtccgtttgctgtttccaggctgtgatatattttcctagtggtttgactttaaaaataaataaggtttaattttctccccac

SEQ ID NO: 162 - DNA, 3177 bp, Homo sapiens
  source 1..3177: mol_type = genomic DNA
ccccgctcccaagtgcgcgcggacccctagctccctctgagttgcgctgggcttggctgctgcaccatgaccctggaggcgatccgctactcgcggggctccctgcagatcctagaccagctgctgctgcccaagcagagccgctacgaggcggtgggctcggtgcaccaggcctgggaggccatccgcgccatgaaggtgcggggcgccccggccatagccctggtgggctgtctcagcctcgccgtggagctgcaggcgggcgccgggggaccgggactcgccgcgctcgtggccttcgtgcgcgacaagctgagcttcctcgtcaccgcccggcccaccgctgtcaacatggcccgcgccgcccgcgacctggctgatgttgcagcccgggaggccgaacgggagggcgctacggaagaggcggtccgggagagagtgatctgctgcaccgaggacatgctggagaaagacctcagagacaaccgaagcattggggacctaggagcccgccacctcctggagcgggtggcccccagcggtggcaaggtgactgtgctgacccactgtaacactggtgctctggccaccgctggctatggtacagccctaggtgtgattcgctcactgcacagcctgggccgcctggagcatgccttctgcacagagacccggccctacaaccagggagcccggctgacggcctttgagctggtctatgagcagatccccgccacccttatcaccgacagcatggtggctgctgccatggcccataggggcgtgtcagctgtggtcgtgggagctgaccgcgtggttgccaacggcgacacagccaacaaggtgggcacctaccagctggccattgtcgccaagcaccatggcattcccttctacgtggctgcccccagctcttcatgtgacctccgtctggagaccggcaaggagatcattattgaagagcgaccgggccaggagctgaccgatgttaatggggtccggattgcagcacctgggattggagtttggaatcctgccttcgatgtcaccccccacgacctcatcactggtggcatcatcacagaactgggggtctttgcccctgaggagctccggacagccctaaccaccaccatctcttccagggatggaaccctagatggaccccagatgtaaccaactcagctctccctagcctgcctctctaggtttttcaatacatttcttgaatggctacccaaaagctgaccgtccagcccctgaccacacttgttcctagtgcagggagctcagacagggccttccatctagagcccagcacctagagccaggctgcccagattcaaatcctgactccgccacttttcccactgtatgatcttgggcaagtcacttcacctctctgtgccttggtttcctcatttataaaatgtggataacaggccgggcgcagtggctcacacctgtaatcccagcactttgggaggccgaggcaggtggatcacaagatcaggagattgagaccatcctggctaacatggtgaaaccccatctctactaaaaatacaaaaaattagccgggtgtggtggtgggcacctgcagtcccagctacttgggaggctgaggcaggagaatggcgtgaaactgggaggcagagcttgcagtgagccgagatagcgccactgcactccagcctgggcaacagagcgagactccgtctcaaaaataaatataattaattaattatttaattaaaaaaataaaaaataaatgtggataatactagtacctccctcttaaggtcagggctggagctagggtgacatctccagggcagaattttaagaggacaccaaaaaagctcagcaaccaagataaaaaatattttaaagcaatattttgttttgggttttttttttttgagatcaagtatcactcgttacccaggctggaatgtagaggcgagatctcagctcactgaaacctgtgcctccccggttcaagcgattctcctgccacagcctcctgagtagctgggattacaggcatgcgccaccatgcccagctaatttttctatttttagtagagacatgatttcaccatgttggccaggctggtctcgaactcctgactcaaatgatccccctgcctcagcctcccaaagtgctgggactacaggcatgagccactgtgcctgaccttacagcagtattttttaaaaatcaaaattaatgcaaaaatccatgatgaggccaggcttggtggctcatgcctgtaattccagcactttgggaggatcccttgagcccaggtgtttgagaccagtttgggtaacataggaagagcttgtctctacaaacaaaaatttaaaaacaatgagctgggcatggaactcacacctctagccccagctactcaggctgaagtgggaggatggcttgagcccaggagttcaaggatgcagtgtgctttgattgcactactgcacttcaccctaagcaacagagtgagaccccatctctttaaaaaaaaaaaaaaatccatgatgaacaaaacaagtatttgtttgagacggggtctcgctctgtcgcccaggctggagtacagtggtgccatctcagctcactgcaacctccgccttctgggttcaagcgactctcctgcctcagcctcccgagtagctgggattacaggagcctggcactatgcctggctaatttttgtatttttattggagacaccatgttagtcgtggctggtctccaactcctgacctcgggtgatccgcgccccgcggcctccgaaagtgctgggattacaagcgtgagccaccgtgcccggcctaaataaaattttgaagaggctagaaccccgcacttgtgccttgagcttactgacctcaacaccctggttccactaaaactttatttacaaaattatgctgccggtctgcaggatgtagtttaacaatttgattattttggatattaaaatattttttaagtcttgaaaatattgtttactattaccaaagtttttgaaccttcttaaattctgtaccagaggtgagtgccacaccctaacctagtctgagtttttatgtgtaaagatcataaaacgttgtaagttttctaaaacacataagctctcaataaacgttagcttatcattgtca

SEQ ID NO: 163 - DNA, 4051 bp, Homo sapiens
  source 1..4051: mol_type = genomic DNA
cgagcgcaaggacagcgcgaggtccgcgcagcccagcgcagccatggagccccgcgcggactcactctatgatgtccctgtcggtgcggccgcagcgccgtctgctcagcgcccgggtcaataggagccagtccttcgcaggcgtcctcggcagccacgagcgggggcccaggagtttcccggtcttcagcccgccggggcccccacggaagccccccgcgctctcccgagtgtccaggatgttttccgtggctcacccagccgccaaggtgccgcagcccgagcggctggacctggtgtacacggcgctgaagcggggcctgacggcctacttggaagtgcaccagcaggagcaagagaaactccaggggcagataagggagtccaagaggaattcccgcttgggcttcctgtatgatctggacaagcaagtcaagtccattgaacgcttcctgcgacgactggagttccatgccagcaagatcgatgagctgtatgaggcatactgtgtccagcggcgtctccgggatggtgcctacaacatggtccgtgcctacaccactgggtccccgggaagccgagaggcccgggacagcctggcagaggccactcgggggcatcgcgagtacacggagagcatgtgtctgctggagagcgagctggaggcacagctgggcgagtttcatctccgaatgaaagggctggctggcttcgccaggctgtgtgtaggcgatcagtatgagatctgcatgaaatatgggcgtcagcgctggaaactacggggccgaattgagggtagtggaaagcaggtgtgggacagtgaagaaaccatctttctccctctactcacggaatttctgtctattaaggtgacagaactgaagggcctggccaaccatgtggttgtgggcagtgtctcctgtgagaccaaggacctgtttgccgccctgccccaggttgtggctgtggatatcaatgaccttggtaccatcaagctcagcctggaagtcacatggagccccttcgacaaggatgaccagccctcagctgcttcttctgtcaacaaggcctccacagtcaccaagcgcttctccacctatagccagagcccaccggacacaccctcacttcgggaacaggctttctataacatgctgcgacggcaggaggagctggagaatgggacagcatggtccctgtcatctgaatcttcagacgactcatccagcccacagctctcaggcactgcccgccactcaccagcccctaggcccctggtgcagcagcccgagccccttcccatccaagttgccttccgcaggcctgagacccccagctctgggcccttggatgaggagggggccgtggccccagtcctggcaaatgggcatgcaccctacagtcggactctgagccacatcagtgaggctagtgtagatgctgccttggctgaggcttcagtggaggccgttggcccagaaagcctagcctggggacctagcccacctacacacccagctcccacccatggagagcaccccagtcctgttcctcctgccctggaccctggccactctgccacaagctctaccctcggtacaacaggctctgtccccacatctacagaccctgccccatctgcacacctagactcagttcataagtccacagactctggcccttcagaactgccaggccccactcacaccactacaggctctacctatagtgccattaccactacccacagtgctccaagccccctcactcacactactacaggctccacccacaagcccataatctctacccttactactacaggccctaccctcaatatcataggcccagtccagactaccacaagccccacccacactatgccaagccctacccataccacagcaagccccactcatacttccacaagccccacccatacccccacaagtcccacccacaaaaccagtatgtcacctcccaccactacaagtcctacccccagtggtatgggcctagtccagactgccacaagtcccacccatcctaccacaagccccacccatcccaccacaagccccatccttataaatgtaagcccttccacttctctagaacttgctaccctctccagcccctccaaacactcagaccccaccctcccaggcactgactcccttccctgtagtcccccagtctccaattcctacactcaggcagaccctatggcccccagaactccccacccaagtcctgcccattccagtaggaaacccctcacaagccctgccccagatccctcagagtctacggttcagagtctaagccccactccctcacccccaacccctgcaccccagcattcagacctttgcctggccatggctgtccagaccccagtcccaacggcagccggagggtctggggacaggagcctggaggaggcactgggggccctaatggctgccctggatgactaccgtggccagtttcctgagctgcagggcctggagcaggaggtgacccgcctagaaagtctgctcatgcagagacaaggtctgactcgcagccgggcctccagtctcagcatcactgtggagcatgccttggagagcttcagcttcctcaatgaagacgaagatgaagacaatgatgttcctggggacaggcctccaagcagcccggaggctggggctgaggacagcatagactcacccagtgcccgccccctcagcacggggtgtccagctctggatgctgccttggtccggcacctgtaccactgcagtcgcctcctgctgaaactgggcacatttgggcccctgcgctgccaggaggcatgggccctggagcggctgctgcgggaagcccgagtactggaggcagtatgcgagttcagcaggcggtgggagatcccggccagctctgcccaggaagtggtgcagttctcggcctctcggcctggcttcctgaccttctgggaccagtgcacagagagactcagctgcttcctctgcccggtggagcgggtgcttctcaccttctgcaaccagtatggtgcccgcctctccctgcgccagccaggcttggctgaggctgtgtgtgtgaagttcctggaggatgccctggggcagaagctgcccagaaggccccagccagggcctggagagcagctcacagtcttccagttctggagttttgtggaaaccttggacagccccaccatggaggcctacgtgactgagaccgctgaggaggtgctactggtgcggaatctgaactcggatgatcaggctgttgtgctgaaggccctgagattggcgcccgaggggcgtctgcgaagggacgggctgcgggccctcagctccctgctcgtccatggcaacaacaaggtcatggctgctgtcagcacccagctccggagcctgtcactgggccctaccttccgggagagggccctcctgtgcttcctggaccagctggaggatgaggacgtgcagactcgagtggctggctgcctggccctaggctgcatcaaggctcccgagggcattgagcccctggtgtacctctgccaaactgacacagaagctgtgagggaagctgcccggcaaagcctacagcagtgtggagaagagggacagtctgcccatcgacggctggaggagtccctggacgccctgccccgcatctttgggcctggcagcatggccagcacagcattctaaactattcacccatgggttcctggtgcccctttccccccactttcagggctcaccaggcactggcagggagggtaagggctggctccagatacccctcccccacagattcctagcaatgaaaatctaatatattcttctgttgcccctggggttggagagtcagtgcctgcagtcaagtgcctcccagcctcggctcagcacatcccttgccacaaatcagtgtctggggcttggccaccctgccgctgcccagccacatcccttggttttgtattttatttacagagttttacagaaaataaaaaagcaaaatgtctttccta

SEQ ID NO: 164 - DNA, 2048 bp, Homo sapiens
  source 1..2048: mol_type = genomic DNA
cagactgccataagatggcgtccgtggcggctgcacgagcagttcccgtgggcagtgggctcaggggcctgcaacggaccctacctcttgtagtgattctcggggccacgggcaccggcaaatccacgctggcgttgcagctaggccagcggctcggcggtgagatcgtcagcgctgactccatgcaggtctatgaaggcctagacatcatcaccaacaaggtttctgcccaagagcagagaatctgccggcaccacatgatcagctttgtggatcctcttgtgaccaattacacagtggtggacttcagaaatagagcaactgctctgattgaagatatatttgcccgagacaaaattcctattgttgtgggaggaaccaattattacattgaatctctgctctggaaagttcttgtcaataccaagccccaggagatgggcactgagaaagtgattgaccgaaaagtggagcttgaaaaggaggatggtcttgtacttcacaaacgcctaagccaggtggacccagaaatggctgccaagctgcatccacatgacaaacgcaaagtggccaggagcttgcaagtttttgaagaaacaggaatctctcatagtgaatttctccatcgtcaacatacggaagaaggtggtggtccccttggaggtcctctgaagttctctaacccttgcatcctttggcttcatgctgaccaggcagttctagatgagcgcttggataagagggtggatgacatgcttgctgctgggctcttggaggaactaagagattttcacagacgctataatcagaagaatgtttcggaaaatagccaggactatcaacatggtatcttccaatcaattggcttcaaggaatttcacgagtacctgatcactgagggaaaatgcacactggagactagtaaccagcttctaaagaaaggacctggtcccattgtcccccctgtctatggcttagaggtatctgatgtctcgaagtgggaagagtctgttcttgaacctgctcttgaaatcgtgcaaagtttcatccagggccacaagcctacagccactccaataaagatgccatacaatgaagctgagaacaagagaagttatcacctgtgtgacctctgtgatcgaatcatcattggggatcgcgaatgggcagcgcacataaaatccaaatcccacttgaaccaactgaagaaaagaagaagattggactcagatgctgtcaacaccatagaaagtcagagtgtttccccagaccataacaaagaacctaaagagaagggatccccagggcagaatgatcaagagctgaaatgcagcgtttaagagacatgtccagtggcctttggaaaggtggtggggatccagttcaggagggaggggtatgtttgtctcccagtctgggcaaaggagtgctatgcggaattctctgcatagcagaaaagctcccaccattttcttttgatgtggttttaaagtctcacgttctctataatagaaacagcaggtcttgtcagctccttgtgtggctgatgtgtctggaaatgatgtagttcaggaaagcattttttttttctttgaaccttaaaggttctattattaaaagcagcacagattccacatttttatacatgaggatcttctttgtggtgaataccaggattgactgcatccctttaaagaagttttatgtccctgactctggctaaaattatctaatttccagatgcttttgtagatgactgaagtatttgtgagccacatattgggagttctagatttgagtgaatggcaggaaagggccatctccattgagatgattaagtgaaccaaactagttctcagaattctacagagaaggagggaatcagactgaggaagctgtgacataggacttgaagaccaaagactttgaaatttgcgagctgctcatgtgtgagttattatcactgctgtctttctattgagttacaaatctatatttttattgaagtttaaataaagaaaaaatttacaagagcctctttgatcctt

SEQ ID NO: 165 - DNA, 990 bp, Homo sapiens
  source 1..990: mol_type = genomic DNA
ggctccctgtcgccgcggaggggcgggggcaggacgcgcaactccggccggagctgtccggggtcgtgagccggccccgccttggtggcggcgccccctcgcggtccagaggcagacgcatcgggtgggctcgggtctccagcccggccgggaggagggaccgggtctgcggagcggggactcggggcctcggcggggcgcgcacacgcaggcggggcggcccggggtgcggggcctctgcgcggctgaccaggctcccagagcgtcagcgccgcccatggccgagccgctccagccagaccccggggcggccgaggacgcggcggcccaagctgtggagacgccgggctggaaggccccggaggacgccggcccccagcccggaagttatgagatccgacactatggaccagccaagtgggtcagcacgtccgtggagtctatggactgggattcagccatccagacgggctttacgaaactgaacagctacattcaaggcaaaaacgagaaagagatgaaaataaagatgacagctccagtgacaagctacgtggagcctggttcaggtccttttagtgagtctaccattaccatttccctgtatattccctctgaacagcaatttgatccacccaggcctttagagtcagatgtcttcattgaagatagagccgaaatgactgtgtttgtacggtctttcgatggattttctagtgcccaaaagaatcaagaacaacttttgacattagcaagcattttaagggaagatggaaaagttttcgatgagaaggtttactacactgcaggctacaacagtcctgtcaaattgcttaatagaaataatgaagtgtggttgattcaaaaaaatgaacccaccaaagaaaacgaatgagaaaaatgaaaggaagttctgctgtcagaggcaaaacatctgtttatcatagacatcaacatgacctataagtaaagtgcgtgtctagtgtcttc

SEQ ID NO: 166 - DNA, 2190 bp, Homo sapiens
  source 1..2190: mol_type = genomic DNA
gacagactcccagaagatctgagcgagtcgcgtagctgagcccggcaggggctggggtggtgctgctgctatgagctgcaccatcgagaagatcctgacagacgccaagacgctgctggagaggctacgggagcacgatgcggccgccgagtcgctggtggatcagtcggcggcgctgcaccggcgggtagcagctatgcgggaggcggggacagcgcttccggaccagtatcaagaggatgcatccgatatgaaggacatgtccaaatacaaacctcacattctgctgtcccaagagaacacacagattagagacttgcaacaggaaaacagagagctatggatttccttggaggaacaccaggatgctttggaacttatcatgagcaaatatcggaaacagatgttacagttaatggttgctaaaaaagcggtggatgctgaaccagtcctgaaagctcaccagtctcactctgcagaaattgagagtcagattgacagaatctgtgaaatgggagaagtgatgaggaaagcagttcaggtggatgatgaccagttttgtaagattcaggaaaaattagcccaattagagcttgaaaataaggaacttcgagaattattgtccatcagcagtgagtctcttcaagccagaaaggaaaactcaatggacactgcttcccaagccatcaaataactgaactctgaatgatggctggagattgtctatcaaggaaggaagttactgtcttcccattcaagtactgtccattaagtgtcttgcctcagatttgatttaatcttaattaaaggtatcaggtggcaatttagaattccagtcaatattggctgtccacagttctcagatgtgttaatgtgaatactacatgctgaatttcaccattcctttctcaaagagactacttttaattttcatttctgggaccttgatttatataaactatgttttcagttctttgttatttttcacatctctgaaactttgagcattttttataagccagcaatttattttacatagcattgtaaaatacacttctaggaaattttaggaaagatttaactgtttaaatctatttggcataaaccttgattttttttttccatttgacaaaaataatacaattccacagaactagatcagcagattctctgatttgtaatgtcattcacctgtgacattttaagtctctctggtgctaagaattggcactttatagcctggtgcctttacttttaatttgagagaacctactgctagtcccaggaaacacacttggaaataagtcagctattttttttgcccagtgatgctatagttgtcatattgtccaaagttcatattgttcaaagctgaggagcttgtcctgtgtatgtgaatgcacacatgtgcacttagttcaaatactaaaagtagcttttattaaatataatcagccaaaaacacacacaaaataaaaaaaacaaatataagtagtcagtttttcaatgttatcctactagttctacattctattttaatttttatacaatttccattttatagttaagaaccatcacttacttggattggatgtctttcattcctagcactaatagttggctttctttttttttgtttacatagaagcagggtttttttttatcttttttctttttttttgtttaagctatataaaaaggtgaggaagcagttttgttacctaatgaaaattattacactcataatgctgtgtaggcaacattgagattcaaatgcccagtggtcaactgggttcactcatcaactcattcccgtcccagtttactcacatttcaaatttataaatttcttcatgttatactattctatttagatttgcccagaattagttgaaataatgctaaacctgtcaatattttccagtaacattaagcaccatactgcatgggagagacacagtactaaaaagagttgttagtgctttatgtgagtgatatttctttcgtaatgctataaagaactacagttaaaataacaaaatattttaaagatgtcctaaaagcatctgatcccagtaataactaatggatgtcatctagagcagtgggtgttaatgaataggtatatgtcatttaagaatttttcaaatttctgtttgatatcctgcatagaatttgacaaaaaaaaca

SEQ ID NO: 167 - DNA, 4391 bp, Homo sapiens
  source 1..4391: mol_type = genomic DNA
ggggggggcggaggctccgtggaaatgtgtcggtgacattgaatggggagaccgagcgcgagcgaggcgcgcgcgcgcacacgcgcactcacggccccgctcgctccgagatccccggccacgtaagtaactattaataccgcctcgccgggggatgcgggcgtgctgagcgcggggattggcctcgggcaccgtcggccgtcccctttaatttttaaatacacggtcccctcttttctctggggggggcaagcaagaaatcaaagaaggaggagacaagccgtcaattttctccaaaacaaaccccaccgggcaatttggtctcggggtagggggagacggggtgattgcaaattattccaggacgagatccagttctccagcgggaaaggggcaaaggaacgccgcgcgttggaagggccagggacgcagctccccttgcagcgcccgcaggacccccgcaagctcgtgccggcgaaatcggagaccgccgatctgtcctcgttctctcctgcacgtctggctgcattcggaggaagacctggggcgcgagcgagcggcgacagcatgagcctgtgctgacctccgcgcggcgggccgagcccagggctttgtcgcggtacctgcgcccagcccgcgccgcaactctgtgcccagcttttgcaatcttttgttggcagcgctgaccgcaccaagttaaatgctcccttgcaatttttcttttttttgtttgtttgtttaatttttggagagctcgcgatcttggaaaagcctcagacgccatctacagttaaaacgtaggtaactgccctctcccgcaccccccccttacacgccccccaccctttccaccaaaaaaagggggtgcagcgcggattctggctgccgtgcgtcgccagccggtagacccgtgcttgtttcctttctctttttgtttggcttctaacgcgttgggactgagtcgccgccgtgagctccccgaagactgcacaaactaccgcgggctcctccgccccgtctgcgattcggaagccggcctgggggtcgcgtcgggagccctggcgctgcagctccgcaccttagcagcccgggtactcatccagatccacgccggggacacacacacagagtaactaaaagtgcggcgattctgcacatcgccgactgctttggggtaacaaaaagacccgagttgcctgccgaccgaggacccccgggagccgggctcggagcagacgaggtatccggcggcgcccatttgggggcttctaactctttctccacgcagcccctcttctgtcccctcccctctcgctcccttttaaaatcagtggcaccgaggcgcctgcagccgcactcgccagcgactcatctctccagcgggtttttttttgtttgtcgtgtgcgatcctcacactcatgaacatacacaggtctacccccatcacaatagcgagatatgggagatcgcggaacaaaacccaggatttcgaagagttgtcgtctataaggtccgcggagcccagccagagtttcagcccgaacctcggctccccgagcccgcccgagactccgaacttgtcgcattgcgtttcttgtatcgggaaatacttattgttggaacctctggagggagaccacgtttttcgtgccgtgcatctgcacagcggagaggagctggtgtgcaaggtgtttgatatcagctgctaccaggaatccctggcaccgtgcttttgcctgtctgctcatagtaacatcaaccaaatcactgaaattatcctgggtgagaccaaagcctatgtgttctttgagcgaagctatggggacatgcattccttcgtccgcacctgcaagaagctgagagaggaggaggcagccagactgttctaccagattgcctcggcagtggcccactgccatgacggggggctggtgctgcgggacctcaagctgcggaaattcatctttaaggacgaagagaggactcgggtcaagctggaaagcctggaagacgcctacattctgcggggagatgatgattccctctccgacaagcatggctgcccggcttacgtaagcccagagatcttgaacaccagtggcagctactcgggcaaagcagccgacgtgtggagcctgggggtgatgctgtacaccatgttggtggggcggtaccctttccatgacattgaacccagctccctcttcagcaagatccggcgtggccagttcaacattccagagactctgtcgcccaaggccaagtgcctcatccgaagcattctgcgtcgggagccctcagagcggctgacctcgcaggaaattctggaccatccttggttttctacagattttagcgtctcgaattcagcatatggtgctaaggaagtgtctgaccagctggtgccggacgtcaacatggaagagaacttggaccctttctttaactgagctcatgccccacggagacttagcaggttccaggagtgagcgagggcagcggaaaggagttcttccgggggacacgaattgcctggctgagtagcaagaaagacacactcttaagtttcttggttcagagcaggaaaaccttcaaggagctgactgaccacgtagcatgggggcaagaggcgtgggatggggattggggtgagatggatgggagcccgctggagcttgtcttccctaacatagcctgggagaccaccccttgccacttgggccacttccgcctaccccacttttcattttgttccaaaatagttgcagatcctgacagaatcaaaactctctgcctcaaacacacatcctggcatcgcactgttagcatttaacttcttgttaggattcagggaaggaacagttggccaagaattttttttcttttaaacaagccaaccacctagctggtaattaatgaggttcacttaaaaaaaaaattcggtgcacacagactgacatgaaacctgggtgctacagtaaaagaaaacaaaagtccagtttgtgtctcttaatcgctcacttcaactcatttcttctaaataaactatttaatatcctggtcaggaaatgacatgttaatgctttgctccctgaagggggaaaaaatctgtcctttaacaagctattctgttttgtgtcaattggttcgtggcaggaagctattagaagtcaaacgtccagatgcattactgctatcttagtttaaagggggaaagaaaagggaagaagaaaggaaaagagaaatccaactcctttttcatgttttgcttttgaacaatgagggtttgtgtgacaggcattcctctttgctgagatgatagcaatggcctgagattttagcaagctcctggagtctgatgcttttgcagtactctgatcgcaactaaacatttgtctttgttttattagaaactagtgaaacaaagcaggttgtcccacatgtataaaatacagggcagctatttagttttctttacagagaatgatccttttaaggcttgtaaggccctctggtttggacaaaaaccctcagtagagacaagcgggaaggataattagctgaaagctatgatgatataaataaaaacagctctctatcccaatacgcacctttgtattttcaagaactcttctatttattaaggaaaatgtcacattgtgatgtattaagccagtacttcaattacgggttgacttgggatgacatattacatgctgtagttaacatttataattctttttccttgtttgagtatttctgtctctgaaataaccttttacttggcttttctagatagctttatttgatttcgagtggcaaaatgttttttattacggcttttctattgctgtatgatacagaactcttttggcataaatatttgtgttcccagtacctcacttgttcggatttgactgcctgtatatgttttgtgaaatggtcctgtttttgggtaggtgacacgtggactctagtatgtaaatgttacttgaatctgtgcttcataatagtgtgtggcatgtatgtgcagactcttggatgctttatgcctgcgcagcaggagccctgtcctcacgttcccaggagggcggcttcacccttcgtaaccaggagacaaggcggccatggatttgcccttgattctattttgctaatggaagatagaaaggagagaaggttttttttttttttaacattctgaagatggtgctgtgtcaagaaggaccttttttttcccctctcccctattttttaagtaccttggaggaggagaggttggtgacatgcatggtggggatctatggcctctggtgctttgtcctgtatttggtttaatgtttttgtcctaatctcttcaatcaataaaattgtgcgtatttaactaaaa

SEQ ID NO: 168 - DNA, 3504 bp, Homo sapiens
  source 1..3504: mol_type = genomic DNA
ggaggtgagcaggaaggagacggccgcccagcagcccgtgggcaggcgcggcggagcgagcggggccggcggcgggcgccgagggacgccgaggcctcgggcgggggctggcccggggttccaggtctccagtgggggctgcagactaagcaaaatgaggcggttcctgaggccagggcatgaccctgtgcgggagaggctcaagcgggacctgttccagtttaacaagacggtggagcatggcttcccgcaccagcccagcgccctcggctacagcccgtccctgcgcatcctggccatcggcacccgttctggagccatcaagctctacggagccccaggcgtggagttcatggggctgcaccaggagaacaacgctgtgacgcagatccacctcctgcccggccagtgccagctggtcaccctgctggatgacaacagcctgcacctttggagcctgaaggtcaagggcggggcatcggagctgcaggaggatgagagcttcacactgcgtggacccccaggggctgcccccagtgccacacagatcaccgtggtcctgccacattcctcctgcgagctgctctacctgggcaccgagagtggcaacgtgtttgtggtgcagctgccagcttttcgtgcgctggaggaccggaccatcagctcggacgcggtgctgcagcggttgccagaggaggcccgccaccggcgtgtgttcgagatggtggaggcactgcaggagcaccctcgagaccccaaccagatcctgatcggctacagccgaggcctcgttgtcatctgggacctacagggcagccgcgtgctctaccacttcctcagcagccagcaactggagaacatctggtggcagcgggacggccgcctgctcgtcagctgtcactctgacggcagctactgccagtggcccgtgtccagcgaagcccagcaaccagagcccctccgcagcctcgtgccttacggtccctttccttgcaaagcgattaccagaatcctctggctgaccactaggcaggggttgcccttcaccatcttccagggtggcatgccacgggccagctacggggaccgccactgcatctcagtgatccacgatggccagcagacggccttcgacttcacctcccgtgtcatcggcttcactgtcctcacagaggcagaccctgcagccacctttgacgacccctatgccctggtggtgctggctgaggaggagctggtggtgattgacctgcagacagcaggctggccaccggtccagctgccctacctggcttctctgcactgttccgccatcacctgctctcaccacgtctccaacatcccgctgaagctgtgggagcggatcattgccgccggcagccggcagaacgcacacttctccaccatggagtggccaattgatggtggcaccagcctgaccccagccccaccccagagggacctgctgctcacagggcacgaggacggcacggtgcggttctgggatgcctcgggtgtctgcctgcggctgctctacaaactcagcactgtgcgcgtgttcctcaccgacacggaccccaacgagaacttcagtgcccagggcgaggacgagtggcccccactccgcaaggtgggctcctttgacccctacagtgatgacccccggctgggcatccagaagatcttcctctgcaagtacagcggctacctggctgtggcaggcacggcagggcaggtgctggtactggaactgaatgacgaggcagcggagcaggctgtggagcaggtggaggccgacctgctgcaggaccaagagggctaccgctggaaggggcacgagcgcctggcagcccgctcagggcccgtgcgctttgagcctggctttcagcccttcgtgttggtgcagtgtcagcccccggctgtggtcacctccttggccctgcactctgagtggcggctcgtggccttcggcaccagccatggctttggcctctttgaccaccagcagcggcggcaggtctttgttaagtgcacactgcaccccagtgaccagctggccttggagggcccactctcccgcgtcaagtccctcaagaagtccttgcgtcagtcattccgccggatgcgtcggagccgggtgtccagccggaagcggcacccggctggccccccaggagaggcacaggaggggagtgccaaggctgagcggccaggcctccagaacatggagctggcgcctgtgcagcgcaagatcgaggctcgctcggcagaggactccttcacaggcttcgtccggaccctgtactttgctgacacctacctgaaggacagctcccggcactgcccctcgctgtgggctggcaccaatgggggcaccatctatgccttctccctgcgtgtgcctcccgccgagcggagaatggatgagcctgtgcgggcagagcaggccaaggagatccagctgatgcaccgggcgccggtggtgggcatcctggtgctcgacggacacagcgtaccccttcccgagcccctcgaagtggcccatgatctgtcgaagagccctgacatgcagggaagccaccagctgctcgtcgtatcagaggagcagttcaaggtgttcacgctgcccaaggtgagtgccaagctgaagttgaagctgacggccctggagggctcaagagtgcggcgggtcagcgtggcccacttcggcagtcgtcgagccgaggactacggggagcaccacctggcagtccttaccaacctgggcgacatccaggtggtctcgctgcccctgctcaagccccaggtgcgctacagctgcatccgccgggaggacgtcagtggcatcgcctcctgcgtcttcaccaaatatggccaaggcttctacctgatctcaccctcggagtttgagcgcttctctctctccaccaagtggctggtggagccccggtgtctggtggattcagcagaaaccaagaaccaccgccctggtaacggtgcgggccccaagaaggccccgagccgagccaggaactcagggactcagagtgatggcgaggagaagcagcccggcctggtgatggagcgcgctctgctcagtgatgagagagcggcaactggcgttcacatcgagccgccgtggggtgcagcctcagcaatggcggagcagagtgagtggctgagcgtccaggctgcgcgatgagcacacactactactgatggcctttcgggggtccctgccccaaccggagaggccggtgcacagggccccgccaggggctgggggcatcccggcttccacaatgcagctgctctgggcctcgggagaggagagaccccagtcccctgggctgcccttcccgggcctcgtctgtctgggtcctttggtcaatgttgcacagtttttattgctcccatccctttttgtagtgggctgggttttaagttataaatgttaactgcctctgggtgaaaaagtttttaataaacacctattacctcttg

SEQ ID NO: 169 - DNA, 1940 bp, Homo sapiens
  source 1..1940: mol_type = genomic DNA
agacgctcgggggaacatggcggctgcggagccggcggtccttgcgctccccaacagcggcgccgggggcgcgggggcgccgtcgggcacagtcccggtgctcttctgtttctcagtcttcgcgcgaccctcgtcggtgccacacggggcgggctacgagctgctcatccagaagttcctcagcctgtacggcgaccagatcgacatgcaccgcaaattcgtggtgcagctgttcgccgaggagtggggccagtacgtggacttgcccaagggcttcgcggtgagcgagcgctgcaaggtgcgcctcgtgccgttgcagatccagctcactaccctgggaaatcttacaccttcaagcactgtgtttttctgctgtgatatgcaggaaaggttcagaccagccatcaagtattttggggatattattagcgtgggacagagattgttgcaaggggcccggattttaggaattcctgttattgtaacagaacaataccctaaaggtcttgggagcacggttcaagaaattgatttaacaggtgtaaaactggtacttccaaagaccaagttttcaatggtattaccagaagtagaagcggcattagcagagattcccggagtcaggagtgttgtattatttggagtagaaactcatgtgtgcatccaacaaactgccctggagctagttggccgaggagtcgaggttcacattgttgctgatgccacctcatcaagaagcatgatggacaggatgtttgccctcgagcgtctcgctcgaaccgggatcatagtgaccacgagtgaggctgttctgcttcagctggtagctgataaggaccatccaaaattcaaggaaattcagaatctaattaaggcgagtgctccagagtcgggtctgctttccaaagtataggacatttgaagaactggtatgctactcactggtgaaggacagtcaggtgaaggactgtaagcccacacaagctcttcttatctctactagaattaaaatgttaagtcaaaaacggctccttttttgcgcctcctagtgaaacttaaccagctagaccatttgagtaccagcatttagttacaaacgtcaaaggcttccggtgctgcttaccttccttttttgttaatgtgcttttatttattaaaaaaaattacaatgaagatgcctgttttgtctctactgtgtactctgatcgtatctttccaaagtgcagactcttgtgaagttttcttaaattgttcactttaaagaaaatgacgtaccaacaatgatttggcttttatattactgtaagatgttataatgttaatgtggatgtagtgcttttactttacagattgattggaataagattattgcatatgaatttacccacaggactctgaatcatgttacccactcccctcacaatgttgtccacttagtgagttgcattgatctatccgtaccaaatgatgttgaataattacatatctttcttgactatactgatttcttattttggtcactattactaaatctctgttaatattctctcttttaactgaaaagggatgggatagaagggtttgcaatgccatattattggtggagggctgttttaacatctttgaagtatggcttgctgaatatctttaccaacatcttgaatatatattctagtgtccacaagatttagcaaaaagataaagcttgggtggaatatcattttaaaatgttcatgttctgttctatattttcttcacctactctccaaatattgtaatgcaaaaagtctcagtaatgatttggtagtattaattttgtggtcattgtttctcttcgataaatttattttcattaaatacttgttagagggttttgaaatgtttttcaaatatgtgaaatgtgaaactgctgtcttttatattaaagtaattaaagaaaa

SEQ ID NO: 170 - DNA, 3433 bp, Homo sapiens
  source 1..3433: mol_type = genomic DNA
gtgctattagatttgcaaattgctgatctcccagtgactttccctcttagatcccagttgagtatggttaccttgagaactgtggtattagccatgttagagcatgctccactggggagttctgtgcagtctatttttaatgctatttaatgaaggagcgagcgcctcactcagcaataaaagaagcatgagggaagacagagcagtgcatggttatggatactggacaaggatatttggaaaggttgacgatgtgtcacactgtgtaagggaatcgcatggagatgggcattccgaactgttaatggggacatgggactccagttgtctctgatcacttgtgtggattttcctggcgtagaacgacagaagccgctagtaagtcgccaagacctacagcaggaattctgcaccaaagggcataaaatcttgttattttaatttgcatctgggagaatgtctgagcaaggagacctgaatcaggcaatagcagaggaaggagggactgagcaggagacggccactccagagaacggcattgttaaatcagaaagtctggatgaagaggagaaactggaactgcagaggcggctggaggctcagaatcaagaaagaagaaaatccaagtcaggagcaggaaaaggtaaactgactcgcagccttgctgtctgtgaggaatcttctgccagaccaggaggtgaaagtcttcaggatcaggaatcaattcatttacagctttccagtttttccagcctgcaagaggaggataaatctaggaaagatgactctgaaagagaaaaagaaaaggataaaaacaaagataaaacctctgaaaaacccaagatcagaatgttatcaaaagattgcagccaagaatacacggattctacaggcatagacttacacgagtttctgattaacacattaaagaataattccagggacaggatgatacttttgaaaatggagcaggaaattattgatttcattgctgacaacaataatcattataaaaagttccctcagatgtcatcgtatcagaggatgcttgtccatcgagtggcagcttattttggattggatcacaatgtggatcaaacaggaaaatctgttatcatcaacaagaccagcagcaccagaataccagagcaaaggttttgtgaacatttaaaagatgaaaaaggtgaagaatcccagaagcggtttatcttgaagcgagataactctagtattgataaagaagacaatcagcaaaacagaatgcatccatttagagatgacagacgaagtaaatcaattgaagagagagaagaggaatatcagagagtgagggagagaatatttgcacacgattcagtttgctcccaggaaagcctttttgtggaaaacagtaggctcttggaagacagtaacatatgcaatgagacctataagaaaagacagctctttcggggcaacagagatggctcagggagaacatctgggagtcgacagagcagctcagaaaatgaactcaagtggtctgaccaccaaagggcctggagcagcacagactccgacagttccaaccgcaatctaaagcccgccatgaccaagacggcgagttttgggggcatcacggtgctgaccaggggtgacagcacttccagtactaggagtaccgggaagctgtccaaagcaggttccgagtcttccagcagtgcaggctcctcaggatcgctgtcccgcacccatccacctctccagagcacacccctagtctcaggtgtggcagctggctctccaggctgtgtgccttatccagagaatggaatagggggccaggttgctcccagcagcaccagctacatcctccttccacttgaagctgcaacaggcatcccgcctggaagcatccttcttaatccacacacaggccagccctttgtgaatcccgatggaactcctgcaatatacaacccacccaccagtcagcagcccctgcgaagcgccatggtggggcagtcccaacagcagccaccacagcagcagccctccccgcagccccaacagcaggtccagccaccgcagccacagatggcaggccctctggtcactcagagagatgatgtggcaacacagtttggccagatgaccctgagccggcagtcctcgggggagactcctgaacccccatcaggtcctgtctacccatcctcccttatgccacagccggcccagcagcccagctatgtaatcgcctctacaggccagcagcttcctacaggaggattctcaggctctggccctcccatctcccagcaggtcctccagccccctccctcaccacagggatttgtgcaacagcctccgcctgcacagatgcctgtatattattacccatctggtcagtaccctacctcaaccacgcaacagtaccggcccatggccccggttcagtacaacgctcagaggagtcaacagatgccacaggcagcacagcaagcaggttaccagccagtcttgtctggtcaacagggattccaaggcctaataggagtgcagcagccacctcagagtcagaacgtgataaataaccaacaaggaactccggtgcaaagcgtgatggtttcctacccaacaatgtcttcttatcaggtgccaatgacccagggttctcaaggactgccccagcagtcataccaacagccaatcatgctacctaaccaggcaggtcaagggtcactcccagccactggaatgcctgtttactgtaatgtcacaccgcccacccctcagaacaaccttaggctgattggcccacactgcccctccagcactgtcccagtgatgtcagctagctgcagaacaaactgtgcaagtatgagcaatgctggttggcaggtcaaattctgagagctctggctgtggtacatttcttcagatatttctcatggcctttgatggaagaggaacaaggtgggaaaactggctgaggacttaagtattcactcaacactcaaatgattgctgctggtattctgtaaaaaataaacaaagactaatatacacgttagctggttaatggtgcatatttctgtcatgtctgctaggtatgcctttatagcttagctagtgacatgaattcatcaaggtaagattttctcctaccactgaataccactgtgtagattataatatccctaatttggattagttttgtactttgtgttgagtttgtgatgctaaaagtatttaaaaattatatactaaatcacattgtaccaaagctgtaatggaaaagcaaagaagaattgatgaattgaaggaataatttatatacattatagagttttcttttttaatggatatatactgtattgtagtgtttaatcaaaataaaactatttgaccttatggaggaaggtcatgtttttaccaccagtttggttca

SEQ ID NO: 171 - DNA, 2464 bp, Homo sapiens
  source 1..2464: mol_type = genomic DNA
ctcgctctgtcgcccaggctggagtgtagtggagccatctcggctcactgcaacctccgcctccccggttcaagcaattctcccgcctcagcctcccgagtacttgggattacaggcgcccgccacctcgcccggctactttttgtatttttaatagagacggggtttcgccgtgttggtcaggctggtctcaagctcctgacctcaagtgatctgcttgccttggtctcctaaagtgctgggattacaggcgtgagccaccgcgtccggcccaaaagccttttttggatgagaaagactcactcagcttcgtcctgaagagcaagtgggctggggaagaggagagtatgaatgtgagtccaagagcaagttttgcacttttttcttcaaagaatgtcaccgtctgaagaatgcgattggaagacacacacacacacacacacacacacacacacgcagccggttctctacaggattagaaaaaacttgcgcgaattaatctgcgtagttaaaaacaaatacgaaatgagcgagaaagcacatagtagtcaaatctcgccaccacataaacaggttaagtttggaagcacagcccctaacattcggtgctgcttagcatctccgacttccggcgtcctccgttgctaaggtgaccagaggcgcgtcctaacgctccgcccaacaaaccatagagtaccggaaaaagctcgagcagaggggtcggaaagggaaaacaactacggctgcggtgtggttggtggtgagatgacgaccttagtgctggataatggagcttacaacgccaaaatcggttacagccatgaaaatgtgtcggttattcctaattgtcagttccggtcaaaaacagcacgtcttaaaacttttactgccaaccagatagatgaaataaaagacccttctggactcttttacatcctcccttttcaaaagggctacttggtgaattgggatgttcagagacaagtttgggattacctttttggaaaagaaatgtatcaggttgattttttagatactaatattattatcactgaaccatactttaacttcacttcaattcaagaatcaatgaatgaaattctatttgaagaataccagtttcaagcagtattaagagtaaatgctggggctctcagtgcacataggtatttccgagataatccttccgaattatgctgtatcattgttgatagtggatattcctttacacatatagttccttattgtagaagtaaaaagaaaaaagaagcaattattcggataaatgtgggaggaaaactcttaaccaatcatctaaaggagatcatatcttacaggcagctacatgttatggatgaaacacatgtgattaatcaagtgaaagaagatgtatgctatgtgtctcaggatttttatagagacatggatattgcaaagttgaaaggagaagaaaatacagtaatgatagactatgtcttgcctgacttcagtacaattaaaaagggcttttgtaagccaagggaagagatggtgttgagtggaaaatacaaatctggggaacaaattcttcgtttggccaatgagagatttgctgttccggaaatactctttaatccttctgatataggcattcaagaaatgggaattccagaagctattgtctattcaattcaaaatctacctgaagaaatgcagccgcatttttttaagaacattgtcttgacaggaggaaattcccttttcccaggatttagggatcgggtttactcagaagttcgatgtcttactccaacagattatgatgtttctgttgtgctgcctgaaaaccctattacttatgcctgggaaggtggaaaattgatatcagagaatgatgattttgaagatatggtggtaacaagagaagattacgaagaaaatggacatagcgtctgtgaagagaaatttgatatttaagcaacatttttgaatgaaagttgtgaccataaggtttaatttcaaagttccttttaaaagaggttaaggaactgtgttaccttttgtcctaagaaaaaggcttgaatttatgtaaatactttgatcgattgctaattttcaaaggcttcttaggtaggttactacagtaaactgtaactcagtccacattttcatttaggagctagactaccataacaatgcttatgctgtttccaagggtaggttatttttcattaaaagaagaatgaatgcattttaagtttaattcttcatagctgaaagcacaaatttaacggcttcactggacagttttccttagaaggtagttttgtgtgactgtgactaaactattttattttaaaatgtcattcttatttatacattctaaagttggaaagactgatcttatatgtgtataatgtttattttgtacctagagtacatttaaaagggtggagactaagctaataaagtttttttggccact

SEQ ID NO: 172 - DNA, 4467 bp, Homo sapiens
  source 1..4467: mol_type = genomic DNA
gcggaaaccggaagcggcggctgtccgcggtgccggctgggggcggagaggcggcggtgggctccctggggtgtgtgagcccggtgatggagccgggcccgacagccgcgcagcggaggtgttcgttgccgccgtggctgccgctggggctgctgctgtggtcggggctggccctgggcgcgctccccttcggcagcagtccgcacagggtcttccacgacctcctgtcggagcagcagttgctggaggtggaggacttgtccctgtccctcctgcagggtggagggctggggcctctgtcgctgcccccggacctgccggatctggatcctgagtgccgggagctcctgctggacttcgccaacagcagcgcagagctgacagggtgtctggtgcgcagcgcccggcccgtgcgcctctgtcagacctgctaccccctcttccaacaggtcgtcagcaagatggacaacatcagccgagccgcggggaatacttcagagagtcagagttgtgccagaagtctcttaatggcagatagaatgcaaatagttgtgattctctcagaattttttaataccacatggcaggaggcaaattgtgcaaattgtttaacaaacaacagtgaagaattatcaaacagcacagtatatttccttaatctatttaatcacaccctgacctgctttgaacataaccttcaggggaatgcacatagtcttttacagacaaaaaattattcagaagtatgcaaaaactgccgtgaagcatacaaaactctgagtagtctgtacagtgaaatgcaaaaaatgaatgaacttgagaataaggctgaacctggaacacatttatgcattgatgtggaagatgcaatgaacatcactcgaaaactatggagtcgaactttcaactgttcagtcccttgcagtgacacagtgcctgtaattgctgtttctgtgttcattctctttctacctgttgtcttctaccttagtagctttcttcactcagagcaaaagaaacgcaaactcattctgcccaaacgtctcaagtccagtaccagttttgcaaatattcaggaaaattcaaactgagacctacaaaatggagaattgacatatcacgtgaatgaatggtggaagacacaacttggtttcagaaagaagataaactgtgatttgacaagtcaagctcttaagaaatacaaggacttcagatccatttttaaataagaattttcgatttttctttccttttccacttctttctaacagatttggatatttttaatttccaggcatagcaatgttatctattttaatgtgtatttgtcacaataacagaacatgcaagaacaatcattattttattttataggcatttgattactattctagacttctggtatcttcttactaacataaatatctcaagtagaaaagtttttgaaaactaacatttaaaaattaatcagttacagtaaagactttgaaaaagaaatgtacttgttaggaagtagcttaattaccccccattgcagtattattgttatatatatagttaatatgttgtacatcacaataatatataattcagtctctagtttccctagagtcatttttgaaaccactgattgcaaacctccctgacaatttttaaaagtagtaagccacattacatttatctttgtaaaaagatttatggtaactggtttcttacttgacttttataaatagtattttacatcttatttttgcctttatttcataagtaatttaaaaatcactggattgctttattatattcagggcaatatggattatttttataccaaggatttgcatcgtgaattacattaagttatttggcaatttataatttattactactttaaatcaaatgtagcattatcacactgtatttaaattgtcattttttaaaggaatattttcttcttaagatatatagaggattttggagaagagagacaggaggggtaaaaccagcttaaggttcagcgagcagaaagggacctgagaggatgctcactgtaagactgttggacagtggtgtgtattgaggggatgaatcggaacgatagtctcatgcagaaaatagtgagattaagatcatccttattgtttctaaattatttcaatcagatgaaagtgatacgattgaaatgaaatcacatagttcgtgctcagaaattctattttggtatgtttgtattagcctttagaaaaaacactccgtttcagaattgttcacagttttatttcttaggtttttagagttcaggatttcatttattaatttcttcttgcttttttggtggaaataggctttgttgtaaacattaagaatataaaatctcctctatatagaaacaagaattttgttaaaaagagaatttgaatcccttcctatactataaaatgctctatagggagacaaagtgtttcttttttcttttatgtttactgtttatgtggagtgaaatataaggctcttggatgtataacatactcaaaagctgttacactttctctgatctgctgtgatccactgaaaatgtgctggggtttgttctgctgtcactgtttatgctgctggaacttagcactgtcttgatttgaagcatatgattgagagccatttgaagcaatcttcattaatgcagataaaacaagtttacatgtgcagagttagaaaatgacatgttcaattctgtaagtggtgactttttgagcacctttcagtattatgtatttgtaaaaaccattgtttttggatataaagctaataagcactttaaaaaggaaaaggcagcctttactattttttctggttgagtcattgctctttagacctagcatcagcaatagatttcaaagataagtattaagcgctaccctaaagtgtgtaagtttttcattttgtcatattgaaaaatgatttgcatagtactgaatgttgacacacagcttatatgtatttacaagaatatctttaagtgtttttttgacacattaaaataaaggaaataaggaaattgtaagctttatttggatttttaaatacatttttaaaatttcagatgtaatttaacatcacatttgtttttcaggtattgagtttagatgcctacttttatgagtaccatcagctggacacagtgtctcatacctgtatttgcagcactttgggaggctgaagcagatcgctggagcttatgagttcgagaccagcctggacaacatagtgaaacactgtctctgcaaaaaatacaaaaattagctgggtatggtggtaagtgcctgtagtcctagctacttgggaggctgagatgggaggatgtcttgagcccgggaggtggaggttgcaatgagccaagattgtaccactgcattccaacctgggcgacagagccagaccttgtctcaaaaaaaaaaaaaaaaaaagaaaaaagaaagtactgtctgtcttaaattttgctgcaaataaaaatgtactttggattatttattgttgaacttgagagatagaaataacatcagatatattttttcttttttttttataattaattttttttttttttttttttgtagagacagtgtctcactatgttgcccaagctggtcttgaactcctgagttcaagagatcctcctgccttagcctcccaaagtgctgggattacaagcataagcaccacacctggctgaacatcagatattttaaagtgtagcccagagtctagttggtaaatgttacttatattgggactagtattttctaatgtttctgggatatgctccctataaaatgaaatgttttcctggaacaatgctaattaggattgcattcctggccaaagacatgacatcaaataagtaatagacatcaccagcaatgaattttgaaaagcaaaaaatactattaacctatataaccatttaaaatttaaaaaattatgttccaagtacctctattttctgagctagaagaaaccttagaggccatctgatgatagattcccagagctggatggatccctagggactacctaatctgactttctgtccactgcatggattcttctaaaaagtatgtcacttatttccctaccttattaagactaaataagtggaacatcatagagctctttatttataacagtcattctttgatagtcaactcttaaatggagacttgagatgcttaaatattgtactactgtgcttatcttgtaaagatttcataaaatgatagtattggttattttaaaaaggctttggcttatgctgaattatacatgtagcaccaaaatgttacaactctactaaatttccttgttctaaactattatattagctataataaatattagtcatacatgtaacatgtttaatgacaaataactttctttatctccttggaattaaagagggcttttaaaagataa

SEQ ID NO: 173 - DNA, 2584 bp, Homo sapiens
  source 1..2584: mol_type = genomic DNA
aggaggaggggccggcagcctggaagggaaaggacagcggagagcagggcagagcctgagcaggcagggcacctccaggtgggcaggagctaccactcagcaccatgagcaccgccacaggcccagaagctgccccaaagccaagcgccaagtctatctatgagcagaggaagcgttactccacagttgttatggctgatgtatcccagtacccagtcaatcacctggtgacgttctgcctgggtgaggacgatggcgtgcataccgtggaggatgcctccaggaagttggccgtcatggatagccagggccgagtctgggcacaggagatgctgctgcgagtgtctcccgaccatgtcacgctgctcgacccggcctccaaggaggagctggagtcgtacccactgggcgccatcgtgcgctgtgacgcggtgatgccacccggcaggagccgctcgttgctgctgctcgtgtgccaggaacccgagcgcgcgcagcccgacgtgcacttcttccagggcctgcgcctcggggcggagctgatccgagaggacatccagggggctctgcacaattaccgctcgggccgcggggagcgcagggcggcggcgctcagggccacgcaggaggagttgcagcgcgaccgctcgcccgccgctgagaccccgcccctgcagcgccgcccgtcagtccgcgcagtgatcagcaccgtagagcggggcgcgggccgcggacgaccccaggcgaagcccattcccgaggcagaggaggcgcagaggcctgagccggtggggacctcgagcaacgctgactcggcctccccggacctgggtccccggggtcctgacctggcggttctgcaggcggagcgggaagtggacatcctgaaccacgtgttcgacgacgtagagagctttgtatcgaggctgcagaagtcggcggaggcggccagggtgctggagcaccgggaacgcggccgcaggagccggcgccgggcggctggggagggcttgctgacgctgcgggccaagccgccctcggaggccgagtacaccgacgtgctgcagaagatcaagtacgccttcagcctgctggcccggctgcgcggcaacatcgccgacccctcctctccggagctgttgcacttccttttcgggcctctgcagatgattgtgaacacgtcgggggggccggagttcgcgagcagtgtgcggcggccgcatctgacatcggatgccgtggcgctgctgcgggacaacgtcactccacgtgaaaacgagctctggacctcgctgggggactcgtggacccgccccgggctggagctgtccccggaggagggacccccatacagacccgagttcttcagcggctgggagccgccggtcactgacccgcagagccgcgcctgggaggacccagttgagaaacagctacagcacgagcggaggcgccggcagcaaagcgccccccaggtcgctgtcaatggtcaccgagacttggagccagaatctgagcctcagctggagtcagagacagcaggaaaatgggtcctgtgtaattatgacttccaggcccgcaacagcagtgagctgtcggtcaagcagcgggacgtactggaggtcctggatgacagtcgtaagtggtggaaggttcgggacccagcggggcaggagggatatgtgccctacaacatcctgacaccctaccccggaccccggctgcaccacagccaaagccctgcccgcagcctgaacagcactcctcctccaccaccagccccagccccggccccacctccagctctggctcggccccgctgggacaggccccgctgggacagctgcgatagcctcaacggcttggaccccagcgagaaggagaaattctcccagatgctcatcgtcaacgaggaactgcaggcgcgcctggcccagggccgctcgggaccgagccgcgcagtcccagggccccgcgccccggaaccgcagctcagcccgggctcggacgcctccgaggtccgcgcctggctgcaggccaagggctttagctccgggaccgtggacgcgctgggtgtgctgaccggggcgcagcttttctcgctgcagaaggaggagctgcgggcggtgagccccgaggagggggcacgtgtgtacagccaggtcaccgtgcagcgctcgctgctggaggacaaagagaaagtgtcagagctggaggcagtgatggagaagcaaaagaagaaggtggaaggcgaggtggaaatggaggtcatttgacctgccaggcgcccttcgcaaagagtgacgaggccccgtgggagaacggactcctcagactctccccaatagcggaagtcgatcttctgaaggatggccaatctgctccggccctggtcttcccccatcccggtggacagacttaacgatccttgctgcagtccctccggagaggatctggactggctgggagtggggagggcgtggagacagtctacggaaagcgctagcagacccccgagagggtgcagtggagccctgagcattgtaatatgcggcccagcctataaacagcctccgtgcttagc

SEQ ID NO: 174 - DNA, 6287 bp, Homo sapiens
  source 1..6287: mol_type = genomic DNA
gcggcggcggcggcggcggcagcagcggggctgggggcggcgagtggcccgcgcgacacgcgccggcctcgaccctatgctttgattcgcgtggcgcaggcgcctactgccccgccggcggggcccgggcttcctgccgcgggatgttctcccgaaggagccacggggatgtgaagaagtccacccagaaggtgctggacccgaagaaggacgtgctgacccgcctgaagcacctgcgggcgctgctggataatgtggatgcaaatgatcttaagcagttttttgagaccaactattctcagatatatttcatcttctatgaaaattttatagcactggaaaatagtttgaaattaaaagggaataataagtcacaaagggaggagctggactccatcctcttcctttttgaaaaaatactgcagtttctacctgaacgaattttctttcgatggcattaccagagtataggctcaactttaaagaagcttctacacactggaaattctattaagataagatgtgaaggaatcaggctgtttcttctgtggcttcaagcacttcagacaaactgtgcagaagagcaggttctgatttttgcttgcctggtgcctggtttcccagcagtcatgtcatccaggggcccttgcacactggagacactcatcaatcccagccctagtgtagctgatgtaaagatatatccagaagaaatcactccactcctaccagccatatcaggggagaagattgctgaggaccaaacctgcttttttcttcaaatactgttgaagtatatggttattcaggctgcgagcttggagtggaagaataaggagaatcaagatactggttttaaatttctttttacattgtttcgaaagtattatcttcctcatttatttccatcatttactaagttaacaaacatctacaaacctgtacttgacatcccccatttgagaccaaagcctgtgtacattactaccactcgagacaatgagaacatttacagtacaaagattccatatatggcagctcgtgttgtttttattaagtggattgtaaccttctttttggaaaaaaagtatctaactgcaacacaaaacactaaaaatggagttgatgtattgcctaaaatcatccagactgttggtggtggtgctgtgcaggagagagcgcctgagctggatggtggtgggcccacggagcaggacaaaagccattctaacagcagcaccttgtcggaccgaagactcagcaactccagcctctgtagcattgaagaagagcaccgaatggtgtatgaaatggtacagcggattctcttgtcaacacgaggttatgtcaacttcgtgaatgaagtatttcaccaggcatttttgttgccttcctgtgagatagctgtaacaagaaaagtagttcaagtgtacagaaagtggattctccaggacaaacctgtgttcatggaggagccagatagaaaagatgttgcccaagaagatgctgaaaaattaggattttccgagactgatagcaaggaggcctcatctgaaagttctggtcataaacgatcttccagttggggacgcacatactccttcacaagtgcaatgagcagagggtgtgtgacagaggaggaaaatacaaatgtgaaagccggcgtccaggctttgttgcaggtatttttgacgaactctgcaaacatctttttgttggaaccatgtgctgaagttcctgtgctcttgaaagaacaagttgatgcttgtaaagctgttttgattatttttaggcgcatgataatggagcttacaatgaataaaaagacatgggaacagatgttgcaaatactactcaggataacagaagctgtcatgcagaagccaaaggataaacaaataaaggacttgtttgcccagagcttggcagggttactatttaggacgctcatggtagcttggatccgagcaaacctctgtgtgtacatttctcgagagctctgggatgactttcttggtgtgctgtcctccctcacggaatgggaggaacttataaacgagtgggccaacattatggactccttgacagcagtgcttgcaagaaccgtttatggagttgagatgacaaacctacctctggataaattaagtgaacaaaaggaaaagaagcaacgaggcaaaggctgtgttctagatcctcagaaaggaaccaccgtggggaggtccttttctctcagctggcggagccacccagatgtgaccgaaccgatgcgatttaggagtgccaccacgtctggagcaccgggagtggaaaaggcaagaaatattgttcgccaaaaagcaactgaagtggaggagtgtcaacagtcagaaaatgcacctgcagccggatctggccatctcacagtgggacagcagcagcaggtccttcggagcagcagcacctccgacatccccgagccgctgtgctcagattcttctcagggtcaaaaggcagaaaacacacagaattcgagttcttcagagcctcagcctattcaagagaataaaggacatgtgaagagagaacatgaaggaataacaatcttagttcgaagaagcagcagccctgctgaattggatttgaaagatgatttgcagcagacacaaggaaaatgtagggaaagacagaagagtgaaagtaccaacagtgacacaactctgggctgtaccaatgaggcagagctgtccatgggcccatggcagacctgtgaggaagacccagaactgaatactcccacagatgttgtggctgatgctgatgcccgtcattggttacaactgagtcccaccgatgcttcaaatttaacagatagcagcgagtgcctcacagatgactgtagtataatcgccggggggagcctcactggttggcacccagactctgctgctgtgttatggcgaagggtcttggggatcctcggagatgtgaataacatccagtcacccaagatccatgccagagttttctgctatctctatgaactctggtacaaactagcaaagatacgggataatctagcaataagcctggataaccagtcttctccatctcctccagttttgatcccaccactcagaatgtttgcatcatggctgtttaaggcggcgacactgccaaatgaatataaggaaggcaaactacaagcctacaggctgatctgtgccatgatgaccagacgccaggacgttctgccaaactcagatttcctggtgcatttttaccttgtgatgcacctgggattaaccagcgaggatcaggatatcttaaatacgatcataaggcactgtccaccccgctttttctccctgggttttcctggcttctcaatgctggtgggggacttcatcacggccgctgccagggtccttagcacagacattttgacggcgcctcgttcagaggctgtcactgtcctcggctctctggtctgctttccaaatacctaccaggagattcctttactgcagtcagtgccagaagtaaatgaggccattacaggaactgaagatgtcaagcattacctcataaatattttactgaagaatgccacagaagaaccaaatgaatatgcaagatgcattgctgtttgctcccttggggtctggatatgtgaagagcttgcacagtgtacaagccaccctcaggtgaaagaggccatcaatgtgataggagtaactctgaagtttcccaacaaaatcgtggcccaggtagcttgcgatgtccttcagttgctggtttcctactgggagaagcttcagatgtttgaaacctctctgcctcggaaaatggcagaaatcctcgtggccacagttgcttttcttttaccaagtgcagagtactcctcagtggaaacagacaagaagtttattgtgtccttgctactctgcctcttggactggtgcatggcattgcccgtgagtgtccttctccaccccgtgtccacagcagtcctagaggagcagcattcggccagagcccccttgctggattatatctacagggttttgcactgctgtgtgtgtggctcaagcacgtacacccaacagagtcactacatactgaccctggctgacttgtcatccacggattatgaccccttcctgccactggcaaatgtgaagagctctgagccagtccagtatcattcatcagcagaattgggtaacctgctgactgttgaagaggagaagaagagaagaagtttggagttgatccctttgactgctcgaatggtgatggcccacctggtgaaccacctggggcactaccccctcagtgggggccctgccatactgcacagccttgtcagcgagaaccatgacaatgcccatgtggaaggctccgagctgtcctttgaggtgttcagaagtccaaacctgcagctgtttgtatttaatgatagcaccctcatctcctaccttcagacacccacagaaggaccggtagggggatcaccagtgggctctctctctgatgtgagagtaattgtgagggatatctcagggaagtactcttgggatggtaaggttttatatggacctttggaaggctgcttagcacccaatggaagaaatccttcatttctgatttcgagctggcatcgtgacacatttggacctcagaaagactcttctcaagttgaggagggggatgatgttcttgacaaattacttgaaaacattggccatacaagtcctgaatgccttttaccgtcacagctaaatctaaatgaaccttccctaaccccatgtggcatgaactatgaccaagagaaggaaatcattgaggtcattttgcgccaaaatgctcaagaggatgagtatatccagagtcataacttcgattctgcaatgaaagtcaccagccaagggcagccctccccagtggagccccgaggacccttttatttctgcaggttattgcttgatgacttgggaatgaattcttgggacagaaggaagaattttcatctattgaagaaaaattcaaaattattgagagagctgaaaaatttggactcccgccagtgccgtgagacacacaaaatcgcagtgttttacattgctgaaggtcaagaagacaagtgttcaatcctctctaatgaaagaggaagccaagcatatgaagactttgttgctggacttggatgggaggtggatctctccacccactgtgggttcatgggtggccttcagcgcaatggcagcaccgggcagacggccccttactatgctacctcaactgtggaagtgattttccatgtttccactcgaatgccgtcagactcagatgattccctcaccaaaaagcttcgtcacttggggaatgacgaggtccatatcgtctggtctgaacactccagagactaccgcaggggtattatcccaactgcctttggagatgtttcaatcattatttacccaatgaagaatcacatgttcttcatcgcgataacgaagaaacctgaggttccattttttgggcctctgtttgatggagccatagtgagtgggaagctgctgccaagccttgtatgtgccacgtgcatcaacgccagcagggctgtgaagtgcctcatcccactctaccagagcttctatgaagagcgagctctgtatctcgaagcaataattcagaaccaccgcgaagtaatgacattcgaggatttcgcagcccaagtcttttctccctctcccagctactccctcagcggaacggattaaaacacgtaaaggtctcatttcaatatttgagcaaggggccctggcctccagtctgagtgctgacctcgaagagcccctgagtgaggaggagacagaacaccctctcctgcctctgccccgagccactaaacccagaatctccaggaaatttcgttgctgtactagtgccctcagcaggtcttcccattagtggacttctgaagcccatggtgaatcccactaccgtgtctcagatgggactcaaactaggctgtatcatcttgtcctgaaacctcacaaaccttggacttccaaagaagaaaagaaaaagtcaccaaaaaccagagatgaacccactgacacgtgggcactggtgtggctgctctgggcagatgacagcaggaaaagattctgcgctttcagggagggggcagagggcagcttgcttctgcaccccaagttgtttcttctcatttatgaacccaagcatgattcacaaaggggctggcaaaacaattgtctaattgaggaatctgatctgca

SEQ ID NO: 175 - DNA, 1746 bp, Homo sapiens
  source 1..1746: mol_type = genomic DNA
atgggaggatcttcccccgtgacctcaaaagctattgtggatgctgatggaagaatttatattcggaactggcagggtggcatcctgtctgggggctttgagaagaacccgaaaccaattttcactgagggcaagaaccagctggagattcagaatctacaggaagactgggatcactttgagcctctgttgagttcccttctgaggaggatgccagaattagagactctggagatcatgaagttggtgaactgcccagagaccttcacaccagacatgaggtgcatcatgggcgagtctcctgcagtgcagggctactttgtcctggcaggaatgaactctgctggcctttcatttggtggaggagccggaaagtaccttgccgaatggatggtacatggttatccctcagaaaacgtttgggaattggacctgaaacgttttggagccctccagagcagccgcacctttctgcgccaccgggtcatggaagtcatgcctttgatgtatgatctgaaggttccccgctgggacttccagaccggtaggcagttacgcacctctcctctctacgaccggctggatgcacagggagccaggtggatggagaaacatggatttgagaggccaaagtactttgttccccccgacaaggacctcctggcattggagcagagcaagactttctataagccagattggtttgacatcgtggagtctgaagtcaagtgctgtaaggaagctgtgtgtgtcattgacatgtcctctttcacaaagtttgagataacatccactggggatcaggcattagaagttctacagtacctcttctccaatgacctggatgtgcctgtgggccacattgtgcatactggcatgctcaacgagggtggagggtatgaaaatgactgcagcatagcacgactgaacaagcgcagtttcttcatgatctctccaaccgaccagcaggtccactgttgggcctggcttaagaaacacatgccgaaagacagcaacctgctcctggaggacgtcacctggaagtacacagccctcaatctgattggccctcgagctgtggatgtgctgtctgagttgtcctatgcccctatgactccagaccacttcccaagcctcttttgcaaggagatgagtgtgggctatgcaaatgggatccgggtgatgagcatgacgcacacaggagagccaggattcatgctctacatccccatagagggcatggatttcattggtcgcgacgccctcctgcagcagaagcagaatggagtgtataaacgcctcaccatgttcatcctggacgaccatgattcagacctagacctttggccttggtggggagagcccatttaccggaatgggcagtatgttggcaagaccaccagcagtgcctacagctacagcctggagcgccacgtttgcctgggctttgtgcacaatttttctgaggacacgggggaagagcaagtggtgacagcagatttcatcaaccggggagagtatgagattgacatcgcgggataccgcttccaggccaaggccaagctctaccctgtcgcctccctcttcacccagaagcgccgaaaggatgacatggagctgagtgccttccttgcccttccacctcctcctcctaatattcactctgggctcttcttcccttcccacccctcactcagcttctcgtggtggcaggaggtatgtctgacaggacagaagcaagctcca

SEQ ID NO: 176 - DNA, 5804 bp, Homo sapiens
  source 1..5804: mol_type = genomic DNA
gaccgctctttccgggtttgcgagcggaagtggacgaatttgaatcctgtgggccgttgaatgtggctgctcgcggtcggcgtgccccgacgtacagcgggccgggaaaagtggcactgaggctctggaacttctgcccagctctccttgtaaaatgaatgaaagtaaacctggtgactcacagaaccttgcttgtgttttctgtcgaaaacatgatgactgtcctaataaatacggagaaaagaaaactaaggagaaatggaatctcactgtacattactactgtttgttgatgtcaagtggaatttggcagagaggcaaagaagaagaaggagtttatggttttctaatagaagatatcaggaaggaagtgaatagagcttctaaactgaaatgctgtgtttgcaagaaaaatggtgcttcaattggatgtgttgcaccccgatgtaaacgaagttatcatttcccatgtggacttcagagagaatgtattttccagtttactggcaattttgcgtcattttgttgggaccatcgacctgttcaaataattacatctaataattatagagagtccttaccatgcaccatttgcttggaatttattgagcctattccaagttataacatattacgaagtccttgttgtaagaacgcttggtttcatagagactgtttacaggttcaagcaataaatgcgggagtgtttttctttaggtgtacaatatgcaataatagtgacatctttcagaaagagatgttgagaatgggaattcatattcctgaaaaagatgcttcctgggaattagaggaaaacgcttatcaagagcttctgcagcactatgagcgttgtgatgttcgaagatgtcgttgcaaagaagggcgagactataatgcacctgatagcaaatgggaaataaagcgctgtcagtgttgtggttccagtggcacacatttagcctgctcctcattacggtcatgggagcaaaattgggagtgtttggaatgtaggggtattatctacaattcaggagagttccaaaaagccaaaaaacatgtattacccaattctaataatgtggggattacagattgtttgttggaagagtcatcacctaaattacccagacagtcacctggatcccagagtaaagatctactgaggcaaggcagcaaatttagaagaaatgtatcaacactattaatagagttaggattccaaattaaaaaaaaaactaaaagattgtatatcaacaaagccaatatctggaatagtgccttagatgcattcagaaatcgaaactttaatccttcatatgcaattgaagtagcatatgttattgaaaatgataattttggaagtgagcatcctggatcaaagcaagaatttctgagtctcttaatgcaacatcttgagaactcatcattgtttgaagggtccttgtcaaagaacttgtctctaaattctcaagctctgaaagagaatctttactatgaagctggcaaaatgcttgccatttctttagttcacggtggtccttcacctggtttcttttctaaaaccttgtttaactgccttgtttatggaccagaaaatacccagccaattttagatgatgtttcagactttgatgtggcacagattataatcaggataaatactgcaacaactgtagctgacttaaagtcaataataaatgaatgctataactaccttgagttaattggatgtctcagacttataacgacattaagtgataaatatatgttagtaaaagacatacttggctaccatgtaattcagagagtccacacaccctttgaaagttttaagcagggtctgaaaacccttggtgttttggagaaaattcaggcttatccagaagcattttgtagcatcctgtgtcataaacctgagagtctttctgcaaaaatccttagtgagctttttacagtacacacattacctgatgtgaaagctttggggttttggaacagttacttacaggctgttgaagatggtaaatctacaacaacaatggaagacattcttatttttgcaactggttgcagttccattcctccagctggatttaaacccactccttcaattgagtgtctgcatgtggattttcctgttggaaacaagtgtaataactgtttagcaattcccatcaccaatacatataaagagtttcaagaaaatatggacttcaccataagaaacactctaagactagaaaaggaagaaagttctcattacattggacattaaaatgtttccttgaacaaagagaagcttctttaaaagctgctattgataactctcttttatttcactaaccttttcatcatcactttgaacaaactagttagcttcttgacctaataaaatttatgatatgaatataaaggaatattatagccacttaggctaaaaaaaggttttttttgttaaagcatactagtcaaaattggtgataatttctcattttcttgatatagatacttcataaacctcaatataaatactctcaaaatggttgtatggattttatttaggtatggtagcatggttaataaaagtaaaaactgttttactcacattttttgtaaattaggattacatatagaatgccacaatttctctaggtttattcaattttcaaattattcctcattttattttaaagcattaaatagaaaagctaattggttaaattttgttatataaatcagagtcatatattctgggatttgtgttactatgcatacttttctaggatgtcaccaaattagttgtttaaaatgtttttagattactgatttatattaagatgacccacactgcaattagattatgcctagtgggaagtattatataaaaagcagaattaagctgggcacatgtgcttgtaatctcagttataagggaggctgaggtgggagaatcgagatactcagccagcctggcaatgtagcaaagactccatctcaaaaaaaaaaacagaattgcacaaattttctggaatctatggacattccatgagcttaaacacttttgaggtggataacatttagttgaaaatacctaagaaagtgtgtcttctttaaagccttggctttaatcatgggaaattgttgttgttgttgttgttgtttgtatcctatgtttggtattctgtatgtctgatccataatcattttagatatttgaatgatctctgtggattggtaggtttggccatttgaccattatttattatcaagttggttgtatgctaaggtaagttgacgccatagcattatacagttatcttcattgctcttgaatgatatctgttatataagcaatgtataaataaagtaaaaaggatagaatgaaaaacccattctaatgtcaccactcagagataagtaccgtatttctgtgtatccttctataaactctttacttctgtttcctttattttttaactttaataatgctactaaaagacaatacctaaaagtaactgtactaacaaagtgctaacaatgtgaaaatatatagtcccatagtcatgtccccatatttatactcccacagaagaaaaaattggaaaacaaagtctgatgtccttaatctattaacatatttaaatgatataatggttcagttttccatgaaagtaaatcattatgggaagtaaaatgttttaaccatatttttcttaatacacaaagcaggtgtcagctgttgtattctcacccttcttaagaaaaatcattacattattgatattttttaagtaacagaatagatttgaaagagataatatatctcttaataccaaaggaaaactaaaacataattctagtgtacttttctttgttccctcatgtctttttcaatctgtacactaacatacctagcaaatttgttttactttaacttgaaatatttaagaacattaaacaagacatttctttggctttggttgaatttttttgtctcaccaatagtaattgaaagatcaattatcaaagagtttgaatagctaatataaaccccaaagtcaccatacagtttttattccaaatatgttgataaaaagatatttgtttctttatccaccttatttttattacagctaaaaaccaatacaaaccaataaaacctagttaaagctattttctggtttttagttgcaattaatttcccctagggtagaaattaaagctgattaagtcacacacacatactttgttggggtgggggtggcaggtggagaggcagtgtacttgggttagctacaattaaaaacagtatttcaattcctcatttgacttattttatatatagacagggccttagtgataagatggtgtaaataatttaggatattcatgttttaaagtgaagcataaatatttattttgcaaaatgttttctagtttgaaggatgttccattattaccatttttagattaatctgtatggtcaaggaatatcagagaaacctgtaggttatttattttctgcagtgtcattttgtcaaatggttggtattataattgttcttttcttattaattttataaccagtgcataattcttacattagattttaaaaaagaattatgctataaatctttataaatgtgtacatatatttcttaaatattgcaattgcctaaatgttgtatattttaaggctgttttctcttgctcttaatgttgaggaaaactataaattgatctataatgcatctactgttaatggttttggttagtttgatattcattgtttttaaacactttccaatatggaaactttaacaccttttatacaattctctactattcaagatattctttaaaatatctcaccagaaacttacaattttatactttgtaatttttagtttctgtaatttgaggaagtgactttttttgtttgggttaagtaaaaagcctttgattgattaccagcatgagaattcaccttggtttctattttatgcatttgtaaatttttcccctaattatatggaagctattggaacttttgtattcagtgctaaatactaagtcaaggggagtatattaggtaagttttttcagtgactgtgcctttagcattcagtcattataagaaaatgatcagaacaaaatcattacattataaacatgtaattcttttatatagtgattatcatgtactgcattgttactttaaaataagctattaaactagtttttatggttcaagtaatgcaatacaaagtttcatgcttcaagtaatgcaatacaaaacataacccatttaatgatgaattacttgaatgtatattatctgtggtttaggaaaatttggattgtcttgaagagactcagttttcaagttctgattttgaccattatctcttctaattcataaacatatcccagtacctacactatgccaggtattatgctaggtgatcgtttatatgtcagcctatttcccccccttttaaagactgccagattaaccaaaaagcgtgacatttataacaatgttttataaataaataaatgtgtttatgccactaaaggtaaactgcctatttaaactaagtaattttttgggatttaataagattaagattctgacgaaactgaaagatacaagattcctttactctccacatttgagagatcctataagcaagcagttagtgtctgacacccaggaacctatagaaatgagggaatctgtgttaaaactatgtatcctctaatgtaaaatagcttaccagaataaattatttaagccaaaa

SEQ ID NO: 177 - DNA, 1987 bp, Homo sapiens
  source 1..1987: mol_type = genomic DNA
gggaaatcctgagcgcaggccagggttgtttggttttgaggtgtgctgggatgaaaggcaccctggaagtggaaggtaaatgaacaatggaaaaacttcacggcaagattagaaagatacctgagcccaatacccgcctgatgtcgtgggccacacctccgggttaccaggggaagggaggaagcaaactgtcatattgatgtggctctaaacaacaacagtgtgcgaaggcccaggggcactttgggattgaccaagaggaaacacaagttgcacaatgatacaatcttgttggtacaattgtcagagaagggaactcccacagcaaaggccataaaaccatccagggcagtctggggcggctcagttctgcggtgccagggagtggagcagagctcagccccgtcccaaacacagatgggaccatgaactccggacacagcttcagccagaccccctcggcctccttccatggcgccggaggtggctggggccggcccaggagcttccccagggctcccaccgtccatggcggtgcggggggagcccgcatctccctgtccttcaccacgcggagctgcccaccccctggagggtcttggggttctggaagaagcagccccctactaggcggaaatgggaaggccaccatgcagaatctcaacgaccgcctggcctcctacctggagaaggttcgcgccctggaggaggccaacatgaagctggaaagccgcatcctgaaatggcaccagcagagagatcctggcagtaagaaagattattcccagtatgaggaaaacatcacacacctgcaggagcagatagtggatggtaagatgaccaatgctcagattattcttctcattgacaatgccaggatggcagtggatgacttcaacctcaagtatgaaaatgaacactcctttaagaaagacttggaaattgaagtcgagggcctccgaaggaccttagacaacctgaccattgtcacaacagacctagaacaggaggtggaaggaatgaggaaagagctcattctcatgaagaagcaccatgagcaggaaatggagaagcatcatgtgccaagtgacttcaatgtcaatgtgaaggtggatacaggtcccagggaagatctgattaaggtcctggaggatatgagacaagaatatgagcttataataaagaagaagcatcgagacttggacacttggtataaagaacagtctgcagccatgtcccaggaggcagccagtccagccactgtgcagagcagacaaggtgacatccacgaactgaagcgcacattccaggccctggagattgacctgcagacacagtacagcacgaaatctgctttggaaaacatgttatccgagacccagtctcggtactcctgcaagctccaggacatgcaagagatcatctcccactatgaggaggaactgacgcagctacgccatgaactggagcggcagaacaatgaataccaagtgctgctgggcatcaaaacccacctggagaaggaaatcaccacgtaccgacggctcctggagggagagagtgaagggacacgggaagaatcaaagtcgagcatgaaagtgtctgcaactccaaagatcaaggccataacccaggagaccatcaacggaagattagttctttgtcaagtgaatgaaatccaaaagcacgcatgagaccaatgaaagtttccgcctgttgtaaaatctattttcccccaaggaaagtccttgcacagacaccagtgagtgagttctaaaagatacccttggaattatcagactcagaaacttttattttttttttctgtaacagtctcaccagacttctcataatgctcttaatatattgcacttttctaatcaaagtgcgagtttatgagggtaaagctctactttcctactgcagccttcagattctcatcattttgcatctattttgtagccaataaaactccgcactagctgca

SEQ ID NO: 178 - DNA, 11528 bp, Homo sapiens
  source 1..11528: mol_type = genomic DNA
ttgcgcagaaggcggcggcggtggtggcttgtggtgcggcctcaccatacaggaacagggcagacgttagcgtgagtgatcactctcaatcccggggacctggtggccttagtctttcaggtggaacggtgtgcgacatgggaaagaaaaccaagcggacagctgacagttcttcttcagaggatgaggaggagtatgttgtggagaaggtgctagacaggcgcgtggttaagggacaagtggaatatctactgaagtggaaaggcttttctgaggagcacaatacttgggaacctgagaaaaacttggattgccctgagctaatttctgaatttatgaaaaagtataagaagatgaaggagggtgaaaataataaacccagggagaagtcagaaagtaacaagaggaaatccaatttctcaaacagtgccgatgacatcaaatctaaaaaaaagagagagcagagcaatgatatcgctcggggctttgagagaggactggaaccagaaaagatcattggggcaacagattcctgtggtgatttaatgttcctaatgaaatggaaagacacagatgaagctgacctggttcttgcaaaagaagctaatgtgaaatgtccacaaattgtgatagcattttatgaagagagactgacatggcatgcatatcctgaggatgcggaaaacaaagagaaagaaacagcaaagagctaaaggaggggatggtctctgtcatttctctttgtacataatacattcacctccctgcctcctctcctttctacccacccctttctatcctaaacacatccataaaaaatgtgcttatcactgtgctccacaggagaaatgttggtattggttctcttgtaacataactgatggtctgattaatgataagtgtctctctgtgaagaccaggcatttacatactgagtgtaatacccacaatttttttttcctttgccctgatctcttccttctgcttccctgtgacctcaagatgagtttcaactttttaatcaccttagagtcttgatcttttcagggttggtcgctttttaggttgggggattttgttacaatgatgttgaattttggtttcttgctttggttcttagaacatgttgctgactagctggcctttgttctgacatgttgagatggaaaggatgttgcccatctgttaaaaagccaatagcaactgcctacctgttggggctttcccaaccttgttcagctctacccaggagaatacagggtttctggtgtggtcttctgggccaccctctgttgttcatcctcactcatcctcccagaattactccatcctttggaagatttgaaattttacactgaaatctgtcaagacactctttttagccccaggactttcggtattgcttttagcactccccacttctgcttctgtaaagtgatatcaatttgtgataaaatgacaagattattaactgtgcagatttgtagctatagtacatgaggatgatggggtagggtacaattgtctttattatcatatatggtatgtatgtatgatttctttccattcctcatatttagactgtatatttatgtaggtgtgagtgattgcctggtgcttgcttgtgccaaggtgctaggcaccctccaaccctgccaacttttgtggcctcccaaagcattcctgttaccaaagaggcttcaaacctgaccctcacttctcagtggacccgagtttcccttccatgccattattttcagtggggaagttttagaggtgagctgttggccacaatatcaattttaagtgttcatagcagttatgtctcctgcattcttggctcctggatttaccaccaagagtccccaaaatattaatgctcttccctttttctaccctcaaacttatagttgtatcttattttttaaaatgaattttcatggccaggcacagtggctaccgcctgtaatcccagcactttgggaggctgaggcaggagaattgcttgaagccagaagtttgagaccagcctgggcaatgtagtgagaccccctgtctctaaaaaatataaataaaaataaaggcatgttcctgaaagactgtcaccttggaaagtgacaggccctggcattagcatgttgacacacccttttcttcttactcagcaaaatacttcgttttggtttcttcttgtgttgctattgagaaatttgtctgatcatatccttctgcctttgtcccccaagaaatgccctactttatccttttctttttgtagttgaggagggctagagaatcacaattaaaagtaaggaaatagcagggttttgaggatccttgtcccagccccaaagctgaggaaataagaataaatgcttaatatagccttaattctagagcgcaccagccatgaggctgcttttcttgttgtttttgatttttaaaacatacagctgtctggccaggagcatctaccatttctagattattcagagtaatgaggggaatggatggattgctccagtccacagatgagccacataatatgcaaatcatatacccattcatagcatttgttaacattgcttccctgctcagctgctgattgaattctgtgtgcttatataaattatgtcaaaaattatactgcataattgaggtgacagctgttgctgcagtgacatgacagactggaacaatgaagcttttggtttaagtcagccaggaaaatccttctgaatggtaatgtgattgggcaagagctcataaaccatacctcaagtgggtgggagttttatctctatattccttctctctctgaaggaattaaaggcctagatcaagtgctggataattgacaattgcttgtacttaatctgatcggtatctaaaagaaggaaaggatggtcaggaaacatttatcataaatgtagccaaggatatcaattagggtagacaagaataggacaaaaataggccagagctcctgaggaggtgatatgggtctcttgatttgcagaaaatgacagcctatccaagtggcccagtgtatgcctcccagtagcagtgggcatgtaaactgcagcgaccttatttttaaaaccaaaaacctagtatgtggacaaagaacatgacaatatttggtactgagattggttctgagaaacctggggcatgtggctgctgtggttataggtaatatttaagacattcataaaaatctgatattcttttaccgaaataaccccagtatcatctactacttaccatctgttaatagactttactctgtcttttttgtcttcggtttattgtactgagtgccgccaaaacaacttttgttctcttcctgcctacctgcagctggttctataggaatgtagggagccagaggccagtattgatttcagcccttagcacaaaggaaatcagatgcctgcttccagcatttgttagtgttgagtagatgttcttgccctagaagaattacagcctcaaacagaaacctgtttcatggagctttctcccctcagaagagttaatagttaagagctaagcactcttaaacacctaagtctcaaatgctaaaaatttatttttcttgtgtttagtcctctttcaagacatctttctaagcctttcagtaatcaacattaaaagatctccctttcttcagagttatagcacagctttgcccagtagaggctaccaaggacagcttagcagccctttgattgctgggctgggcagatggccttcaagttaagatcaaatgccgggaaaatcagcctacatgggagcacccattttaaacctggagagaaccatgatgttttcttcttcaaataacaatctagttttttttcccccagtactaaaattgtattgtctttcagacaatataatttttatttaaaattggaacatactatcttcatgctttctaagctaaatcttcatttagatttcactcctcagtagatcccagagaagaagctatataggatccagattcaaatttaacagtgtcttctacttttttagttatgttttctatcaactcctgctgccttttcaaatacggatatttttcaggagactcttctacttgtccactgactgtattttttcctttttgatccgtagccctggttaaatggctgacatccttccgtggatgattcttggaggtagtctcagaattccaaagtgattgtctgtcttcttcttgtcttgatcctaatgcagacattcacctctattatttatttattttttttagacagagtctcgctctgtcaccaggctggagtgcagtggcacaatcttggcttactgtaccctccacctcctgggttcaagcgattctcctgcctcagcctctcgagtagctgggactacaggtgtgtgccaccatgcccagctaatttttgtatttttggtagagatggggttttaccatgtttgccaggatggtctcgatttcctgaccttgtgatctgcccaccttggcctcccaaagtgctggaattacaggcatgagccaccgtgcctggccacctctattaaatttttgtggacaaaaataaaattgtcattatttgtttgctctcatggagcactttcagtaatacaattttttttaaattccagttgccctctttgttgctctgtcctctgtaatacctgactttgctaaagacttgaggggtggtttcagaggagggtcaggtgatgggaaggcaggatgagaaaagccctggacttgcatgtttgagaaggcttccaaccacatcttcactcagactcttggaattcctgtccccaaaacaagcttctgttttttgctcacaatgctatatttctaaatttttcctgaattactgagaagcagtcattagctttgttaagtttggtttggggacattgttggtatcaaaaatcgaagtcttattcatttgatgtaggccatgaatcatcaataactggttgctggaaagcttgactaccatccactggggtgctattttgagaaggatttttgggtatctttatagtctgcaattagttgatgattgctttctagtttatcaactgcatttatatttgcttttctgttcatggaaaatcctttatttgctggggttttttgtttgtttgtttgtttttcccacttacagcaagtaaaagtggtctgaggttatccttgtttttcttcgcggtttgccatgtgtgaaagtagatttcctgctattgatatattctcattatagacagaatagtggagaacagtgttgccatggacaaaatccagttttggtccactctggggagcatttggacctgtggtgcttctaacaattaaaagtctagatggtccttgactgtcccccagccatactgcatactactttgtgcattctactttgtgtcattaatgaaagattggttctgtccctgtaacttaggcatttattattcttaactcttcattcctgttctgtagccacccagcagtccattttccctatgttcaggccaaaccacagggcattggggaaggtttttgggattttcttattgagattttgttgaatctgtagtttaccccagctttcctaaggtacagtgaggggttggagggatctgtgtttggcccggggagcaattgtctctaccttaaggttcagttttgagggcataaaatactactttgcaatgtcatgagaacaccgttagatctgaaatgtggaaatggtttctcacaatttaaaggaaaaacccactttgcacccatgatcccatcattttggttgagattttagaataaaaaatatagtgttgagatccgtacttttgtaatcagaccaccaagcatgcctgtggcaaggcagagaggaaaggtctggagccagtgtattgcagtttcatgctacctttacctgctaatcataaaaattatgttttcaaaagtagatgatactagccttacacccaaaaacatgttctgaattagatgccccctcacccaatttttattaagctttctaaattccagccacattgctgtacatcaacattggtttcattcaacagacatttttttggcctgaagatacaaggttcagaaagaggccatccctgccctcaaataactttcatactggtgtatgatgaactgaccattaatagtttaagtgcttacaagctatgtttctgttcaaaaaaaaaatagtttggtataataaatgctataaaccaatacacatttctgacttgggggcagagacagactggctgatgttgtatagtttgtagccctggagtaagaagttgacattaatttcggcctatatgtggaaaagacctataacattgggtgaactgagccagctggccatagaacacaagaacatattccaggaaataaatatagctggagggttggaaatgctgttattactgagagagaaaacaggtgagttgggattgagaactcctgattttcatccctggtttagattcttggccaaagtagtggtagagttaatctttgcttgtggaaagcattaactatgttgcagattcagttgtgttacattattgtgggttctataacaacatattcctcatggacactttaccagagttgctcacacctttttcaatttctcatcccttttggaggaatgaacatgagacttaactgcctttaagcctaaaacggacatgctttccaatgacaagagattttctaaagagaagtcttggagcacatctgttaatacctgagcatctactctgagcagtgcagttttattcaatactggagagagggtgatttctttttttttgagacggagtcttgctctgtctcccaggctggagtgcagtggcgcaatctcggctcactgcaagctccacctcccgggttcacgccattctcctgcctcagcctcccgaggagctgggactacaggcgccggccaccacgcccggctaattttttgtatttttagtagagacggggtttcaccttgttagccaggatggtctcaatctcctgacctcatgatccacccacctcggcctcccagagtgctgggattacaggcgtgagccaccgccgggccgagagggtgatttctaagcagagaattgtatcagttatgtggaaacctttgccagaaatacatataccttgtatattaaatctgagtctcagatttaatcatcgaagcgtagctgggttaagaaacagtctgatcgtaaggatgttgtcgattctgacccatggatgaccacaagaaaaagatatttatttctgcctggataattgagagttgactaactttggaagtcagaattcccaggaattagagtaactgctctggaaagttaaagtgtgaagttttttagatagtttcataaaaacaattctggtttctttttgcttgtgctgactttcttggattttaatctacctcatcttgtctttttagagttacttcaacttgtcactttaacattgtgcttgactttggttgttttctaagatggaatttttcctgttcattgacagcttgttctcttgccttttcattctgatcctcatttcatctaacatcatctcatattgctcctctgtcaagagaaatgttttaaaatagtttaaagtcttgttttatgggaagaaagtgatcctccaatgctatttgtttctgaggtcagtaagagaaggagttaaaacaaggcagtggggaagggaatgaatcctgcactggaggcaaaagctgacaaggaaagagccattaattaagacaatttcaaagtcaactgattgtgatcattaatgtcacaatagatcaaaacctaattatcacagcctaggtaagagccatcagtattaatcggaaaatctaataggaaactattatcaagaaattaggccaaattgaatgcagtgaactttttatcttggcattctctatttttttgtgatgtcccctggcattggcaggtgtgaccctaacagtcgattcaaggccaagtggtcagtttgtcagccttttttaagggatttctttttatttttaggaattccaaacagagttaacctaaactgtcattgccaaaagatcagtcttaaactttcttagcacctgtacctgtttaatgtgatcagctatcagtgaggaaaaaaaaaaaaatctatttaggtcttggaatggttcctgtacctagagtatccatattgaaccttttttttttttttttttttttttttttgagatggaaacttgctcttttgcccaggctggagtgcagtggcgtgatcttggctcactgcaacctccgcctcccgggttcaagcagttctctgcctcagcctcctgagcagctgggattataggcgcctgccaccatgcccggctaatttttgtatttttagtagagacagggttcaccatcttggccgtgctggtcttgaactcctgaccttgtgatccgcctgcctcggccactcaaagtgctgggattgcaggcgtgagccagcacccggccacagtatctttattacagctcactgcagcctcaatctcctgggctcaaatgatcctcctgcctcagcctcccaagcagctgggactacaggcgcacaccacggtgtctggctaattttattatttaaaaaatgttttgtagagacagtctccctgtgttgcccaggctggtctccaactcgtgagctcaagtgatccacgtgcctcagcctcccaaagtgctgggattacaagcataagccaccgcacccggcccctagtgaacattttactgtatgtgttgataaatcatcttttgagtttctgttgtatgtggggacttcctacactggctgctgtgaagaggtatggaagaaaggagaggctttctgcctagaaattctttgagaacacctgaaaagacagtttaatcatgtcacaacactcttaaggctcaagtcagtgttctggtttccggtagctttaggattggattctaaacgagggctggtggtgagtttggtgtttgtctcgtgtcaccctcacccctcacctcctcagtttaggataagagacataatgatttctaccagaatccaaagtaaatccaaagggggagaaaagacataactgttttttcttctaccttttttttgttaaagagttacatctctcacaggaggaaagaattcaagagtctatatgattagttacagagaatattttcatcccctctccctgaatagaaaagcaggggtcaccatttgtatccttacccttgaggtgtttttgaagatgctgtaactcttgaagttgagctgaggcagaaaggttggaaaaatgcagccctctgggtattgtggggagggatgtgatgtagtaagagggtgttttgtggtgctaggattcccacgccaccaacttgcagctttataagagcgctaccaagaaccaccactggggaaaaggttcttattcattgtttctgttggaatgtgatcttgctttctggattttaggaattcaggttactcagtataaaactctgagaaatcagtgtgacttagtccttcacctcctaagataaagtgaatatttctttacaaaataattcatgtccttaatgttaaagatgtaattttattttcaaaacatctataacatgactttcagaagcagttcatttttccaagattcctcacattatactagataaataataggccctcagttaatacccttcagttattgaattaatctagtttgtggaatgaggtgtatcctgccaacttccctctgctcccaagtacactctgagaggtaaaatgctctgggaaatggaacaagaatcgagtggatgctgactctgtgtgcccacctcctcaactgattgataatggttgaccttgggcaagtcacttctttcaatgcctcagttccccatctgtcaaatggggttaataatactgacctacctcacaggggtgttgttgtgaggcattgtaaatcaaagttaatagaatacttcagggtcctctgtggaggatgtcttgagccagagtttaagcctgacacacaggctttggtcctcactgagctgtctccaagactggaactacttagtgactcggcaaattttctgccccccacccctcatcaaagctgctagttcagatgttgacagtgttttcatgaatgttggaatcttactagtccagacttacttaggatgttgttggggaaggcacttgggattttctgtgtcttgcattcacagagggaggccatttcagattcaagagcattggattagggaatcgtgaggcagggatgctactgcgtatttctctctgcaggttggggattaaagttcctttccccatgggtttgaagcagactcagactgtctcaggatcaaagcaaccctcaatggttttgatttatgtcattgcttaccactccccaaccaatcccaggacagctgggtcactgtacccctttgtggtatctgtacctgggcctctccttcctcatagggaccagctgattgaataaatgtgaccaccttatttccaccccccacccccaaaagctacattggaattatttttcctagaaatgtgtataacactcagaattgggcattgatccttaaagcttcatcccattcaccgtattcaacatctgtcatctcttagtgtctgcagtctgaacctaaccttgaccttttttccctctggtttgagaaaactttggacactatttctacttggccaggtgtgggctcaagagccttactctttccatctcagtttaggggcgcagccagctcctcttcccaatagggctctttctgctttccctctccttggccctagatttgtaatccatgaaaaagcacaaggtcctggctccttgcggtcacattctggttctctgtgttttgtggactctgctctcactgttcacccagcactagcagtaccagatggttctgtggagtcctggggaatggagagagcacagtctgactccctgccaagtagccaggagttgacttgcccatggtccgctggctttcccaccacttcctacaggatgggatctaagagactcaagagctgggtttctttcagcactctgtactgtcccaaatagcaaacaaatcactttgtagccagatttctgaatggaaatgagaaattgaattctccatggacttttaggtttatgggggagttttagctgtgtttcttggttttatttcagccaaacatgtctgcttttgattttttttttaaagtataagtggtctatatatatgttcaccttttaaatgtaaatgtttaaaaagtaagcatttatgtgtttccataactgacatctgatgcagacctcattctctccccctcttctaccctcctcttttcccccttttcatactcttgtattggttctaataaatggttgcttttcaaatatgga

SEQ ID NO: 179 - DNA, 3421 bp, Homo sapiens
  source 1..3421: mol_type = genomic DNA
ctgcctgcgttagcggcggtggaggaggaggcagagaggagtggagggcggagtagacggaggaggctgctgcagagaagaaagtgtcagagccggttcggctttagagtgtggtgaagggtacttttcatggtgcatggaaggaaagccaatgcgcaggtgtaccaacattcgaccaggagagactggaatggatgtaacaagccgctgcacccttggagaccccaacaaactgccagaaggggttccccaacctgcccgcatgccctatatctcagacaagcaccctcgacaaaccttggaagtgattaaccttctgagaaagcaccgggagctatgtgatgtggtgctagttgtgggcgccaagaagatatatgcccatcgagtcattttgtcagcctgtagtccctacttccgagctatgtttacaggagaattggcagagagccgtcagacagaagtagtgatccgagacattgacgagagggctatggaattactgattgactttgcgtatacctcccagataacagtagaagagggcaatgttcagactcttctgccagctgcttgcctcctccagctggcagaaatacaggaagcctgctgtgaattcttaaagagacaattagatccttctaactgcctgggcattcgggcttttgctgacacacattcatgtcgtgagttgctaaggatagcagacaagttcacccaacataactttcaagaggtaatggagagtgaagagttcatgttgcttccagccaatcaactcattgatataatatccagtgatgagctaaacgttcgcagtgaagaacaagtgttcaatgcagtgatggcctgggtcaaatacagtattcaggaaagacgtcctcaattaccccaggtgctgcagcatgttcgtttgcctttgcttagtcccaagttcctggtcggcacagtaggctctgatcccctcatcaaaagtgatgaagaatgcagagacttggtagatgaggctaaaaactacctcctattgccgcaagaacgaccactaatgcaaggaccaaggacgagaccacggaaacctatccgatgtggggaagtactctttgcagttggtggttggtgcagtggagatgccatttccagtgttgaacgatatgatccacagaccaatgaatggagaatggtggcttcaatgagcaaaaggagatgcggagttggggtcagtgttcttgatgatctgttatatgcagtaggaggccatgatggatcctcttatctcaatagtgttgaaaggtatgaccccaaaacaaaccagtggagcagtgatgtggcccctacaagcacctgcaggacaagtgttggtgtagcagtacttggaggctttctttatgctgtgggtggccaggatggtgtgtcttgcctcaacattgttgagaggtatgatccgaaggagaacaagtggactcgggtagcttctatgagtaccagaagactaggtgtggctgtggctgtgttaggagggttcttatatgctgtaggtggctctgacgggacatctcctctcaacacagtggaacgttacaatcctcaggaaaacagatggcacactatagcccctatggggacccggaggaaacacctaggctgtgcagtatatcaggacatgatctatgctgtaggaggtagagatgacactacagagctgagcagtgctgagagatacaaccccagaaccaaccagtggtctccagtggtggccatgacatcacgccgtagtggagttggcctggcagtggtcaatggacagctcatggcagtaggaggttttgatggcacaacatacttgaagaccatagaagtttttgatcctgatgccaatacatggaggttatatggcgggatgaattaccgtcggctagggggtggcgtaggagttattaaaatgacacattgtgaatcccatatttggtgaacacagagaagacagtcttgtatatattcctctgtattctggggagctttgaccttggagctttgtacagcttgagaaaacattagaacaaattttattatttgccggtgcctcaacaaatggaaatacaatccaatgaaagtacttcacctgcaagatgcacaataattttcaactctgtgcagaagaatatttatttttggttttaatttatcatggttttttgttgttttcgttttgaacttatccttcctcccacaaaaaaagaaaagaagaaaaaattccaagcagcaaaacttactttgtttgtaaggtattcatttaggtttgaaaatactatttaataagggcagaagggctatatatgatttggctattatttctagacactccatccacatgattccactaacaaggattaccaggaataaaggtaggtatgcaaaatgtattagctacccattattctcgcactaaccaccagaagacttgaaaatcttaaaaaaaaaaaacaaaaaaacaagaaaaggcaacatctcattttaaatagtacaattcagaagggatactaaatcaataaaaaccaggactcagacactacagttttcatcagtgtaattttatgtcttgtttctttctatatgaacttgtttatttagtctttttttcataatattctcatagagtttctgctagatctagagctctgctcagtgcctcttataaaaacaatatataagtctcatatgctgtcttgagaatccaagagaatcacatgcagctctgcaacagtttttgctcaaaaatgttactgactaaagcaactgtccttcctgtttccttattgctaccaaggaccagcagggagaaatgtcttctcccagcagtgaattctgttatgcaatttattcttgatgctcaggcctggttaagctgaggcttacctttaataacagcctccaagggaatgaattattcagttaatgtaatagcacacattaaagagtgtaaaatcaattgaggcattttattaatatcttggttcttttatacaaacaatgtatcattatcttcattctataaggtcattgttactacttctctcaaattgcactttctggtaaaaagttaaaaatttttaaggaaaaaataatttcaatggttaaagttttttttcctcattgtattcatagacaaatttttttcaatatattttgcaagaaaaatctttgaataagactaactgcatttaaaaggaataacctccttctccctttccccaactacaaaaatgtttggcaactttgtgtttacatttaaagatcatttgcacctttttcaaggaaaaaaagtattgagtaaacaattgtttacatatatcatttatgcttttttctagcatgtataacttttttaaataaaggtagtatttaccattaaaaaaattttagctaa

SEQ ID NO: 180 - DNA, 1553 bp, Homo sapiens
  source 1..1553: mol_type = genomic DNA
agttagggcaaaagccaacttccggtcaccatcttgagtgacgacagaggcggagctccaactgacatgttcattaagggcagggctccgagggcgccacctcgagagcgacggcgggctacccggggcgggctgaggcaggttgtagccccgccccgggccttgggctccacctctcggccccacttccgccgggcaagcgtttgtaggcggcgctgccgtaaatcaggcggtctgcttgccgcatcacgcaagatggcggccgcggcggtgaacggggcggcaggcttctcgagctccgggcccgcggcaacctcgggcgctgttctgcaggccgcgaccggcatgtacgagcaactcaagggcgagtggaaccgtaaaagccccaatcttagcaagtgcggggaagagctgggtcgactcaagctagttcttctggagctcaacttcttgccaaccacagggaccaagctgaccaaacagcagctaattctggcccgtgacatactggagatcggggcccaatggagcatcctacgcaaggacatcccctccttcgagcgctacatggcccagctcaaatgctactactttgattacaaggagcagctccccgagtcagcctatatgcaccagctcttgggcctcaacctcctcttcctgctgtcccagaaccgggtggctgagttccacacggagttggagcggctgcctgccaaggacatacagaccaatgtctacatcaagcacccagtgtccctggagcaatacctgatggagggcagctacaacaaagtgttcctggccaagggtaacatccccgccgagagctacaccttcttcattgacatcctgctcgacactatcagggatgagatcgctgggtgcatcgagaaggcctacgagaaaatccttttcactgaggccacccggatcctcttcttcaacacacccaaaaagatgacagactacgccaagaagcgagggtgggtcctgggccccaacaactactacagttttgccagccagcagcagaagccggaagacaccaccattccctccacagaactggccaaacaggtcatcgagtatgcccggcagctggagatgatcgtctgagccccccgggcactgggtggggcagggcacgagttatttaaaacagttacactgcagggtttcgcccaataaaggtggactgacattccctcttccaggcccttgtctccccagttgggacggcagagagacaagttcttatatctgaagaacttggaggttttggggcattcaggagttggagatagcctccaactgggtcagcctctgtctggtgggcattgctcagggtctcaaacatggacgcccactgtggggccccagcagcactgtggcctgcaggagggcatggccccaggtagggggactgttctagccagctgtggacacataggaatgctggaccagggtaccagattttttcaacaaagggggtgaagtgtcctactaaaaagaataaatgttggcagtgaattaaacaatttttcaaatga

SEQ ID NO: 181 - DNA, 1763 bp, Homo sapiens
  source 1..1763: mol_type = genomic DNA
aagcaactctcctccaactgtctttagggataaccctgagcgggcagccgctctactctatacctaactttatccgtaccagatacctagcctcactcagggccccccttacctggcggtgccgggatcaacaaatgaaattgtgacgggaagtcctggcccttggcccaacctcctgctgtccccggtctgagggcccaagccccgcgtctccgccttgccgtccagcctgtccttggtgtggggtgcttggaagtgtgagcaccctctctggctctttgccggccccaagggtcgttgcggcggcccccgggcccagtcatcagccctcttttccggtgccggaactatcgtactggtgccctagtttcccagccggcaggcggagtgaggaggaagcggaggcgagaccgcgctcaacactggggaaaggaaggaggcgggccctgcgcgcagcattttgggaaagagtggaattctgggtgttaggcccgccattcgcttgactcacgccttcgccgtagcatctttcgcagcggaccgaagagaagaaaagtaggccagagccgaactctcttcctgccaagatgtctattggtgtgccgattaaagtactgcatgaggccgagggccacattgtgacatgtgagacgaacaccggtgaggtatatcgggggaagctcattgaagcagaggacaacatgaactgccagatgtccaacatcacagtcacatacagagatggccgagtggcacagctggagcaggtatacatccgtggcagcaaaatccgctttctgattttgcctgacatgctgaagaacgcacccatgttaaagagcatgaaaaataaaaaccaaggctcaggggctggccgaggaaaagctgctattctcaaggcccaagtggccgcaagaggaagaggacgtggaatgggacgtggaaacatctttcaaaagcgaagataattttctaagttgaacagaactttgtccttttttctttcaggttatctgagttcattggagtgggtgcttgtgcatatatgctaggtatcttttgccatctttctctttagatcaggggaaatgtttaagctaaataaatctggggggttttttgttctgttttgttttgttttctttgagaaaataaggactttgtgttcatttgaagtttgctttggctaaattttgacaccctgggggatgtcctgggagaatgccagtactttgaaatagcacagctattgatgagattttaagctgctgttcctggccagttgcaggttaagccccagaaaagttcaccttggagaagctccgagaacacacagattgtgtctcattcatcttcagacacaggcacatagtgtggcactttgttcagttaacatttgtggagctgtcatcagctcagctttaacaacacaggtgactctttcccttgataaagtcataggtaattcaggggctgggtgcggcggctcacgcatgtaatcccagcactttgggaggccaaggcgggcggatcacgaggtcaggagttcgagaccagcctggccaatatggtgaaacctcgtgtgtactaaaaataaaaaaattagccgggtgcggtggcatgtacctgtagtcccagctactcgggaggctgaggcagaagattcgcttgaacccaggaggtggacattgcagtgagcagagatcatgccactgtactccagcttgggtgacagagcgagactgcacctcaaaaaaaaaaaa

SEQ ID NO: 182 - DNA, 4469 bp, Homo sapiens
  source 1..4469: mol_type = genomic DNA
cgagactcagattgtctgaattgagctatcgcaacttaatgctaaaagctccttaaagctacagatttatgacatagttccttccaaaatattacatcataaatcattgagaagattaaaaaaaaacacttgaagaaattgtagttttaaacatctctgcatatattttggatagctactaggttactttaactgtcattaaggagcacagacttactgaagctttactggacagaatcctgggaaatcgatatcattataaggttatatttcccagttagcgggtgaagggctggagaccttattgcagtcatggctttcacaaattacagcagtctgaatcgagctcagctaacctttgaatatctgcacacaaattcgtaagtatcctctaggtgccactgaggtaaccagtaactcgttccttgatattatatggaaatcgtttccccagaaaattttgctttttcactttttgagatgtatcccactggagtgaaatgtgtcactggatatcttgagctctgtattgaagaactgagatcagtgaaatacttgttgctaatccagaagaatctgatttttgtttattggatcaaaattttctaaatgcaaactttagttatttgaagtcaatatgttgagttgtttcattcaagtgtttataggaatccaacaaatactgctctattggatcgccaaatgttggactattttagtatcaaccgtttcccctctgtagtgacaacgtcctaaacagttaggtttataacaagtgtttactttctaacaagaaaacagaagacatttaaatgacaactttcaagaagaaaatttttattttttcagaagttggcattatcttcctggcagattgctcacatccaatattatttgtatatgctaaacaggaaacggcaacttgtttatatctctatttagatagtctttccccaaaatttccacagaaacatacagtgttcatggttcttgagttcatgaaggagtaatctaatcactccaacatggtctggaatgtttcaggtttaatccatatgcccactctcttggaggctgtccagtagcgtcaaaactttagtgttttaatacattcacctgttacttttgagatgaagttcacctttcttggatcacatgcaaaggatgtttaggtctgtgaagaaaagaatttctaggccgggtgctgtggctcacgcctgtaatcccagcactttgggaggccgagaaccactcacgaattcttgtttggtgcccttgctgaactggttgataatgcaagagatgctgatgccaccagaatagatatttatgcagaaagacgagaggaccttcgaggaggatttatgctttgctttttggatgatggagcaggaatggatccaagtgatgctgccagtgtgatccagtttgggaagtcggccaagcgaacacctgagtctactcagattgggcagtacgggaatgggttaaaatcgggctcaatgcgcattgggaaggattttatcctgttcaccaagaaggaagacaccatgacctgcctcttcctgtctcgcacgtttcatgaggaagaaggcattgatgaagtgatagtcccactgcccacctggaatgctcggacccgggaacctgtcacagacaatgtagagaaatttgccattgagacagaactcatctataagtactctccattccgcactgaggaggaagtgatgacccagtttatgaagattcctggggacagcggaacattggtgatcatcttcaatctcaaactcatggataatggagagccagaactagacataatctcaaatccaagagatatccagatggcagagacgtccccagagggcacgaagccagagcggcgctcgttccgtgcctatgccgctgtgctctatattgatccccggatgaggatcttcatccatgggcacaaggtgcagaccaagaggctctcctgctgcctgtacaagcccaggatgtacaagtacacgtcaagccgtttcaagacccgtgcggagcaggaggtgaagaaagcagagcacgtagcaaggattgctgaagagaaggcgcgggaggcagagagcaaagctcggacattagaagtacgcctaggtggagacctcacgcgggactccagggtgatgttgcgacaggtccagaacagagccatcactctgcgcagagaagccgatgtcaagaagaggatcaaggaggccaagcagcgagcacttaaagaacctaaggaactgaattttgtttttggtgtcaacattgaacaccgggatctggatggcatgttcatctacaactgtagccgactgatcaaaatgtatgagaaagtgggcccacagctggaagggggcatggcatgtggcggggttgttggggttgttgatgtgccctacctggtcctggagcctacacacaacaaacaggactttgctgatgccaaggagtaccggcacctgctccgagcaatgggggagcacctggcgcagtattggaaggatattgccatcgcccagaggggaatcatcaagttctgggatgagtttggctacctctctgccaactggaaccagcccccatccagtgagctgcgttacaaacgccggagagctatggaaatccccaccaccatccagtgcgatttgtgtctgaaatggagaaccctccccttccagctgagttctgtggaaaaagattaccctgacacctgggtttgctccatgaaccctgatcctgaacaggaccggtgtgaggcttctgaacaaaagcagaaggttcccctgggaacattcagaaaggacatgaagacgcaggaagagaagcagaaacaactgacagagaaaattcgccagcagcaggagaagctggaggcccttcagaaaaccacacccatccgctcccaagcagacctgaagaaattgcccttggaagtgaccaccagaccttccactgaggaacctgtgcgtagacctcagcgtcctcggtcgccccctttacctgctgtgatcaggaacgcccccagcagacccccttctttgccaactcctagaccagccagccagccccgaaaggctcctgtcatcagcagtaccccaaagctccctgctttggcagcccgggaggaggccagcacatctaggctgctccagccacctgaggcaccccgaaagcctgccaacactctcgtcaagactgcatcccgacctgcccctctggtgcagcaactgtcaccatctttactgcccaactccaagagccctcgggaggttccttctcccaaagtcatcaagactccagtggtgaagaagacagagtcacccatcaaactctccccggctacccctagtcggaagcggagtgtcgcagtttctgatgaggaagaagttgaggaggaagctgagaggaggaaggagaggtgcaagcggggcagatttgttgtgaaggaggaaaagaaggactcgaatgagctctcagacagtgctggggaagaggactcggctgacctcaagagagctcagaaagataaagggctgcacgtggaggtgcgtgtgaacagggagtggtacacgggccgtgtcacagccgtggaggtgggcaagcatgtggtgcggtggaaggtgaagtttgactacgtgcccacagacacgacaccaagagaccgctgggtggagaaaggcagtgaggatgtgcggctgatgaaacccccttctccggaacatcagagccttgatacacaacaggagggcggggaggaggaggtgggccctgtggcccagcaggccatagctgtcgcagagccctccacttccgaatgcctccgcattgagcctgacaccactgccctgagcaccaatcacgagaccatcgacctgcttgtccagatcctccggaattgtttacggtacttcctgcctccaagtttccccatctccaagaagcagctgagtgctatgaattcagatgagctaatatcttttcctctgaaggagtacttcaagcaatatgaagtagggctccaaaacctgtgcaattcctaccagagccgtgctgactcccgggccaaggcctccgaggaaagcctgcgcacctccgagaggaagctccgcgagacggaggagaagctgcagaagctgaggaccaacatcgtggcactcctgcaaaaggtgcaggaggacatagacatcaacacagatgatgagctggacgcctacattgaggacctcatcaccaagggggactgaaggcaggagagagagcagctcccctgcccacctgcccctcaaccctgtagctgcagggggaggggacttcattcatgggttggtggtcgcaccttggtttgacttacacgggacatttgtgtttttggaggaaaagataccctgattctttgaatcttccttaagtttataaatatttattttttaaaagaa

SEQ ID NO: 183 - DNA, 4710 bp, Homo sapiens
  source 1..4710: mol_type = genomic DNA
gcctgccggtcggcgcccgagctcggagccgcagccgcagccggaaaccgggcccgcgcggcggccgccgtcccggccaagccggggccccgaagccagagccggagccgggcgggccgcggggtcatggctgggccgcggggcgcgctgctggcctggtgccgccgccagtgcgagggctaccgcggcgtggagatccgcgacctgagcagctccttccgggacggcctggccttctgcgccatcctgcaccggcaccggcccgacctgctagattttgattcgctttccaaggacaatgtcttcgagaataaccgtttggcctttgaagtggctgagaaggagctggggatccccgctctcctggaccccaatgacatggtctccatgagcgtccctgactgcctcagcatcatgacctatgtgtcccagtattacaaccacttctgcagtcctggccaagctggtgtctcgccacccagaaagggccttgcaccctgttccccgccgtctgtagcacccactccagtggaaccagaagatgtggctcagggcgaggagctctcctcaggcagcctgtcagagcagggcaccggccagacccccagcagcacgtgcgcagcctgccagcagcatgtgcacttggtgcagcgctacctggctgacggcaggctgtaccatcgccactgcttccggtgtcggcggtgctccagcaccctgctccctggggcttatgagaatgggcctgaggagggcacctttgtgtgtgcagaacactgtgccaggctgggcccggggacacggtcggggaccaggcctgggcccttctcacagccaaagcagcagcaccagcagcaactcgcagaagatgccaaggatgttccaggaggcggccccagctccagtgctcctgcaggggctgaggccgatggacccaaggccagccctgaggcccggccgcagatccctaccaagccccgggttcctggcaaactacaggagctggccagcccccctgcgggccgccccacccctgcccccaggaaggcctctgagagcaccaccccagcaccccccacgccccggccccgctccagtctgcagcaggagaacctggtggagcaggctggcagcagcagcctggtgaacgggagactgcacgaactgcctgtccccaagccgagggggacaccgaagccgtccgaggggacaccagcccccaggaaggaccccccatggatcacgctggtgcaggcagaaccaaagaagaagccagccccacttcccccaagcagcagcccggggccaccaagccaggacagcaggcaggtggagaatggaggcaccgaggaggtggcccagccgagcccaacggccagcctggagtccaaaccctataacccctttgaggaggaggaggaggacaaggaggaagaggctccagctgcacccagcctggccaccagccctgccctgggccacccggagtccacacccaagtccctgcacccctggtacggcatcacccctaccagcagccccaagacaaagaagcgccctgccccgcgcgcacccagcgcgtccccactggctctccacgcctcccgcctctcgcactcggagccgccctcggccacaccatcgccagcgctcagcgtggagagcctgtcgtctgagagcgccagccagactgcaggtgcagagcttctggagccgccagctgtgcccaagagctcctcagagcctgctgtccatgcccctggtacccctggaaaccctgtcagcctctctaccaactcctccctggcctcctctggggaactagtggagcctagagtggaacaaatgcctcaagccagccctggccttgcccccaggaccaggggcagctcaggtccccagccagccaagccctgcagtggcgccaccccaacgcctctcttgttggttggagacaggagcccggtgccttcccctggaagctcgtccccacagctgcaggtaaagtcctcctgcaaggagaatccttttaaccggaagccatcacctgcagcgtccccagccacaaagaaggccaccaagggatccaagccagtgaggccacctgcccctggacacggctttccactcatcaaacgcaaggtccaggctgaccagtacatccctgaggaggacatccatggagagatggataccattgagcgccggctggatgccctggagcaccgtggggtgctgctggaggagaagctgcgtggcggcctgaatgagggccgtgaggatgacatgctggtggactggttcaagctcatccacgagaagcacctactggtgcggcgagagtccgagctcatctatgtcttcaagcagcagaacctggagcagcgccaggctgatgtcgagtatgagctccggtgcctcctcaataagccagaaaaggactggacggaggaggaccgggcccgggagaaggtgctgatgcaggagcttgtgaccctcattgagcagcgcaacgctatcatcaactgcctggatgaggaccggcagagggaggaagaggaagacaagatgttggaagccatgatcaagaagaaagagttccagagggaggctgaacctgagggcaagaagaaggggaagttcaagaccatgaagatgttgaaactgctaggaaacaaacgtgatgccaagagcaagtcccccagagacaagagctaacagcacgagaagccagttggggactgccccctcctggagcagctcctgggctgtgctctgtttgaagggggcgccctgctcccctcagatcagtcaggaggaagatgactaaggggagggatcctctgggtgatggcctcttcctcctcagggacctctgactgctctgggccaaagaatctcttgtttcttctccgagccccaggcagcggtgattcagccctgcccaacctgattctgatgactgcggatgctgtgacggacccaaggggcaaatagggtcccagggtccagggaggggcgcctgctgagcacttccgcccctcaccctgcccagcccctgccatgagctctgggctgggtctccgcctccagggttctgctcttccaggcaggccagcaagtggcgctgggccacactggcttcttcctgccccatccctggctctgagtctctgtcttcctgtcctgtgcaggcgcccttggatctcagtttccctcactcaggaactctgtttctgaagtcttcagttaagtttgagtttatgactgagtggcctgtactgtcagacgtgaatgggcctgacgggcaaatccatccctctctccctcacagttccaggagcggcttccctcgtctccccttactccacagggagcctcccttgccaggaccagggctgcgacggccatgctggggcaggtgagtgctctgttagctgctcccagtgctgtccccaggctgcagttctggtccctggttgtcaggtaggaagggtgcacttgaagcaggtgctcatctcggttccttaacgtttatagtctgacccctcacttaggctttcctctgccaccccggtccagggaagaggctcgctcccgcccatggtcatcactggtctgtctgctctgttgtctgttctttccctgactccctcccaccgaaggcctgatggctactcacccctctgggatggctatgggagaggaggagtgatggggaccgccaccttttctgcaggaaatgtgcccagcagctcttggtcaaagcactgttgctataagctatctctgggatgcctctaggcccccttccctctacacacctctgggaaaagattacactgtattaactctcgaggagtttcctcaccaataaacagacaacctcaactgccagtgccctgcagcctcgggccacagcggcagccttgtttgccttcccacctgcctctgccacacctggtggctgaacatctctggtcgcccagaggccatgttggggccatcctccaagagggatctctgccctcaccgcctgccactgggcaggatccctttcctctgcagggagaggtggctcctcggccatgcagcccctggcaggctccttctaaacatgcctgttgacctggagctggcgccaccaactccagggcctttccagggccagacaggtaacacgcatgaacccgagtgacagctctgacgggctgtttcggtgtcaggagacaaagctggcaggggcaggggtgaactggaggcaagtcaagtcacctgtggcctgtggggctgaatgtgggcccggtgttgccagatcctttgtcataagaagctagaaatccagattttatgtgtgtgtaatttgtaaatgctgaaagctagcctgaattttttttttttttttttgagacagagtctcgctctgtcgcccaggctggagtgcagtggcgcgatctcagctcactgcaagctccgcctcctgggttcacgccatcctcctgcctcggcctcctgagcagctgggactacaggcgcatgctacgacgcctggctaattttttgtatttttagtagagacggggtttcaccgtgttaaccaggatggtctcgatctcctgaccttgtgatccacccaccttggcctcccaaagtgctgggattacaggcgtgagccaccacgcccggccactagcctgaatttcaatcaag

SEQ ID NO: 184 - DNA, 966 bp, Homo sapiens
  source 1..966: mol_type = genomic DNA
cccccaggccgcgctctaggggctggactcagggcggtttgaaagatcggcgcgcaccgcaggagcaacggttggtcctgcggctgtgatgtcggtgttgaggcccctggacaagctgcccggcctgaacacggccaccatcttgctggtgggcacggaggatgctcttctgcagcagctggcggactcgatgctcaaagaggactgcgcctccgagctgaaggtccacttggcaaagtccctccctttgccctccagtgtgaatcggccccgaattgacctgatcgtgtttgtggttaatcttcacagcaaatacagtctccagaacacagaggagtccctgcgccatgtggatgccagcttcttcttggggaaggtgtgtttcctcgccacaggtgctgggcgggagagccactgcagcattcaccggcacaccgtggtgaagctggcccacacctatcaaagccccctgctctactgtgacctggaggtggaaggctttagggccaccatggcgcagcgcctggtgcgcgtgctgcagatctgtgctggccacgtgcccggtgtctcagctctgaacctgctgtccctgctgagaagctctgagggcccctccctggaggacctgtgagggtggctggcccctgggctgccccttctcatggcttcgtgctgactccataaacattctctgttgaggatgtccagtcagggcttgacaggcccaggctcagcccgccgtggctgggaaggttccctgcagtgccagtgctgcagcagggagagctgggcagaagcagcgagggggcccagctggcgagactgtagccccctcccactcccacactcactcttgcagagcctgtgtctttaagcagctggcgtgttacatctccatttaaggtttcctttgaacaaaaggtctgtggctaaaaaaagtttaaaaatcactggtctcattcacca

SEQ ID NO: 185 - DNA, 1133 bp, Homo sapiens
  source 1..1133: mol_type = genomic DNA
gcggcaggaggcgggtgggtcaaggtaactctgggctacagagtccttgctgggggttcggggagcgcttggaccccggcttctgggacgcgtcaggagaagggagcactggctttgctttcatcaggccaaagatgcctttctttgggaatacgttcagtccgaagaagacacctcctcggaagtcggcatctctctccaacctgcattctttggatcgatcaacccgggaggtggagctgggcttggaatacggatccccgactatgaacctggcagggcaaagcctgaagtttgaaaatggccagtggatagcagagacaggggttagtggcggtgtggaccggagggaggttcagcgccttcgcaggcggaaccagcagttggaggaagagaacaatctcttgcggctgaaagtggacatcttattagacatgctttcagagtccactgctgaatcccacttaatggagaaggaactggatgaactgaggatcagccggaagagaaaatgaagaccccagagacatttattggggagtaggatgtggctgagtgctttttttttggccagactagcggattcagtcctggaagagagtatcatataatgagacccacaggcactggcacccttgggttggcaatagaaggtgacatggaatggagaaaaccaagattccagatggggatagtaactagaaggtgcttcagatgcactgcctgcgggtgccagtctgaaaaccagaccgcacagaggcctggggctgctgatgagctttttggtgctctccacacacaagctcgcaaacacacatgtcccagaatagctctgttgggttgtgttgggagaagcggctggagttcattctctcacccccttatgttggtgtttggcgtgtgacagcagttctacagagctctgtgttggggtcatggatgagcggctctcttggctcttaaaggcaggcctctctcttcttgcctttaaagaatcctccttcctcacacctggcctcctctggcttcagcttctcagcagcaagcaccagccttccacaacaacactatatttttatgctactttcctgtttgcactactacttttttattaaacgatgttaaataatctc

SEQ ID NO: 186 - DNA, 3415 bp, Homo sapiens
  source 1..3415: mol_type = genomic DNA
atatactccaagaaaaaaaccacaaatgtttttctgttttgcctgaatacatgatttaaacaagagatttccacagaagggcgctttcatggaactatatgatcatatgggcaacattctgttgcagtctaccttctgtctgacggatatgccatcctgaaaaaggaaagaagctgaacttcaagttcctttcatttagccttgggcttccaccttctctgtggctagaaacaggaccgtccagaagtcacctgtaactgccctatcttgcaagttctgattttggcaaaaaaaaaaaaaaaaagccttgacaaggttggattcacttctttccctggattgtgtgtcatccaactctgcggccgtcacgatgttctggaagtttgacttgaacaccacgtcccatgttgacaagctgctggacaaggagcatgtgacgctgcaggagttaatggatgaagatgacatcttgcaggagtgtaaggctcagaaccagaagctgctggacttcctgtgcaggcagcagtgcatggaggagctggtgagcctcatcacacaggatccgcccctggacatggaggagaaggtccgcttcaaatatccaaacacagcctgtgagcttctgacttgtgatgtgccgcagatcagcgaccgcctcggtggggacgagagcctgctgagcctcctgtacgacttcttggaccatgagccgcctctcaatcctctgctcgccagttttttcagcaagaccattggcaatctcattgcaagaaaaaccgaacaggtgattacgtttttgaagaagaaggacaagttcatcagcctggtgttgaagcacatcggcacctcagcgcttatggacctgctgctgcgcctggtcagctgtgtggagccagccgggctccggcaggacgtcctgcactggctgaatgaagagaaggtcatccagaggcttgtggagttgatccacccgagccaggatgaagataggcagtcaaatgcttctcagactctctgtgacatagttaggctgggcagagaccagggcagtcagctgcaagaggctctggagccagacccgctcctcacagcgctggagtcgcaggactgtgtggagcagcttctgaagaacatgtttgatggagaccggacggagagctgcctcgtcagtgggactcaggtgttactcaccttgctggaaaccaggcgggttgggacagagggcttggtggactccttttctcagggactggaaaggtcatacgctgtcagcagcagcgtactacacggcatcgagcctcggctgaaggacttccaccagctcctgctcaacccgcccaagaagaaagcgatcctgaccaccattggtgtgctggaggagcccctggggaatgcccgtctgcatggcgcccgcctcatggcagcactgctgcacacaaacacacccagcatcaaccaggagctctgccggctcaacacgatggacttactgctggacttgttctttaagtacacctggaataactttttgcacttccaagtggaactatgcatagccgctattctctcccacgctgcccgtgaggagaggacagaagccagcggatccgagagcagggtggagcctccgcatgagaacgggaaccggagcctggagactccccagccggccgccagcctccctgacaacacaatggtgacccacctgttccagaagtgctgcctggtgcagaggatcctggaggcctgggaagccaacgaccacacgcaggcagcgggtggcatgagacgtgggaacatgggccacctcacacggatcgccaacgcggtggtgcagaacctggagcggggccctgtgcagacgcacatcagcgaggtcatccgagggctccctgcggactgccgtggccgctgggagagcttcgtggaggagacgctgacggagacgaaccgcaggaacactgtggacctggtgagcactcaccaccttcactcctcaagtgaggacgaggacattgagggtgctttccctaacgagctgtcccttcagcaggccttctctgactaccagatccagcagatgacagccaacttcgtggatcagtttggcttcaatgatgaggagtttgccgaccaggacgacaacatcaatgccccgtttgacaggatcgcagagatcaacttcaacatcgacgctgacgaggacagtcccagcgcagctctgtttgaggcctgctgcagtgaccgcatccagccctttgatgatgatgaggacgaggacatctgggaggacagtgacactcgctgtgctgcccgggtgatggccagacccaggtttggagccccccatgcttcagagagttgctcaaagaatggcccagagcgtggaggccaggatgggaaggcgagcttggaagcacacagagatgcacctggggcaggtgccccaccggcccccgggaagaaggaagcgccccctgtggagggtgactcagaaggcgccatgtggacggcagtgtttgatgagccagcgaactcaacgcccacagccccaggagtggtgagggacgtgggttccagtgtgtgggcagctggcacctcagctccagaggagaaaggctgggccaagttcactgacttccaacctttctgctgctccgagtcagggcccaggtgcagctctccggtggacacagaatgcagccatgctgagggcagccggagccaaggccctgagaaagcctcacaggcctcctactttgcagtcagcccggcttctccatgtgcctggaacgtgtgtgtcaccaggaaggcccccctgctggcctctgacagtagctcctctgggggctcccacagcgaggatggcgaccagaaggcagcgagtgccatggatgcggtgagcaggggtcccggccgggaggcccccccgctgcccacagtggccaggacagaggaggctgtcggcagggtcgggtgtgctgacagccggctgttaagccctgcctgccccgcgccaaaggaagtgactgctgccccagccgtggctgtgccccccgaggctactgtggccatcaccacagcactgagcaaggctggccccgccatacccaccccagcagtctcttctgcactggccgtggcggtccccctagggcccatcatggcagtcacagcagccccagccatggtggccaccctggggacagtgacaaaggacgggaagacagatgccccgccagaaggagctgccttaaatggcccagtgtgatgctgctgccgcccggccacggcccaccctggtcaggctgcctccttaatcgagaaaactacctggtgatgcaatcttttttttttttaatttaatttaattttaaaataaatgctgcattggtaaagctggcagttgaaacca

SEQ ID NO: 187 - DNA, 1188 bp, Homo sapiens
  source 1..1188: mol_type = genomic DNA
gcaggcgcggtggtcggacgacagaccgtgtgtttccaaaatggcggcagcgatggatgtggataccccgagcggcaccaacagcggcgcgggcaagaagcgctttgaagtgaaaaagtggaatgcagtagccctctgggcctgggatattgtggttgataactgtgccatctgcaggaaccacattatggatctttgcatagaatgtcaagctaaccaggcgtccgctacttcagaagagtgtactgtcgcatggggagtctgtaaccatgcttttcacttccactgcatctctcgctggctcaaaacacgacaggtgtgtccattggacaacagagagtgggaattccaaaagtatgggcactaggaaaagacttcttccatcaagcttaattgttttgttattcatttaatgactttccctgctgttacctaattacaaattggatggaactgtgtttttttctgctttgttttttcagtttgctgtttctgtagccatattgtattctgtgtcaaataaagtccagttggattctggaacggatgctctctcttgtgtatgtgaacaaagtgaacataaatgaagagtctccccttccaaggctgaaaactcagcttttgaaagtgaaatgtttgttcatcggggccagagcagggttgtcctctgagcgcatcacttagtgacgaggaatccaacagctcaaggcagagtgtggatcaccggctcccgaaaacagcagtcagcccttctttctcctgtgtgacagcagtgggcagctgaaagagggaagaatgtgggattcagtcatcaaacccagttctgagtcctggttccacagcttgggtactgatggcaatcttggccaagttgtctctctactctgaactttcctcctctgtactgtgggcttctgaggactaagtggcatcatgtgggcacagagagaagctttgtaaaatgtaaaaccgctatacaaatgtgacctttggttgtgtatgacagcagtccccaacctttttgccaccagggattggtttcatggaagacgatttttccatggaccgggggtggggcgggggtgtgcttggggatggttttggaactgttccacctgagatcatgaggcagtagatggaccgcgcaacctagatccctcacatgcacggttcgccaatagggttgaa

SEQ ID NO: 188 - DNA, 2687 bp, Homo sapiens
  source 1..2687: mol_type = genomic DNA
ggctcggggcgccgaggcttccgcgcccgctggttcctcgctccggggcggagctcgcgatagcgaccgggagcagggcgcggggcgggacccaggtccgaggcgaggaagccggaagccaggcgcggggagcctcccccttcgactgcagcctcgctccgtgccttctgcgcgcctgggatcccggagcctgcctaggttctgtgcgctcccgcccaggccggtgcccgccgcccgcctgcgccccaggcaggtcccaggcctccggctgctcccggccgaaggtggggacaggcagtggcaggcaccactagcgagggcgtttgggaacccagggtgaccacggcgcagccatggggaccgcgcttgtgtaccatgaggacatgacggccacccggctgctctgggacgaccccgagtgcgagatcgagcgtcctgagcgcctgaccgcagccctggatcgcctgcggcagcgcggcctggaacagaggtgtctgcggttgtcagcccgcgaggcctcggaagaggagctgggcctggtgcacagcccagagtatgtatccctggtcagggagacccaggtcctaggcaaggaggagctgcaggcgctgtccggacagttcgacgccatctacttccacccgagtacctttcactgcgcgcggctggccgcaggggctggactgcagctggtggacgctgtgctcactggagctgtgcaaaatgggcttgccctggtgaggcctcccgggcaccatggccagagggcggctgccaacgggttctgtgtgttcaacaacgtggccatagcagctgcacatgccaagcagaaacacgggctacacaggatcctcgtcgtggactgggatgtgcaccatggccaggggatccagtatctctttgaggatgaccccagcgtcctttacttctcctggcaccgctatgagcatgggcgcttctggcctttcctgcgagagtcagatgcagacgcagtggggcggggacagggcctcggcttcactgtcaacctgccctggaaccaggttgggatgggaaacgctgactacgtggctgccttcctgcacctgctgctcccactggcctttgagtttgaccctgagctggtgctggtctcggcaggatttgactcagccatcggggaccctgaggggcaaatgcaggccacgccagagtgcttcgcccacctcacacagctgctgcaggtgctggccggcggccgggtctgtgccgtgctggagggcggctaccacctggagtcactggcggagtcagtgtgcatgacagtacagacgctgctgggtgacccggccccacccctgtcagggccaatggcgccatgtcagagtgccctagagtccatccagagtgcccgtgctgcccaggccccgcactggaagagcctccagcagcaagatgtgaccgctgtgccgatgagccccagcagccactccccagaggggaggcctccacctctgctgcctgggggtccagtgtgtaaggcagctgcatctgcaccgagctccctcctggaccagccgtgcctctgccccgcaccctctgtccgcaccgctgttgccctgacaacgccggatatcacattggttctgccccctgacgtcatccaacaggaagcgtcagccctgagggaggagacagaagcctgggccaggccacacgagtccctggcccgggaggaggccctcactgcacttgggaagctcctgtacctcttagatgggatgctggatgggcaggtgaacagtggtatagcagccactccagcctctgctgcagcagccaccctggatgtggctgttcggagaggcctgtcccacggagcccagaggctgctgtgcgtggccctgggacagctggaccggcctccagacctcgcccatgacgggaggagtctgtggctgaacatcaggggcaaggaggcggctgccctatccatgttccatgtctccacgccactgccagtgatgaccggtggtttcctgagctgcatcttgggcttggtgctgcccctggcctatggcttccagcctgacctggtgctggtggcgctggggcctggccatggcctgcagggcccccacgctgcactcctggctgcaatgcttcgggggctggcagggggccgagtcctggccctcctggaggagaactccacaccccagctagcagggatcctggcccgggtgctgaatggagaggcacctcctagcctaggcccttcctctgtggcctccccagaggacgtccaggccctgatgtacctgagagggcagctggagcctcagtggaagatgttgcagtgccatcctcacctggtggcttgaaatcggccaaggtgggagcatttacaccgcagaaatgacaccgcacgccagcgccccgcggccgcgatccggaccccaagcccacggctccctcgactctggggcacggaaccccgcccactcccaatccccgcgccccgccctctcccacccgtgcttcccccgctccacccctcacctcacctcgcccccgccccacccatcgcgccccggcccgtcccatcgaggcccatgcaacccacgctcggtcccgttccggcccctgcgccccgctgcgcttcgctccccgcccttgcgccgttagtaaacatcgctcaaacgaaa

SEQ ID NO: 189 - DNA, 2271 bp, Homo sapiens
  source 1..2271: mol_type = genomic DNA
aatcccggcgtggacagcgcgaggagaaagatggcggcgatggcggtcgggggtgctggtgggagccgcgtgtccagcgggagggacctgaattgcgtccccgaaatagctgacacactaggggctgtggccaagcaggggtgagggccggacctccacgagcggaatgcggggtccgaactcggggacggagaagggcagactagtcatcccggagaagcaggggtttgatttcctctgcatgcctgtcttccatccgcgtttcaagagggagttcattcaggaacctgctaagaatcggcccggtccccagacacgatcagacctactgctgtcaggaagggctttcctgctgccccttaatcaggaagataacaccaacctggccagagttttgaccaaccacatccacactggccatcactcttccatgttctggatgcgggtacccttggtggcaccagaggacctgagagatgatataattgagaatgcaccaactacacacacagaggagtacagtggggaggagaaaacgtggatgtggtggcacaacttccggactttgtgtgactatagtaagaggattgcagtggctcttgaaattggggctgacctcccatctaatcatgtcattgatcgctggcttggggagcccatcaaagcagccattctccccactagcattttcctgaccaataagaagggatttcctgttctttctaagatgcaccagaggctcatcttccggctcctcaagttggaggtgcagttcatcatcacaggcaccaaccaccactcagagaaggagttctgctcctacctccaatacctggaatacttaagccagaaccgtcctccacctaatgcctatgaactctttgccaagggctatgaagactatctgcagtccccgcttcagccactgatggacaatctggaatctcagacatatgaagtgtttgaaaaggaccccatcaaatactctcagtaccagcaggccatctataaatgtctgctagaccgagtaccagaagaggagaaggataccaatgtccaggtactgatggtgctgggagcaggacggggacccctggtgaacgcttccctgcgggcagccaagcaggccgaccggcggataaagctgtatgctgtggagaaaaacccaaatgccgtggtgacgctagagaactggcagtttgaagaatggggaagccaagtgaccgtagtctcatcagacatgagggaatgggtggctccagagaaagcagacatcattgtcagtgagcttctgggctcatttgctgacaatgaattgtcgcctgagtgcctggatggagcccagcacttcctaaaagatgatggtgtgagcatccccggggagtacacttcctttctggctcccatctcttcctccaagctgtacaatgaggtccgagcctgtagggagaaggaccgtgaccctgaggcccagtttgagatgccttatgtggtacggctgcacaacttccaccagctctctgcaccccagccctgtttcaccttcagccatcccaacagagatcctatgattgacaacaaccgctattgcaccttggaatttcctgtggaggtgaacacagtactacatggctttgccggctactttgagactgtgctttatcaggacatcactctgagtatccgtccagagactcactctcctgggatgttctcatggtttcccatcctcttccctattaagcagcccataacggtacgtgaaggccaaaccatctgtgtgcgtttctggcgatgcagcaattccaagaaggtgtggtatgagtgggctgtgacagcaccagtctgttctgctattcataaccccacaggccgctcatataccattggcctctagccctgcgtgccaagtgtccagagccttggaagcagcttcaggttctgctcctgtagtacagaaggtgcagtacatctatgggctgtgattccccttgcccatcagagaggagcatttcaatctgctttcctgccttacatcaaggtgggcaagggattataattaattgcagggctcaagccaccaatctatgaagacctcaggccagggggtgaggaattagtgctggatttgaagctacgcactcagcctcaagaactccctggaatatccctgagaacatggggtttgaacggattttcagcctttttctgttcttgttttgatggttttgtgtaagaggaaatacaaataaagttatagccctttactgc

SEQ ID NO: 190 - DNA, 1420 bp, Homo sapiens
  source 1..1420: mol_type = genomic DNA
aagcgggtctggagcgggcgagacggccagggccggcgagcgcagtgcagcgccgcgcggtgcgggcggccgagtgggggcgtcatggaggatgagcggagcttttcggatatctgcggcggccgcctggcgctgcagcgccgctactactccccgtcctgccgggaattctgcctcagctgccctcggctctcgctgcgttcgctcaccgctgtcacctgcacggtgtggctggcggcctacggactcttcaccctctgcgagaacagcatgatcctctctgctgccatcttcatcaccctcttaggtctgcttggttatctccattttgtgaagattgatcaggagactctgttaatcattgattcccttggcattcagatgacttcatcttatgcttcaggcaaagaaagcactaccttcatagaaatgggcaaggtcaaggatattgtcatcaatgaggccatttacatgcagaaggtgatttactacctctgcatcttattgaaagatccagtggaaccacatgggatatcccaagtagtacccgtcttccagagtgccaagccccggctggactgcttgattgaagtatacaggagctgccaggagatcctggcacaccagaaagccacatcaacaagcccatgagccccagcgttcagaaggccagcattgtcttccatgggagatgactcttaagccataggggctggttttccgtactccaaaccatcaggtggacacagtcctaggaaccattatggatgtagtgcatcttagagccatagagcaggtgactggaaatctaactcagtatatttccgtgtattatagtgttttccttgtaaggttttgcctactttaccaaaggaggggagaccttaagaattttgacacagtatgtcaaaagtaatgtcagcaaagaacactttcggaaattgctaagcatgttcaggtttactttgttgatgtttgtgaagcaaaacaatgggaaactgacatcagatgtcttgagaaagctatattttccaatagtaccccttgtgtaaagttacgaaaaaaacaagcccttcagtactggttagcaggaagaaatgtcctacaaaagacgagtctgtcaacctagtgcctgtgttctgtacagggcttatttatttactgttaataaacagatcttccaaaacacacagttacctggttcacagatagctgctttttattgacaaacaagatcatagtatttcagtcatggtgtcaagcacattaatacttttctgttactcagcatttttttttatatcagttcaaaagctacttttgccaagaaggatgagacaaaaggccagacagaaattggactttggttttcagacatgggactctcatgttaacaaagaataaataagcaaatattgaa

SEQ ID NO: 191 - DNA, 1402 bp, Homo sapiens
  source 1..1402: mol_type = genomic DNA
ggaagttaaggaggggagggggtggagggaaaagcaagccaggaggtgcttgcggccgcttctagtagtttccaggcgctgccgggcggctggcactaagcggtcctgaggctgtggctacggctgctccggagctggtggcgccgcgataggagagccgatggccaagtggggtgagggagacccacgctggatcgtggaggagcgggcggacgccaccaacgtcaacaactggcactggacggagagagatgcttcaaattggtccacggataagctgaaaacactgttcctggcagtgcaggttcaaaatgaagaaggcaagtgtgaggtgacggaagtgagtaagcttgatggagaggcatccattaacaatcgcaaagggaaacttatcttcttttatgaatggagcgtcaaactaaactggacaggtacttctaagtcaggagtacaatacaaaggacatgtggagatccccaatttgtctgatgaaaacagcgtggatgaagtggagattagtgtgagccttgccaaagatgagcctgacacaaatctcgtggccttaatgaaggaagaaggggtgaaacttctaagagaagcaatgggaatttacatcagcaccctcaaaacagagttcacccagggcatgatcttacctacaatgaatggagagtcagtagacccagtggggcagccagcactgaaaactgaggagcgcaaggctaagcctgctccttcaaaaacccaggccagacctgttggagtcaaaatccccacttgtaagatcactcttaaggaaaccttcctgacgtcaccagaggagctctatagagtgtttaccacccaagagctggtgcaggcctttacccatgctcctgcaacattagaagcagacagaggtggaaagttccacatggtagatggcaacgtctctggggaatttactgatctggtccctgagaaacatattgtgatgaagtggaggtttaaatcttggccagagggacactttgccaccatcaccttgaccttcatcgacaagaacggagagactgagctgtgcatggaaggtcgaggcatccctgctcctgaggaagagcggacgcgacagggctggcagcggtactactttgagggcattaaacagacctttggctatggcgcacgcttattttagggccagcggcaggggactccagcctgctggacacttcagtccagctctctcctgactggggcttgcgactcacaggattgcatcgtcccagctgctaacttggggccggggcccctcccttccacatataccttgggtttgtgcatgttttctgctgggtgggttcagagggcaatttctcttttatgtgtacatatgctaaataaacataatttaaaaaacatg

SEQ ID NO: 192 - DNA, 3859 bp, Homo sapiens
  source 1..3859: mol_type = genomic DNA
aggaagtagaagggagcgagagccccagagcgcggcggcagcggcggcctggcccttccagagggccagagccagggacatgcgggcgcccgggactccgcgttccgcgcggcccggcgcctgagcgcctccgttccccgtcccggagctgccggcggcatgatccgacacgccggggcgcccgcgcgcggggaccccacgggtccggttccagttgttggcaaaggagaggaagaggaagaggaagatggcatgcggctttgtctgccagccaacccgaaaaactgccttcctcaccgccggggcatcagcatcctggagaagctcatcaaaacatgcccggtgtggctgcagctgagtctgggccaggcagaggtggccaggatcctgcaccgggtggtggctgggatgttcctggttcgccgggacagcagctcgaagcagctggtgctctgtgtccactttccttctctgaacgaaagctcggccgaggtgctcgaatacaccattaaggaagaaaagtcgatattgtacctggaaggctcggctcttgtgtttgaggacatcttcagattgattgcgttctactgtgtcagtagagacttactgcccttcacactgcggctaccccaggccatccttgaggccagcagcttcacggaccttgagaccatcgccaacctgggtctgggtttctgggactcctcgctgaatcctccacaagaaagagggaagccagcagagcccccaagagaccgggcccccggattccccctagtctccagcctcaggcccacagcccatgacgcaaactgtgcctgtgaaatcgagctgtcggtaggaaatgaccgcctgtggtttgtgaatcctattttcatcgaggactgcagcagcgccctgcccaccgaccagccacctcttggaaattgccctgcacgccctttgccgcccacctctgatgccacctcacccacctccaggtgggccccacgccgcccaccaccccctcccccagtgctgcccctgcagccctgcagcccagcccagccccctgtgctccctgctcttgcccccgcccctgcctgtcctttgcccacctctcccccagtgcctgccccccacgtcacaccccatgccccaggtcccccagaccatccgaaccagccgcccatgatgacctgcgagagactcccatgccccactgcaggcctgggccccctcagggaggaagcgatgaagccaggggcagcctccagtcccttgcagcaggtccccgccccgccactgcctgcgaagaagaaccttcccactgcccctcccagacgccgcgtttccgagagggtgtccttagaagaccaaagtccggggatggcggcagagggggaccagctcagcctgcctccccaagggacctcagacggccctgaggacacgccccgggagagcacggagcaaggccaggacacagaggtgaaagccagcgatcctcacagcatgccagagctgcccaggacagccaaacaacccccagtcccgccccccaggaaaaaacggatctctcgacaactggcctcgaccctcccagctcccttagagaacgctgagctctgcacacaggcgatggccttggagacacccacgccgggtccacccagagagggccaaagccctgcttctcaggctgggactcagcaccctcctgcccaggccactgcccattcccagagctctccagagttcaagggctccctggcctccctctcagacagcttgggggtgtctgtcatggccaccgaccaggactcctactccaccagcagcacggaggaggagctggagcagttcagcagccccagcgtgaagaagaagccctccatgatcctgggcaaggctcggcaccggctgagctttgccagtttcagcagcatgttccacgctttcctctccaacaaccgcaagctgtacaagaaggtggtggagctggcgcaggacaagggctcgtactttggcagcctggtgcaggactacaaggtgtacagcctggagatgatggcgcgccagacctccagcacggagatgctgcaggagattcgcaccatgatgacccagctcaagagctacctgctgcagagcaccgagctcaaggccctggtggaccccgccctgcactccgaggaggagctcgaagcaattgtagagtctgccttgtacaaatgtgtcctgaagcccctgaaggaagccatcaactcatgcctgcatcagatccacagcaaggatggttcgctgcagcagctcaaggagaaccagttagtgatcctggccaccaccaccactgacctaggtgtgaccaccagcgtgccggaggtgcccatgatggagaagatcctgcagaagttcaccagcatgcacaaggcctactcacctgagaagaagatctccatcctgctcaagacctgcaaactcatctacgactccatggccctcggcaacccagggaagccctatggggcggatgacttcctgcctgtgctcatgtatgtgctggcccgcagcaacctcacggagatgcttctcaatgtggagtacatgatggagctcatggaccccgccctgcagctgggggagggttcctactatctgaccaccacctacggggccctggagcacatcaagagctacgacaagatcacggtgacccggcagctgagtgtggaggtgcaggactccatccaccgctgggagcgccggcgtactctcaacaaggcccgggcctcccgctcctccgtacaggacttcatctgcgtgtcgtacctggagcccgagcagcaggcgcggacgctggcgtcgcgggcggacacccaggcccaggcgctgtgcgcgcagtgcgcggagaagttcgcggtggagcggccgcaggcgcaccggctgttcgtgctggtggacgggcgctgcttccagctggcggacgacgcgctgccgcactgcatcaagggctacctgctgcgcagcgagcccaagcgcgacttccactttgtctaccggcccctggacggtggtggcggcggcggcggcgggagcccgccctgcctggtggtgcgggagcccaacttcctgtgaggccctcccggggcgcctcccctcacccccaggcgcacgtctggccccgcctctggctgcgcactcccgaccgcgacgtccacgcagcagagggacatgggccattccatgacgtgcccaggccaacgtcgcaggacagttgtgaaaataacatgacgctcgtccaaggccacttcctgagggcaagtcctaatagccctgagacaccgagacggcatgttcttcattagacggaaagggaaactgaggctcaggagagaggcgctccaggccgctgcagccaacaaaccggcgccctcttcacacgtagctcctcaggccattccccatgagtcccccacacccaccccatcctcggtctttgcaaagaagggcccgagcttagtttccccaggactggcctaggaaggagcaccggccacagctgctccccgtgccactcagggtggacccagcatctcaggagcacctcagggtgtcggttaagagacaggcctccacccctgcaccagagcctgctcttagctcccggtgcccccagaccccgcagctctgtgcccggcaagaagcagctagacacacgccagggcgccaagcacggccagctccgcggacccatggacaagcccagccccgcctcagggaaaacagggcctttccctacaggacacgccccagagctgtggcagattgcaggagccatcgtgtggggagaatttaataaaagcccttttgaaaatga

SEQ ID NO: 193 - DNA, 1606 bp, Homo sapiens
  source 1..1606: mol_type = genomic DNA
gctgcgtttggtcagttgcaccttctgggtcactggtagccgcgggagccgggtggggcctaggcgatgatccggcattaaggagctgggatcatcctccgtctcaggtggtttggggaaagtgtaggggcaaccaaagatcatcggcttgactaggccctttgccctgaacctcatgaagaaatgataggaggcagacatatgtgcctaaaaagagcgttgagctcagagaagagcaactcggagttttgggggtgtgctttgatttgtgtacatcaatggcagaatcatccagcgaatcagatcacttccgctgtcgtgaccgattgagtccatgggctgccagatcaacgcacaggggaactcgaagtcttcctacagtagaagttaccgagaaggtcaacactataacaagtactttacaggataccagtcggaacctgcgacaagtggaccagatgcttggacgataccgagaatacagtaatggacaggcgggtgcgatagaacatttaaaagaaagcttggaacaatcaatcgaccaactccggagtcaacgtttattgagaaactcaggagggagaagtatttctgttacaagtttgagtgcaagtgaccttgatggtggcactgggtcagagctccatcattttccacctacctcacctctcaaggactatggggatccacagggtattaaacgaatgagatcaagaactggtgtccggtttgttcaagagactgatgatatgactcagcttcatggttttcatcagtctcttcgagacctcagcagtgaacaaattcgccttggagatgatttcaacagggagctttccagaaggagccggtcagatgccgaaacaaaaagggctttggaagaattgactgaaaaacttaatgaagcccagaaacaagaagtggtttcagatcgggtggagcggcggcttcaggaactggagagagagatgcgcacagaaagggagctggtggaaagacgccaggatcaactgggactcatgtccctgcagctacaggaggcactaaagaaacaagaagctaaagcagatgagcatgagggggcaataaaaaataagctaagacaaactgaaactgagaagaatcaacttgaacaggaattggagctatctcgaaggttattgaatcaatcagaaggcagccgagaaacacttttgcatcaggtagaagaactgcgtacacaacttacgaaagcagaaggtgatcgaaagggtttacagcatcaagtatctcagatttccaagcaacagtcaaactatcaggatgaacaaggggaggactggagatttaggagaggggttgagcgggaaaaacaggacctggagaagcaaatgtcagatttgagagtgcagctgaacttcagcgcaatggcatctgagttagaggaagtgaaacggtgcatggagagaaaagacaaggagaaagcacatttggcatcacaagtagagcacatcaatagaaaatgtcttttaaatttggttcaagatttggattgtaaagataatgaaatattgacatactctttacaaagccctctacatgtttaataaagacttacttgaaattg

SEQ ID NO: 194 - DNA, 2495 bp, Homo sapiens
  source 1..2495: mol_type = genomic DNA
cctggtcctgccgctgcgcccgcccgccatggtgtcccgggaccaggctcacctgggccccaagtatgtgggcctctgggacttcaagtcccggacggacgaggagctgagcttccgcgcgggggacgtcttccacgtggccaggaaggaggagcagtggtggtgggccacgctgctggacgaggcgggtggggccgtggcccagggctatgtgccccacaactacctggccgagagggagacggtggagtcggaaccgtggttctttggctgcatctcccgctcggaagctgtgcgtcggctgcaggccgagggcaacgccacgggcgccttcctgatcagggtcagcgagaagccgagtgccgactacgtcctgtcggtgcgggacacgcaggctgtgcggcactacaagatctggcggcgtgccgggggccggctgcacctgaacgaggcggtgtccttcctcagcctgcccgagcttgtgaactaccacagggcccagagcctgtcccacggcctgcggctggccgcgccctgccggaagcacgagcctgagcccctgccccattgggatgactgggagaggccgagggaggagttcacgctctgcaggaagctggggtccggctactttggggaggtcttcgaggggctctggaaagaccgggtccaggtggccattaaggtgatttctcgagacaacctcctgcaccagcagatgctgcagtcggagatccaggccatgaagaagctgcggcacaaacacatcctggcgctgtacgccgtggtgtccgtgggggaccccgtgtacatcatcacggagctcatggccaagggcagcctgctggagctgctccgcgactctgatgagaaagtcctgcccgtttcggagctgctggacatcgcctggcaggtggctgagggcatgtgttacctggagtcgcagaattacatccaccgggacctggccgccaggaacatcctcgtcggggaaaacaccctctgcaaagttggggacttcgggttagccaggcttatcaaggaggacgtctacctctcccatgaccacaatatcccctacaagtggacggcccctgaagcgctctcccgaggccattactccaccaaatccgacgtctggtcctttgggattctcctgcatgagatgttcagcaggggtcaggtgccctacccaggcatgtccaaccatgaggccttcctgagggtggacgccggctaccgcatgccctgccctctggagtgcccgcccagcgtgcacaagctgatgctgacatgctggtgcagggaccccgagcagagaccctgcttcaaggccctgcgggagaggctctccagcttcaccagctacgagaacccgacctgagctgctgtggagcgggcatggccgggccctgctgaggaggggcctgggcagagggcctggacctgggatcaaggcccacgcgcttccctggggtttactgaggtgatgggtgcaggaaaggttcacaaatgtggagtgtctgcgtccaatacacgcgtgtgctcctctccttactccatcgtgtgtgccttgggtctcagctgctgacacgcagcctgctctggagcctgcagatgagatccgggagactgacacgaagccagcagaggtcagaggggactctgaccacagcccgctctctggctgtctgtctgcagtgcccggctgagggtgggaggcaaacacgccttgttcctgctcttcccagttcagcttggtgggagaaagtcattcgcgtggctcgggacgctcatgtaaatttggttttggtgctcaagggttctttcctcccaggggcaggtgtttctttcctgtttgtcttgtgtcttgagagcttggccttatgaccagtgagaactctctccctggtctctgccagcccaagcatcactgcccgaggcgccagctcagtttcaccgtccacgtccacaaggggcttttcccaccttcacctttgtcgctgggtcagtgctggaaagcgcccctcactcctgcgctgacaagggcccttctctactgtctgtggggtggttccgggctgggggggctgcctcctttgcacctgattttgaaggtgtctctttcatccatggttaagtcataaaaagcttattggttttggttttgactcacctgaaagtttttttggtttaaaagaagaataggcggggcacggtggctcatgcctgtaatcccagcactttgggaggctgaggcaggtggatcacgaggtcaggagatcgacaccatcctggctaacacggtgaaaccccgtctctactaaaaaatacaaaaaattagctgggtgtggtggtgggggtgggcgcctgtagtcccagctacgtgggaggctgaggcagcagactggtgtgaacccgggaggtggagcttgcagtgagccgagatcgcgccactgcactccagcctgggcgacagagcgagactccatctc

SEQ ID NO: 195 - DNA, 1374 bp, Homo sapiens
  source 1..1374: mol_type = genomic DNA
ctctgaggtgccactgcccccgggagcactggccacgctgagttctagctgttctcttggagtggctttgcacagaagcagcccggcgtccagagggccaggtgaatcttcacttcctgccttctctggggtggctctgttgcccccagcctgtaaggctggcctcccctacaatctcagccgacaagagggacatctgacgtgcctctcaatccctgacatcaagacggccttcagcgactgcaccagcaagatcggcaggcgagattgcctgacccaggcctgctcggccctcacaggcaaaggggtgcgcgagggcatcgagtggatggtgaagtgtgtcgtgcggaatgtgcaccggccgccgcggcagagggacatcacgtaggcgcagccgcgctgccgtcgggacggctggtcccctggtgctggaggagtggcctcctgttggctcccatgctgctgatctggggggtgggtttgctttgctttggggttcttctatttactttgttttctcgaagacaaactttcctctatgtctggaaaagcgtaggcatccggaggctttggaggggagtctggcagcccggctggcccaggccctgcagcggcagcctttccacagggcgcagcggcggcctttcgaggccctttctggggggtctgagggagacctggttgggaattggggctccagtgctcaggctggcttgggctgcatgaggacagccctgtgggaccctcgggagaccccgtggctgtctccgccccatcgaggaggaggcccgtcagccatggctgccatctggcttctgccctgtgaccccgtgaccccgtgaccccgaagtggtctggggctgatcttgccttgaggaagacccaggccatgttcccaaaggccagcgggggccctggattgtgatgcagcctcgggacagggctgaggcctgcgggggaagacctataccccacgcctgggcctggcttcacctcaccctaatcccccgggagggagctgactgatgcaaaaagctgagggggcctgctgggagtggctgtttttatgccccagccccgcaagttggggagtgtttgtgggggtccagagccctcccccagccaggagagaacctcccggaggggttctctgtggggccctgtgtcccctgctcgggagtaaggctggtcctggggtcctccctgcacggaccccactgggcctgccgagtgctgtgttcttcctcagtctggctgtgggcaggagcggcctgcccagtgtcacccagggtgagtgcaaaataaagacggcgagtgtggctctgtccatcccttccctcctggagggtggaggctcctggctgttggacacgg

SEQ ID NO: 196 - DNA, 2429 bp, Homo sapiens
  source 1..2429: mol_type = genomic DNA
aaagcagccaatgggagagccgaggcggggaggtgcggccaatggcgcgggcctgtttgattcaaaggttgcctataaagcgggactgcacgccggtttttgtccgagggctgtcgagtccgagcgccgccatggctctgctgtccgagggcctggacgaggtgcccgccgcctgcctgtcgccgtgcgggccgcccaacccgaccgagctgttcagcgagtcacggcgcctggctctggaggagctggtggcgggcggccccgaagccttcgcggccttcctgcgacgcgagcgcctggctcgtttcctgaaccccgatgaggtgcacgccattctgcgcgcggcggagaggccgggagaggagggcgcggcggcggcggcggcggccgaggactcgttcggctcctcgcacgactgctcttcgggcacctacttccccgagcagtcggacctggagccaccgctgttggagcttggctggcccgccttctaccagggcgcctaccgcggcgccacgcgtgtcgagacgcacttccagccccgcggcgctggcgaaggtggcccctacggctgcaaggacgctctgcgccagcagctccgctcggcgcgagaggtgattgcagtggtcatggacgtgttcacagacatcgacatcttcagagacctgcaagaaatatgcaggaaacagggagttgctgtgtatatccttctggaccaggctctcctctctcaatttctggatatgtgcatggatctgaaagttcatcctgaacaggaaaagttaatgacagttcggactatcacaggaaatatctactatgcaaggtcaggaactaagattattgggaaggttcacgaaaagttcacgttgattgatggcatccgcgtggcaacaggctcctacagttttacatggacggatggcaaattaaacagcagtaacttggtaattctgtctggccaagtggttgaacactttgatctggagttccgaatcctgtatgcccagtccaagcccatcagccccaaactcctgtctcacttccagagcagcaacaagtttgatcacctcaccaaccgaaaaccacagtccaaggagctcaccctgggcaacctgctgcggatgcggctggctaggctgtcaagtactcccaggaaggcggacctggacccagagatgcccgcagagggcaaggcagagcgcaagccccatgactgtgagtcctctactgttagtgaggaagactacttcagcagccacagggacgagctccagagcagaaaggccattgacgctgccactcaaacagagccaggagaggagatgccagggctgagtgtgagtgaggtgggaacacaaaccagcatcaccacagcatgtgctggtacccagactgcagtcatcaccaggatagcaagctctcaaaccacgatttggtccagatcgaccactactcagactgacatggatgagaacattctctttcctcgaggaactcaatctacagaagggtcaccagtctcaaaaatgtctgtatcgagatcttccagtttgaagtcttcctcctctgtgtcttcccaaggctctgtggcaagctccactggttctcccgcttccatcagaaccactgacttccacaatcctggctatcccaagtacctgggcaccccccacctggaactgtacttgagtgactcacttagaaacttgaacaaagagcggcaattccacttcgctggtatcaggtcccggctcaaccacatgctggctatgctgtcaaggagaacactctttactgaaaaccaccttggccttcattctggcaatttcagcagagttaatttgcttgctgttagagatgtagcactttatccttcctatcagtaactgctccgtgttcagactcctggtttcttccaggcttacagtggacatcatcagcttcctgctttaaaaaatatcttatgtccctaattgcctttcttttacctgactttgtcacctttgttgtctttgaattctttaggctgcatattattttacatgctttgttttgtcatgtatataccaggtattggttttatggtttaaacactatggatacaggggtttgttttgcacaattttaatagtcatgcactacataatgatgttttggtcaatgacagaccacgtatatgttggcagtctcataagattataatactgtatttttactataccttttctgtgtttagatacaaataccattatgttacagttgcctacagtattcagtgcagtaacatgatgtacaggtttgtagcctgttttgcatttttcttaggttgtatgctcttctgttttaaaggtttgaatcaccagcatttttgtgatcaaaatcctatttagaaaaaataaaactactttctgtttatctctttagaa

SEQ ID NO: 197 - DNA, 6938 bp, Homo sapiens
  source 1..6938: mol_type = genomic DNA
tggctgctgggtgccgcacgccttcccatcctcctcctctcccctcccccatccctccccgccccctcggccgctccgctccctggcgtgactcggcactgagagtcccgggagaagactcggcggtcgccacctcttctgtccaggcctcggccttcctgagcatctctccttcctctcccagatcgtcttctccttcagtttcaaagccagtggcgtcgcggccaccctgccgggctctctgtgaggatggtgggggtgaagcccgtcgggagcgacccggatttccagccagagctgagcggcgcgggctccagactcgccgtggtcaagttcaccatgagagggtgtgggccatgtttgaggattgccccagcattcagttctatgagtaataaatatccacaggctgttttcttggaagtcgatgtacatcagtgtcagggaacagctgccaccaacaatatatcagcaacacctacatttttgttttttcgaaacaaagtgagaattgatcaatatcaaggagcagatgctgtgggattagaagaaaaaatcaagcagcacttagaaaatgaccctggaagcaatgaggacacagatattccaaaaggctatatggatttaatgccttttattaacaaagctggttgtgaatgtcttaatgaaagtgatgagcatggatttgacaactgtttacgaaaagacacaaccttcttggaatctgactgtgatgaacagctgcttattactgtggcattcaatcaacctgttaagctttattccatgaaatttcaagggccagataatggtcagggccctaaatatgtaaaaatttttatcaacctaccccgatctatggattttgaagaggcagaaagaagtgaaccaactcaagctctggaactgacagaggatgatattaaagaagatggcattgttccacttcgttatgttaagtttcagaatgttaacagtgtaactatatttgttcagtcgaatcaaggtgaagaggaaacaacaagaatttcatattttacttttattggtactccagtccaggcaacaaatatgaatgacttcaaacgagtagttggcaaaaaaggagaaagccactaaggtacaaaagacactggacaaccatattgcaatcagatctacagctcctggataattgcttgattctcgccagagactgtcaatgtttcattcattgccattaccaataaatcattgcttttgttcagatggtatcactagtgtttccattgtaatcttgacacatgcaattgtaaataaaagtcaccacttttgccaagcttaatttttgtctttctaaatcagtattttctctttccatgtatttgaaaactggttaacttctgattttagtagagacttaagtgtctggtagtatattgattgaaagccagtttctttagaaaaggagaaactgttctagggaattaagaagtacatgtgtacacattcatggcaagttattttgataagtgaacctggaacagctaaccatgttaaattattactgcatttttattaaaggacatttgtatatctgagctatggaaattactcaaattataaattagaagaaataaacaggtttaatgagatttagctactcttacctaaaacttagctaatgggtccacagattctttcttggtatatatcaagattttaatctcttctggtaaactttaaaatttgagtcagcctttttttttttttttttttttttaactaatagaagaatgtggaaatcagacagttggggaaaaaatacagcatagtgaattcagaaaacaggaattggccaggtgtggtggctaatgtctgtaatcccagtactttgggaggccaaggcgggcgaatcaccagaggtcaggagttcgagtccagcttggccaacatggtgaaacctcgtctctactaaaaatacaaaaattagccaggcatggtggcgggtgtctgtaatcccagctacttgggaggctgagacagaagaatcggctgaacccgggaggcagaggttgcagtgagctgagattgcgccattgcgccccagcctgagcgacaagagcaaaactccgtctccaaaaaaaaaagggaattattacccttaatcaagtatttattacctgaactaccaaaacgtgcagtgtaaatatacagagaacatgatttaaggttgaaaatgaggtgctcaaatagaaatgtttaaaaggtctttcacaaaaggctggtaaaatacctattcgttaccttttttatcttaaaattgtaatctaaaaagtattggtagttttaattttaaaatttctgagtattttgaaaactatttttaaagagtacataagactgtaaaattgtgattcagttaaacatttgagggcattcttgtctaggaatatggtagagataccatttgcctttgtgagagcagtgtgtttatacttgtttatgaaaaaattctacagaagttttagtgttgaaagagtccctttctgaaacccaagtgtcattagatagtttagttcatttgtatatgggcacattaactggtctgtgatgatcttaacactccttaaatagaccatctcagattaatcacatctgaaattaaggataagattaatatgcagggttttggtttacagttttgtacacttaacctttctgagtaattgttaaagtgcctcatcctaagtattgctgaccttttcctatttatacttgatagtttgaaaacccagtgaaacaaatttcgtatttgtaaaggattggacatcagatttatattgtctatgtgactcttctataacaattagttgcagtatgcaagtattacataattcaaattgtaaatagtgaaaaatgaacgtttataggtaactataacgtttcacttaatgggaaatcttactattataaatgtgcataattggcatttaaaatatcaaactgaaatgctgttttctcctaaaacagtatatatatatacacacatatgtatatgtaacatttatatataacactgaattttccagatgaataagagcatttgaaaaaatgtaactctagttattttaactgaagttatttattagtgcatctagaaaactggtattcagtttcttgttcattttgtcggacatagcaaaaaagaatttcatgatctctgtattttgatacattgacatcaggtgcttttgatgagaaacaacagtgaaatatcgtgttcataatagaaacgaaagtcaggtattgcagtaggaagtctttgtcagcttaatgctgaagccaagagtagcacaaggtaccacattcttgtgcccacgacaggcttttataatccttctgagttctctttgacatcaagccccacgttgttccccagtctcaatattctgttggaggcagccacgtaacaattagagttgaaacctgccccacgttgttccccagtctcaatatactgttggaggcagccacgtaacaattagagttgaaacctgccccacgttgttccccagtctcaatatactgttggaggcagccacataacaattagagttgaaacctgccccacgttgttccccagtctcaatattctgttggaggcagccacgtaacaattagagttgaaacctgccccacattgttccccagtctcaatattctgttggaggcagccacgtaacaattagagttgaaacctgccccactttgttccccagtctcaatattctgttggaggcagccacgtaacaattagagttgaaacctgccccacattgttccccagtctcaatattctgttggaggcagccacttaacaattagagttgaaacctgtctgccatcctttgtctcaatgtttgaggatgtatgcagtgtttttggcagcgattataggaatgcagttgtttatttggcctcagcagtttatttatggctgcaattaatatccctgatcatgggcttttaaacctaaaatagttcagatcctcccttgttcctcttaatgtctaaaagctttgattctgtaataagaataaagtgttggagttgaataaattagttacaccctttgtaagctttaaaaacatgaaatttaaggcttactcatgttgcttgtattgatactcatatagttcaatttagtaggttaatttttgtgttaggtatatctcttctggaactgataatttgtaatcttagactattttttttttaagataagtaacttagagtaagaaatccagctgggaacagtggctcatgcctgtaatcccagcattttgggaggccgaggcggctggatcacttgaggtcaggagtttgagaccagcctggctaacatggagaaaccctgtctctactaaaaatacaaaaaattagccaggcatggtggcaggtgccacacccagctacttgggaggctgaggcagtagaatcgcttgaacccgggaggcggaggttgcagtgagccaagatcgcatgactgcacactagcccgggcaacagagtgagactgtctcaaaagaaaaaaaaaaaaaatccattcacagaactgctaaagaaaaactagaggaatattttgctcatttagctttaaaactcattattagaggtgtgtattttacagttttgtaaatatagattatgctttataatacacataaagcaagtatatataacatgcatatagtaaataaattttaaaatattgactattccccagttaagcctatacttcttaaggaagactactgatgtcattttaagcatgtttcaaaattcaagttttatttttgatcaataaggtttttttttttttttaacatgctcagcactataggaataagaggacagtggagatttgtaggctaataagatcgcttttaaactttgtggtccatgtaaaattattagttggagaatgtgtaattagagaactataagataaagagataacctttagaatttgaatgtactaaaattgtacacagcttggaatattaaaatcttaaggatatgcaatgttaaaactgctagagtatttttccttcgtgcttgctatgcttctctatgggaagaggaattttattttggaattatttctaagttgaacagaccagaattaattgtgaaaacatgatctgttggtttataattggacacgcatttggagatactggctcatcatactacctaggagcaaaatctctgaagtttgaatccctgctcttccacttgttagctgtgtcatcttgagcaagtaacatccttcagagctcaaatttcttcttgtgtaaaaataggaacatctatctcttagacttgttctgaagatgcgccttactttgtatctggaacaaggataagtatcttctgtatcctgctctcagctgtcactgctttttaggccatcattacttgcttggcatactgcagtgcctcctaattgtctctttgtttctgctctggcctctctcatgtatcccccacatggccgctggttctcttttctttatggggtctttgtaatgtaatctctcctcctctagcctccccatgcccctcatttctccagtgtgctgtgctgtattaccaggtagcagaacgtaccctaatatcgcatgccttcctctgacctaacttttccatctgaccaattcctacttatctacaaggctcagtccaaggaaaactgataccgggaataatcataacaattgtgcacgcctcctcagctgctatgacaccttgccattatttcatccggatacttatcaagctacttgtaatgatctgtagtcttatttggactactagattgtgagctgtaatacaagtattttgtctctagtattaagccagtttatttggtttctatcattaaatacaatgttgaaaaaattctcagggtccaaggggagatgcttgggttgagtcagagataaagtaggaatatgcagttgaggaaggtaaggaagataatttagctgaagtaaaggaaaagtgcatagtgtgttcatagagtgggagttaagtgtaagagacattctagggaagtgaaggagaagctgaaagagcaagtagagacggtaaggtgaagctcctcttgccatgtgaaagagatcaaactttctccttaatttatgggaggagcgagcatagagaagtctgtgatgtctcacaaggttctcacttttacaattgaatatagaagtagctcttaggagaagcagaacgttcagaggggaagatgaatatggttttgggtacattgccttaaattgcatttttggtatttgggtggcgatgtctagtaagtaaaaagccaggaatgtgattttagagcttagagctagaagcaaggaactaggagttgtttagatgatgaaaactgaaatatgtatatgaatgggaatttttagaatataaagggagagaatgaaactaaggagcaaatgttagggaatcctaagaaatattaaagaattgggaaaagaggaacctggaaggtagagtagtaaacaggaaagggaggaaaaacaggaggtggtaataaagtagtgttaatgaatccaagagggagcagtcaccatcttcaaatgtgatattgaaattagctgggatgtccagttgtttaatccattaaattgtggaaacagtctttctagtgcttaattataggaatcattgatcatattaataaactttcagttgaagcatcagcagataattattccaaaaccctctggcaaagaaatgtagatgcttttatagtctaccattgaacacagttttacatgacacttggcaaaacttggagatggatggcactattttgtaagagaatatgaaacactgctttgaagttgtcattaaaggatcttatcaggtgc

SEQ ID NO: 198 - DNA, 1229 bp, Homo sapiens
  source 1..1229: mol_type = genomic DNA
ggacgcaaccatctgcggaaaggataggggggaggaagacttaacactgcaacaacaggtacaaaaaagaaggaaactcagtaacaggacccagaggaccattatatattgctctatattctaggtcgcccactttacacttccttctcatgcacttggtcaataccacgcccgctgaccacactggcgacttccctctctgtcgcccctccgtgaagtcagacccactctgcgggccaagaaaggtgaccgggcttccttccggcttgctaagcagaggccggaagcggtggtttttagcggctctctgggtagcagggtggtgtgatagcggcagcgaggggctcggagaggtgctcggattctcgtagctgtgccgggacttaaccaccaccatgtcgagcaaaagaacaaagaccaagaccaagaagcgccctcagcgtgcaacatccaatgtgtttgctatgtttgaccagtcacagattcaggagttcaaagaggccttcaacatgattgatcagaacagagatggtttcatcgacaaggaagatttgcatgatatgcttgcttcattggggaagaatccaactgatgagtatctagatgccatgatgaatgaggctccaggccccatcaatttcaccatgttcctcaccatgtttggtgagaagttaaatggcacagatcctgaagatgtcatcagaaatgcctttgcttgctttgatgaagaagcaactggcaccatacaggaagattacttgagagagctgctgacaaccatgggggatcggtttacagatgaggaagtggatgagctgtacagagaagcacctattgataaaaaggggaatttcaattacatcgagttcacacgcatcctgaaacatggagccaaagacaaagatgactgaaataacttcaaattccagccaaacgttccttgttgccactttgggtattctgagattttctcttgcatgcccttagctttacagcttttgcatttcctgttgtatttattctcagccattttgggcatatgtatctttataatcagactggaaacgggactttctattaatatcattttcagaataaaaaataggataatttaacctaccagcccttctcccccaataactgtggtctatacagagtcaatatattttttcagagaaagttattcgctcgattttttctgaatcataattaaactttatgataaaata

SEQ ID NO: 199 - DNA, 1546 bp, Homo sapiens
  source 1..1546: mol_type = genomic DNA
attggtgaagctctaacggctgttttgactggcgtagccggagccggcgacgtgaggcgggcgttgctcgcgcgacaagtagttgctgggacagcgaaatggaggggtgtgtgtctaacctaatggtctgcaacctggcctacagcgggaagctggaagagttgaaggagagtattctggccgataaatccctggctactagaactgaccaggacagcagaactgcattgcactgggcatgctcagctggacatacagaaattgttgaatttttgttgcaacttggagtgccagtgaatgataaagacgatgcaggttggtctcctcttcatattgcggcttctgctggccgggatgagattgtaaaagcccttctgggaaaaggtgctcaagtgaatgctgtcaatcaaaatggctgtactcccttacattatgcagcttcgaaaaacaggcatgagatcgctgtcatgttactggaaggcggggctaatccagatgctaaggaccattatgaggctacagcaatgcaccgggcagcagccaagggtaacttgaagatgattcatatccttctgtactacaaagcatccacaaacatccaagacactgagggtaacactcctctacacttagcctgtgatgaggagagagtggaagaagcaaaactgctggtgtcccaaggagcaagtatttacattgagaataaagaagaaaagacacccctgcaagtggccaaaggtggcctgggtttaatactcaagagaatggtggaaggttaaacagcttggatttattcttactttgtatgttgtgttgttgtccccagtgtcctacaaactaatgtatttgtgcacaagacatcatctatgaatgatgaagttttctcaccttcaaagtcttataaacatgttgactcttgttcctgctgagttacttgttcgaagcttacagcttgttttccaggcatcgaataactgttgagattgttctactgttgtcgtatattcttctatattgaattctggttaatttggagtaactaattctgtggctgttgtgagtcttcagcaccctcccatgtaccttatatccctctctgaaacagaacagctccaatagcaacaagctagttgttctgccagatgtttctatgtggattctgtaatgttcctccatacagttaaaacatcctaacttgtttttcaagctcactcaggcctacgccaaacgtttctgttttttttaaccatgaggtttaatttatttttgtgataggagggatatttacatattttagtggaccacattttaagttggatggtgtgctctaaaatactgaaaaacaatagcccatatacctatgtatttgtttttgatgggttgtttactctgaaataaaatgtatggttttcttaaaaggaagttttaaagtacctattttgtgtcatcctgtattgaaaagaatgtcaagcttgttaaaatgacatgtaacaaaaatgtattttgatttgtatttcagaaactaaaaaataaaatgttgaaagaa

SEQ ID NO: 200 - DNA, 2867 bp, Homo sapiens
  source 1..2867: mol_type = genomic DNA
aattccggaggcggcattcggtggtcagaggcctgtgcggctgcaggtagagtgtcttaggaacctaggaaataactcggaacctgtaacgtcccactggtttggacatattcctctcctgatctggcctcatctgttccagggaggtgggattgaaacatatgcagtaatgtcacctcaaaagagagttaagaacgtccaggcacaaaacaggacttcacaaggtagtagtagttttcagaccacgctttcagcctggaaagtaaaacaggatccaagcaactcgaagaacatctcaaaacatggacaaaacaatccagtgggagattatgaacatgctgatgatcaagctgaagaagatgctttgcaaatggcagtgggatattttgagaaaggtcccattaaagcttcacagaataaagataaaaccttggaaaaacacttgaaaactgtggaaaatgtggcttggaagaatgggttagcttcagaagaaattgatattctattaaatattgcactcagtggcaaatttggaaatgctgtaaacacacggatattgaagtgcatgatcccagcaacagtaatatcagaagattctgtggttaaggcagtctcctggctttgtgttggcaagtgttctggtagcaccaaggtacttttttatcgttggctggttgcaatgtttgacttcattgatcgtaaggagcaaattaacttgctctatggcttcttttttgcttcattgcaagatgatgcactgtgcccttatgtttgccatttgttatatttacttaccaaaaaagagaatgtcaaaccatttcgtgtgagaaaactgcttgatcttcaggccaaaatgggaatgcagcctcatctccaggctttgttgtcactgtataagttctttgctcctgctctgatttcagtatctttgcctgtaaggaagaagatatattttaagaattcagagaatctatggaagacggctctgcttgccgtgaagcaaagaaaccggggaccttctccagaacctctgaagttgatgttaggtccagctaatgttcgtcctctaaaaagaaagtggaattctctctcagttataccagtgctcaattccagtagctacactaaagaatgtggaaaaaaagagatgagtctttctgattgtctgaatagaagtggatcatttccactagaacaacttcaaagcttcccccaacttttacagaacatccattgcttagagctgccttctcagatgggctcagtgctaaacaactctctgctgcttcactacattaactgtgtcagagatgagccagtcttgctgaggttttattactggttgagtcaaacattacaagaagaatgtatttggtacaaggtgaataattatgaacatggaaaagaatttaccaacttcctggataccatcatcagggcagagtgcttcttacaagaggggttttattcctgtgaagcattcctgtataagagccttcctctctgggatggcctttgttgtcggtcacagttccttcagcttgtgagctggattccttttagtagcttctctgaggtgaaaccacttctttttgaccatctagcgcagctcttctttacatcaaccatttatttcaagtgtagtgtgcttcagagtctgaaagagctattgcagaattggctgttgtggctttctatggacattcacatgaaacctgttacaaacagtcctctagagacaactttgggtggatccatgaactctgtgtctaaactgatccactatgtagggtggctatccactactgcaatgcgcttggagagcaacaatactttcttgctgcactttattttggatttctatgagaaggtgtgtgacatatatataaattataaccttccattagtggtattgtttcctcctgggatcttctattctgcactcctcagcctggataccagcatcctgaaccagctgtgttttattatgcacagatatcgtaaaaatttgactgccgcaaagaaaaatgagttggtacaaaagacaaaatcagagttcaatttcagcagcaagacttatcaagaatttaatcactatttgacatcaatggttggttgcctgtggacgtccaaaccctttgggaaaggaatatatattgaccctgaaatcctagaaaaaactggagtggctgaatataaaaacagtttaaatgtagtccatcatccttctttcttgagttacgctgtttcctttttgctacagggaaagaaatggagctggtatttggactatttattttcacaggggttacaaggcttgaaactttttataagaagtagtgttcatcattcttccattcccagagcagagggcataaactgcaacaatcaatattaaatgaatgttgacataaactgaacacactggactaaactcactcctcattgctagagcaaagtggctcatcttgagttcccattttcatttcactgacagactgccatcctcaaggagtactcagactggccttctgttcatggcttaggagagccttggtgtgcctaactgatttttcaaaatttagatttttttagcctaccagtgaaaaatgaccccttcatcatcaggctctgcgttctaccaaattgtatgtaaaaagacacatctgttttgtggtaggattttttcacatttttgggtactatgagctgcattgatggaagacagcaggcaatatgtggtgacagttaactcacagacataaacatgcaaaatactttgctgtctctggggatattgccatttttcttactgtgagcaacagcaccaacaccaagttaacaggatgcaacatgtgtatgactct

SEQ ID NO: 201 - DNA, 2321 bp, Homo sapiens
  source 1..2321: mol_type = genomic DNA
gggcttgccccggcagcctccctccctggcttagcctcacctcccgcgctgcgggccgtgtctgggcctccgcgcatagcacgccgggaattgtagttttctctcggcgcgctcatgccggaaagggggggcggtgggactgcgtctcccagagtgcagcggggcgggcgaaggaaggcaggggggaagggacagtcggccgcagaccgcgctgggttgccgctgccgctgccgccatcgtgccagcccctcgggtctccgtgaggccgggtgacgctccagaatgggagacaagccaatttgggagcagattggatccagcttcattcaacattactaccagttatttgataatgatagaacccaactaggcgcaatttacattgacgcgtcatgccttacgtgggaaggacaacagttccaggggaaagctgccattgtggagaagttgtctagccttccgttccagaaaattcagcacagcatcaccgcgcaggaccatcagcccactccagatagctgcatcatcagcatggttgtgggccagcttaaggcggatgaagaccccatcatggggttccaccagatgttcctattaaagaacatcaacgatgcttgggtttgcaccaatgacatgttcaggctcgccctgcacaactttggctgacctcctctcagctaggcactcacgctgtttcctcctccctcctcttcccaatactattcccactcctccagatgctccaaatatcatgcacaaatgagcagggccgcggtgggagtgggcgcagtgcgctgctgccactgaggtgttgtgcatgatgtttggatgctagactagttgcatctgacgggagaagtttgtgttgtaccagcgcatgccttggaaagacttaagtaatgcaaaaggttgtccttttttttttttttttttttttaatctactgacaagttgctctagtaacccaaagaagtgaaggagaaagcagctgcctcaccgcccagacattgatttgttcagatgtttcaatgcctcatgatacaataaaaccacaaaaattttcttaacagtttaaattgttttaattagtttactagttggctgggcatcagaagctacccagacccgttgtctctctcatgtttcaccctcccacttctgccccaactctgaatacctgttgcagggagaaactgctgaagcagcactcccagctagcctctcagaagccgtgtagggcagttctctcccactccacagggcgactggtctttggaaagcaggcaggaagagctcaggtctggcctgaagcttctctcactgaagcctgtgcagtcagttctgatacctcctgtgacttctgctctgggtaggttcagggccctagtagcaggagagatgatcctgaatcctgttgaagctggagaggccttggcaaaatggctcatcacgttcaggccctccgggctgagttgtcagcagtatcaagggaggggcctgctctatccccagaaggatcaggatcatatccaggatgccccacatacaccaagccaggcagagggcagctcagctcctgtcccatctgctttggatatctttacccaaaggcaggtaacccgaagagccagcctccactgcccacagagccaggcccagttgtgttggagtataggtcaggagctgtggaaggaggcagtctgtgagggactcatgctttaggagtcctcacccctcagactgctgcaggacattgccaggcctctctccacttccttcctcagcatacagacttcatgctatcttccaattccggggagtcttagctattagggcagtttctgcttctccattttggggacaaaggccttgcccagtacaaatctagccccttgtcccacagacttctggatggtataaacctagtggcaatgtagcaaccataggctagaaccaaacccaagatttgggtcagtgccctgttaagggttttaggattggtaaggacaccacagctaaatctgacatgtaaaaggatacccttcccctgtcccactacgggtggaggctaaggacctcctcagatcccacagattgcctggtgacattgggcacagggctggatggtgtgctgtttgagaggacagcatgctcaggagatttcagtgggaatgatctctaggctgatgtgtatttggggaagtgggggtggggaagaggtaggtgcctgctgcctcaaaccaccttgtgtaaaatctgcaatacggcttcttccatgtacctgtgcctgaactgtctgcaataaagaagaatttgtaaa

SEQ ID NO: 202 - DNA, 2130 bp, Homo sapiens
  source 1..2130: mol_type = genomic DNA
aggaggcggggcgccgcgcccctccggcagtcaccgaggcccggacctgcggcgtcggcggcgcgcgcagagggccaggcgggcgtagaggccggaccgacgcgtggcggcagagggtatccaaggccggacctggcgcgcaggcgctgacccgacctggcagtgagctggccgcggccttggctgagaggccttaaccccgccgggcggccgcgccctgcatgcgagttgggccgcgggcggggttggagcctactcggggcgactgcgatggacgccttagaaggagagagctttgcgctgtctttctcctccgcctctgatgcagaatttgatgctgtggttggatatttagaggacattatcatggatgacgagttccagttattacagagaaatttcatggacaagtactacctggagtttgaagacacagaagagaataaactcatctacacacctatttttaatgaatacatttctttggtagaaaaatacattgaagaacagctgctgcagcggattcctgagttcaacatggcagccttcaccacaacattacagcaccataaggatgaagtggctggtgacatattcgacatgctgctcaccttcacagattttctggcttttaaagaaatgtttttggactacagagcagaaaaagaaggccgaggactggacttaagcagtggcttagtggtgacttcattgtgcaaatcatcttctctgccagcttcccagaacaatctgcggcactaggtcctacctccagccaatgaatgggatcattctggatgtcaccagcccaataggctcagctcatgatgacagaacacatcttggaaagactgactctgttatgtaactcttcatttatgttaagtattaataggtcaaaaccaaaatgacctaaccctcctggacctatttatcctgaaacaccttcttgtattcattaaccatagtactcctccccacctcaagtagacacctctctcaggagcttctgagtcagacgcctctggagcgagccctatgtcaggcactccacctggggggcccttccccagcatacctgctggtgtgtaagtgtggactaacccgccgccaccaccctctgttccagcaggctctgcatgaatctttgtgcacttgcacctctttttcacatgggccacagtttcagtacttcagcctcagtggggttcctgatgtttatctagggtgttactcaagcccagtttgagattttggagtctcctgtgatcacatcttgtctcggctgtaggaatcaacagaaggagacgtcctctacataaaagctccatgtgaaaagctactcctagtcttaacatttgcagtccttgtgtcactgtcttctggtcctgatgtagtcccactgtttctagaagtctcttttaagcattatttttgaaaaaaaaaatatttttatagatgaatactcaggctaacctagtggatgtgatcttggaacttccatgattatccacttaaagatcaaagtattatatgctgtgtgctttttaggtgtttgttagtactgtgaaggcaaaaatgctttctacattgacattcattcctattttactgggcacctatgaatgtatgctgtgtgctagaaatagactaaaacatattcctatagcatgttagtgtgtttgcatgtttgctgaaaatcctttgtgtataaaccagtttgtaaggttctctgggttaggtagggactctgcagtttcttcctgtcaaaatctctcctaccaagatggtgttccactgtccagcccagcatgagtagcaggtagagcacagctttactggctgtttgtatgctttggtttagtgcaatgtgtggtagattacttatcagaaaacatatatgtcatctctagaacgaagaaaaagcatagtagttcaattcccagtgtgtccctttgattttttttttttaatagtaaaaataagaatctgtactgacttttcacttggccattctggttttaaaggacaagctacaagctctgtgtttctgtactgatgtgtcacttattaaatacttttgtaccatgagtaaaacttcaggtgtttcgcaagaaccaccattctcaa

SEQ ID NO: 203 - DNA, 942 bp, Homo sapiens
  source 1..942: mol_type = genomic DNA
gagcgccgagcggggcggcggcggggcgggcggcggctcctcggcggctccgcggcgcccgggccgcgcgccgccatgctgggcctggacgcgtgcgagctgggggcgcagctgctggagctgctccggctggcgctgtgcgcccgagtcctcctggctgacaaggagggtgggccgccggcagtggacgaggtgttggatgaggctgtgcccgagtaccgggcgccggggaggaagagcctcttggagatccggcagctggacccggacgacaggagcctggccaagtacaagcgggtgctgctggggcccctgccaccggccgtggacccaagcctgcccaatgtgcaggtgaccaggctgacactcctgtcggaacaggctccggggcccgtcgtcatggatctcacaggggacctggctgttctgaaggaccaggtgtttgtcctgaaggaaggtgttgattacagagtgaagatctccttcaaggtccacagggagattgtcagcggcctcaagtgtctgcaccacacctaccgccggggcctgcgcgtggacaagaccgtctacatggtgggcagctatggcccgagcgcccaggagtatgagtttgtgactccggtggaggaagcgccgaggggtgcgctggtgcggggcccctatctggtggtgtccctcttcaccgacgatgacaggacgcaccacctgtcctgggagtggggtctctgcatctgccaggactggaaggactgaacccccagtccgtgtctcccctacctccctcagttgttgcacagggacccccaagcatccccagcaccccccgtgagtgaccagaccctcccctgctgcccctgctgcccctgctgcccctgctctgtcccgggaccccctggcctggcgctgtcccctgagctgtcccattaaacatggccctgtctc

SEQ ID NO: 204 - DNA, 988 bp, Homo sapiens
  source 1..988: mol_type = genomic DNA
cagccgcacgtgggctcggcgcgatggaggaggagacgcatactgacgccaaaatccgtgctgaaaatggaacagggtccagccctcggggtcctggctgcagcctccggcactttgcctgcgaacagaacctgctgtcgcggccagatggctctgcttccttcctgcaaggtgacacctctgtcctggcgggtgtgtacgggccggccgaggtgaaggtcagcaaagagattttcaacaaggccacactcgaagtgatcctgaggccgaagattgggctgcctggtgttgcagagaagagccgggagcggctgatcaggaacacgtgcgaggcggtggtgctgggcacgttgcacccccgcacctccatcaccgtggtgctgcaggttgtcagcgatgccggctctctcctggcctgttgtctgaatgccgcctgcatggcattggtggatgcaggtgtgcccatgcgggctctcttctgtggggtcgcctgcgccctggactctgatgggaccctcgtgctggatcctacatccaagcaagaaaaggaggcccgggcagtcctgacctttgccctggacagcgtggaacggaagctgctgatgtccagcaccaaggggctctactcagacactgagctccagcagtgcctggctgcggcccaggccgcttcgcaacacgtcttccgtttctaccgggaatcgctgcagaggcgttactccaagagctgaggcaagctggggcaaggggccgctcccattgcctccacccactcaccccctacagcctgaagcaaaccagcagcccagccttgcctctctgacccatgggctccttgagcctgcagctctgtaaccacagggctcctgtggggaggccttggcctgtgacagcccccaggcctgggggcacagatccccccagcaaggataacattcaaaggagctcacatttatggaatggatgaatcaataaattaattcacttt

SEQ ID NO: 205 - DNA, 1765 bp, Homo sapiens
  source 1..1765: mol_type = genomic DNA
atgccctggaagttgtggagagggagtgttgggtgtcctggggacctgtcctctgatgggctcttgttccggctaggaccccccaaaccccccaccgagctggagcctgagccggagatagaggggctgctgacaccagtgctggaggctggcgatgtggatgaaggccctgtagcaaggcctctcagccccacgaggctgcagccagcactgccaccggaggcacagtcggtgcccgagctggaggaggtggcacgggtgttggcggaaattccccggcccctcaaacgcaggggctccatggagcaggcccctgctgtggccctgccccctacccacaagaaacagtaccagcagatcatcagccgcctcttccatcgtcatggggggccagggcccggggggccggagccagagctgtcccccatcactgagggatctgaggccagggcagggccccctgctcctgccccaccagctcccattccacccccggccccgtcccagagcagcccaccagagcagccgcagagcatggagatgcgctctgtgctgcggaaggcgggctccccgcgcaaggcccgccgcgcgcgcctcaaccctctggtgctcctcctggacgcggcgctgaccggggagctggaggtggtgcagcaggcggtgaaggagatgaacgacccgagccagcccaacgaggagggcatcactgccttgcacaacgccatctgcggcgccaactactctatcgtggatttcctcatcaccgcgggtgccaatgtcaactcccccgacagccacggctggacacccttgcactgcgcggcgtcgtgcaacgacacagtcatctgcatggcgctggtgcagcacggcgctgcaatcttcgccaccacgctcagcgacggcgccaccgccttcgagaagtgcgacccttaccgcgagggttatgctgactgcgccacctacctggcagacgtcgagcagagtatggggctgatgaacagcggggcagtgtacgctctctgggactacagcgccgagttcggggacgagctgtccttccgcgagggcgagtcggtcaccgtgctgcggagggacgggccggaggagaccgactggtggtgggccgcgctgcacggccaggagggctacgtgccgcggaactacttcgggctgttccccagggtgaagcctcaaaggagtaaagtctagcaggatagaaggaggtttctgaggctgacagaaacaagcattcctgccttccctccagacctctccctctgttttttgctgcctttatctgcacccctcaccctgctggtggtggtccttgccaccggttctctgttctcctggaagtccagggaagaaggagggccccagccttaaatttagtaatctgccttagccttgggaggtctgggaagggctggaaatcactggggacaggaaaccacttccttttgccaaatcagatcccgtccaaagtgcctcccatgcctaccaccatcatcacatcccccagcaagccagccacctgcccagccgggcctgggatgggccaccacaccactggatattcctgggagtcactgctgacaccatctctcccagcagtcttggggtctgggtgggaaacattggtctctaccaggatccctgccccacctctccccaattaagtgccttcacacagcactggtttaatgtttataaacaaaatagagaaactttccttataaataaaagtagtttgcacagaaattga

SEQ ID NO: 206 - DNA, 2659 bp, Homo sapiens
  source 1..2659: mol_type = genomic DNA
gggtggaagtgacgctgcccccgctgcccaaaatgtcggcgcccagagggaggtagagagcccccacataccactgtattccccgccaccatggatgacgtccccgccccaacccctgcaccagcaccgcccgccgctgccgcccccagggtcccgtttcactgcagtgaatgtggcaagagcttccgctaccgctcagacctgcggcgccactttgcccggcacacagcgctcaagccccacgcatgtccgcgctgcggcaagggtttcaagcacagcttcaacctagccaaccacctgcgctcgcacaccggggagcggccctaccgctgctctgcctgccccaaggggttccgcgactccaccggcctgctgcaccaccaggtcgtccacactggtgagaaaccctactgctgcctggtctgcgagctccgcttctcctcacgctccagcctgggccgccacctcaagcgccagcaccgtggggttctcccctctcccctgcagcccggccctggcctgcccgccttgagtgcgccctgctccgtctgctgcaatgtggggccctgctcggtgtgcgggggctcaggggccggcggcggagagggccccgagggggcaggcgcgggtctgggcagctgggggctggcagaggcggcagctgcggccgcggcctccttgcccccatttgcgtgcggcgcctgcgcgcggcgcttcgaccacggccgcgagctggcggcccactgggcggcgcacaccgacgtgaagcccttcaagtgcccgcgctgcgagcgcgacttcaacgcgcccgcgctgctggagcggcacaagctgacgcacgacctgcagggcccgggcgcgcccccagcgcaggcctgggccgcggggccaggcgcagggcccgagacggcgggcgaaggcaccgctgcggaggcgggcgacgctcctctggcttcggaccgcaggctgctcctgggccccgcggggggcggcgtgcccaagctcggggggctgctccccgagggcggtggggaggcgcctgcacctgcggcggccgccgagccctcggaagacaccctgtaccagtgcgactgcgggaccttctttgcgtcggccgcggccctggccagtcacctggaggcccactcgggcccggccacctacggctgcggccactgcggggctctgtacgcggcgctggccgccttggaggagcaccggcgggtcagccacggtgagggcggcggggaggaggcggcgaccgccgcccgggaaagggaaccggcgtccggggaacccccgtctggctccggccgcggcaagaagatcttcggctgctccgagtgcgagaagctgttccgctcaccgcgagacctggagcggcacgtgctggtgcacactggcgagaagccgttcccgtgcctggagtgcggcaagttcttccgccacgagtgctacctcaagcgccaccggctgctgcacggcaccgagcggcccttcccttgccacatctgcggcaagggcttcatcacgctcagcaacctctccaggcacctgaagctgcaccggggcatggactgactgccaggctgcgtgcgccctgccctccacccagcctcctggactcggcctggaccaggggacctcgggactgcgcgtgaggccccggccctccaaatccaaatccagacgcaggccctgaaatgaggggaccctgactggagaggtgggggccaccaaaaacccacaaaggccccggagctgggggaccacaaacaaacagggtccttagctggggcaggggagcccaaatctagggagagactcctgagcctgaggtccctggaatgagtgtgggtagccgtaagtccccaagacatggggactttgcagtgagcaatgggtctccacaagtacctctcatcttgagagccctaatactaaaagatgggcacccacccccaccaagggaagactgccccattccctgagagccatcattcctaacgaccttgatctggagaatgtggagggagcatgtccctgaattttcctagatccctccaaatgccacccaccagagtcactggtgaccccagaaaatggatatagccgaaatctgcctttcccctttttcattccctgtgctgaaagagggaccagggtagatgccccctgccctcgaatcccccctccccgactgtggaatggatcgaccctaacgatcttccccgccccaaacactagaatagactggcctgaaatccccttgcccagtagaatggactgatctatgtgcacacacccccatcacatggaatgggctggtctaggctgtggcctgccaccttccttagagtgaatagggcggacactcctctcttttcctgtagcgtgtggaccggtccacgcaattctttatcctgtgaactcatctgagtgggaggtggtggacactggggtttccttccctctctccgtagcatccgttggtctttctctccatctctgttggtttgtctgtctctgtcttcctcccaatccctaggggaagggggcatttggctagggggtgcccctgtgagcctcgaccttgccccctcgtccctctccccagtgtttccaggacccccaataaaccttgtcctgtcagtcgctg

SEQ ID NO: 207 - DNA, 3346 bp, Homo sapiens
  source 1..3346: mol_type = genomic DNA
gttgcccagggcaaccgctccttcaggcgtgaatgtggcggctgcctctgcgaatggacggcgtgggaagagaatggcttctgcaaggaaagccagccgtcccatgcgtgatgtttttggtgacttcagtgatgtttccttggaagattcaacaatggaagaaatcagaaacttccagatcagtagaaatcttaccaaaatagcacctggtcatagcagatttctaaaaagaaaccaaactctagatgagaaacacttactcctgaaagagaaccctgtgctcgggagtggacccaggcttgcctcatgtagaccgcccaccactgcctccaggatccgagccaatgccgcactcatgaagctggcccagctggaaacccggatcatgaatcggaagctgcagaggaatttgtctgacacggaatctgactcaatgaccgccgatgctggtcttccaaagagagctgacagaatcctctctgggggtgcactcgaactcgcgtcccagaacacagacaaaacttcccagaatcaagcccgtgaacttcctgtcaccgaaaataatgcacagaacgcgaaggtcagtaggtttctaaagaagaaacaagcacctgttgaaaacatatcccctgaagcacctgctgggaaagagaggactttgcaaacccccaaacagaaagaacctgctagaacatttgattctccagacagtgacgaagaagaaatgaaagtattgctaggaagcttgatggactcttctagagaaaaaaacacgaatcaaggcttcagcagcgctaacgtcagcgaggaagaagaaagaaaactattttcggtcccatctcaactgagagcatttactgtacccagcgtggaactctccagcgcaaagccttctcagacatcacacctgccaacctccctggcagcagacagaacccttcacagcactcgctcaagagcagactacccacagagtcacgtttccagtgacaccgcctcccacacgccgtcagtttccatcacaggcgccttttcaaactcagtgtctttaaagatggggcatgtcaagcttgtgtcctccccgggaaggagtgaggctgagactgtggacgagccagtctcagaaggtgctgatgacagcctcgacgagtttagaataaatattttatcgcttgacggtctggctccagctgtcagtgagaactccgatttggaacaggaagaggaaagtgctcagagacaaaaaacagctggcaaaatcttcagagccgaggcgtccactgggcaggatgccccgaggcaggcccaggcgaggagctgggcatcacagggaaaggccgcctctgcagagggggatgagagcgaggtctcggagcatctcagtgccagctcggcttctgccatccagcaggacagcacttccagcatgcagccaccatctgaagcccccatggtgaacacagtcagctcagcttattcggaggattttgaaaactctccaagtctgacagcatctgagccaaccgcccattccaaggagtctcttgacagaacactggacgctttgtctgaatcctcttcaagtgtgaagacagaccttccacaaacagccgagtctaggaaaaagtcgggcaggcacgtgacaagagtgcttgtgaaggacacagctgtgcagacgccagatcctgccttcacctacgagtggaccaaggtggccagcatggcagccatggggcctgccctgggaggcgcctacgtggacccgacacccatcgccaatcatgttatcagtgcagatgcaatagaagccctgaccgcttacagcccggccgtgctggcactccatgatgtgctgaagcagcagctgagcctgacgcagcagttcatccaggccagccggcacctgcacgcctccctcctgcgctccctggacgcggactccttccactaccacaccctggaggaagccaaagagtacattaggtgccacagacctgccccactgaccatggaggatgccctggaggaggtgaacaaggagctgtgagcgccagcaggtggagcttgacgtgacgtcttaacaaaagcaaagcaccgcagcttcccagagttaccagcgcagcacttaagacaggatcttacggcggggtggggctcctggaccgtgaccggcgtcttcttcctggggagtacgacttggaccgggaccgcgactgggaccgggagcggcttctggaggagcgcgacctgctccgacttctgcagggaagggtgcccaagggtcagcagcagccaggcgtcgtggggaggccacaggaagaggcctcaggcactgccctgaggcagcctctgcctacctagatctggagcgggagtaggaacgggagcaggagcgcgaccttgaccttgagtacgagcctgaagacttggaggatcttgagttggagcgggaggaagaacgccctcgactcttggatctgctccgagacctcgagggtccgctgtggggagaggcctgatgatcaggtgccccagtggatgggctgcacccagcccaccctggccctcaggttcctagaccaccccagatgcaggggctctggctgtggatgtggcgccatagccacagcaacggtaccaagttcctaaatagtgtggccgagcctgctgctgtgtgaattcaggccttgtggaaaacaccgccccataggcacaggctgtgtgagggtggacgtgatgagtgtatctggggtctgctcccacccatcacaagctgtggaccctggccccccggccactgcagacatctgcgcttttacctgttcctcttctcctggcctttcctccgccgggcccgcatttttgctcggaagaactcatagaggccgttctgctcccagccttcactgtaagacacggcattccgtgtgtgaccacgtgacacccacccacaaggaagtcgtgaaaaagtcatcaggagttaatccacagaaccttggagagtacatggccctgtggctgtgggctccgagcatgggcgcagtagagcttggttcagtgttcccacagggctgtcctcctgcagcccagtggctcctctggtgcccacgcccttgccaccctgctgttccgctgaggtggtggggacccatggtctgtggaactgggaaacaggaacactgactcatgggtggacaggcctgcagcccagcacaggaaggaggggtgaccactgggaagggtgggctgagggccctgtggcagccggctgcttgagacgtgccgccgtgccacaccttccctaacttcttctgatgtgtctccattaaaacgcccttcattgagg

SEQ ID NO: 208 - DNA, 558 bp, Homo sapiens
  source 1..558: mol_type = genomic DNA
aggccgcgctcgcgccgaggggctgcgagagtgaccgcggctgctccagcgctgacgccgagccatggcggacgaggagcttgaggcgctgaggagacagaggctggccgagctgcaggccaaacacggggatcctggtgatgcggcccaacaggaagcaaagcacagggaagcagaaatgagaaacagtatcttagcccaagttctggatcagtcggcccgggccaggttaagtaacttagcacttgtaaagcctgaaaaaactaaagcagtagagaattaccttatacagatggcaagatatggacaactaagtgagaaggtatcagaacaaggtttaatagaaatccttaaaaaagtaagccaacaaacagaaaagacaacaacagtgaaattcaacagaagaaaagtaatggactctgatgaagatgacgattattgaactacaagtgctcacagactagaacttaacggaacaagtctaggacagaagttaagatctgattatttactttgtttattgtctatatgccttttaaaaaaataaacttgttatgc

SEQ ID NO: 209 - DNA, 1473 bp, Homo sapiens
  source 1..1473: mol_type = genomic DNA
gccgcctcgggctcggctctctccgcgcagaggtttcatggcttgcttcaatcttttgatatcttagagtaattgcttccaatttttgggcatcgccgcctcagtttacagaatagtatggatctggtgccagagccgggaaaacgatgcgcatcgtaaaccgcaaaacactgagcatccaggacagaagccaaggcgcttggcttggttgaaggccagtgcgcatgcgcgagtttacccttcgcggactgggcgagctcttgccactcctacctccgggcttcagtcttcgccgcctgttctggtcctttcccgggccgctattggaagaaccgtgaactatggaaggcccctctggattggctgggctggcccaagagtaaggagagccctcttcctggcggtggggaagggacggcggcgattggcggacgctcctggcaggagagcgcggattggtcaggcacggagcaggaggcggggctgatagcccagcagcagcagcggcggcggcggctgcggagcgggtgtgaggcggctggaccgcgctgcaggcatccgcagggcgcggcaagatggaggtgacgggggtgtcggcacccacggtgaccgttttcatcagcagctccctcaacaccttccgctccgagaagcgatacagccgcagcctcaccatcgctgagttcaagtgtaaactggagttgctggtgggcagccctgcttcctgcatggaactggagctgtatggagttgacgacaagttctacagcaagctggatcaagaggatgcgctcctgggctcctaccctgtagatgacggctgccgcatccacgtcattgaccacagtggcgcccgccttggtgagtatgaggacgtgtcccgggtggagaagtacacgatctcacaagaagcctacgaccagaggcaagacacggtccgctctttcctgaagcgcagcaagctcggccggtacaacgaggaggagcgggctcagcaggaggccgaggccgcccagcgcctggccgaggagaaggcccaggccagctccatccccgtgggcagccgctgtgaggtgcgggcggcgggacaatcccctcgccggggcaccgtcatgtatgtaggtctcacagatttcaagcctggctactggattggtgtccgctatgatgagccactggggaaaaatgatggcagtgtgaatgggaaacgctacttcgaatgccaggccaagtatggcgcctttgtcaagccagcagtcgtgacggtgggggacttcccggaggaggactacgggttggacgagatatgacacctaaggaattcccctgcttcagctcctagctcagccactgactgcccctcctgtgtgtgcccatggcccttttctcctgaccccattttaattttattcattttttcctttgccattgatttttgagactcatgcattaaattcactagaaacccagaaa

SEQ ID NO: 210 - DNA, 1671 bp, Homo sapiens
  source 1..1671: mol_type = genomic DNA
ggcggggtttcccgcgctcggcggaagcggaaggggcggggctccgcgctcctagtctccactgctgccgccgtcgccgccacccgagccggagcgggctgggccgccaaggcaagatggtggactacagcgtgtgggaccacattgaggtgtctgatgatgaagacgagacgcaccccaacatcgacacggccagtctcttccgctggcggcatcaggcccgggtggaacgcatggagcagttccagaaggagaaggaggaactggacaggggctgccgcgagtgcaagcgcaaggtggccgagtgccagaggaaactgaaggagctggaggtggccgagggcggcaaggcagagctggagcgcctgcaggccgaggcacagcagctgcgcaaggaggagcggagctgggagcagaagctggaggagatgcgcaagaaggagaagagcatgccctggaacgtggacacgctcagcaaagacggcttcagcaagagcatggtaaataccaagcccgagaagacggaggaggactcagaggaggtgagggagcagaaacacaagaccttcgtggaaaaatacgagaaacagatcaagcactttggcatgcttcgccgctgggatgacagccaaaagtacctgtcagacaacgtccacctggtgtgcgaggagacagccaattacctggtcatttggtgcattgacctagaggtggaggagaaatgtgcactcatggagcaggtggcccaccagacaatcgtcatgcaatttatcctggagctggccaagagcctaaaggtggacccccgggcctgcttccggcagttcttcactaagattaagacagccgatcgccagtacatggagggcttcaacgacgagctggaagccttcaaggagcgtgtgcggggccgtgccaagctgcgcatcgagaaggccatgaaggagtacgaggaggaggagcgcaagaagcggctcggccccggcggcctggaccccgtcgaggtctacgagtccctccctgaggaactccagaagtgcttcgatgtgaaggacgtgcagatgctgcaggacgccatcagcaagatggaccccaccgacgcaaagtaccacatgcagcgctgcattgactctggcctctgggtccccaactctaaggccagcgaggccaaggagggagaggaggcaggtcctggggacccattactggaagctgttcccaagacgggcgatgagaaggatgtcagtgtgtgacctgccccagctaccaccgccacctgcttccaggcccctatgtgccccttttcagaaaacagatagatgccatctcgcccgctcctgacttcctctacttgcgctgctcggcccagcctggggggcccgcccagccctccctggcctctccactgtctccactctccagcgcccattcaagtctctgctttgagtcaaggggcttcactgcctgcagccccccatcagcattatgccaaaggcccgggggtccggggaagggcagaggtcaccaggctggtctaccaggtagttggggagggtccccagccaaggggccggctctcgtcactgggctctgttttcactgttcgtctgctgtctgtgtcttctatttggcaaacagcaatgatcttccaataaaagatttcagatgctc

SEQ ID NO: 211 - DNA, 2188 bp, Homo sapiens
  source 1..2188: mol_type = genomic DNA
gagccggagcccaagccagagcggcgcggcctggaagaggccagggcccgggggaggcggcggcagcggcggcggctggggcagcccgggcagcccgagccccgcagcctgggcctgtgctcggcgccatgagcggcggcgggccttcgggaggcggccctgggggctcgggcagggcgcggactagctcgttcgcggagcccggcggcggaggcggaggaggcggcggcggccccggaggctcggcctccggcccaggcggcaccggcggcggaaaggcatctgtcggggccatgggtgggggcgtcggggcctcgagctccgggggtggacccggcggcagcggcggaggaggcagcggaggccccggcgcaggcactagcttcccgccgcccggggtgaagctgggccgtgacagcgggaaggtgaccacagtcgtagccactctaggccaaggcccagagcgctcccaagaagtggcttacacggacatcaaagtgattggcaatggctcatttggggtcgtgtaccaggcacggctggcagagaccagggaactagtcgccatcaagaaggttctccaggacaagaggttcaagaaccgagagctgcagatcatgcgtaagctggaccactgcaatattgtgaggctgagatactttttctactccagtggcgagaagaaagacgagctttacctaaatctggtgctggaatatgtgcccgagacagtgtaccgggtggcccgccacttcaccaaggccaagttgaccatccctatcctctatgtcaaggtgtacatgtaccagctcttccgcagcttggcctacatccactcccagggcgtgtgtcaccgcgacatcaagccccagaacctgctggtggaccctgacactgctgtcctcaagctctgcgattttggcagtgcaaagcagttggtccgaggggagcccaatgtctcctacatctgttctcgctactaccgggccccagagctcatctttggagccactgattacacctcatccatcgatgtttggtcagctggctgtgtactggcagagctcctcttgggccagcccatcttccctggggacagtggggtggaccagctggtggagatcatcaaggtgctgggaacaccaacccgggaacaaatccgagagatgaaccccaactacacggagttcaagttccctcagattaaagctcacccctggacaaaggtgttcaaatctcgaacgccgccagaggccatcgcgctctgctctagcctgctggagtacaccccatcctcaaggctctccccactagaggcctgtgcgcacagcttctttgatgaactgcgatgtctgggaacccagctgcctaacaaccgcccacttccccctctcttcaacttcagtgctggtgaactctccatccaaccgtctctcaacgccattcttatccctcctcacttgaggtccccagcgggcactaccaccctcaccccgtcctcacaagctttaactgagactccgaccagctcagactggcagtcgaccgatgccacacctaccctcactaactcctcctgagggccccaccaagcacccttccacttccatctgggagccccaagaggggctgggaaggggggccatagcccatcaagctcctgccctggctgggcccctagactagagggcagaggtaaatgagtccctgtccccacctccagtccctccctcaccagcctcacccctgtggtgggctttttaagaggattttaactggttgtggggagggaagagaaggacagggtgttggggggatgaggacctcctacccccttggccccctcccctcccccagacctccacctcctccagaccccctcccctcctgtgtcccttgtaaatagaaccagcccagcccgtctcctcttcccttccctggcccccgggtgtaaatagattgttataatttttttcttaaagaaaacgtcgattcgcaccgtccaacctggccccgcccctcctacagctgtaactcccctcctgtcctctgcccccaaggtctactccctcctcaccccaccctggagggccaggggagtggagagagctcctgatgtcttagtttccacagtaaggtttgcctgtgtacagacctccgttcaataaattattggcatgaaaacctg

SEQ ID NO: 212 - DNA, 1225 bp, Homo sapiens
  source 1..1225: mol_type = genomic DNA
gttttcccgaacgcccgcagcagggtcagaagggaggtggccggtctccgtcgtgacctctgacggtttctgagcgttggcctttggcacgcgctacccccttttgctttggttctgccatgccgatgtaccaggtaaagccctatcacgggggcggcgcgcctctccgtgtggagcttcccacctgcatgtaccggctccccaacgtgcacggcaggagctacggcccagcgccgggcgctggccacgtgcaggaagagtctaacctgtctctgcaagctcttgagtcccgccaagatgatattttaaaacgtctgtatgagttgaaagctgcagttgatggcctctccaagatgattcaaacaccagatgcagacttggatgtaaccaacataatccaagcggatgagcccacgactttaaccaccaatgcgctggacttgaattcagtgcttgggaaggattacggggcgctgaaagacatcgtgatcaacgcaaacccggcctcccctcccctctccctgcttgtgctgcacaggctgctctgtgagcacttcagggtcctgtccacggtgcacacgcactcctcggtcaagagcgtgcctgaaaaccttctcaagtgctttggagaacagaataaaaaacagccccgccaagactatcagctgggattcactttaatttggaagaatgtgccgaagacgcagatgaaattcagcatccagacgatgtgccccatcgaaggcgaagggaacattgcacgtttcttgttctctctgtttggccagaagcataatgctgtcaacgcaacccttatagatagctgggtagatattgcgatttttcagttaaaagagggaagcagtaaagaaaaagccgctgttttccgctccatgaactctgctcttgggaagagcccttggctcgctgggaatgaactcaccgtagcagacgtggtgctgtggtctgtactccagcagatcggaggctgcagtgtgacagtgccagccaatgtgcagaggtggatgaggtcttgtgaaaacctggctccttttaacacggccctcaagctccttaagtgaattgccgtaactgattttaaagggtttagattttaagaatggtgctctttcatgcctattatcagtaaggggacttgtattagagtcagagtctttttatttaggccagttgtcaagtgtcaataaaagcatcatgtaattta

SEQ ID NO: 213 - DNA, 640 bp, Homo sapiens
  source 1..640: mol_type = genomic DNA
gccggacggacgctcgtcttcgcccgccatggccgagagcgactgggacacggtgacggtgctgcgcaagaagggccctacggccgcccaggccaaatccaagcaggctatcttagcggcacagagacgaggagaagatgtggagacttccaagaaatgggctgctggccagaacaaacaacattctattaccaagaacacggccaagctggaccgggagacagaggagctgcaccatgacagggtgaccctggaggtgggcaaggtgatccagcaaggtcggcagagcaaggggcttacgcagaaggacctggccacgaaaatcaatgagaagccacaggtgatcgcggactatgagagcggacgggccatacccaataaccaggtgcttggcaaaatcgagcgggccattggcctcaagctccggggaaaggacattggaaagcccatcgagaaggggcctagggcgaaatgaacacaaagcctcgaaatcagtgcgctccagctgatctcgttccgccggttccccttggccgccagttccgttctcctcacgggccgaacggaacaaggggtccagcttgcgggggaccctccccagcccattcctgctgtcaaacaaacaaaaccttgcaaagcg

SEQ ID NO: 214 - DNA, 2212 bp, Homo sapiens
  source 1..2212: mol_type = genomic DNA
gggcggcgcgctgcattgtggggtggcggcggcggccgcgctagcgacgcggggccgggcggctgagcgttcgcggggccgaggccatggctttctgggcggggggttcgcccagcgtcgtggactatttccctagcgaggacttctaccgctgcggctactgcaagaacgagtcgggcagccgctccaatggcatgtgggcacattccatgacagtacaggattatcaggatctcatagaccgaggatggcgaagaagtggaaaatatgtgtacaaacctgtcatgaatcaaacatgttgtcctcagtacacaataaggtgccgacctttacaatttcagccttcaaaatctcacaagaaggttttgaaaaaaatgttgaaatttctagctaaaggggaggttcccaaaggaagttgtgaggatgagcccatggattccacaatggatgatgctgttgcgggtgactttgcattgataaataaactggatatacagtgtgatcttaaaacactcagtgatgacatcaaagagagtttagagagtgaaggaaaaaattcaaagaaagaagaacctcaggaattacttcagtcacaagatttcgtaggagagaagttgggctctggtgaaccgtcacattcagttaaagttcacacagttcctaagccaggcaaaggggctgatttgagtaagcctccatgtcgaaaagcaaaggaaatccggaaagaaaggaaaaggttaaaactaatgcagcagaacccagctggagaacttgagggtttccaggctcaaggtcacccaccatctttgtttccaccaaaggctaaatccaaccagccaaaatcactcgaagatttaatttttgagtctttaccagagaatgcatcacacaagttagaggtgagggtggtgagatcatctccaccaagttcgcagttcaaagccacacttctggagtcttaccaggtctataaacgttaccagatggttattcacaagaacccacctgatacgccaaccgaaagccagttcacaagattcctttgcagttcacccttggaggcagagactccccctaatgggccagattgtggctatggctcctttcaccagcagtactggcttgacggaaagatcattgctgtgggggtgattgacatcctcccaaactgtgtatcatctgtgtatttgtactacgatcctgattattcgtttttgtctttgggcgtctactctgcactacgagaaattgcttttactaggcagcttcatgagaaaacttctcaactcagctattattatatgggtttctacattcattcatgtcccaagatgaaatataagggtcagtatagaccttctgatttgctgtgccctgagacatatgtttgggtacccattgagcaatgcctgccttcacttgaaaactccaagtactgccgtttcaaccaggacccagaagcagtggatgaggatcgcagtacggaacctgaccgattgcaggtgtttcacaagagagccatcatgccttacggtgtttataagaaacagcagaaagacccaagtgaggaggctgctgttctgcagtacgccagcctggtggggcagaagtgctccgagcggatgctgctgttcagaaactgacctgttcacctctgccgggaagttcctgtgttgtgctgatgatttgtgccaggatacatattcagtacctgtggggaaataactgtcaccacccacaaattagacattttttattttgactatctatggcttttaaaaaatattttgtggcaatgtatctgtgagaatctcatagttaatataaagattttaaaactgcattatgacctagcccccataattgggatttatcattttggaggattctttctagagcaagatacgctcaaattctcctgtttgtattttgtaaaatgaagaagtgaatctaagtaacttaatcacagttgtgcattttttttggttctgttagagaaattaaaacagactgtttcctcaggcccattttaaactgaacttatgctaggaaaccttaagtatggggaaggtagaaagttcatttcatcacttagaaaatatgtcttctcaagaacaaaactgtgctgttacaactcagtgttcaatgtgaaattgctgccaaatgttatgtagtttaatagagaacttgaaaaaataaaacattaaaatgg

SEQ ID NO: 215 - DNA, 2362 bp, Homo sapiens
  source 1..2362: mol_type = genomic DNA
tgtcctcccagctaccccctccctaagcaggctgaggaagaagagatagcaagccctcacctaacttgacccctttcttgtctctccccgctgctagcttctcccttctcgctgccttgcggggtggggaaacgtggaaggaattctgggaaaaccagatgtctgggttctctattcccgtctggcttgattctggacaaggggcttcctctccagggcctcggtttccccatctttaaaatggactgatagcatagacctgcccacctttcagaggtgcccgaagccttgacgagataacagatgagaagtggttttcgttgtgatgagccagctgaagcggttgcaccggagcgccagaccgtcagcggtgcagtggctctcgcgtccttcacatccccccacacccatcccgtggatgatgggggaaggcactactcctggggttccccgaagcggatcctgggactgggacctggggacgcggtgagaggcagccctgaagctgagtccagaggtctggggcgtcattgtcccagggcggacccagccccagaccctacaactaaacccaaggccagccgagaagcactaccactggcgggctgagctgagctctcattcttcttaggactctggacctttggaggaaatgaaagggacccagttggaaatatagtctttcttcgcgccccctacatctctctcccccggcggaaacgcggcccaaactgttacgaagtggaagaggctggatagctcttcataattaatcaggaatgggaggtttgagcaggtttacttgatgagggaaacattatagcctcgccaattcattcattatttcaacaattacttattgaacacctgctacgtggcagacagtaagagcctggatagtttctccccgtttttcaaagtcgctaaacgcgaccagagggcagaggagaggccggtaacctaagagtcctggctccgccccctccgcgtttggccttgcctgctcctcccaccaccacttcgctcagaggcggctactggctcaagaggacgacagaagccagtctctgatgcccaccgcattctccagcttcaggcctcaagccctgtagccgagaaggcgaggcctaatgttacaccaccggtctgttccgcctccgtttcggggtccacccgaaaagctttcagatcggatcctcggtgagacggcactcgattaaataggtctgtctctacaggccaaggaggcgggtttggtgcggccactccaaggccaaagcgagaaaatcttactgcgcacgcgcaatagacagccgatggagccaccgatggagccgtccggaggggagcaagagcccggagccgtcaggttcctggacctgccctgggaagacgtgctgctcccacacgtcctgaaccgggtcccgctgcgccagctgctccggctgcagcgcgttagccgggccttccggtcgctggtgcagcttcacctggccgggctgcgtcgcttcgatgccgcgcaggtgggtccgcagatcccgcgggccgcattggcccggctgctgcgggatgccgaggggctgcaggagctggcactggcgccgtgtcacgaatggctgtcagacgaggacctggtgccggtgctggcgcggaatccgcagctgcggagtgtggcgttgggcggctgcgggcaactgagtcgccgggcgcttggggctttggccgagggctgcccacgcctgcagcgcctgtcgctcgcgcactgtgactgggtggacgggctggcgctgcgcggcctcgctgatcgctgcccggccctggaggagctggatctcaccgcctgccgccagctcaaggacgaggccatcgtgtacctggcgcagaggcgcggcgctggtctccgcagcctctctctggccgtcaacgccaacgtgggggacgccgcggttcaagagttggctcggaactgcccagaactccaccaccttgacctcaccggctgcctccgcgtcggaagcgacggtgtcaggacattggccgagtactgccccgtgctgcgttcgctgcgggtgcggcactgccaccatgtggcggagtccagcctgagccgcttgcggaagcgcggcgtggacatcgacgtggagccgccgctgcaccaggccctggtgctgctgcaggatatggcgggcttcgcaccttttgtcaacctgcaggtctgacccgcctgccaatcggagcacagctggactgtgtggctggggcctgacactgagctgtagggaaactgaactgtgaggacctctggtgagaggccagtgccctgccccaccctggagcttcaaataaagagctttttaccccc

SEQ ID NO: 216 - DNA, 3501 bp, Homo sapiens
  source 1..3501: mol_type = genomic DNA
gattggcaggcgactccccgcccctgccccgcccccctgggcgaagagcgcggacttgtggggccgctggctgcagactggagctgcgcgggtcagggagataatggctgcgcggccgatcaccctcggcattgacctgggcaccacatctgtgaaggcagctctgctgagggccgcgcccgacgacccatccgggttcgcagtgctggcgagctgtgcccgtgctgcgcgggcagaggcggcggtcgagagcgcggtggccgggccccaggggcgggagcaggatgtgagtagaatcctccaagccctacacgagtgccttgctgcccttccccgaccccagctccggagcgtcgtgggcatcggggtgtcgggccagatgcatggagtcgtgttttggaaaacaggccaaggctgtgaatggacagagggagggattaccccggtgttcgagccccgagctgttagccacctggtcacgtggcaggatggccgatgtagcagcgaattcctggcctctctgccccagccgaagtctcatctcagtgtggccacgggcttcggctgtgcaaccatcttctggcttttgaaatatcgcccagagttcctgaagtcctacgacgcagccggtaccatccacgactatgtggttgccatgctgtgtggcttgccaagacctctgatgtccgaccagaatgctgccagctggggctatttcaacacgcagagccaaagctggaacgtagagacactgaggagctcgggttttcctgtccacctgctcccagacatcgccgagcctggcagtgtggcgggcagaacttcccacatgtggtttgaaatcccaaaggggacgcaggtgggagtggccttgggtgatttacaggcctctgtctattcctgcatggcccagaggacagatgcagttctcaacatcagcacctcggttcagctggcagcctccatgccttcaggattccagcctgcacagactccagaccctacggccccagtcgcctacttcccatacttcaacaggacctacctgggggtggccgcgtcactcaacgggggcaatgtgctggccacgttcgtccacatgctggttcagtggatggcagatctaggcctggaggttgaagaatccactgtgtattcacgcatgattcaggcagctgtgcagcagagagatacccacctgaccatcaccccgacagtgctgggggagaggcacctgccggaccagctggcctcagtgaccagaatctcctcctccgacctctccctggggcacgtgacccgggctctgtgccgaggcattgttcagaacctgcactccatgcttccgattcagcagctccaggactggggcgtggagagggtgatgggcagtgggagtgcgctgtccaggaatgacgtgctgaagcaggaggtgcagagggctttccctttgcccatgtcctttgggcaggatgtggatgcagctgtcggggcagctctggtcatgctccggagacacctcaaccagaaggaatcttagacagcaaactctttcgccaaacgactgctgtgaattttacctgattaacattcctgacaccatctgtgggtcatcctttccctggaccgttcagtggacagctttcaagcagtgcttgttgtgaggtcccatctcggccaagaacttaccttcagaacatactctaataatgcagccaggagccgtcagccagatcccaaatgagtgccttccgaaattgacccacctgggagctatttacaaatgtccatgtgggagagagagagcatgagagcacagtagcccagcctgctggtcagcaggctcatctgtggttcacctgtagacagagagcagatcaatgtgtacttcagacaccagaaagtctggtggctttggtcccaagtgggaaaagagaactgccccatgcccagcttgtgattatcgtttttggagacctgaagcccacactcgggtcgtatggacttctggaaaagttcttgtctcctggactgaaccatgtgaccggaggcccctttcctagtctcatcctcccctggctgcagatgcttagctgggccagggattgacccaagcgcgatgcagcaggcaggctcagaagacgatgcggggctgtgtgccggccttcttgctgcatgtactcagcctcaggagagcttgctgcacccaggccgcccaggtcttcacagcacaactgcctggaaggcaggttgcgagaaggagaggcggatggcatgagcagcaagggggaccgatgctgtgcagctcacaccactccagaacctgacaaggcaccagcaggaccccttgccaggagcatgtctgtgcagcagtgtttttgcccctgcacattccagaagccctcatgggaagggatgcagccaggcagactcctgccagatggggcaggtagtttattcaaagagaactctgtatcccataggcccaggctctcctttcgcttggcgtgggctttgctggcccagtgtgtgctcctggctcagcagaaacatccatttgagttggcatccctgtagggatcccagagcgttgtaagccttcttgtgattggtagggatggctgtggggtggcttccaggagggggccaccattgccgcatctacttctagactcccaaaggagcccaggctcaggcaggcctggcccagagtcacgctggcaaccacgagtttgggaagcagtcgtattctctctctctctctctctctctctctcagtatccatgacaggtatgaaacatattgtctctttataaatgtcattttacaaattatgtgattatctggaagctctaagatgagagcaaatgcctgatcactctggccaaatgtcagatactaaagcccattcttggccgggcatgttggctcccgcctgtaatcccagcactttgggaagcccaagtgggtgaatcacctgaggtcaggagttcaagaccagcctgaccaacatggggataccccgtctctactaaaaatacaagccgggcgtggtggcgcatgcctgtaatcccagctactcaggaggctgaggcaggaaaatcacttgaactcgggaggcagaggttgcagtgagctgagatcgcgccattgcactccagcctgggtgacagagcaagactctgtctcataaataaatacaaagcccattcttccagagtcttgtgccttaaataaaacacacctctctgctgtgggaagactgtgcaatggcacagccgcagagcttggtttgggaggttgaagtgctctggggagaattcgtagatcatcctcagaaaagccttgccctggtgttctaccagaaaaacgtctcccaatcacccaggaaagctgtccacagtagtccccccttatccacggtgtcactttccatgggttcagttatctgcggtcaaccacggtctgacaatattaaatggaaaattcttcaaacagtt

SEQ ID NO: 217 - DNA, 1377 bp, Homo sapiens
  source 1..1377: mol_type = genomic DNA
agtggcgctccggccagtgattggctggaggtttgttaactattcatgagggggcgggccgagcggggcggcctttgttaagcagcgagggcgcgaccgcgggtactctgctgccggcttctcggagcggcgctgggcgaccagagcagggtcgagatgtcctacatcccgggccagccggtcaccgccgtggtgcaaagagttgaaattcacaagctgcgtcaaggtgagaacttaatcctgggtttcagcattggaggtggaatcgaccaggatccttcccagaatcccttctctgaagacaagacggacaagggtatttatgtcacacgggtgtctgaaggaggccctgctgaaatcgctgggctgcagattggagacaagatcatgcaggtgaacggctgggacatgaccatggtcacacacgaccaggcccgcaagcggctcaccaagcgctcggaggaggtggtgcgtctgctggtgacgcggcagtcgctgcagaaggccgtgcagcagtccatgctgtcctagcagccaccaccatctgcgactcctgcctgccgcctctctgtacagtaacgccacttccacactctgtccccatctggcttctgctgaccgctgggccccagctcagaagggctatagctggtcccagaggcctggcctggccttccttcccttctcccatccctggcctggggcctctgggaccggctttctctcctggacaccgaggattggaaataagggcctggagctgagtagtagccagtctgctgtgaccacaggctcaggtccgaccctgctgcttggccacagcagtggctgggcaagtgggaaccactatctcttgggagcccccaaaagctgggaaatgctggaggaaccaggcctttcccgcttttgcctggctgcagggttcggctctgcccctgccccccagccctcgtgtgtccacaccgcagtgcctctgcccctcgggggactggacacacatcctgccagaggcgctacgaagctttgcccagatgaagccaggtgggctccgcgttcactcccactctcccgaggggtgctggcctccccagggtttgccttcttacggatttagacgaggttcgaggctcacctatcagggcagctctcaggattgtcattttcctctttgcctgtgggtttaacttttgtatttttttaatcacaagtttgatacaaaatgtttttatcgtactctttggagatgcccattctacttttgaatttagcttttactaattcgcatctggaagctcagcaagtgcacaagccttactttggttaccgtggaaaccactgccgcccctccccgatgtggtgcgctcaataaaaatgctg

SEQ ID NO: 218 - DNA, 2232 bp, Homo sapiens
  source 1..2232: mol_type = genomic DNA
gaggcccatggtgccgtgcggcgggtcgttgcgcctgcgcggtgcgagcggcgggcagcgcagactgcgaggctcttttgttcggctgaggggagggccgttggccggggcctgcggtacgccgcttcagtgagggacgccactgcggccacccggcttgctgccttcctgggcgccactcccccaggcgacccgacgcgacgcgccagcagcgcagcaccgattcctctcgggctcttgggcgctgctctgagcagcgtcaccctttacaccagaaagctggcgggcactatggggaaaaaacaaaacaagaagaaagtggaggaggtgctagaagaggaggaagaggaatatgtggtggaaaaagttctcgaccgtcgagtggtaaagggcaaagtggagtacctcctaaagtggaagggattctcagatgaggacaacacatgggagccagaagagaacctggattgccccgacctcattgctgagtttctgcagtcacagaaaacagcacatgagacagataaatcagagggaggcaagcgcaaagctgattctgattctgaagataagggagaggagagcaaaccaaagaagaagaaagaagagtcagaaaagccacgaggctttgctcgaggtttggagccggagcggattattggagctacagactccagtggagagctcatgttcctgatgaaatggaaaaactctgatgaggctgacctggtccctgccaaggaagccaatgtcaagtgcccacaggttgtcatatccttctatgaggaaaggctgacgtggcattcctacccctcggaggatgatgacaaaaaagatgacaagaactaacgctcctgagtaccagcccctgtcacatctgactgtgggtttcaagtgggaagggaaggagttctacttgtcttgacaccatagaggtggcttgagaagatgtcctttgaagagccagtatagtttctgtgccctgcagcagcccaagtgctttaaagccgtttcaagctgtatagtttgcacacccatcccagtggaggggaaaggggataagtgtttcaaggcaaccttttctgcactttgctgcgaaaagcaaagggccttctatgaaggacaaaacttgcagaattgggtgtgtgggagagcaaaaaaatactgtagatcttcaaagagcatctccacaacccacagccttcttcccaatagtgttaactctgcatttttacagcgtagcatgtgtgtagtttttggctattactggtgtattatttgggggagggagggatggggaggggagaaagggagatgggtagcatcattttgattaacatttggggcctgataggggaaatggtgaagcaatggaaaagaacagacaactaatgatttgcttctatgtccagaatattttacctttaaaaaaatgtcattggcaccataaataaggactgtgagagactgtttaaaagctgtgaaagtctgaaacctataagccaaggtgttccctgcctaaacttattgctgttcccacaaaggactaagcctgttcataagttaccaaagttgccattttggagatggaaattgacgaggagggaaggtcttttattggagagtatacagtacaagcagatcattctgccttagaggtgctaattcccgaaattagaagaccctttcttttccagtaacgaagttataaatatcagcttgttcatccaagccactggctgaggtgttaggaagaggaagagggtggtagaggaggtaagacagtagggaaagacaagggcccatgctcttagtggggaaaactcttggagccgtttactttgagctttgaacactgaaaccattgttggcagggttcagtcactgacagcacaagtttcactgaattgatccaagagtttagtgatttcaaaagccttggtctcaggagaagattaaactttcatattgggcagtggttcactttaaaacacacacatacacacacaaaacaattttttaagaaatcctaataagtaacatacccaaaatgctctgtcttgagtcatgagaaccatcagttcttgatattgtctagacttgcatctagagctacgttgtaaaattcttttaggcatgtgttagatttctgtgtaaactttgtttaaatgtaaacttcatactacattgtcagtttttgtcttaataaaactatagatttataatccctga

SEQ ID NO: 219 - DNA, 2109 bp, Homo sapiens
  source 1..2109: mol_type = genomic DNA
tcctatccaccctccactcccctgtcccttggtgactcatccctgagcttcccaaggaagcccccaccctctgccctttcctcccgccttccatgagtggaaaatccacctccgccccctatagcaggccagcccccttcctccccagtctccgaccccatcccccagccgaccagtttcctctccaggaccagggagcaatcacagctgccccgaccttggcttcctctgctgggtgggattgggggctgggcccccaaatgggcccctggcttcccccttcctctgggcaggggacagagagacacaggctcggggagcaggactgacttcctcttgtcccggaatgagcatgcctgccctttgcaagcaggtttgggtctcacgcagaggaaaccaaaagcaataagagggagggaaggcagagcaaccaatcaagggcagggtgagactcaaaacgagcgggctccctggggagccagacagaggctgggggtgatggcggagctacagcagctgcaggagtttgagatccccactggccgggaggctctgaggggcaaccacagtgccctgctgcgggtcgctgactactgcgaggacaactatgtgcaggccacagacaagcggaaggcgctggaggagaccatggccttcactacccaggcactggccagcgtggcctaccaggtgggcaacctggccgggcacactctgcgcatgttggacctgcagggggccgccctgcggcaggtggaagcccgtgtaagcacgctgggccagatggtgaacatgcatatggagaaggtggcccgaagggagatcggcaccttagccactgtccagcggctgccccccggccagaaggtcatcgccccagagaacctaccccctctcacgccctactgcaggagacccctcaactttggctgcctggacgacattggccatgggatcaaggacctcagcacgcagctgtcaagaacaggcaccctgtctcgaaagagcatcaaggcccctgccacacccgcctccgccaccttggggagaccaccccggattcccgagccagtgcacctgccggtggtgcccgacggcagactctccgccgcctcctctgcgttttccctggcctcggccggcagcgccgaaggtgtcggtggggcccccacgcccaaggggcaggcagcacctccagccccacctctccccagctccttggacccacctcctccaccagcagccgtcgaggtgttccagcggcctcccacgctggaggagttgtccccacccccaccggacgaagagctgcccctgccactggacctgcctcctcctccacccctggatggagatgaattggggctgcctccacccccaccaggatttgggcctgatgagcccagctgggtgcctgcctcatacttggagaaagtggtgacactgtacccatacaccagccagaaggacaatgagctctccttctctgagggcactgtcatctgtgtcactcgccgctactccgatggctggtgcgagggcgtcagctcagaggggactggattcttccctgggaactatgtggagcccagctgctgacagcccagggctctctgggcagctgatgtctgcactgagtgggtttcatgagccccaagccaaaaccagctccagtcacagctggactgggtctgcccacctcttgggctgtgagctgtgttctgtccttcctcccatcggagggagaaggggtcctggggagagagaatttatccagaggcctgctgcagatggggaagagctggaaaccaagaagtttgtcaacagaggacccctactccatgcaggacagggtctcctgctgcaagtcccaactttgaataaaacagatgatgtcctgtgactgccccacagagataaggggccaggagggattgaaaggcatcccagttctaaggctgctgctaattacagcccccaacctccaacccaccagctgacctagaagcagcatcttcccatttcctcagtacccacaaagtgcagcccacattggaccccagacacccctctgcagccattgactgcaacttgttcttttgcccattg

SEQ ID NO: 220 - DNA, 854 bp, Homo sapiens
  source 1..854: mol_type = genomic DNA
gccaaatcttaaaggatccgggagctaagccagacccgggtggcggtggcagctgcgaaacccagggagccgatgccacgtgacccaatgtggacttcttttaaacctttctaatgcccataacccagcctcagacccatggagcccacgagagactgcccgctgttcgggggcgccttttccgccatcctccccatgggggccattgacgtaagcgacctccgaccggtcccggacaatcaagaagttttctgccatcccgtgacggaccagagcctgatagtggaacttctcgagctgcaggcccacgtacggggcgaagcggctgcgcggtaccactttgaggatgttggtggcgtgcagggggctagggctgtccatgtggagtctgttcagcctctcagtttggagaacctggccctgaggggccgctgtcaagaagcctgggtcctctctggcaagcagcagatagctaaggaaaaccagcaggtagcaaaggacgtgacacttcatcaggccttgctgaggctgccccagtaccagactgatctcttgcttaccttcaatcagcccccccctgacaacaggtcatctcttggccccgaaaatctgtcacctgcaccctggagcctgggtgactttgaacagctggtgaccagtctgacccttcacgatcctaacatctttggtccccagtaaaggcgctgaagcactgcatgatgttgctgagaacttggggactcggttctgtgagggggaaaagaggttgaaaagagggtttcctcttatttcttccctgtgcgtaaacataagacaatccctcttcagaataaacttgctttataatcaatata

SEQ ID NO: 221 - DNA, 2213 bp, Homo sapiens
  source 1..2213: mol_type = genomic DNA
gcgggcgcacacgaatgcgggcgcacacgaatgcgggcgcacacgaatgcgggcgcacccttgagtcccctccacaaccgcggtttgatcccagcggtccagtcggccggtgctgcccatccgtcccgccccctagacgcacgtccgctcgcccggcgcccgagccagtccgcgcgcacgccgtctgcgccccgaaagccccgccccaaggcgcgcccgcccaccgctctccacgtgctcgctggagggcggtgcgaggggccgagccgacaagatgttcttgctgcctcttccggctgcggggcgagtagtcgtccgacgtctggccgtgagacgtttcgggagccggagtctctccaccgcagacatgacgaagggccttgttttaggaatctattccaaagaaaaagaagatgatgtgccacagttcacaagtgcaggagagaattttgataaattgttagctggaaagctgagagagactttgaacatatctggaccacctctgaaggcagggaagactcgaaccttttatggtctgcatcaggacttccccagcgtggtgctagttggcctcggcaaaaaggcagctggaatcgacgaacaggaaaactggcatgaaggcaaagaaaacatcagagctgctgttgcagcggggtgcaggcagattcaagacctggagctctcgtctgtggaggtggatccctgtggagacgctcaggctgctgcggagggagcggtgcttggtctctatgaatacgatgacctaaagcaaaaaaagaagatggctgtgtcggcaaagctctatggaagtggggatcaggaggcctggcagaaaggagtcctgtttgcttctgggcagaacttggcacgccaattgatggagacgccagccaatgagatgacgccaaccagatttgctgaaattattgagaagaatctcaaaagtgctagtagtaaaaccgaggtccatatcagacccaagtcttggattgaggaacaggcaatgggatcattcctcagtgtggccaaaggatctgacgagcccccagtcttcttggaaattcactacaaaggcagccccaatgcaaacgaaccacccctggtgtttgttgggaaaggaattacctttgacagtggtggtatctccatcaaggcttctgcaaatatggacctcatgagggctgacatgggaggagctgcaactatatgctcagccatcgtgtctgctgcaaagcttaatttgcccattaatattataggtctggcccctctttgtgaaaatatgcccagcggcaaggccaacaagccgggggatgttgttagagccaaaaacgggaagaccatccaggttgataacactgatgctgaggggaggctcatactggctgatgcgctctgttacgcacacacgtttaacccgaaggtcatcctcaatgccgccaccttaacaggtgccatggatgtagctttgggatcaggtgccactggggtctttaccaattcatcctggctctggaacaaactcttcgaggccagcattgaaacaggggaccgtgtctggaggatgcctctcttcgaacattatacaagacaggttgtagattgccagcttgctgatgttaacaacattggaaaatacagatctgcaggagcatgtacagctgcagcattcctgaaagaattcgtaactcatcctaagtgggcacatttagacatagcaggcgtgatgaccaacaaagatgaagttccctatctacggaaaggcatgactgggaggcccacaaggactctcattgagttcttacttcgtttcagtcaagacaatgcttagttcagatactcaaaaatgtcttcactctgtcttaaattggacagttgaacttaaaaggtttttgaataaatggatgaaaatcttttaacggagacaaaggatggtatttaaaaatgtagaacacaatgaaatttgtatgccttgatttttttttcatttcacacaaagatttataaaggtaaagttaatatcttacttgataaggatttttaagatactctataaatgattaaaatttttagaacttcctaatcacttttcagagtatatgtttttcattgagaagcaaaattgtaactcagatttgtgatgctaggaacatgagcaaactgaaaattactatgcacttgtcagaaacaataaatgcaacttgttgtgc

SEQ ID NO: 222 - DNA, 5771 bp, Homo sapiens
  source 1..5771: mol_type = genomic DNA
gttttggcaagggattaaagtgctcccccctgtggcagcagtgacccagaaatgagtttgattcacatagtccttcctccataacaagccaaacgccagaccgagagtgcctccgtgcgcgagtgcccggtgtgtgcgcgccggcgagagcaggggcccgcccggctccccgcccgccgcggcccgaactcatgcagctccgagcgagcgagcggcgcccagcccagcgcctcggccgaacccctccgcagcaggctgcctgctgtttcccggggagatcatgaaacgaggtcgccttcccagcagcagtgaggattctgacgacaatggcagcctgtcaactacttggtcccagaattcccgatcccagcataggagaagctcctgctccagacatgaagatcgaaagccttcagaggtgtttaggacagacctgatcactgccatgaagttgcatgactcctaccagctgaatccggatgagtactatgtgttggcagatccctggagacaggaatgggagaaaggggtccaggtgcctgtgagcccggggaccatccctcagcctgtggccagggttgtgtctgaagagaaatccctcatgttcatcaggcccaagaagtacatcgtgtcatcaggctctgagcctcccgagttgggctatgtggacatccggacgctggctgacagcgtgtgtcgctatgacctcaatgacatggatgctgcatggctggaactgaccaatgaagaatttaaggagatgggaatgcctgaactagatgaatacaccatggagagggtcctagaggaatttgagcagcgatgctacgacaatatgaatcatgccatagagactgaggaaggcctggggatcgaatatgatgaagatgttgtctgtgatgtctgccagtctcctgatggtgaggacggcaatgagatggtgttctgtgacaaatgcaacatctgtgtgcaccaggcctgttatggaatcctcaaggtaccagagggcagctggctgtgccggacatgtgccctgggggttcagccaaaatgtctgctgtgtccgaagaagggtggagctatgaagcccacccgtagcggaaccaagtgggtccacgttagctgtgctctgtggatccctgaggtgagcattggcagcccagagaagatggagcccatcaccaaggtgtcacacattcccagcagccggtgggcgctagtgtgcagcctctgcaatgagaagtttggggcctctatacagtgctctgtgaagaactgccgcacagccttccatgtgacctgtgcttttgaccggggcctggagatgaagaccatcttagcagagaatgatgaagtcaagttcaagtcctattgcccaaagcacagctcacataggaaacccgaggagagtcttggcaagggggctgcacaggagaatggggcccctgagtgttccccccggaatccgctggagccctttgccagccttgagcagaaccgggaggaggcccaccgggtgagtgtccgtaagcagaagctgcagcagttggaggatgagttctacaccttcgtcaacctgctggatgttgccagggctctgcggctgcctgaggaagtagtggatttcctgtaccagtactggaagttgaagaggaaggtcaacttcaacaagcccctgatcaccccaaagaaagatgaagaggacaatctagccaagcgggagcaggatgtcttatttaggaggctgcagctgttcacgcacctgcggcaggacctggagagggttcggaacctcacttacatggtgacccgcagggaaaagattaaacggtctgtgtgcaaagtccaggaacagatattcaatctttacactaagcttttggagcaagaaagagtttcaggtgtgccttcttcctgctcctcctcctcactggaaaacatgcttttgtttaacagtccttctgttggccctgatgctcccaagatagaggacttgaagtggcattctgcattcttcagaaaacaaatgggtacttccttggttcattcgctgaaaaagccccataagcgagatcctttgcagaatagccctggaagtgaaggcaaaaccctgctgaagcagccagacctgtgtggtagaagggaggggatggtggtcccagagagctttttgggtttagaaaagacctttgcagaagcacgtctcatatcagcacaacagaaaaatggtgtggtgatgccagaccatgggaaaagaagagacaatcgttttcattgtgatctcattaaaggagacttaaaggacaaatcttttaaacagagtcacaagcctctcaggtccacagatgtgtcccagaggcatctggacaacacaagagctgccacctcccctggagtggggcagtcagcacctggcacaaggaaggagatagtgcccaagtgcaatggctccctaatcaaagtaaactataatcagactgcagtcaaagtgcctacaacacctgccagcccagtgaaaaactggggaggattccggattccaaagaagggggaacggcagcagcagggagaggcccacgatggggcctgccaccagcactcagactacccatatttgggcttaggccgagttccagccaaggaaagggcaaaaagcaaattaaaatccgacaatgagaatgacgggtatgtccccgatgtggaaatgagtgactcagagagtgaggcatcagaaaagaaatgtatacacaccagcagcactatcagcagaaggacagacattatcaggagaagcatcttggcttcttgatgcaacagagatgatgcggaagccctttgggctcgtcattgggtttgctagaggagagctctgatgtgggggagaagcagaaacccattaatcctgagctacacaaacacatttacttgcaattcagattaatttttttccagagtcatttttaaatcatttttgtgagaagtttgtgttatttgcaacttgttgaggaaacagaagagtagattgtaaccataagacactgctaagactagaacccgaactgaacactaaaataaaaatgaaatgttttaaagaaggcaaggcttaaataagcctcatgaatttttatagccctctgcattcttcccaaagcacaaactcatggttacctgaatatagggaaccagatatggttcttgagaaaccctcatggtaccattcacagcccataaagtttattttctaggactgtggtagatcttgaaatcatatttatatttggccctcaaggctatttttgttgcattatagcatataggcagcagctctgaagcttcagtaacactaagaaatttatgtgtaaatatagcagtcagggaagagaattttaaaaaaggtcattattgaagaagctgaggggacagggtagagctgctgcaatatggagatttagggtaatatggcaaggtcctgctgcttgaagcctgtgagtgggttgtggatatgggactggtggagagtgagactgttaggaaagttgtatctatgaataagggcagttgaagtagaatttttaccagtccacttgaccttcttcttccctaaccactggctcttgagccagcttgggatttccctggccattgccaatacctggccatctggcttccaatagtacagtggctactcaagttcaagcgaagaacttccagactctggtgactgttacttcccagagccaaccactagtgcatatgttagggaatctgggcttccaacatgaatggattccttaagaaaaaggaaaaaaaaaaaaaaaagaaaaaaagaaaaaaaaaagaaaaaagaaaaaaagagaaaaaagcgaaataggttatattttaaaaacaatagaaaggcaataagttgcgataagctcttactattgaccaaggttatacaggaaagagactgaagtgtacccttgaataggttttctgtagtcagagttctaaactctaatttgtaacttggactttctaattgcaaatggcaataactattaagttatcagcaataataaatttagcattaaatttgagtacaatgttttgtttttgcactccccatagtgcgtatgtattaagacagtggatagtgtttaggtcctgttaattttctttggaattcaatgtggttgtgaatcaaacttaaggaaggaacgtttaaatagcaatgagatacagaattatgggcctttggaacaagcccgacttcccctaaattctccttagtttgttaataccagtattcagattcctgattcatttatacatctgtttccatatggcagggacattatgatacttaatgaataatgctttgaggagttctgcagttaactttcaagtcttccagatgattgtcaacaacaaaaaaggcttattgaatcccatcttgctatgcaagttttatcagatgatcaaatagtagatctgatacatccccattgtatgtacgacattttcaaaccaagtcttaacttttcaaggacattttagtagctaattcaggggagggggaagaatgatgcaggtttttagattgactgactatttttgagttatggggctcattttgaaagactgctgtccagatcagcttgttgctgcagataatagaaggttcttatgaatccaagttgtatattcacttgtaggataatttaaaaattagattttttttgcatatgagcaaaaaccttttgctggatacaggagaaggttggactttatctacagttatcttttgattacagcaacagctctgggtgagagtagaatttatagagggataatttgtcaagccatagaaagaaaatctaaattaatctagtaagtgtatgacctctcaccattttaagaggtatcagattcatttgcactattaggaatgctagttttgtgcaaaaataatgccttacctgttttttccccacatttaggttgaaaagctttcaaatgttccaagttatgctgaaccaaaaaaaacaaaacaaaaacaaaacaaaaaatattaaaaaaaacccacacaaaaacaaaacacacaaaaataaaaagcccacactttttattcctgcttcgaaatgcaaatggatagagcacggtttctctgacagtataatgatagctttgtgagttagtttcatgtcatgctgggaactctctatgaggtggccataagcagcaaccagcccaaacacccacttgcgttctattagtatggaaccatttgcatttgttttttttaagctttatctttccttgtgcatcctgaccaagaaatatctttgattatgattaatgtattatgtcaaaatgtaggctagttaaacttttgtaaagttgcctggaatgtcatttgttaggttataaacacaagatctaaatgaagggttttatgtgttgtgtacaaatcttattttgaaatggacaaacttgtcattacatttgtaaccttgtacagaggatttttcactatgtgcctagcttggtgtccattcagctaaaattgaaaaaaaaaaaaaggtgcatgaagagttaaaaatcaaattaaagtatatgtagagatgactattttatattacatgacccaatcctgtatttatttctaccccctttttgaaagtatttataaaactagttgaggacagctgtatttttttgttgaactatttagtagaattgtgcctttttgtctgtatgtgaataaatgctgtacattttgcaataca

SEQ ID NO: 223 - DNA, 1780 bp, Homo sapiens
  source 1..1780: mol_type = genomic DNA
caaatgcagaagtggttctcatctttttttgcagcttaagatctgccttggtatttgaagagatataaactagatcaatttctttcacaggatcaactaaacagtgtaccacaatgaattctgaacttgactattatgaaaagtttgaagaagtccatgggattctaatgtataaagattttgtcaaatattgggataatgtggaagcgttccaggcaagaccagatgatcttgtcattgccacctaccctaaatctggtacaacctgggttagtgaaattgtgtatatgatctataaagagggtgatgtggaaaagtgcaaagaagatgtaatttttaatcgaatacctttcctggaatgcagaaaagaaaacctcatgaatggagtaaaacaattagatgagatgaattctcctagaattgtgaagactcatttgccacctgaacttcttcctgcctcattttgggaaaaggattgtaagataatctatctttgccggaatgcaaaggatgtggctgtttccttttattatttctttctaatggtggctggtcatccaaatcctggatcctttccagagtttgtggagaaattcatgcaaggacaggttccttatggttcctggtataaacatgtaaaatcttggtgggaaaagggaaagagtccacgtgtactatttcttttctacgaagacctgaaagaggatatcagaaaagaggtgataaaattgatacatttcctggaaaggaagccatcagaggagcttgtggacaggattatacatcatacttcgttccaagagatgaagaacaatccatccacaaattacacaacactgccagacgaaattatgaaccagaaattgtcgcccttcatgagaaagggaattacaggagactggaaaaatcactttacagtagccctgaatgaaaaatttgataaacattatgagcagcaaatgaaggaatctacactgaagtttcgaactgagatctaagaaggtctttctttacttaacatatctgatattaaagatttcttttcattattctccactttttcttattttagattgctagaaaagacataatcatggattatgttgacattttctttttaaatttttgtttaactttttttttttttttttgagacagagtctcactctgttgcctaggctggaggacagtggcacaatcatggctgattgcagccttgacctccttgactcaattgatcctcccatctcagcctcccaagtagctaggactacagacatgtgcaaccatgtttggctaatttttttaatgtttttttgtagagatgaggtcttattatattgtccaggctggtcttgaattcctgggctcaagcttcccaagtagctgcaacaacaggcacacaccaccatgctcaactaattttatttctattttttgtatagacaggggcttgctatagtgtccaggctggtctgaaacccttgagctcaagtgatcttcccacaccagcctcccaaaatactgggattacaggcttgagcctccatgcctggcccaggtaacatgtttattgagctgtacatgcatatgagaaataagaaacttttttttcctactatcatctcttaaattttgttttctttttcttttgcttcctcttcttcttttctattttttataaatatcatgcacaactataacctatgggaatgatgtagtaacacagattattcatcttgttagagttgtattaaaaataaacaagcatttcaaatta

SEQ ID NO: 224 - DNA, 853 bp, Homo sapiens
  source 1..853: mol_type = genomic DNA
ttttgcagtcctcgcagcctcccgcgacctcaggactgggctgtactcgccccttctcggccgccgtagtttttttttttttttaaagaaaaaacggttacccagcaactagaaaaacaaccggaaccggcggcaccagctcggagagaaaggaggttccataggcagttcttaccaagaagatgtcgattccattctccaacacccactaccgaattccacaaggatttgggaatcttcttgaagggctgacacgcgagattctgagagagcaaccggacaatataccagcttttgcagcagcctattttgagagccttctagagaaaagagagaaaaccaactttgatccagcagaatgggggagtaaggtagaagaccgcttctataacaatcatgcattcgaggagcaagaaccacctgagaaaagtgatcctaaacaagaagagtctcagatatctgggaaggaggaagagacatcagtcaccatcttagactcttctgaggaagataaggaaaaagaagaggttgctgctgtcaaaatccaagctgccttccggggacacatagccagagaggaggcaaagaaaatgaaaacaaatagtcttcaaaatgaggaaaaagaggaaaacaagtgaggacactggttttacctccaggaaacatgaaaaataatccaaatccatcaaccttcttattaatgtcatttcttcctgaggaaggaagatttgatgttgtgaaataacattcgttactgttgtgaaaatctgtcatgagcatttgtttaataagcataccattgaaacatgccacttgaagatttctctgagatcatgagtttgtttacacttgt

SEQ ID NO: 225 - DNA, 2645 bp, Homo sapiens
  source 1..2645: mol_type = genomic DNA
gggtggggccgcgagagcggcggaagtaggaagccgaggtctgaattgcgcgtggtggccatggcggccagcggggctgtggaaccagggcccccgggggctgccgtcgccccgtcgcccgccccggccccgccgcctgcccctgatcacctgttccggcccatcagcgccgaggacgaggagcagcagcccaccgagatcgagtcgctatgcatgaactgttactgcaatggcatgacgcgcctcctgctcaccaagattcccttcttcagagaaataatagtgagctccttttcctgcgagcactgtggctggaacaacacggagatccagtcggcaggcaggatccaggaccagggagtgcgctacactttgtctgtcagggctctggaggacatgaacagagaagtggtgaagactgactctgctgccacaaggattcctgagctagattttgaaattcctgcctttagccagaaaggagctctgaccactgttgaaggattgatcacccgtgctatctctggcctggagcaggaccagcctgcacgaagggcaaacaaagatgctacagctgaaagaattgatgagttcattgtcaaactgaaggagctaaagcaagtagcctcccctttcactctgatcattgatgatccctcagggaacagttttgtggaaaacccacatgctcctcagaaagatgatgccctggtgatcacacactacaaccggacccgacagcaggaagagatgctggggcttcaagaagaagcaccagcagagaagccagaagaggaagatctcagaaatgaagtgctccagttcagcacaaactgcccagaatgcaatgcccccgctcagaccaacatgaagctagtacaaatccctcactttaaggaggttatcatcatggctaccaactgcgagaactgtgggcatcggaccaatgaggtgaaatctggaggagcagtagaacccttgggcaccaggatcaccctccacatcacagatgcctcagatatgaccagagacctcctcaagtctgagacttgcagtgtggaaatcccagagctagaatttgaactgggaatggcagtcctcgggggcaagttcaccacactggaagggctgctgaaagacatccgggaactggtgaccaaaaatcctttcacactgggcgacagttccaatcctggacagacggagagactacaggagtttagccagaagatggaccagatcatcgaaggtaacatgaaggcccactttattatggatgatccagcaggaaacagttacttgcagaatgtgtatgcgcctgaagatgatcctgagatgaaggtggagcgttacaagcgcacctttgaccaaaatgaggagctagggctcaatgacatgaagacagagggctatgaggcaggcctggctccgcaacggtagcagtgggtggctcaagggccagcctccagcgctgctctttctgtaggttatttattagtattggatgaaggcgaaggctgggagtgtctttcccaccagcccttgcccatggtggggaggacatctggtctgagtcagagatctgtgcacactttctaaacagcttgtgatgcaagtgtgagcctattgtgttacttgaccttattttggaagttttgaattggcctaggaggaaacccagaaatgaaccaggggtatgtcatcacttttttcatatcaagtcctcaccctccttccacataatgctctatcctctaaggttggaactctgaagttggagaaggtggaataaagttacacctggagtttgttgttggttttgagtatataaaatactgactttgaacaggaaaggagtctcctgaggggagaccgagtccagcacaagtgaaggagttaccattgaaatgatgactttcaaacagcactggcctctgtattgaccctatccttgtttgatatcatgctgttagaattcagcctcctaaagaaaattttcccgtgtatctactgtaatttggggattgcagctggcatttaattcattccttcagcagatgcttgcttatctactttatgccaagcacaccacagaacagaggacaaaataaatctctttcatggaacttgaagtctagtggggaaaaatgacaataaacagatcaggaaaacagtacatcagatggtgattagtgtcatggaggaatgtaaagcagggaatggggctgggttgtgcaaggaaatggggagtagggaagatcttctgaacaagaaggtgataatttgacatttgggcaaagctgaggaggaggtcagggagtgagctgtgtgggtatctgggggaagagatttcctggcagagggaactgcaaatgctagagctgtgaggttagagccagtgggggtacctgatcagttagccctactctcagttagaaatgttgaaacacattcatccagagagaaaggaggctctctgcagttcttctgaaagttaaggaccagtgaacactctgctgcttgggccctggacttcccagccagtgttctttgcactgtagtctcctgcctctcataaacaaaaggtgactcctgtggtgcagactgcagggtatttgttcaataaagaccagttcattgattaa

SEQ ID NO: 226 - DNA, 5642 bp, Homo sapiens
  source 1..5642: mol_type = genomic DNA
ggcgcggtcgaggcccggaggcggcggcgcaggaggaagcggaggaggtcgggcgctcggggcccgggaggcgggccgcgcagcgccgcagccccgggctcgccatgctcctggcctcggccgtggtggtctgggaatggctgaacgagcacggccgctggcgtccctacagcccagcggtgagccaccacatcgaggcggtggtccgcgccggcccccgcgcggggggcagcgtggtgctgggccaggtggacagccgtctcgcgccctacatcatcgacctgcagtccatgaaccagttccgccaagacacgggaactctccgcccagttcgccgcaactactacgacccctcctcggcccctgggaagggcgtggtgtgggagtgggagaacgacaatggctcctggacgccctacgacatggaagtgggcatcaccatccagcatgcctatgagaagcagcacccctggatcgacctcacttccattggctttagctacgtaattgacttcaacaccatgggccagatcaaccgtcagacccagcgccaacgccgcgtccgccggcgcctcgacctcatctaccccatggtcacagggaccttgcctaaggctcagtcctggccagtcagccctgggccagccacctcgccccccatgtccccctgctcctgtccccagtgtgtcttggtgatgagtgttaaggcagccgtggtcaatggcagcactgggcccctacagctgccagtgacccgcaagaacatgccgcctcctggagtggtcaagctacccccactgccaggctctggggccaagccactggacagcacaggcaccattcgaggcccactgaagaccgccccatcgcaggtgatccggagacaagcctccagcatgcccactgggacaaccatgggctctcctgccagtcccccaggacccaacagcaagaccggaagggtggccctggccaccttgaatcgtaccaacctgcagcgactggccattgcccagtcccgggtgctgatcgcctctggggtccccacagtcccagtgaagaacctaaatgggtccagtcctgtcaaccctgccttggcaggaatcactgggatcctcatgagtgcagcggggctgcctgtgtgtctcaccaggccaccaaagctggtcctacacccaccccccgtcagcaagagtgaaataaaatccatcccaggggtttccaacacaagccgcaagaccaccaaaaaacaagccaagaaaggtaaaaccccagaggaagtgctaaaaaaatatctacagaaagtccggcacccaccagatgaggactgcaccatctgtatggaacgcctcacggccccctcaggctacaagggcccgcagcctacggtaaaacctgacctggtagggaagctgtccagatgcggccacgtctaccacatctactgcttggttgccatgtacaacaatgggaacaaggatggaagtttgcagtgtccaacctgcaagaccatttatggggtgaagacaggcacccaacctccagggaagatggagtaccacctcatcccccactccttgcctggccacccagactgcaaaaccatccggatcatctacagcatcccccccggcattcagggaccggaacacccgaatcctgggaagagtttcagcgcccgaggcttcccacgacactgttaccttccggacagcgagaaagggagaaaagttctgaagctgctgctcgtggcctgggatcgccgcctcatttttgccattggcacctccagcaccacaggcgagtcagacaccgtcatctggaatgaggtccaccacaagacagagtttggctctaatctcactggccatggctacccagatgccaattacctggataatgtgctggctgaactggctgcccagggcatctctgaggacagcactgcccaggagaaggactgaggccagaaaagctttgaggtgggaggggccatggagactgcaggacaggaagtgaggagagtgagtcaatgtagaagaagttggtgtcctgccctcccaactttctatcctcccctcctgccctgtgtccatccctcatccctcccaaccacagtgggagccagactgaatatagcgacatcattcataaatctcatccaacacaaagggagatgggatgagggccatcctgggtctgttcccatggagtttttggtgctgggtaggcaggaatcccctccctaccccacctcccaagtaggggcatggtcagcacacctagggtatgggcagtgcttaggcactccatatcctggctttgggaagccggggtttcttgcctcagccggcttcttgctacttccactctgctttgagactggagtttctgctattctccctctgctggaggcagggagctctcactgtgcaaggttggggggtgggcaaaggggtgaatcactaaactgctgtgacatcagaaactgatgccttggtgtagagcaaggaagcacttcttcccaagagggtcggagaaggaaaagcctctgggagcacattctgctgtcatcacagtccttggcttctctgggccctcctctcctcctcacagctctcacctgtccaaagaggcatctggttctctcatgtggatggatggactctggggttcctctttggagtggcatcccatgatgctgtttctagaccctctctgatcaaaccagagcctgcatcccactgagcatctgaactgtcctcagggagaggagcccacagccttcttcccaactcattctagaccagctcaaagattccatgagtttcatcgagtcactgtgagtggagcccatgctgggctctgtgccctctgtgtctgtgcatgcgcgtgtgtgtgtgggcgtgtgtgcattgctgggccagcttgaagggaaggcccgtcatgtccctgcactctgttttgcaagatgccaaaccccagttctgatggggctccaacagccaggctgtggtcctttgacgttcctcacctgttgccaacctatcccgtagtgaactgaaaccccaatgaagacagaactgtgcctggggagatgcaatgaggtgagggctgaactcatccttttatatttcttttcaagattggatcagagctcatctccatccagtcttgtttctatgaaggcttcaatctgtttccatgcaaatttgctaatcagagcccagagctgctgggtccctcatctccctcatctattatagattgacttacagcagggagagaatctctttagctcattcctaatggagttgggatcacaatatggtctggtccaatctgcatcttgttgtgtcccaagaccctatctcctccccaacattcttattgcctttggctcccagtaaggaacgaattgggggccagggaggagaacaggggggatcaagaagggaaacccaattccccctttgaaagtgggttctttgaactatgtgtttgggggaagttcctctggatactaatttgaatttatatacctcatgttttgggggtttgacgtatatatatatatatatatatgcatatatatttcataatatttggaaggtttttgatgctagaaaaatggaaacaagagaaccttcaaaaatggtacttagatgggaactggaggccaatctttcataaagccagccccatagctgcttgctgttaggcctccagccattttgacattggggtggatagtcgattcacctgcctgtcagtcgattcacctgcctgtcacccagttctgtggatgtgctggtgctgagcctttgctctctttccaaatggttacagggatgttgatcagctccaccagagggagctctgatgggaggaattgctctgccatccttgtccctgtgtctcctgtcggcaggcagccattgtatctcaccagcagaccaggagactggtcccaaggttactgcaccacagggcaatttcctgccatagttaggaaggaaacacctgaactaaatggaagagacatccctgcggtgtttaatatcacacccatgccctttgtcaggttaccatgtacagagattacttggagagcctcatgccgtctctaccttcgcacactggtcaagtatctgctgagcttcttggccgcaaggatgcagaaataggctgagggtccatgggaagaaagacacaatgaggcagtaggaggtggggaagaaaagaagacagactttcaaaatggaattaggcactggggagagatcagtttccccacatcagggagaagaaggtataggtggggaagggggtggccaggagcagaaggaagaagactcaagatggaaagggagccgctgtgcctgtggcaataccacttggagaggtcgacttcataccttcaagccttttcccctgggcttttgattgtgtctgtgccccctttcttgtcctctctgcagatgcccagtaggggctacctcatcctcgtgctgttcttgtgtggctttctgggcagtagggatcttgaatttcctttctaacactgtgcccggcaaggcggggagcattcctctgccctttgtcttgtgccaacctggaaaggtgcagtctagatttcagtgagaaccctgccagctgagccctgtgcatctactaccttgacacagagtgttttcccactagaagctctgctctgctctcctggcccaagtaggggattccatgccttccctttcatggtcttagcaccagcagcctagtttctcccttccagagtctccagggatgacaaattggattggagacaaacctcgtcagatgctcatcccctaaaaggttaattgtgtatttgtggctgcgtgtgcctttgtgttttcattctcttcccatttttgtacattttggtcttctctgtggttttatacttggtcaaaagtactcgtcttggtattgcactgttgtgtgcatgagaaaactgggggaaggctcactggtacaagaaaggacccctgacccctttccttctctgtggtccccggcattagattgggggttctgggagaggcaggtgaatgtcctaagtgaattgttctgtttgtaactggaatgtttttgaagtctttggtgttgctccgtgaaaggacatcgccacctggtgctcatgaggtgtctttgcagaacaataaatggcaaatgaacaaccacaaaattgttactcttgttggccttctgctgtttgtagattagtgcacctatctgtgagggatttgggttacctccctgagtctgtaagcaaccacaagccctgccactgggtgggggaagtccctccccaaccacttaaaaacaaattttccacatattacccacccacacatttgacctggctagactttgtttgcctaaaggaacagaccacattgctgggaaaatgagtaagtgaacgtgtgggagaaaaacacttttagaatcacgaatattcacttttaaaggtctctttgcctggctgcaatatagtgtgtgtttaaattatttacaggctgttgtttctcaaataaatgtttaatattaatcattcccaaactgacaagaacacaaaaataaaatgcaaatacagagcc

SEQ ID NO: 227 - DNA, 1014 bp, Homo sapiens
  source 1..1014: mol_type = genomic DNA
agaagcggaactgcaaggccggaagctccacgtccgcacccgccccttccgtttcgcttccgcctacctcgcccaggctgccagaccggaagcgctccgctgtacctggatcctgctcctctgggttgaaacccgggcgccgccaagatgccggcttaccactcttctctcatggatcctgataccaaactcatcggaaacatggcactgttgcctatcagaagtcaattcaaaggacctgcccccagagagacaaaagatacagatattgtggatgaagccatctattacttcaaggccaatgtcttcttcaaaaactatgaaattaagaatgaagctgataggaccttgatatatataactctctacatttctgaatgtctgaagaaactgcaaaagtgcaattccaaaagccaaggtgagaaagaaatgtatacgctgggaatcactaattttcccattcctggagagcctggttttccacttaacgcaatttatgccaaacctgcaaacaaacaggaagatgaagtgatgagagcctatttacaacagctaaggcaagagactggactgagactttgtgagaaagttttcgaccctcagaatgataaacccagcaagtggtggacttgctttgtgaagagacagttcatgaacaagagtctttcaggacctggacagtgaagggagcccgggcagccaccgtctccagagccctgggcagcattttccagcaagatgtacacaatcttttgcctttatttcgtaaagttttatacagaagagagaagagcatgtctttacttgaaaaactcttgatcaagaatttgggtgggagaaaagaaagtgggttatcaagggtgatttgaaattttctgcagcattaaagctggcgcttaataagaataagtaataataaagaaatttctaacattccatgtcagaaaaactttattgccagtctttgacattcacttacaatttgttttgagataaaattcacattccataatg

SEQ ID NO: 228 - DNA, 3019 bp, Homo sapiens
  source 1..3019: mol_type = genomic DNA
ggtacatggaaggccacaggaagaaacaagatcttgagctgagcaagaacatcccagcatcttcattgactttaaaagtatattctggagtcttccgtggttcactattccagtactacagagattccttatattacatggcaggaggggggtaaactgagggatagtgaagacaacaataaattaatcaagagctttcctcatatctcagaacctatcctctgtaagaatgtcagaaaaggttgactggttacaaagccaaaatggagtatgcaaagttgatgtctattctcctggagacaaccaagcccaggactggaaaatggacacctccacggatcctgtcagagtgctcagctggctccgcagagacctggagaagagtacagcagagttccaagatgttcggttcaaacccggagaatcatttggtggggaaacgtccaactcaggagacccacacaaaggtttctctgtagactattacaacaccaccaccaagggcactccagaaagattgcattttgagatgactcacaaagagattccttgccagggccccagggcccaacttggcaacgggagttcagtagatgaagtttccttctatgctaaccgcctcacgaatctagtcatagccatggcccgcaaagagatcaatgagaagatcgatggctctgaaaacaaatgtgtctatcagtcattgtacatggggaatgaacccacacccaccaaaagcctcagtaagatagcatcagagcttgtgaatgagaccgtctctgcatgttccaggaatgctgccccagacaaggctcctggctctggagacagagtctcgggatcatcacaaagtcccccaaatttgaaatacaagtccactttgaagatcaaggagagcaccaaagaaagacagggtccagatgacaagcctccttctaagaagtctttcttctataaggaagtgtttgaatctcgtaatggagattatgccagagagggtggaaggttctttcctcgggagagaaagaggtttcgagggcaggaaaggcctgatgactttacggcttctgttagtgaagggatcatgacctatgctaacagtgtggtatctgatatgatggtctccatcatgaagacactgaagatccaagtgaaagacacaaccattgccaccatcctactgaagaaggttctgctcaagcatgcaaaagaggtggtctcggatctcatcgactccttcttgaggaatctccacagcgtcacagggaccctcatgactgacacacagtttgtctcggctgtgaaaagaactgtcttctctcatggaagccaaaaggccacagatatcatggatgccatgctaaggaagctgtacaatgtaatgtttgccaagaaagtccctgagcatgtcaggaaagcccaagacaaggctgagagttattccctcatctccatgaaaggaatgggtgatcctaaaaaccgaaatgtgaactttgccatgaaatctgaaactaaattgagagaaaaaatgtattctgaacccaaatcagaggaggagacttgtgcgaaaactctgggtgagcacattatcaaagaggggcttaccttgtggcataaaactcagcagaaagaatgtaaatctctaggtttccagcatgcagcatttgaagctcccaacacacagcgtaagcctgcatcagacatttcctttgagtaccctgaagatattggcaacctcagccttcctccatatcctccagagaaacctgagaattttatgtatgattcagactcctgggccgaggacctgatcgtgtctgccctgcttctgattcaatatcacctggcccagggaggaagaagggatgcacggagcttcgttgaagctgctggcaccaccaactttcctgccaatgaacctcctgtagctcccgatgaatcttgccttaagtctgctcccattgtaggtgaccaagaacaagcagaaaagaaggacctaaggagtgttttctttaatttcatccggaacttacttagtgagaccattttcaagcgtgaccagagccctgaacccaaggtgccggaacagccagttaaggaagataggaagttgtgtgaaagaccgttggcgtcttctccccccaggctatatgaggatgatgagacccctggtgccctttctgggctgaccaagatggctgtcagccagatagatggccacatgagtgggcagatggtagaacatctgatgaactcagtgatgaagctgtgtgtcatcattgctaagtcctgtgatgcttcgttggcagagctgggagatgacaagtctggagatgccagtaggctaacttcggccttcccagatagtttatatgagtgcttaccagccaagggcacagggtcagcagaagctgtcctgcagaatgcctatcaagctatccataatgaaatgagaggcacatcaggacagccccctgaagggtgtgcagcacccacggtgattgtcagcaatcacaacctaacggacacagttcagaacaagcaactccaagccgtccttcaatgggtagctgcctctgagctcaatgtccctattttgtattttgctggtgatgatgaagggatccaggagaagctacttcagctctcagctgctgctgtggacaaaggatgcagtgtgggcgaggttctgcagtcggtgctgcgctatgagaaggagcgccagctgaatgaggcggtggggaatgtcacaccgctgcagctgctggactggctgatggtgaacctgtaatcggcaaccccactgctttcccctcttctggcagtggggccggcccttatccccgcccttctttctcacttccacatctccccctctatatcctcacagagccctaacattatcttcacaccactctcatcaaagacatgtcatcttgtgctagccactggattttgcagattttcctgtccatgcaagcaaggacgtaaaattaaaaaattacaattaaagggctcc

SEQ ID NO: 229 - DNA, 3568 bp, Homo sapiens
  source 1..3568: mol_type = genomic DNA
ggaagagaaagagtgaagaaaagttgcgagcgtctcctctcttcctaagcctcccgccccaacccacccctcagagaaggagaagataatatactgaaaagaagaggaggaggagagcgacgggacgggacgcgagcgggagcgcagccgccctctcggctccgcggcggcgcctcgcaagtccgggaggcgaggggggcccgaggggagacgccgtgacaactttcgtttccctctgagggaattgggaggtcggcggccccaaaagctttcagtccagtgtaaagctgttggagcgcgggagcaaaggtaaagaatgatgtaatgcgctggctgctccaaagcatcttttgttgtggaatggttattccagtcatctctttatgaatcaaatgtgaggggctgctttgtggacggagtcctttgcaagagcacatcaacgggaaagagaaagagacattcacttggagggctcttgctgaaaatgggtttaactctccttttgccagtcaccaccagcctgacctcatacacttttagtacaatggagtggctgagcctttgagcacaccaccattacatcatcgtggcaaattaaagaaggaggtgggaaaagaggacttattgttgtcatggcccatgagatgattggaactcaaattgttactgagaggttggtggctctgctggaaagtggaacggaaaaagtgctgctaattgatagccggccatttgtggaatacaatacatcccacattttggaagccattaatatcaactgctccaagcttatgaagcgaaggttgcaacaggacaaagtgttaattacagagctcatccagcattcagcgaaacataaggttgacattgattgcagtcagaaggttgtagtttacgatcaaagctcccaagatgttgcctctctctcttcagactgttttctcactgtacttctgggtaaactggagaagagcttcaactctgttcacctgcttgcaggtgggtttgctgagttctctcgttgtttccctggcctctgtgaaggaaaatccactctagtccctacctgcatttctcagccttgcttacctgttgccaacattgggccaacccgaattcttcccaatctttatcttggctgccagcgagatgtcctcaacaaggagctgatgcagcagaatgggattggttatgtgttaaatgccagcaatacctgtccaaagcctgactttatccccgagtctcatttcctgcgtgtgcctgtgaatgacagcttttgtgagaaaattttgccgtggttggacaaatcagtagatttcattgagaaagcaaaagcctccaatggatgtgttctagtgcactgtttagctgggatctcccgctccgccaccatcgctatcgcctacatcatgaagaggatggacatgtctttagatgaagcttacagatttgtgaaagaaaaaagacctactatatctccaaacttcaattttctgggccaactcctggactatgagaagaagattaagaaccagactggagcatcagggccaaagagcaaactcaagctgctgcacctggagaagccaaatgaacctgtccctgctgtctcagagggtggacagaaaagcgagacgcccctcagtccaccctgtgccgactctgctacctcagaggcagcaggacaaaggcccgtgcatcccgccagcgtgcccagcgtgcccagcgtgcagccgtcgctgttagaggacagcccgctggtacaggcgctcagtgggctgcacctgtccgcagacaggctggaagacagcaataagctcaagcgttccttctctctggatatcaaatcagtttcatattcagccagcatggcagcatccttacatggcttctcctcatcagaagatgctttggaatactacaaaccttccactactctggatgggaccaacaagctatgccagttctcccctgttcaggaactatcggagcagactcccgaaaccagtcctgataaggaggaagccagcatccccaagaagctgcagaccgccaggccttcagacagccagagcaagcgattgcattcggtcagaaccagcagcagtggcaccgcccagaggtcccttttatctccactgcatcgaagtgggagcgtggaggacaattaccacaccagcttccttttcggcctttccaccagccagcagcacctcacgaagtctgctggcctgggccttaagggctggcactcggatatcttggccccccagacctctaccccttccctgaccagcagctggtattttgccacagagtcctcacacttctactctgcctcagccatctacggaggcagtgccagttactctgcctacagctgcagccagctgcccacttgcggagaccaagtctattctgtgcgcaggcggcagaagccaagtgacagagctgactcgcggcggagctggcatgaagagagcccctttgaaaagcagtttaaacgcagaagctgccaaatggaatttggagagagcatcatgtcagagaacaggtcacgggaagagctggggaaagtgggcagtcagtctagcttttcgggcagcatggaaatcattgaggtctcctgagaagaaagacacttgtgacttctatagacaatttttttttcttgttcacaaaaaaattccctgtaaatctgaaatatatatatgtacatacatatatatttttggaaaatggagctatggtgtaaaagcaacaggtggatcaacccagttgttactctcttaacatctgcatttgagagatcagctaatacttctctcaacaaaaatggaagggcagatgctagaatcccccctagacggaggaaaaccattttattcagtgaattacacatcctcttgttcttaaaaaagcaagtgtctttggtgttggaggacaaaatcccctaccattttcacgttgtgctactaagagatctcaaatattagtctttgtccggacccttccatagtacaccttagcgctgagactgagccagcttgggggtcaggtaggtagaccctgttagggacagagcctagtggtaaatccaagagaaatgatcctatccaaagctgattcacaaacccacgctcacctgacagccgagggacacgagcatcactctgctggacggaccattaggggccttgccaaggtctaccttagagcaaacccagtacctcagacaggaaagtcggggctttgaccactaccatatctggtagcccattttctaggcattgtgaataggtaggtagctagtcacacttttcagaccaattcaaactgtctatgcacaaaattcccgtgggcctagatggagataatttttttttcttctcagctttatgaagagaagggaaactgtctaggattcagctgaaccaccaggaacctggcaacatcacgatttaagctaaggttgggaggctaacgagtctacctccctctttgtaaatcaaagaattgtttaaaatgggattgtcaatcctttaaataaagatgaacttggtttcaa

SEQ ID NO: 230 - DNA, 1721 bp, Homo sapiens
  source 1..1721: mol_type = genomic DNA
ggtggcaggaaaggcttggaacagctgccggaggtgacggagcggcggccccgcccggtgcgctggaggtcgaagcttccagctctggacatcctgagcccaagtcccccacactcagtgcagtgatgagtgcggaagtgaaggtgacagggcagaaccaggagcaatttctgctcctagccaagtcggccaagggggcagcgctggccacactcatccatcaggtgctggaggcccctggtgtctacgtgtttggagaactgctggacatgcccaatgttagagagctggctgagagtgactttgcctctaccttccggctgctcacagtgtttgcttatgggacatacgctgactacttagctgaagcccggaatcttcctccactaacagaggctcagaagaataagcttcgacacctctcagttgtcaccctggctgctaaagtaaagtgtatcccatatgcagtgttgctggaggctcttgccctgcgtaatgtgcggcagctggaagaccttgtgattgaggctgtgtatgctgacgtgcttcgtggctccctggaccagcgcaaccagcggctcgaggttgactacagcatcgggcgggacatccagcgccaggacctcagtgccattgcccgaaccctgcaggaatggtgtgtgggctgtgaggtcgtgctgtcaggcattgaggagcaggtgagccgtgccaaccaacacaaggagcagcagctgggcctgaagcagcagattgagagtgaggttgccaaccttaaaaaaaccattaaagttacgacggcagcagcagccgcagccacatctcaggaccctgagcaacacctgactgagctgagggaaccagctcctggcaccaaccagcgccagcccagcaagaaagcctcaaagggcaaggggctccgagggagcgccaagatttggtccaagtcgaattgaaaggactgtcgtttcctccctggggatgtggggtcccagctgcctgcctgcctcttaggagtcctcagagagccttctgtgcccctggccagctgataatcctaggttcatgacccttcacctcccctaaccccaaacatagatcacaccttctctagggaggaggcaaatgtaggtcatgtttttgttggtactttctgttttttgtgacttcatgtgttccattgctccccgctgccatgctctctcccttgtttccttaagagctcagcatctgtccctgttcattacatgtcattgagtaggtgggtagccctgatgggggtcgctctgtctggagcataacccacaggcgttttttctgccaccccatccctgcatgcctgatccccagttcctataccctacccctgacctattgagcagcctctgaagagccatagggcccccacctttactcacaccctgagaattctgggagccagtctgccatgccaggagtcactggacatgttcatcctagaatcctgtcacactacagtcatttcttttcctctctctggcccttgggtcctgggaatgctgctgcttcaaccccagagcctaagaatggcagccgtttcttaacatgttgagagatgattctttcttggccctggccatctcgggaagcttgatggcaatcctggaagggtttaatctccttttgtgagtttggtggggaagggaagggtatatagattgtattaaaaaaaaaaaggtatatat

SEQ ID NO: 231 - DNA, 2924 bp, Homo sapiens
  source 1..2924: mol_type = genomic DNA
agggccccgccctgccttctggggcaaagcggagagtggtcggttctgccccacagtaacgcgaggaaagaaatctcgcgaggctggagttctccgggagcgccggtcggaggcggtcggcggaggtgtctaccccgccggtgatggcgttgaacgccactggcttcccggccttccgtccgctgcctccgtccgattctgcgtctgcttgctgaggaggcggattaggggggcgcggagtctcttcccttgagtgcataggtcccggttggtagagggtttgagtccgcatcgccacagctgaaggctgcgagggactaagagcagaatatatctttagaaatgagttgcacaattgagaaggcacttgccgacgctaaagctcttgttgaaagattaagagatcatgacgatgcagcagaatctctgattgagcaaaccacagctctcaacaagcgagtagaagccatgaaacagtatcaggaagaaattcaagaacttaatgaagtcgcgagacatcggccacggtccacgttagttatgggaatccagcaagaaaacagacaaatcagagagttgcaacaagaaaacaaagaattacgtacatctctggaagaacatcagtcggccttggaacttataatgagcaagtaccgagaacaaatgtttagattgctaatggctagcaaaaaagatgatccgggtataataatgaagttaaaagagcagcactccaagattgacatggtacatcgtaacaagtccgaaggattcttccttgatgcatctcgacacatccttgaagcacctcaacatggactggagagaaggcacttggaagcaaatcagaatgaactgcaagcacatgttgaccagataactgaaatggcagcagtaatgaggaaagccattgaaattgacgagcaacagggttgcaaggaacaagaacgaatatttcaacttgaacaagaaaacaaaggcttgagagagatccttcaaataactcgagaatcatttttgaacctaaggaaagatgatgcgtcggaaagtacttctttgtcagcattagtgaccaacagtgatttgagtctgaggaagagctgaagagtttctgagtctgtgagcttcttacatggctccaaatggtcaaataagtgaatgaatgaatggacagaaaattcaatcctttatttttttctctgtaaatatgtacagtgcacgggctatgagatagcaacaaaaaatgcatagttaatggtcatagactttattccaaaacataattggaaaatagaaactgagccattgccaaatggtaaagaaatgaaaagttttcacagtgactactgaatataccaagagcttttggcagtactgctggctttctgggtgattaattaggtaaacttgaatattcccagtaaatgtttgagaatgcataaaattataccaatttaaaaatataaatttttgccactgttttgtgaacggaggatttgtacgctaaatttcatccttatttggcgtcaaagttgatgcaaagtttatgtaccatgagacttctagtgattgcctactttcacatttatttaaatttttgtgaaagaaaatacagttttaaaggctataggaatgtgttatatgtaccttaaacagataatttaattttagcaatttatcataactgatacttagctaacaattgtccataacttgtttaagtgtaagaaataccatttcaggaatgaaaaagaaggaatactactttctaagaaagaagatcttataatagacatatttagtaggttaaactactcctttgaaagaataagttttggttcaaagtcaataatgaagacgagatttgtttttctcttctctggctgatttttaaggatattatgtagttcatttagttaacagaattgaaatgtttgatatggcaagataggtatggtaatttcaaagtgaattgggaattcctctggctcatagaacccttttttttttcctttaagtattcttgagatacaaaaaaaaaaagtaaatacaatttcaaaaaaaaagttccggatctgtttttaagctccatctggtcctcataacctgcaagatttttcttaaaacctttcagctgaaagtgggggtaaaggtggagtaatctgtggatttgtttctgttgtcttttaaaatgtcaaatatataatatgtaatttttttaaaaaccaccagatacagaaatgtgctttaacatcagttgaaacctaaattttcttatgttgtggtgattgtattaaaaagggataaaagaagagtgtcaaacatggttaaatatattgtactcatttatgttgaatacgtattaaaattaagacaaatggaaaattatactttgagtatataatttgttaaatattactttatatggtaattttatgtataatttcatatattggtaaaattcaaaactacacttgagaatttttttatcttaagtttggggtgaatggggtggatgagactgattgaatagaaaagggctaatggcccaaacattatatagatttctttttttcagtcagaggccttatttgatattttataaataaatgacagtttttatttttaaactttttattgtttttgggaaagtattccttaatttaatgacacattcattcagatacttcttatccctgctaataaaggaaatctatttcaagctacaccattgagattaagtctgaggcagttcattgaggcagctctactataaaagcttacttgataaataattatttttgtaaacaagttgggttaacttattcttcgtctttttgcttggatatgaatttaaggtcttcatgtttaaagacatttactttgttatttagtgacacatttccatcctatttttttttttt

SEQ ID NO: 232 - DNA, 715 bp, Homo sapiens
  source 1..715: mol_type = genomic DNA
aaagtcagtgagcaaatcgcggaccaccggggctgccagctcgcctgactcccggcctcttgcgctcctaggggcggagaagggtgcgggctcttcgccctttgtgtcctccttctttcactaacttctggactttccagctcttccgaagttcgttcttgcgcaaagcccaaaggctggaaaaccgtccacgatgaccagcatgactcagtctctgcgggaggtgataaaggccatgaccaaggctcgcaattttgagagagttttgggaaagattactcttgtctctgctgctcctgggaaagtgatttgtgaaatgaaagtagaagaagagcataccaatgcaataggcactctccacggcggtttgacagccacgttagtagataacatatcaacaatggctctgctatgcacggaaaggggagcacccggagtcagtgtcgatatgaacataacgtacatgtcacctgcaaaattaggagaagatatagtgattacagcacatgttctgaagcaaggaaaaacacttgcatttacctctgtggatctgaccaacaaggccacaggaaaattaatagcacaaggaagacacacaaaacacctgggaaactgagagaacagcagaatgacctaaagaaacccaacaatgaatatcaagtatagatttgactcaaacaattgtaatttttgaaataaactagcaaaaccagaa

SEQ ID NO: 233 - DNA, 1262 bp, Homo sapiens
  source 1..1262: mol_type = genomic DNA
tcagttggtcacgtggttgttcggagcgggcgagcggagttagcagggctttactgcagagcgcgccgggcactccagcgaccgtggggatcagcgtaggtgagctgtggccttttgcgaggtgctgcagccatagctacgtgcgttcgctacgaggattgagcgtctccacccagtaagtgggcaagaggcggcaggaagtgggtacgcaggggcgcaaggcgcacagcctctagacgactcgctttccctccggccaacctctgaagccgcgtcctactttgacagctgcagggccgcggcctggtcttctgtgcttcaccatctacataatgaatcccagtatgaagcagaaacaagaagaaatcaaagagaatataaagaatagttctgtcccaagaagaactctgaagatgattcagccttctgcatctggatctcttgttggaagagaaaatgagctgtccgcaggcttgtccaaaaggaaacatcggaatgaccacttaacatctacaacttccagccctggggttattgtcccagaatctagtgaaaataaaaatcttggaggagtcacccaggagtcatttgatcttatgattaaagaaaatccatcctctcagtattggaaggaagtggcagaaaaacggagaaaggcgctgtatgaagcacttaaggaaaatgagaaacttcataaagaaattgaacaaaaggacaatgaaattgcccgcctgaaaaaggagaataaagaactggcagaagtagcagaacatgtacagtatatggcagagctaatagagagactgaatggtgaacctctggataattttgaatcactggataatcaggaatttgattctgaagaagaaactgttgaggattctctagtggaagactcagaaattggcacgtgtgctgaaggaactgtatcttcctctacggatgcaaagccatgtatatgaaatgcattaatatttgactgttgagaattttactgccgaagtttacctccactagttctttgtagcagagtacataactacataatgccaactctggaatcaaatttccttgtttgaatcctgggaccctattgcattaaagtacaaatactatgtatttttaatctatgatggtttatgtgaataggattttctcagttgtcagccatgacttatgtttattactaaataaacttcaaactcctgttgaacattgtgtataacttagaataatgaaatataaggagtatgtgtagaaaa

SEQ ID NO: 234 - DNA, 657 bp, Homo sapiens
  source 1..657: mol_type = genomic DNA
ggcgccggagagcgcgggcggctggggaatggctgctgccatggtgccggggcgcagcgagagctgggagcgcggggagcctggccgcccggccctgtacttctgcgggagcattcgcggcggacgcgaggacaggacgctgtacgagcggatcgtgtctcggctgcggcgattcgggacagtgctcaccgagcacgtggcggccgccgagctgggcgcgcgcggggaagaggctgctgggggtgacaggctcatccatgagcaggacctggagtggctgcagcaggcggacgtggtcgtggcagaagtgacacagccatccttgggtgtaggctatgagctgggccgggccgtggcctttaacaagcggatcctgtgcctgttccgcccgcagtctggccgcgtgctttcggccatgatccggggagcagcagatggctctcggttccaggtgtgggactatgaggagggagaggtggaggccctgctggatcgatacttcgaggctgatcctccagggcaggtggctgcctcccctgacccaaccacttgacttaatctcactttcttaaattcttctattctcagacactgctctagtaccattccttcctcttagccccaggagcaaattaaaaggtacagttaaaatcctaa

SEQ ID NO: 235 - DNA, 3492 bp, Homo sapiens
  source 1..3492: mol_type = genomic DNA
cgggaagactgcatccggctccaggaaaagcgagtgggatatcccaatctttggactgcatcctggttgcctctactgtggtcacctttgggaagaaatgtcttctgtaaaaagaagtctgaagcaagaaatagttactcagtttcactgttcagctgctgaaggagatattgccaagttaacaggaatactcagtcattctccatctcttctcaatgaaacttctgaaaatggctggactgctttaatgtatgcggcaaggaatgggcacccagagatagtccaatttctgcttgagaaagggtgtgacagatcaattgtcaataaatcaaggcagactgcactggacattgctgtattttggggttataagcatatagctaatttactagctactgctaaaggtgggaagaagccttggttcctaacgaatgaagtggaagaatgtgaaaattattttagcaaaacactactggaccggaaaagtgaaaagagaaataattctgactggctgctagctaaagaaagccatccagccacagtttttattcttttctcagatttaaatcccttggttactctaggtggcaataaagaaagtttccaacagccagaagttaggctttgtcagctgaactacacagatataaaggattatttggcccagcctgagaagatcaccttgatttttcttggagtagaacttgaaataaaagacaaactacttaattatgctggtgaagtcccgagagaggaggaagatggattggttgcctggtttgctctaggtatagatcctattgctgctgaagaattcaagcaaagacatgaaaattgttactttcttcatcctcctatgccagcccttctgcaattgaaagaaaaagaagctggggttgtagctcaagcaagatctgttcttgcctggcacagtcgatacaagttttgcccaacctgtggaaatgcaactaaaattgaagaaggtggctataagagattatgtttaaaagaagactgtcctagtctcaatggcgtccataatacctcatacccaagagttgatccagtagtaatcatgcaagttattcatccagatgggaccaaatgccttttaggcaggcagaaaagatttcccccaggcatgtttacttgccttgctggatttattgagcctggagagacaatagaagatgctgttaggagagaagtagaagaggaaagtggagtcaaagttggccatgttcagtatgttgcttgtcaaccatggccaatgccttcctccttaatgattggttgcttagctctagcagtgtctacagaaattaaagttgacaagaatgaaatagaggatgcccgctggttcactagagaacaggtcctggatgttctgaccaaagggaagcagcaggcattctttgtgccaccaagccgagctattgcacatcaattaatcaaacactggattagaataaatcctaatctctaaatctaagaactaagctttgagtattatttaataatttctaataacactcattcctcaagtgatattagagattattcagtactcttgagagtgtcacaacacaaaatacgatgttgggttttcgaaatattttcaaagtgttctgtcttaatcacaaattcatatttttacacatttttacaatattgcctcagattatgttaaatttgggtcagtcttctctgaactttttctctcttggtttcttttcttccttcacagttttatctcacaaaaccatttttctaataagagacatcatgttggaaagatgttctagaaatgtgcataaatttcagtgcctcttgtaagcattaaactgatgatgaagaaagttcctgatttgagaaatgaatcaaagtaattttaatgaatttttagcttgtattagcttgagttagctggcattgattttttagtccttttgttacctttaagttgtcaatatatggtttttgttcatctccccattgtagtcccacttgctctttcctgggggttccattgttctagcagtggaggtgttatagtgtcgccactcgtctaatttgaccagtgttaagaattttctaatttaataatttaatagtgatctcaataccacaccctcatggaaggagaaaagcatactattatatctgggacctctcttttagacctaaaattaattaacatatctacttatatgttacttatacctaaagctgttattaagacaaaccaagattctctgcttttgcactgaaattaaacttgaaaggaattctcctcaaaggtcggatattaaataagtcccaggcagatttacatatttaatttaaaacattggctttatttcattttgtgatgagtgatgtatctgtgttaacaaaaaattgtataatcattaccaatactatttattatgctcaaatatatcttggctttgaccttatttcaacacattctaagaagccttgacaaagtaagtatattttagagctgaatcagtaagattctagagaaagcaaaacatagtagttcacaattttgcaacatagaaagtcacattttgaaaggctattttgaaattgatttaatagctattatagtttatgaatatcaaaatttgtataatttgcatctttactaatgtatgctagagctacaagagaccttaaggataatatatgaaattagctttccttattttatagataaggaaaaagaaattgtgaaaggtgaatttacctaattagtgaaagttacataactaattacaacagtctgtactatataatgcagaggacgattctccctgtaaaaggaactagaagctattactaaaaatatatatagacaaaattaaaagaaggaatgataagaataaatttaatttaccaaatattgttaattaaaattttagatacttaacatttatttaacttaaataaaagataactgtcagataaaactttattttactaatgagcagtgattttcttaggaattgatgaaggcttattggtatcaagaatttaaaccaaattaaaactgacagaggacatttagatacataataaaattcgagctacataagtatatggaaaataatgtaccttgattattatgaaatagagcatcttgaaattcagttttactctaaatgtacttttaatacttgcagattctaagattacattgtaaaattccaggttttcataatgttaaaataggaaagtagaatataaagtatcaacaagtgtagttatacattttgttttggatatttaatccttacttgggaaaaaatcagcatctaggtaaattattattttaataacaactcttaaattgccaacctctgagaggtgaaaagctatgtaaatagaaggaatggccagttcaaaagaatagtagatgtgatagtgccgtgaatgtattctactggaaatgaatgtaataatacattaaatttttaaaatcta

SEQ ID NO: 236 - DNA, 1738 bp, Homo sapiens
  source 1..1738: mol_type = genomic DNA
gcggtcttatataagccagatccgcaggggagtccgcagaagggttaaacaggtctttgggcttcggcgacctcgcccgcggcagaaaccggtaagaagacagtgggctgcgcgtctcattttcagccttgcccggactctcccaaagccggcgcccagtagtggctccagagcccacaggtggcccccggcagtctctggggcgcatggagcggcgttaatagggctggcggcgcaggccagtagccgctccaacatgaacctcgtgggcagctacgcacaccatcaccaccatcaccacccgcaccctgcgcaccccatgctccacgaacccttcctcttcggtccggcctcgcgctgtcatcaggaaaggccctacttccagagctggctgctgagcccggctgacgctgccccggacttccctgcgggcgggccgccgcccgcggccgctgcagccgccaccgcctatggtcctgacgccaggcctgggcagagccccgggcggctggaggcgcttggcggccgtcttggccggcggaaaggctcaggacccaagaaggagcggagacgcactgagagcattaacagcgcattcgcggagttgcgcgagtgcatccccaacgtgccggccgacaccaagctctccaagatcaagactctgcgcctagccaccagctacatcgcctacctgatggacgtgctggccaaggatgcacagtctggcgatcccgaggccttcaaggctgaactcaagaaggcggatggcggccgtgagagcaagcggaaaagggagctgcagcagcacgaaggttttcctcctgccctgggcccagtcgagaagaggattaaaggacgcaccggctggccgcagcaagtctgggcgctggagttaaaccagtgagccgaggcccgcgccgaggacctggccaggccagccactcctgaagccccgggaggagaggaaggcagcggcgaacgccaggctctgggctccggcgactggtgctacgcatcccgcggagcttctgctgagcgccggcaggtcgtcggctgcaaccacacacttggatcgcacgtgcaatgtcctttgattttttttaatacattaagagaaagagaaatatatatatatccacccccagcccaaccgagggcggcccttggcggcaacatgcaagaaggagggactgtcgaacccaagggctcaaagacgcactcttccacccttttggagcgaatttagaacctcagccctatctccatttccctatctggctctttctctcttgtccctccatatgatccgccccgacgccgtcttctctaattaaaatgcaataaggaatcaattcttttctgcctgagaaagagaaccagacgcaggaagatgaaaggctgccctttgttcttcgaatcgtggtggttttattttatttttctttttgtcgctgcacttcctgtttagttccaagggaaacactttctctctttctctgtctctctcttttcttccttcttttccttcctttttgtttctatctaaataaaagctttccctgtgttggaaagtttttatgtatttaaactacctaccatgcctgttgtgctcaggtgtttgttcatcctgccatccccaacccttttctacctcaagtctgtgtgaccactcacagcccccctcccttcgccaaagcagtgtctatgctcttgattaataaaacattttctgaaatca

SEQ ID NO: 237 - DNA, 3107 bp, Homo sapiens
  source 1..3107: mol_type = genomic DNA
aagaccagcagataaaaaataatttttaaaaacctcgtgagactgatttgccgcaggacgggaggaggaagaagcaagcgtggaaggtgctaacggaggaacctaaacctccatcctctttgcctgggaggttaagaactacagggagaggcgagagagactatgactgccctacggctagagtagccgcgaagagaacacttccggggcggggctatctggccctttcctttccgcgtgtagaatgtggggcgcctgtaaagttaaggttcacgattccttggccaccatttccatcactctgagacggtacctgagattgggggcgaccatggcaaaaagcaagttcgagtacgtgagggacttcgaggctgacgacacctgcctggcacactgctgggtggtagtgcggctggacggccggaatttccatcggtttgctgagaagcacaactttgcaaaacccaatgacagccgtgctctccagctgatgaccaaatgtgcgcagactgtgatggaagaactagaggatattgtgatcgcgtatggacagagtgatgagtacagctttgtgttcaagcggaaaaccaattggtttaaaagaagagccagtaagttcatgactcacgtggcctcccagtttgcctccagctatgtgttttattggcgggattactttgaggaccagccccttctgtatcccccaggctttgacggaagagtcgtggtgtatcccagcaaccagactttaaaggactacctcagctggcgacaagcagattgtcacatcaataatctttataatacagttttctgggcacttatacaacaatctggactaacaccagtacaagcccaagggagattacagggaactcttgcagcagacaagaatgagattttgttttctgaattcaacatcaactataataatgagctgccgatgtataggaaagggactgtgttgatatggcagaaggtggatgaagtgatgacaaaagaaattaagctgccaacagaaatggaaggaaaaaagatggcagtgacccggaccaggacaaagccagtgcccttgcactgcgatatcatcggggatgctttctggaaggaacatccagagattctagatgaagacagctgacccttttgcgcttcagttctggtgtgcttaaccatgcaagccctcccacctcccagggctccttgccttaggtggctgtagcatccctaccacccaggacactggtgcgaatgacacaactcaagttgggaggggaacagggaaggaagggatggatgggggtggtgtatcttactctgtttaagcagaacaccttgtttgcggtgttggaacatggttcctttggcagaagtgctttttttttaatcgcagtactatttttataaagcaagaactattccatgccttggagaatgaatcatttttagattgtgacataaatcttgtaaaaacctgtcagttattttcatctatgagagaagaggagcccaaactctcgcccacctgttcttaaccagaaaacccactgactttgaaaatctcacctctgccacccatctacttgcattcgtctttggcagacctcaagataaatatgggttaatgcctgcatgatgcctctgaattcaggaattgcagggaaaactcggggctttgtgccagtctctaagttggcaactttggctgaacaaatgagtagtggcttcagtgtccttgcgtacacattctgtggattgatttaatggagttgtcagcatgatcatcatcttctagccaggggcatagttgccaaggccatttacctctttctaagaagaaacagaattatgtgtatatatgagagaaagaaacaagaatgcgtgaatgaggatgaagaaacatttaccccatgtactcaagacatttcagttttaaaagtcactttcctattagacttcttgaaaaacattctcacatagcctctatgtaatcagacaaatgacatttgatttcaagagcagaggggtaaacatcctctgctaatcgacaggtagcaggtgtcagaggaggcataatattaatagcgccaccttctgttgggtcagtggagatgggtgaggaacagcacagagcagcagggatcatcacatgcagccaaacttggcctctgaagggggaaggtagtgggaataggtggtgagagaactcacatttttctcttgtcctggttttatatttcggagggaaaggattatttggccccattaagaattaagaggctgggtgcggtggctcacgtctgtaatcccagcaccttgggaggcccaggcaggcagatcacctgaggtcgggagttcgagaccagcgtgaccaacgtggagaaacccccgtctctactaaaaatacaaaaaattagctgggcatggtggtgcatgcctgtgattccagctacttgggaggttgaggcaggagaatcatttgaactcaggaggcggaagttgcggtgagccaagattgtgccattgcactccagcctgggcaacgagcgaaactacatctcaaaaaaaaaaaaaaaagacatggctgggcatggtggctcacacctgtaatcccagcactttggggggctgaggcaggtagatcacttcaggccaggagtccaagaccagcacgtccaacatggcaaaacccagtctgtactaaaaatagaaaaattagctgggcgtggtggcgtgtgcctgcaataccagctactcagaaggctgaagcaggataattgcttgaacctggtaggtggaggttgcagtgagctgaaatcatgccactgcactccagcctgggtgacagagcaaaactgccttaaaaaaaaaaattaagagacagcccgtgtcccagtccctcgtcttgcactgcagaatttacatctaagaagaaaatgtatttttgaaagggtgatggctggcctcatccctcactaattgacaacccatctgtcgatgccattttttcccttcctgttctcactccacagaaagaggagatacggttcttgtttggtaattgctaaaatctctttgaggaaagaaataaagatgtcaactccttt

SEQ ID NO: 238 - DNA, 4186 bp, Homo sapiens
  source 1..4186: mol_type = genomic DNA
agatgcccgtaccccctcaccgccctcagttcacgccctggctggtttggattcgagaggaaaaatcattaaaggatctggagttttcaccccaaaactttaatcgttttgtcccttctttttttttcttgtctttcctccagcagctgcagactacataatgaaaaataacaaaagtgcccatgcgcgaggctgtgcaactaaccacccgacgattgcggggaggaggagtaagagtcggctaagcggcgcccagtgtcctactgcgcctgtgcgccggtggcgtgcgcagaggcctctgggtaggtggctcaaccccgcctctcagttgaggactctgaaggctgtttctgtggcgcttcccctgcgaggatggctaccctggttgtaaacaagctcggagcgggagtagacagtggccggcagggcagccgggggacagctgtagtgaaggtgctagagtgtggagtttgtgaagatgtcttttctttgcaaggagacaaagttccccgtcttttgctttgtggccataccgtctgtcatgactgtctcactcgcctacctcttcatggaagagcaatccgttgcccatttgatcgacaagtaacagacctaggtgattcaggtgtctggggattgaaaaaaaattttgctttattggagcttttggaacgactgcagaatgggcctattggtcagtatggagctgcagaagaatccattgggatatctggagagagcatcattcgttgtgatgaagatgaagctcaccttgcctctgtatattgcactgtgtgtgcaactcatttgtgctctgagtgttctcaagttactcattctacaaagacattagcaaagcacaggcgagttcctctagctgataaacctcatgagaaaactatgtgctctcagcaccaggtgcatgccattgagtttgtttgcttggaagaaggttgtcaaactagcccactcatgtgctgtgtctgcaaagaatatggaaaacaccagggtcacaagcattcagtattggaaccagaagctaatcagatccgagcatcaattttagatatggctcactgcatacggaccttcacagaggaaatctcagattattccagaaaattagttggaattgtgcagcacattgaaggaggagaacaaatcgtggaagatggaattggaatggctcacacagaacatgtaccagggactgcagagaatgcccggtcatgtattcgagcttatttttatgatctacatgaaactctgtgtcgtcaagaagaaatggctctaagtgttgttgatgctcatgttcgtgaaaaattgatttggctcaggcagcaacaagaagatatgactattttgttgtcagaggtttctgcagcctgcctccactgtgaaaagactttgcagcaggatgattgtagagttgtcttggcaaaacaggaaattacaaggttactggaaacattgcagaaacagcagcagcagtttacagaagttgcagatcacattcagttggatgccagcatccctgtcacttttacaaaggataatcgagttcacattggaccaaaaatggaaattcgggtcgttacgttaggattggatggtgctggaaaaactactatcttgtttaagttaaaacaggatgaattcatgcagcccattccaacaattggttttaacgtggaaactgtagaatataaaaatctaaaattcactatttgggatgtaggtggaaaacacaaattaagaccattgtggaaacattattacctcaatactcaagctgttgtgtttgttgtagatagcagtcatagagacagaattagtgaagcacacagcgaacttgcaaagttgttaacggaaaaagaactccgagatgctctgctcctgatttttgctaacaaacaggatgttgctggagcactgtcagtagaagaaatcactgaactactcagtctccataaattatgctgtggccgtagctggtatattcagggctgtgatgctcgaagtggtatgggactgtatgaagggttggactggctctcacggcaacttgtagctgctggagtattggatgttgcttgattttaaaggcagcagttgtttgaagttttgtggttaaaagtaactttgcacatagtatgttttaagaaattatacatctcaaaagatggtaatttaggatgcatatatatatatatatatataaaggaatcttggattgggaattcagtactttgctttaaaaaaattttgtggcagaattaaatttctaattgagcagattagattgaattaaatagaaacttattgaatatacattcttttaaaaagtatatttgttatttaagtttttcagataatatgtgaccaatatactgggaaagaggtagtcacagagaaagggtaagtgaaggtttattctttcagtgaaaaaagaatagccaattgagtgcctaatgagacctctgtgtgaagcaagtgaagtatagctgcttcttttaacctgccttttcactgaatgttggcagcatttagtagtagaaatgacagttgcttaatgaaatagaatccaaactacatatttggataataggattactttatgtttatgttcagagttaacagaacacctttaatgctaagaactataaggtacagaaaattaatactttatatagtgttttattaactttctcctacagcattttgtataaaacacaatgagggagtgaaatgttacccaattaggcttgtcaggttagtaataaactgaacagtaataaaactgtggaagtaattggatctgaatttatgaaagacccatttccaggactgaacctaggtcagagctctaaattggtccttctatttttcaacaaatttaaagtaatatttctttctaatataatattgcatcctttgtgggaatgactataggtaaaatgtagtaagtaacgcagaaccagggttggctttatttaaaagctagtgacctaaatagaaagcgaacttcaagagaagttgtaagtacagtggcaaatgcttattacttacttcaaactgtttcccaaaataagtgcatttattttgacaataaaacttaaggctgttcatgagaaggccttgaaaagttactctagaggaaaaatgtctaaagaaaaaaaaaattcaaaaagtttacattaattattcagtgttgtgagtaaataaaaatgtgtgctctttactgtttttcatttttaaagaatattattatggaagcacgatttatttaaataggtacattgagacttttttttttttaatgttctgatacattaggatgaagttaaatcttaaatcttattagttgaattgttgtaaggacagtgatgtctggtaacaagatgtgactttttggtagcactgttgtggttcattcttttcaaatctatttttgtttaaaaacaatacaagttttagaaaacaaagcattaaaaaaaaagcctatcagtattatgggcaatatgtaaataaataaatgtaatatttcatcctttatttttcaggtaaaaggtcatgctgttacaggtgtagtttgtgtgcataaataatacttccgaattaaattatttaatatttgactgatttcaataactgtgaaaaataaaaaaggtgttgtattgcttgtgagaacttgaactgtttactagttaattgaagaaaaagtgtaacactaaggtgaacttgcttcccttttcactaattttgctaaactttgtaatgcacattcttagcatataactgaacacagttgaaaaattgtgcctgattataatgtatgtataatggtaggtgtttgtgtgtgattcatttttaaagaaatatttttctcaagctcctattactatttgtggttgtattatttcactaatcattagttaagactgtgctagtcttccctgggaaactaagaagagagcttttttatatacagtatattagaattttcctagtagctgaatttctgtattaggtctaaatattactgtatgttatataaagcaggtatgtcaagtgtatagccgtagtctataattcaggaatgctttataaccatcagaagccattatttgcactacatatatgataagtatagacagcaataaaatgttaagatcatttttaagaa

SEQ ID NO: 239 - DNA, 2896 bp, Homo sapiens
  source 1..2896: mol_type = genomic DNA
aaaaagatgtgatcaagagtgagttgggttggaggcagggactgctctggattaaatggccaagaaaggccatgctgaggtgtaaactgagccctgaaggaaaagtattccaggcaaagtgcaaaactctgaggcaaaaacctctttggaatgtatgagggaggttcagggaagcaaggaggagaggaaagaatccaagtcccgaggtacaggagaggacaagaagtagatcttgcagagctgctagtaagcggcatcccacctaacattttgagggccagaagtagccacagagcccctctcacgcaagggagtaatgtctatatgctttttttttttttttgagacggtctccctttgttgtccaggctggagtgcggtggtgcaatcttgcctcactgcaaactccacctcctgtgctcaagcgattctcctgcctcagtctcccatgtagctgggactacaggtgtgtgctaccacacctgtctaatttttgtacttttagtagagacagggtttcaccatgttgcccaggctggtctcaaactcctgacctcaagtgatccgcctgcctcggcctcccaaagtgctgagattacaggtgtcagccaccgcgcccggcctgatatacacttttaaggctccgggctgtccatgaggatcaagcgtggaagtaggtctacagaaaaggctgccgcagttcacccatgacaggtgatgacagtctggacatagggaggatggagagaagtcgtgcgccctggcagtatttcaggagccaactagtggagccgggacgcgagaaatagaggaaccaagaagccataaggaggaggaagagcagcgggtaggtcaagatgccacagccgcaggaggggctgttggggtcggggttacccccatccctgtgcaggcggacttggcgtctgaggacagagtccagaccacaaggatctggagctcaggagagactcgtgggccacagcccgagaaagcgctgggaatccaaatactatggcgattggcagtcgcgtaggcgaggcgggctagagacccgcccggatttaggcgcgagccacctccaggggcggggcccaggccgcactgcgcaggcgcggctaacccgtttccatggctgcgagaactgacgctccccaaccgtcccgcaactgtcctgtcccagactttggcaccgtcggggtccgtcgtccccgaatgtgacagcatccccaccccggctgctgcccaggatccgccggaccccggcctcgatatgggagacctggaactgctgctgcccggggaagctgaagtgctggtgcggggtctgcgcagcttcccgctacgcgagatgggctccgaagggtggaaccagcagcatgagaacctggagaagctgaacatgcaagccatcctcgatgccacagtcagccagggcgagcccattcaggagctgctggtcacccatgggaaggtcccaacactggtggaggagctgatcgcagtggagatgtggaagcagaaggtgttccctgtgttctgcagggtggaggacttcaagccccagaacaccttccccatctacatggtggtgcaccacgaggcctccatcatcaacctcttggagacagtgttcttccacaaggaggtgtgtgagtcagcagaagacactgtcttggacttggtagactattgccaccgcaaactgaccctgctggtggcccagagtggctgtggtggcccccctgagggggagggatcccaggacagcaaccccatgcaggagctgcagaagcaggcagagctgatggaatttgagattgcactgaaggccctctcagtactacgctacatcacagactgtgtggacagcctctctctcagcaccttgagccgtatgcttagcacacacaacctgccctgcctcctggtggaactgctggagcatagtccctggagccggcgggaaggaggcaagctgcagcagttcgagggcagccgttggcatactgtggccccctcagagcagcaaaagctgagcaagttggacgggcaagtgtggatcgccctgtacaacctgctgctaagccctgaggctcaggcgcgctactgcctcacaagttttgccaagggacggctactcaagcttcgggccttcctcacagacacactgctggaccagctgcccaacctggcccacttgcagagtttcctggcccatctgaccctaactgaaacccagcctcctaagaaggacctggtgttggaacagatcccagaaatctgggagcggctggagcgagaaaacagaggcaagtggcaggcaattgccaagcaccagctccagcatgtgttcagcccctcagagcaggacctgcggctgcaggcgcgaaggtgggctgagacctacaggctggatgtgctagaggcagtggctccagagcggccccgctgtgcttactgcagtgcagaggcttctaagcgctgctcacgatgccagaatgagtggtattgctgcagggagtgccaagtcaagcactgggaaaagcatggaaagacttgtgtcctggcagcccagggtgacagagccaaatgagggctgcagttgctgagggccgaccacccatgccaagggaatccacccagaatgcacccctgaacctcaagatcacggtccagcctctgccggagccccagtctccgcagtggagagcagagcgggcggtaaagctgctgaccgatctccctcctcctcaccccaagtgaaggctcgagacttcctgccccacccagtgggtaggccaagtgtgttgcttcagcaaaccggaccaggagggccagggccggatgtggggaccctcttcctctagcacagtaaagctggcctccagaaaca

SEQ ID NO: 240 - DNA, 6087 bp, Homo sapiens
  source 1..6087: mol_type = genomic DNA
gttcctaaacgccagctcggagcaatccccttgggctggagccaaatccctgctgtgattttaaggaagaccggcaggtccgggcccccaagggtcaaccccacacacatccccgcactttcctgtatgcaggcctgcgagcgtagagggagtggaattcacagcctccccacccatccgcaggggtctcctgggaggaacccaccagcgataggaacactgaagctgggctacggcgtccgcccgagccttttcttaaaggcgccgaccccggaagcggggcgtccgagggagcgcgcgacgggccacgcacgtccgggcgtccagttcggggcagcttctccggctggtgggtgggtggggcagcctttcaggcagggtggcaaccaactatatctgaggaccagagccattttggggcaccagagcttgtgacctctccatctccacccagctgggtccaggggccactctcagcactcacctcagcagctgacatcataaagcagacttgggaacctggaagcactctggagaacctttccctgagacatggagctttggggccgaatgctgtgggccctcctgtctggcccagggaggaggggaagtacccggggctgggccttcagctcatggcaaccccaaccacctctggctgggttatccagtgccatagaactggtcagccactggactggggtctttgagaagaggggtatccctgaggcccgggaatccagtgagtacatcgtggctcatgtccttggagccaaaacatttcagagcctgaggccggcactttggacccagcccttgacctctcagcaactacagtgtatccgggagctgagtagccgtcgattgcagaggatgccggtgcagtacatccttggagagtgggacttccaggggctcagcctaaggatggtgcccccagtgtttattcctcggccagaaacagaggaactggttgagtgggtgctggaagaggtggcccagaggtcccatgctgtgggatccccaggcagccccctcattctggaggtgggctgcggatcaggagccatctccctcagcctgctgagccagctcccccagagccgagtcattgctgtggataagcgggaagctgctatctctctgacccatgagaatgctcagaggcttcggttgcaggacaggatttggatcatccacctcgacatgacctcagaaaggagctggacacacctgccctggggccccatggacctgattgtcagcaaccctccctacgtcttccaccaggacatggagcagctggcccctgagatccgcagctatgaagaccccgcggccctggatggtggggaggagggcatggacatcattacccacattctggccttggcaccccggctcctgaaagactctggtagtatcttcttagaagtggacccaaggcacccggagcttgtcagcagctggcttcagagccggcctgacctgtaccttaatcttgtggctgtgcgcagggacttctgtgggaggccccggttcctgcatatccggaggtctgggccatagcatggctgccctgtggatgccttgtcagtgccgccagcctgaccagaggggaggtggatggcactttccagagcccaggttcttatggcatttcccagggttctgtgatttccccatgctctgcatttctaggatatttctaggacacctggattggctccatcacatcagagtggctgagggcagttgctctgtgttggtgaaattgctgtgggggtatcgggggatatggccagtaaagtattgagagactaacaaatggtgacctaatgttttgtccatgacttgcaggtcccctgacccccttactcccaggtagcactggggcaagggtttccttctgccccagcagggctggccgtcagtcccctgcttggtagtggtgtgggggtgcagtgtggaggaaggcacgtgagtcctcactcctggccttggataccatgggtcctggcatagagcagctcactcccagggattgattagtcctccactgccctgggtgcatgcgtacacaattccctggccaagcctggctcgagcacaggaagctcatctgcgttttggctcaaggatgactgcctgctttctggaggggagggtctggaggtctttgctgcacagttcctgggtcgcacatccacgttcatttaactgaaggcttgagccagtgaggggtgtttcctttttatccccatagcttttagctaaaacatccctcccgagttgaccccctggggtttcaaataacccatgtgtccctggttggggctggggagagtgagaagctgagatactgggcacagggttgtggcctccaccccagctctggtctgtgcagactcatggccaccaggaggcctgcagatccagccttcctgtcaacagcgacaggaaatctctaggttggtgagtgctggtgatgtgagcctacatcagggtgggtcctaagaaacatggcaaaccaggctgtctcattccactagactgccccctgccaccctggcacttcccagggcctggcagtatggtctgatgggcagtatggtccaataggcagcatcctctgctgcagctgggagagctgagttccagggctgtgtcctgcagtgggaccttgggcaactcctttccctatgagaagctggctcttctgagtccagggccaacgccaactggcaacctctttactcttagtcaagtggaatgtgcatgctggcatctgaatgtccattcgccaggcatggagagcaagagaaggtatgtactgcctgaggtcacatgacagtgaccaagtggagacagtaagttagatccctccctttggggagcctatattgctggagtcatacccagcctaagtgttgccctgcactatggctggaggacacatttggtagaggtcacactgcagctcccagtgccccagtgtcctgccctgtgcccagccccagctgcatggactctgagctgcccctggcttcctttaaggaggctgctccagaaggaacctgggtggggagggcgaagggggtgcacaaccagggcaaggctccccacttccttagtcccccatgctcacagacctttgcctgctaaggtcctcaccagtattgccctttctgtctttctccttgtgccctttggctcttgctgtcttcagcagcatctcagggtagctgccctgacctcggagcagtctgtcgcccccctacacctcagccagtcctggcttccctgatggtctctccctcctggcctcaggcccattcctgaggaagggccttggcgagcttgtggatgttgcaccagaagagagtgcagtgttggagagtgacactgtcggggcagctggggccacaagcaggagccggcctcgggcacaactttctgcccagaaaaatgtgcagcttgactctgctgaggaaaaggtccaagccaagaggactggcaggcggggcctcaagcctgcagccactggcttgattgggccctggacgttgagcccagatgttggagccacaccagcctggatttcaatcccagaatctgcccctcacgaggatgtgaccttgggcagatgacttcacctcactcagccttggcttctaaggctgagaaatgggacttaatgctttattttataggatgcatgtgaggagcccatgggatgtgcctggcttggcacattgtggcatttttccttgccttcctcggagggcagacacagggaggaaggacccagtgccctcaggcgtccatctgatgcatgggaccaacataaggcaggcagggatacaaggcagtctggaaagaagggaaggcaggagtttcagtcttgggctcttgactcctcactgttgtctagagatggagccagcaggctggtagcctggcagcctacatctcccctcagcctctcctcactatggccccagtgccttgaggcccaggccagggcagccagtggctctagctcagggaaagccaggcccacctgccctatcccctcccttgctcctgaggccaaagccagagactcgaacagcctccccaccaccaccagcatatgtcaaggagcacttgcaggcagaatgggaggaggacatggagctgatggagtccaggctgtgcaagcccctgaggtcttgagagatgtgcccactgcccgtgcagcctccttcagccagagcccagagcatagacaggagtgtaggagtccctgtttgatgtactctgggagagtaattctatctcctcttctgatagttggggaaactgaggccttgtctcacagttggatgcttttcccagttgtcagtgggtttctccatgggtctcatacagctgccttattgaaataggccccgaaccccctaaatgcaaaaaatactcttttttgctcctttacccccacctggaccctgggctattggctgctcccaatccttgccccaaacacttagctggctccccatgacttaagtgtgttctcttgtgtcctatggaatccagttctgaagaggtgggggaggacaactgtgggaaaagccctgggggcccctcccaaggccccatcagtgctctgagtaggctgtcatcagaacaaagggctccactgctgacaaggtttgagaactgctggcttgaggtgagaacccctttaacctctgcgggacagcatgtctttccctatccaccttcgattcttttctcttttttttcttcattggctccttcttagtggattctcttctctactgccctgggcttcagcctttgtgcagtactctcgatgccctgaacacacaccttccctttgcccaggcggtgcaaacaatccacttcttcaagctccaacacaaatgctgcctcctttaggatgcctgctctgtgctctccctgcctcccctagcccatacctctgctggcaccttctgtaccatgccttcagaaaccttcttatccccctcatctctggggccccctgtggatctggcatacccaagttcagtaaatgtctatcagtaagctgatggtacatgcattttctagaatagagctgggacttcccatgtggcccacatctgacctggcagcccatgtattccggtcattagggatgggaagccatgaggacctggccttctgcccgacccaggcagccattcaagttgagcaatggccacttcgaagactcaagtgcacctgatccctgcgcaacagccacaccaggagaacaggctgtccttggcggcagtaggagcaggcgccaggtttcctggagctcttggcttcagccagcccccagccagagtcctggctaggacagtgacctgatctcctcctcatgaccttctgccctggacaagccccctgaactggatttgggactgtcaaagcaactctacccctgctctggtaggctgaacagtgaccccccaaaatggcagtgtcttaatcacctaaaccttaacatgtgactatattaccttcacatagcaaaatggactttgcagatgtgattaaggatcttgagatggaaggagtatcctggatttttcaggtaaactgagtataatcacaagggcctctgtaaaggaggcaggagtgtcagagtgacggaagaaaatgtatgtaacaatggaagcagaggtcagagtgatgcaattgctggaggaagagccatgagccgaggaatgcagacagcctcttctcctctggggcctcaagaagaatgcagtcctgccaataccttgattttaagccctgtgaaactgatttcagattgctgacctccagaacagtaagatcataaatttgtgttgttttcacatgtgtgaaaacacatgtgtgataatttgttacagcagccacgggaaacgaatatagattgtggtgcccaaattagagtgctgctgtaacacacgcctactgattgaagtggctttggaattgcaacgtggaaatgggcagaggctggaagaattttgagagtcatgataaattgccttaaccacc

SEQ ID NO: 241 - DNA, 4660 bp, Homo sapiens
  source 1..4660: mol_type = genomic DNA
aagaggccccagcagccgaagggaaaccggcgcgtcccccgcccgcccaggcgtcagctgatgggctgcctgccgaggaggccgcagcagtcgccgcgcgaacatggcggccgaaatccactccaggccgcagagcagccgcccggtgctgctgagcaagatcgaggggcaccaggacgccgtcacggccgcgctgctcatccccaaggaggacggcgtgatcacggccagcgaggacagaaccatccgggtatggctgaaaagagacagtggtcaatactggcccagcatttaccacacaatggcctctccttgctctgctatggcttaccatcatgacagcagacggatatttgtgggccaggataatggagctgtaatggaatttcacgtttctgaagattttaataaaatgaactttatcaagacctacccagctcatcagaaccgggtgtctgcgattatcttcagcttggccacagagtgggtgatcagtaccggccacgacaagtgtgtgagctggatgtgcacgcggagcgggaacatgctcgggaggcacttcttcacgtcctgggcttcgtgtctgcaatatgactttgacactcagtatgctttcgttggtgattattctgggcagatcaccctgctgaagcttgaacagaacacgtgttcagtcatcacaaccctcaaaggacatgaaggtagtgtcgcctgcctctggtgggaccctattcagcggttactcttctcaggagcatctgacaacagcatcatcatgtgggacatcggaggaaggaaaggccggacgctgttacttcagggccatcatgacaaggtgcagtcgctgtgctaccttcagctcaccaggcagctcgtctcctgttcctcggacggcggaattgcagtgtggaacatggatgttagcagagaagaggctcctcagtggttggaaagtgattcttgtcagaaatgtgagcagccatttttctggaacataaagcagatgtgggacaccaagacgctggggctaagacaacatcactgcaggaaatgcgggcaggctgtctgcgggaagtgcagcagcaagcgctcaagttacccagtcatgggcttcgagttccaagtccgggtttgtgattcttgttacgactccatcaaagatgaagatcggacttctctagcgacctttcatgaaggaaaacataacatttcccacatgtccatggacattgccaggggactgatggtgacctgtgggaccgaccgcattgtaaagatctgggacatgacacctgtggtgggctgcagtctggcgactgggttttctccgcactgatctgagagctgggcggcgtccacacctaagaacagcagctccaccaaatgaagtccctctcacgcagctccacagcgctgtctcgtgaatggacagtagccacttacaaacaaatcaacatttttaaaaagaaaatgtaaaggtgtgttttggggcatttgtggaacttacccatggggactaatatggaaaaggtctgtccatagtggttccctgaagactggaattacttcagcaaaacttccccatgaacagctaatgtgtagtgaaagaatgagctagcaaatgagttttagcggggacaaaaaatcaaacaaaaaagtgaatgcttagaaccttctcaaagcagtcacaagtacagacacttcacttagcctagggggccttccagggttcttgtggctgttgtcagagcaggagctgggggagggaagacttgttctctctttcttgaggggtggcattaggaacttacgaaaccagagacctttccctatgacttggcagtatgtgaatatcctctacacttagttattgataaacttcttaaagagatctgttattttcaggtagtgccataatctgcacttagcattggcttgcttcagttgtttctcttcccagccagtatgccacaggtgaactttcggggttgtcattaagtaagttgtgaaatttctgtaataacaaaggcagtccgcattcttccctttcccccaaattcctagggcaaaacttttttatggtgctgttaacatgggagtcacacaagccgcctgactttttctcattgccattagtaatgactgatggaaaacccagccaccactgtgatgcgaaatgatcagtctgttgcctgaaacagcccagtcctcttaactgaaacagcattctacttcttgttccaagatgagcctctgcaatattctggcaatttaatataccccctacaaaagcactccacagcttttacactattttgactttgagttataactagtattattcatgttttcataaaaagaagttagtgacccagagctataatcatccatcaagtcttccacaataattcccaactcataaattgctttcctaacaactagcaaaagctattgttcataatggcatttctaaagcttttgggcactgtgtaccaggatgaggaagagaagaaatgaggagcctgtcttttaatattccagtatttgtgtgtttgattttttttgacaacagtacatatatctatttctctagggatatggaagtaagtggagaagggcctacctttttaaaggacaaatataaaaatagcaacagtatctttgctaatcttactaatagatattgattaaaaaaaaaaaacctcagtactgcatcactgtgttgggatcataccaggacaatagggtcattccatatgataaaactaaaggactaaatttgttttataatgatgtcttagagggactgaaaggtttaaggaggcgatcaaactaaaatgtcttaatggctgtgtgacacacgtaaggaaaggaaagggggtcacgcacatcatgtactggaatgatctgcattaaacatagacttgtcttcagaaataagactgaagggttttgttgttccttagagttttcgtgttacatcacctaaagagatttcttttaaaaactttctagactctttgcaaaatgtatattactaacatagtttggaagaaaaattgagtagtggtaagttttgttcaagcacaatgttgaatgttaagcttcctgtattaattttagttcagttaatggttcagcccatacaaaggtgctatcctagggattttatgaattcctgaaaggaaaatagaatatgatcaattccttgccctgtggaagagtgcagaactgtggttttgttttcctttgacttctgtaaaatgtgaccgtttgacatctgtggtagattgaacggaatatcacagctgctgagtttactccatagctttcaaaccttttttattttaagaaattcttgaaaaaccctatgttccatgggaacataaagttattatagtgcctcctaaggggttaatataaatcaaggaggaagtttatatttaaggaagaattggagtgacgtatcttagaaaaggaaaggctgatgtttccatatagcttgctctccaccaggcctatcatttttctttttagagacaaacgtgacaggctagtcttgtctctctcatatgctaggtagcaaatggggtgatatttttatagaagtgggcaaaaattattttctcaattttactgagtaggcacagaagaaaagtacagataggctgatggttattgccttattttgactgcatttctcttaaatggatcatttaaattagttcttcaagtaacagtttactggttgttccattcctgaatatgcaggctaatttgtacagatagggattaaggaatacagactattagagaagatccttatatttacatctagtatatatgtggtaaggaaatgccgattcttcattataaacaagttttaaaattgttctttcttagttcaaatgatagcaatacccctatagcattaggtagaaacaaattattcattacatcgtaaatctctttactatgtcctagctctgtcctgctacctaaaggatataaagaaatactattgctctagaatgtattactttgttctcccatgaaagaattcagtttgttagtacctatatttttaaactggtgaaactgacccaaatatgtaataaataccatagtagctcagacccaaggagatatttttctaaaatcagttttcgttaaagtacttctacttccgttattggatatggtatctcctaaagtgtaaaaaaaatctgttactatatagtgataaaccatctgctcatcgtaagtgtaaggcttaacaaataagtaatacatgctatatttattcaagtgtctattgcttaattgttaattgtgagcagatttattgaatgcctattctattttctgcagtttacaatacaataactctttgagtaagttgaagtttaattgtgcaacaaatttgtattagagtacaatttaaagtgtttttctctatagccttttttgactggggaagcaaggggtaatgttaattagtacactttgttcttgtactagctatgtttctataagatatggtgccctgtgtatcccagagatgctagaaaactgttctttgctcctatttgtgggttctgtttttgtgggtttttttttttgagaaaatgtacacaataaaacattccttgcttgttac

SEQ ID NO: 242 - DNA, 2185 bp, Homo sapiens
  source 1..2185: mol_type = genomic DNA
cgcgcggtgaccgttggcgccgaggggaggaggcagccgccgccgccgccgccgccgccgccgccgccgccgccgccgttgcgcagatccgggccgcggctgtggggagggcgacggagcgggtgaccttccggaggcgggagcgagcgaggaggcccgggagcgccgagcgtcgccgccgccgccgccatgaacaactcgggcgccgacgagatcgggaagctcttcgtgggcggtcttgactggagcacgacccaagagactctgcgcagctacttttcccaatatggagaagtcgtagattgtgttatcatgaaagataaaaccaccaaccagtctcgaggctttgggtttgtcaaatttaaagacccaaactgtgtggggacggtgctggccagcagaccgcacacgctagatggccgaaacatcgaccccaagccatgcacaccccgggggatgcagccggagagaacacggccgaaggaaggatggcagaaaggacccaggagcgataacagtaaatcaaataagatatttgtcggtggaattcctcacaattgtggtgagacagagctcagggaatacttcaagaagttcggagtggtcacggaggtagtcatgatctatgacgccgagaagcagaggccccgaggttttggatttattactttcgaggacgaacaatcagtggaccaggctgtcaacatgcattttcacgacatcatgggcaaaaaagtggaagttaaacgagctgagcctcgggacagcaagagccaagcgccgggacagccaggtgccagccagtgggggagccgggttgtgcccaacgctgccaatggctgggcaggccagcccccgcccacgtggcagcaaggatatggcccgcaaggaatgtgggtgccggcaggacaggcgattggtggctatggaccgccccctgcaggaagaggagcccccccgccacccccaccgttcacctcctacatcgtgtccacccctcctggaggctttccccctccccagggcttccctcagggctacggtgccccgccacagttcagttttggctacgggcctccacctccaccgccagatcagtttgcccctccgggggttcctcctccaccagccactcccggggcagcacctctggctttcccaccgcctccgtctcaggctgccccggacatgagcaagcccccgacagctcagccagacttcccctatggtcagtatgcaggttacgggcaggacttgagtggcttcggacagggcttctcagaccccagccagcagcctccttcctacgggggtccctccgtgccagggtcggggggcccccccgccggcggcagcggctttggacgagggcagaaccacaacgtgcaagggttccacccctaccgacgctagcccgcggcgccgcgacgtctgcacggcccagacccaggattccaaacttgtgaactcgtgacaatcacaaacttggcggcaaagtggcgactcaaccttgggggggggggcggggggagggcgcgaggcttttggagcggctgtgggtgtcgtctggactgaggtttttaaatatttctttctctaacccatcagcacaataaaaaaaagtcactggttcaacaacagggtttaaaaaaaatgtcttcagctttaattcaaaacttcaggtttctttttcttccttttttttggaaattattttcctgagccttttgttttacggtatattgtaaacttttatgttaaagaaaaaatatacatttacaaattgtgagatttttaagagaaattttctacgatgtatactggcttattttttaatttaaaacggggtttccgtcggcactggtggagggggtgcgctgttagtcccctcgctcctggctttgggggttgggacttggtggtccagaaactctgggagcttctagaagaaatctactgagtgtatttctgttttttgtttaattccttgcttttgtcgactgacctgcttggtagtgtctgaggtgaactgtgggggttgcgcacagccagccgcgtggatcccacgcagcgctgaaccgaaccgagtaggaagcctttctccccaggcacgtggcttcagggcgtttcccattgaccagtttgaccctggtttgaataaagagaagtgcgtttggattagaaa

SEQ ID NO: 243 - DNA, 492 bp, Homo sapiens
  source 1..492: mol_type = genomic DNA
atataaggctaggggcgggcgccgctcttttgtttcttgctgcagcaacgcgagtgggagcaccaggatctcgggctcggaacgagactgcacggattgttttaagaaaatggcagacaaaccagacatgggggaaatcgccagcttcgataaggccaagctgaagaaaacggagacgcaggagaagaacaccctgccgaccaaagagaccattgagcaggagaagcggagtgaaatttcctaagatcctggaggatttcctacccccgtcctcttcgagaccccagtcgtgatgtggaggaagagccacctgcaagatggacacgagccacaagctgcactgtgaacctgggcactccgcgccgatgccaccggcctgtgggtctctgaagggacccccccccaatcggactgccaaattctccggtttgccccgggatattatagaaaattatttgtatgaataatgaaaataaaacacacctcgtggca

SEQ ID NO: 244 - DNA, 2887 bp, Homo sapiens
  source 1..2887: mol_type = genomic DNA
atcatacacgtctaagggcagagtgaacttccatcctgaaggctccgcgcttagttttcgcagattaatagctcaccaagaatttatcatcttttctttccactaactcgaaaccaatctaaattctttccaaacatcttctcaacgtagtctcctttgatgaaatttactgtttcggattctagacttggctcttaccaacttaactttcggttaatagcttaatacctctgattcaggtttttgcatttgtcaactaccattgaatgataatttcaatgagttcgttcttatgaggatcaaatgaaataacatctgtgaaaacctcttacaaagtttaagcaaatagtgctaagcaatcaccaagcgttaactactaattttcagtgttaggcattagaactgtcatggcgccttcaagaagaggtaggaggccctctctgcgtccagcagaaccatctggggcacctggaccgggcggtggggtggacagagagacgagccccagctgggaccgaaaacatcgacccctccgagaggtctcggccggaccggcgcaaggggaggagagcgggtggaagcccaccccagcgaacgcccgagggccgggccccgcccacccagaacgtcacccaatggaaacctgccggcggtgcggcaccgcccatcgttggtccgggcgccgcgagggcggggcccgcagttcggttgcgctgcggagcgcagctgtgagggagtcgctgtgatccggggccccggaacccgagctggagctgaagcgcaggctgcggggcgcggagtcgggagtgcaggcctgagtgttccttccagcatgtcggagggggagtcccagacagtacttagcagtggctcagacccaaaggtagaatcctcatcttcagctcctggcctgacatcagtgtcacctcctgtgacctccacaacctcagctgcttccccagaggaagaagaagaaagtgaagatgagtctgagattttggaagagtcgccctgtgggcgctggcagaagaggcgagaagaggtgaatcaacggaatgtaccaggtattgacagtgcatacctggccatggatacagaggaaggtgtagaggttgtgtggaatgaggtacagttctctgaacgcaagaactacaagctgcaggaggaaaaggttcgtgctgtgtttgataatctgattcaattggagcatcttaacattgttaagtttcacaaatattgggctgacattaaagagaacaaggccagggtcatttttatcacagaatacatgtcatctgggagtctgaagcaatttctgaagaagaccaaaaagaaccacaagacgatgaatgaaaaggcatggaagcgttggtgcacacaaatcctctctgccctaagctacctgcactcctgtgacccccccatcatccatgggaacctgacctgtgacaccatcttcatccagcacaacggactcatcaagattggctctgtggctcctgacactatcaacaatcatgtgaagacttgtcgagaagagcagaagaatctacacttctttgcaccagagtatggagaagtcactaatgtgacaacagcagtggacatctactcctttggcatgtgtgcactggagatggcagtgctggagattcagggcaatggagagtcctcatatgtgccacaggaagccatcagcagtgccatccagcttctagaagacccattacagagggagttcattcaaaagtgcctgcagtctgagcctgctcgcagaccaacagccagagaacttctgttccacccagcattgtttgaagtgccctcgctcaaactccttgcggcccactgcattgtgggacaccaacacatgatcccagagaacgctctagaggagatcaccaaaaacatggatactagtgccgtactggctgaaatccctgcaggaccaggaagagaaccagttcagactttgtactctcagtcaccagctctggaattagataaattccttgaagatgtcaggaatgggatctatcctctgacagcctttgggctgcctcggccccagcagccacagcaggaggaggtgacatcacctgtcgtgcccccctctgtcaagactccgacacctgaaccagctgaggtggagactcgcaaggtggtgctgatgcagtgcaacattgagtcggtggaggagggagtcaaacaccacctgacacttctgctgaagttggaggacaaactgaaccggcacctgagctgtgacctgatgccaaatgagaatatccccgagttggcggctgagctggtgcagctgggcttcattagtgaggctgaccagagccggttgacttctctgctagaagagaccttgaacaagttcaattttgccaggaacagtaccctcaactcagccgctgtcaccgtctcctcttagagctcactcgggccaggccctgatctgcgctgtggctgtccctggacgtgctgcagccctcctgtcccttccccccagtcagtattaccctgtgaagccccttccctcctttattattcaggagggctgggggggctccctggttctgagcatcatcctttcccctcccctctcttcctcccctctgcactttgtttacttgttttgcacagacgtgggcctgggccttctcagcagccgccttctagttgggggctagtcgctgatctgccggctcccgcccagcctgtgtggaaaggaggcccacgggcactaggggagccgaattctacaatcccgctggggcggccggggcgggagagaaaggtggtgctgcagtggtggccctggggggccattcgattcgcctcagttgctgctgtaataaaagtctactttttgctaaaa

SEQ ID NO: 245 - DNA, 3785 bp, Homo sapiens
  source 1..3785: mol_type = genomic DNA
gtcgatttcacgcaggttctatagaatttgccaagactgctggcctgttttctaccctgattccttaggtggcttctgggacagaattacggttctctaagtatttgcttgcaggatttctataattggcctgatgaatcctttgatgaaatggacagtacactagctgttcaacagtatattcaacagaacataagagcagattgctccaatattgacaaaattcttgaaccacctgaaggccaagatgaaggtgtgtggaagtatgaacatttaaggcagttctgccttgagctaaatggacttgctgtcaaacttcagagtgaatgccatccagatacttgcactcaaatgacagcaactgaacaatggatttttctttgtgcagctcataaaactccaaaagagtgtcctgctatagactatactagacacacacttgatggtgctgcatgtcttctgaatagcaataaatattttcccagcagggttagcataaaggaatcatctgtagcgaaactaggatcagtatgccgtaggatttacagaatattttcacatgcttattttcatcatcggcagatatttgatgaatatgaaaatgaaacatttttgtgtcatcggtttactaagtttgtgatgaaatacaatttgatgtccaaggataacctgattgtaccaattttagaagaggaagtacagaattcagtttctggggaaagtgaagcatgaagggaatcataggaaaaatgtactgatcatataattaacattatgtactgtatatatcattttagacacatcaatcatgtatccatattatagcttctttgtttagtataggtttttgtatgctgggtttgccttttaaaatgggaaatactttttaagttattcataagctgtatattcaccagtgtggcactcatggtttttaaataagattagtattatctgtttataatgcctgttaataaaagaatttacagtttggtaaaattgctgctaaacaatcattggatcacaatcctcatcagacaaacccatctgtaaaaaaaatgagggagagcttgaggtttcacacaagccatttactaaagaggtagaaatgttttctattggttttaccttgagtttagatatcctaaaaaattctgtagtacgtagttttgtcttacctgttaactttccccaattgagataaaagtgttttaaaattctgtttatagtttttgatatgcatatataattatgtgtatatctaaatacaaatgcaaatgaagcattagtaatacttaaataattttactgtgctacataaagtataacatacttggaaaggatttaccgttctgcaacaacggactggtacatacaggatgatcacaatggtaaggcacataaattattttcccactggaaacctgccctgtccaccccttctcatttcccttaaccttatcttcaaactactttagctgagaagcttttcaccagactgagttagtggtggcttatacctatttatatttgtattaattgcttacagattatacctcatattagcaattacattacactacaagaaaatgtatttgcataggctcttgcttatctttgttttgcaaaattgttctacttagaaaacagtccttaaaatagtttgactcttcctgttagtaatatattaatctttcatttaaccagctaggcagcattaaatagaattgaagaaataccatagtatttattttacaccccctctcccacgaagtttatgtttggattacatgcacgtgtgagattatttgcaataattcataggttccaagggtgttgatgaatagtcatacatttttttggactttgttataattcattgtggtaagaatgattgaaatgcagatttaacaatcttataatctattgaatgccatttttgataaagcactggaggtcttattgccaaactgattgtaatgaggcagtaagggtgaaaacattgtacatgttgtgaagaaagtatttaaatccaacttttgaacagatttaacaaacatgaggaacttttttatttagaaggataattttgaagatgaaaatgtattcatcttaattgttttttcaaatttaagggaataatttataccatcttttcagacaagaatgtacagcaaaaataaggggaacagtagtatactgagagtgtgtgtatgtatagtgtatgcctttccaagcttgccagtctttttggctttgaacactgcccatcagctacagtcattactgttccccaacccacaactatcttttaagaagtcttagttcacagtgaaaggaatgatgactttgaaattatggatttatattaatggcactataaaccaatggtaatggtaatttttaaacttgctaaatattgagaaactaaactactaagttaataaattatatatagcagtgtagctgttctctctagatggtgtctcacaatggatttctgttgcttgactattttcttagtgaatatttatactaaggtagtgactgagatttggtgatctggctgagtattttgaaacacattttgaataatatggcttagtgttaacggggacttaaatatgatttttttttcttactcatttcaccttccctgtactgtatgtttggaattgatcataaaacatctccaaaagaaaataatcagtttgtagtcttgcttttgtattcatgttgataatcttactaattgtgaagttgattcactactatactaggtaagacctaagtgaaacagttcctgtttttccttaatactgttttcagaattttgaaaatgtacttatatatacataaatactactaaaaaattaatgagcctggcaaaccattgatttataaaagtaagtgttctaagaggggaacaagacagttctgtgtgataaggaagttaggctccactttttgtttgaattaccctatgtatatccgaaggtaaacttaggcttttctttccaaaagatcgtatagtcaattcattctttttctcctatcacatctgggaaagtagctaacttttaactatttatgttcccataagtaacccttcttttgtgtgtatacatttccttttctctgacttgagatgtcaaatttggatttctagaacagtttctcagttaaattcttgatgacttaacaacttttactatcagaatacaattagaaatccttggtcaggcacaggggctcacgcctgtaatcccagcactttgggaagccaaggcagacagatcacctgaggtcaggagttcgagaccagcctgaccaacatggagaaaccctgtctctactaaaaatacaaaaattagccgggcgtggtgctactcgtgaggctgaggcaggagaatcgcttgaacccgggaggtggaggttgcggtgagctgagatcgtgccattgcactccagcctgggtaacgagcaaaactccgtctcaaaaactccgtctcaaaaaaaaaaaatccttgattacattgttagtaaggactgtgttacgattataaacacatttattggttgatgtcaaattcactgtaatagtagaactaagttttttatgtgagtactttgccctactgtctatatgatgacatcttttttgagcagctaaattttaaattgtatatactttattttgtgaatccttgttgaatgtgctaaaggtttctttgtgtagttcttccatgctatgcgaatattttagtaaaagtagttgattttta

SEQ ID NO: 246 - DNA, 5900 bp, Homo sapiens
  source 1..5900: mol_type = genomic DNA
aaagttcatccccccagaatgaaaatgaggacatttgagaaggtgatttaaggtgtggacatttgagaaggtgtcctatcaaattagtaaaccaaaggaaaagtactgaatagattaatccaaaacacttactgttttttaaacgaagaggatttcaccttgacagaaaaacaacttttattcaatatgtatttcctgaaattaaagagacaagtacagactgaaaggaaaatagattcgtaaataagctacgtcaactctatcctgctgaggatagctcagtgatgttaaatcctttacaaatccctggttgtcttcctacagacaagactgctttttgatgggactgatattaagagaaataggacctttggggcattcaactccttgataaaacttaaaagtatcggcatgagtggcttaacagaggaaataaagaagttttcaactaaatccaaaagtgcggtcattttctttactgctgttattttaaaaacctcttcataaccattgaaaaagaatcgacaactattttaaaagattaaagaaaggcagatgtctgcaaataattcccctccatcagcccagaagtctgtattacccacagctattcctgctgtgcttccagctgcttctccgtgttcaagtcctaagacgggactctctgcccgactctctaatggaagcttcagtgcaccatcactcaccaactccagaggctcagtgcatacagtttcatttctactgcaaattggcctcacacgggagagtgttaccattgaagcccaggaactgtctttatctgctgtcaaggatcttgtgtgctccatagtttatcaaaagtttccagagtgtggattctttggcatgtatgacaaaattcttctctttcgccatgacatgaactcagaaaacattttgcagctgattacctcagcagatgaaatacatgaaggagacctagtggaagtggttctttcagctttagccacagtagaagacttccagattcgtccacatactctctatgtacattcttacaaagctcctactttctgtgattactgtggtgagatgctctggggattggtacgtcaaggactgaaatgtgaaggctgtggattaaattaccataaacgatgtgccttcaagattccaaataactgtagtggagtaagaaagagacgtctgtcaaatgtatctttaccaggacccggcctctcagttccaagacccctacagcctgaatatgtagcccttcccagtgaagagtcacatgtccaccaggaaccaagtaagagaattccttcttggagtggtcgcccaatctggatggaaaagatggtaatgtgcagagtgaaagttccacacacatttgctgttcactcttacacccgtcccacgatatgtcagtactgcaagcggttactgaaaggcctctttcgccaaggaatgcagtgtaaagattgcaaattcaactgccataaacgctgtgcatcaaaagtaccaagagactgccttggagaggttactttcaatggagaaccttccagtctgggaacagatacagatataccaatggatattgacaataatgacataaatagtgatagtagtcggggtttggatgacacagaagagccatcacccccagaagataagatgttcttcttggatccatctgatctcgatgtggaaagagatgaagaagccgttaaaacaatcagtccatcaacaagcaataatattccgctaatgagggttgtacaatccatcaagcacacaaagaggaagagcagcacaatggtgaaggaagggtggatggtccattacaccagcagggataacctgagaaagaggcattattggagacttgacagcaaatgtctaacattatttcagaatgaatctggatcaaagtattataaggaaattccactttcagaaattctccgcatatcttcaccacgagatttcacaaacatttcacaaggcagcaatccacactgttttgaaatcattactgatactatggtatacttcgttggtgagaacaatggggacagctctcataatcctgttcttgctgccactggagttggacttgatgtagcacagagctgggaaaaagcaattcgccaagccctcatgcctgttactcctcaagcaagtgtttgcacttctccagggcaagggaaagatcacaaagatttgtctacaagtatctctgtatctaattgtcagattcaggagaatgtggatatcagtactgtttaccagatctttgcagatgaggtgcttggttcaggccagtttggcatcgtttatggaggaaaacatagaaagactgggagggatgtggctattaaagtaattgataagatgagattccccacaaaacaagaaagtcaactccgtaatgaagtggctattttacagaatttgcaccatcctgggattgtaaacctggaatgtatgtttgaaaccccagaacgagtctttgtagtaatggaaaagctgcatggagatatgttggaaatgattctatccagtgagaaaagtcggcttccagaacgaattactaaattcatggtcacacagatacttgttgctttgaggaatctgcattttaagaatattgtgcactgtgatttaaagccagaaaatgtgctgcttgcatcagcagagccatttcctcaggtgaagctgtgtgactttggatttgcacgcatcattggtgaaaagtcattcaggagatctgtggtaggaactccagcatacttagcccctgaagttctccggagcaaaggttacaaccgttccctagatatgtggtcagtgggagttatcatctatgtgagcctcagtggcacatttccttttaatgaggatgaagatataaatgaccaaatccaaaatgctgcatttatgtacccaccaaatccatggagagaaatttctggtgaagcaattgatctgataaacaatctgcttcaagtgaagatgagaaaacgttacagtgttgacaaatctcttagtcatccctggctacaggactatcagacttggcttgaccttagagaatttgaaactcgcattggagaacgttacattacacatgaaagtgatgatgctcgctgggaaatacatgcatacacacataaccttgtatacccaaagcacttcattatggctcctaatccagatgatatggaagaagatccttaatcactgagctaacctaaataaggaaggatttcattttatggactgatattttgctgtgtaacttgttctttgtagattgtcatctgcagtgctgcaaagatatgaagaaatatgataacgaataagtgacaccagtactgtagttcataatgagtaggtacaggcgggaaactgaataataagaagtcataatggaatcaaggtgaagctttttataaacttttttagcctaagcaataactggttttgtattttttcttaatccttcactttaatacaataggctcacttaatttgtcttcccatttctctttatatatatatatataaatataaatatatgtttgtttgtttttttaatgaaaaacaagtcaagctagcatccagttactatatagcttggctaaattatacaagacttacaagattgattactcgacaggcttgtatttaagaggtaactgtgaggttaccattatgtgatgttactataaggacttttaacattggtttaacaaaccatagaggcattgaagggtttttcttagatgcctagaaaaagcgcactgggctgttttacctttcttttttaggtcaatcaagactccaaaatagtgattcctaacctttttggagttgctctgctactctgaatatgttctatacagcataaggattgtcaccttctgtgtgttgcaacagcttctaagataattagggacaaatgatgttacaaaaggaagagtactgctggtctaagtgctgagttgtatgtctttgcatagctccactctgctgctaaatatgcatgttctgactgacaccatcttgatgccagtactggattccagcattcagcaggtgcagatctcggctttacacaatttatctttacctagggttcagtcagtaatttctgctttttagcagggccagtgcagggtcagttaatgctacagttactgtatagcaaacagtatccttttttctccttcccctagcctattgggctttgcagatatctggagtgttttaaagtcaattattttaagcagtttgaggggatgtgtaggagtggagcatgaaacagtttataaggctggggctgtattatcagcacagcaaattaaagaatgaaagaagtacttctttttacatttcagctccagcagccagctatttaaaaaatatttttaaatatcttccccaaagtttaagatgtgggaccatctacttgtaagaaacagtggcttatttcttcatttctcagtaatcattgtaaacctttttttttttcttctccactctaacaaaagtaaaagaacaaaacttttgctgaggtcttggactccactacttgttagttatgttggcctggacagatggcaggtctgtcggcagttcctcagtctgtaaaatgaagattatcattcttgcctctccctttgtcacagtgttgtcgtgaagatcagatatgtatgaatgcagtcaaataaactaaaaactaggaaagtgttaactatcgttgcccaccgaatttgaggtagcaaaaaaaaaaaagaatgttctggtacatgaacagactgagaaggcctttcgacatccctgaagctagtctcctgtctagactaaaaatatccttgaaagaatagtagcaaacagtatgcagtactcctgtgttctaagttcttttatgttttagtttaccctcacagcagccatagtgttaagtcattatgagcttcatcttaaagataagaaaactgaggcaaggggagattaacttactgccaaatttcaaacagttagtagtatttgagaccagtagtatggctctaatcttacccttagccctcccaaccattatgctgtactatctacccataaatacctccaggaaacattcccctcttggtaatttgtccttctatagaagcttcaaagattaaatcaaattaattttcaaaaaaaatttttttttagaaatgttattttccctgtgatagaggatgacttcccagtttcaccaaagtctgtttatatcaacacacacaaaatggaataattctgagtcactaggcaatcaatctactgtggttttactatgtaaggtgaaaattaactggaacgatgtttgtttgctatacttacatagtcaaactttacaagccatgaaattaattgcactctttgtatttgttgttaaatgcctaagaagttttctaaaaattttgtaaaggcactgtcagagaatctggagttgaatgattattccagatactgtataacctgcataactttttgtctttaagtcgtgtttgtaaaagaagtaattgctagaaacatttgataatgtacaaagtagtctataatgactgttcagtacatttttaatatttttttggttatatccaactttttgtaaatatactggaagcttgataataaaatgtatttcctatcaccatacttttccatgtgaaaacctgagcctatttctagtataagtatccaaagaaaagtttgacctggttgtgttattttaccagaccttggtaaaagaactattttggaaacagtatttgtaaatggaactaatgctatatttaaaaacactgatttttttttaacctgccaaaaataaaaaaaagctcattttataattttctact

SEQ ID NO: 247 - DNA, 1107 bp, Homo sapiens
  source 1..1107: mol_type = genomic DNA
atggaacctgggcagccccgggagccccaggagccccgcgagcccgggccaggagcggagaccgctgcggccccggtctgggaggaagccaagattttctacgacaacctcgcgcccaagaagaaacccaaatcgcccaagcctcagaatgcagtcaccatcgctgtgtcctcccgagccttgtttcgcatggacgaggagcagcagatctacacggagcagggcgtggaggagtacgtgcgctaccagctggaacatgagaacgaacccttcagtcccgggccagccttcccttttgtgaaggctctggaggccgtgaacaggcggctgcgggagctgtaccctgatagtgaggacgtcttcgacatcgtcctcatgactaacaaccatgctcaagtgggtgtccgcctcatcaacagtatcaaccactatgacctgttcatcgagaggttctgcatgacaggtgggaacagcccgatctgctacctcaaggcctatcacaccaacctctacttgtcagccgatgcggaaaaagtgcgagaagccattgatgaggggatcgcagctgccaccatcttcagccccagcagggatgtggttgtgtcccagagtcagctgcgcgtggccttcgatggggacgccgtgctcttctcggacgagtcggagcgcatcgtcaaggcccacgggctggaccgattcttcgagcatgagaaggcccacgagaacaaacctctggctcagggccccttaaagggctttctggaggcactgggtaggttgcagaagaagttctactccaaaggcctgcggctggagtgcccaattcgtacctacttggtgacagcacgcagtgcagccagttccggggcccgggctctcaagaccctgcgcagctggggcctggagacagatgaagccttgttccttgctggagcgcccaagggccctctccttgagaagatccgcccacacatcttctttgatgaccagatgttccatgtggctggggctcaggagatgggcactgtggccgcccatgtgccttatggtgtggcacagacaccccggcggactgcacctgcaaagcaggccccatctgcacagtag

SEQ ID NO: 248 - DNA, 1362 bp, Homo sapiens
  source 1..1362: mol_type = genomic DNA
ccaacgcgcaggcgccgctgctatgctgagtgccgcgtctcgcgtagtctcccgcgccgccgtccactgcgcgcttcgctctccgccgcccgaggcccgcgcgctcgccatgtcccggccaccgccaccgcgggtcgcctcggtgctgggcaccatggagatggggcgccgcatggacgcgcccgccagcgccgcggccgtgcgcgcctttctggagcgcggccacaccgaactggacacggccttcatgtacagcgacggccagtccgagaccatcctgggcggcctggggctcgggctgggcggtggcgactgcagagtgaaaattgccaccaaggccaacccttgggatggaaaatcactaaagcctgacagtgtccggtcccagctggagacgtcattgaagaggctgcagtgtccccaagtggacctcttctacctacacgcacctgaccacggcaccccggtggaagagacgctgcatgcctgccagcggctgcaccaggagggcaagttcgtggagcttggcctctccaactatgctagctgggaagtggccgagatctgtaccctctgcaagagcaatggctggatcctgcccactgtgtaccagggcatgtacaacgccaccacccggcaggtggaaacggagctcttcccctgcctcaggcactttggactgaggttctatgcctacaaccctctggctgggggcctgctgactggcaagtacaagtatgaggacaaggacgggaaacagcctgtgggccgcttctttgggaatagctgggctgagacctacaggaatcgcttctggaaggagcaccacttcgaggccattgcgttggtggagaaggccctgcaggccgcatatggcgccagcgcccccagtgtgacctcggctgccctccggtggatgtaccaccactcacagctgcagggtgcccacggggacgcggtcatcctgggcatgtccagcctggagcagctggagcagaacttggcagcaacagaggaagggcccctggagccggctgtcgtggatgcctttaatcaagcctggcatttggttgctcacgaatgtcccaactacttccgctaggcccatcatggctcaggctgcccaaggcttttctgtcacctcttttgttctctcacactgaccagtcttggccttaagctgacttagaagggtttttctgaattgtctagatccatgcattatttttctagcttcctgccttgctccctattcactttacactgtgaaaggtggggggtgagtcccacttgagcgcttcctgttgaataaagcaggcacttgacctggctgtagcctaggtcttgagtgaaccccaaaaa

SEQ ID NO: 249 - DNA, 1295 bp, Homo sapiens
  source 1..1295: mol_type = genomic DNA
atttattgtcgcggggaagctgcggccgcctcgcacccggaacaacaaagcaaggaagacggagtccgagcctcgggggctcctagcaacgggccggggcgggagttccatggagactggggagcgcgcccgtctcatcctcatccttgtcctccagcttctccttcgcatccgacgcaaccggcagcagcgctgccgccgcgtcctcagccaccgctccctcttcccacggatgtgatcttcgtggtggaaagctaaattttaaaaccaccccaatggatgcagacagtgatgttgcattggacattctaattacaaatgtagtctgtgtttttagaacaagatgtcatttaaacttaaggaagattgctttggaaggagcaaatgtaatttataaacgtgatgttggaaaagtattaatgaagcttagaaaacctagaattacagctacaatttggtcctcaggaaaaattatttgcactggagcaacaagtgaagaagaagctaaatttggtgccagacgcttagcccgtagtctgcagaaactaggttttcaggtaatatttacagattttaaggttgttaacgttctggcagtgtgtaacatgccatttgaaatccgtttgccagaattcacaaagaacaatagacctcatgccagttacgaacctgaacttcatcctgctgtgtgctatcggataaaatctctaagagctacattacagattttttcaacaggaagtatcacagtaacagggcccaatgtaaaggctgttgctactgctgtggaacagatttacccatttgtgtttgaaagcaggaaagaaattttataattcaccacttaattggttagaatctctaactgagcaccttttaaacctgctgcacattggactcaaaaggaaaactggaccaacaataattgaggaaatagactcttttattcattcacggctacagtgtaagctccagtccctttggattttattccaaaccttgctgtaatataaaaggaagtttacaagacatgatattgctgcttttacaaaaggacattctatttattttcgcagtaattctcatgtccccataagcagagctgtcacagtgtgcactaccttagattgttttattgtcgtcattgttatttttttccattttgagctaatgtgttttatttgtgaatagtcttttacatttttgtatgctgaatatgggcaccaaagaacctgtaaaagttatctttttcaattgaatgtgcacaaataaaagtttggaaaagatctctcttc

SEQ ID NO: 250 - DNA, 2394 bp, Homo sapiens
  source 1..2394: mol_type = genomic DNA
gatctctcttgcgccattccaaacatggcggctccactagggggtatgttttctgggcagccacccggtccccctcaggccccgccgggccttccgggccaagcttcgcttcttcaggcagctccaggcgctcctagaccttccagcagtactttggtggacgagttggagtcatctttcgaggcttgctttgcatctctggtgagtcaggactatgtcaatggcaccgatcaggaagaaattcgaaccggtgttgatcagtgtatccagaagtttctggatattgcaagacagacagaatgttttttcttacaaaaaagattgcagttatctgtccagaaaccagagcaagttatcaaagaggatgtgtcagaactaaggaatgaattacagcggaaagatgcactagtccagaagcacttgacaaagctgaggcattggcagcaggtgctggaggacatcaacgtgcagcacaaaaagcccgccgacatccctcagggctccttggcctacctggagcaggcatctgccaacatccctgcacctctgaagccaacgtgagcaaagggcagaggcagttggcctatgagtgggctgatgcgtgaggttggccacacattccttcctgtggacttgacattttggaagaactctttgccagataatgagttcattttagttttatgctcccattgaaaaattttccactatttttataagctgttaatttcttgagtactttataacatgtctgtagcttggataaaccaagtaagtattttttttttgtctttagcaaagtttagactgtgaatatgatgacacagattcttttttatggtggctttgcttgttttaaatttttgcatgacttttcatctttttatgtgtgtttcctgtagtttgatccgaaggaaaagagtatagtagcctgagaatcaggagatgggagttttagtcgtaggccttatgataattaccccgcggtggtgtgtagaaaagtatgtaaatttgctctgttttaagactttgaactacctcaagaagaggaatctaatacaatatttgtaatgtttccagagctctcagaatgaggatttttttgtaaataggtcagaagacgatggaactgtcctgggttagtatagtaatcttacagtaggatccttaggttgatgctgacttctgtttggggtatgtttatattttatgtggtgtttactttttttttttgacatagaaggatatagtgggagcagtgatacgctaacattcattacattctgcagtaatgaatctgtttaatgggtcagtcactgttttcagtagcatgacagtggggtcataggtgagctgtgaggggctaaatcttgctctgattgtctctttctgttttgagttttgtttgcgtgtatcatttttgttctacattttgggaggggaaacattttccgttaaggaaggttgttgccagtggatttgactccaagggactagagtgtcgtggtgggggtggggaggggctgcagggtgatcattggctactgagcctccacagagagcatgtggtgccctgcctttgggagggtattttgctctcgttagttttgtgggcagcctcagattccctgttgagttgctgttaagaaatggagatttctggctctcattgggtaaggttttctgagttttatatcttattagatcacatccctttacccagaacaaatgcttcactgtcttctgattggcagtactcctgtggctttgtgccttgactcattttgttgtcttcagccttgaaggccccttcccacatggactgacatccactcatgtgcctgatccctgaagcctcccagcacccattcagttgcatccccagggcacaggactttgatctcttctgttgccctcgctaggttctccctggtgggttagtgctttgtatctgtctctctgcccctcactaattctacacccatgagaattagacattattctccttaaatatataaggaccatataatctgtatctttttggtgtgtgtatatggtatctggcacatggatctctgattaccagcctgacatcaacaaatcccctcagttacaacgtataggttaaacaaagcttttaaaagctcatgtggtatgacctcaaggttgctaacctggtcactcatggtaattagaaactctgattggcagctttgtatttcttgactaaaaacctaaataaactgattaggttttaggcgttctttcaaagaggttcttgagaagattgagaactatcctatttggtgcttagtgaaaagattttgaattactgtacgtaccagttgttgccatttctttattaaattcagaagtttttttgccaaataacaa

SEQ ID NO: 251 - DNA, 2208 bp, Homo sapiens
  source 1..2208: mol_type = genomic DNA
cgggagggtcctcagctaaagccaaaagcagatcaaagtggtgggactcgcgtcgcggccgcggagacgtgaagctctcgaggctcctcccgctgcgggtcggcgctcgccctcgctctcctcgccctccgccccggccccggccccgcgcccgccatggagaagactgagctgatccagaaggccaagctggccgagcaggccgagcgctacgacgacatggccacctgcatgaaggcagtgaccgagcagggcgccgagctgtccaacgaggagcgcaacctgctctccgtggcctacaagaacgtggtcgggggccgcaggtccgcctggagggtcatctctagcatcgagcagaagaccgacacctccgacaagaagttgcagctgattaaggactatcgggagaaagtggagtccgagctgagatccatctgcaccacggtgctggaattgttggataaatatttaatagccaatgcaactaatccagagagtaaggtcttctatctgaaaatgaagggtgattacttccggtaccttgctgaagttgcgtgtggtgatgatcgaaaacaaacgatagataattcccaaggagcttaccaagaggcatttgatataagcaagaaagagatgcaacccacacacccaatccgcctggggcttgctcttaacttttctgtattttactatgagattcttaataacccagagcttgcctgcacgctggctaaaacggcttttgatgaggccattgctgaacttgatacactgaatgaagactcatacaaagacagcaccctcatcatgcagttgcttagagacaacctaacactttggacatcagacagtgcaggagaagaatgtgatgcggcagaaggggctgaaaactaaatccatacagggtgtcatccttctttccttcaagaaacctttttacacatctccattccttattccacttggatttcctatagcaaagaaacccattcatgtgtatggaatcaactgtttatagtcttttcacactgcagctttgggaaaacttcattccttgatttgtgtttgtcttggccttcctggtgtgcagtactgctgtagaaaagtattaatagcttcatttcatataaacataagtaactcccaaacacttatgtagaggactaaaaatgtatctggtatttaagtaatctgaaccagttctgcaagtgactgtgttttgtattactgtgaaaataagaaaatgtagttaattacaatttaaagagtattccacataacttcttaatttctacattccctcccttactcttcgggggtttcctttcagtaagcaacttttccatgctcttaatgtattcctttttagtaggaatccggaagtattagattgaatggaaaagcacttgccatctctgtctaggggtcacaaattgaaatggctcctgtatcacatacggaggtcttgtgtatctgtggcaacagggagtttccttattcactctttatttgctgctgtttaagttgccaacctcccctcccaataaaaattcacttacacctcctgcctttgtagttctggtattcactttactatgtgatagaagtagcatgttgctgccagaatacaagcattgcttttggcaaattaaagtgcatgtcatttcttaatacactagaaaggggaaataaattaaagtacacaagtccaagtctaaaactttagtacttttccatgcagatttgtgcacatgtgagagggtgtccagtttgtctagtgattgttatttagagagttggaccactattgtgtgttgctaatcattgactgtagtcccaaaaaagccttgtgaaaatgttatgccctatgtaacagcagagtaacataaaataaaagtacattttataaaccatttactatggctttgtaacaattgcatacccatattttaagggacaggtgaatttactactttctaaagtttattgatacttcccttttatgtaaaatgtagtagtgatacctatatttccacattgtgcattgtgacacacttgtctagggatgcctggaagtgtataaaattggactgcatttcttagagtgttttactatagatcagtctcatgggccatctcttcctcagatgtaaatgatatctggttaagtgttatatggaataaagtggacattttaaaactagcaaa

SEQ ID NO: 252 - DNA, 1166 bp, Homo sapiens
  source 1..1166: mol_type = genomic DNA
atgcacacatacgcgcgcgcacatgcacataggcacacagagatacgcgcacacacacacacaaacgcactcagatttcccggaccctggttttcctcctgtgaccctttcggggccgggctctcaccctaaagaagcagccccgccctggggtggccccaccctctcttgggacctgtcataagtcggaccccgggcgcccggctgcgcagtcccagccgccttccccaggcagtggaaccttcgggctcctgagcttcaggatggttcgtactaagacatggaccctgaagaagcactttgttggctatcctactaatagtgactttgagttgaagacagctgagctcccacccttaaaaaatggagaggtcctgcttgaagctttgttcctcaccgtggatccctacatgagagtggcagccaaaagattgaaggaaggtgatacaatgatggggcagcaagtggccaaagttgtggaaagtaaaaatgtagccctaccaaaaggaactattgtactggcttctccaggctggacaacgcactccatttctgatgggaaagatctggaaaagctgctgacagagtggccagacacaataccactgtctttggctctggggacagttggcatgccaggcctgactgcctactttggcctacttgaaatctgtggtgtgaagggtggagaaacagtgatggttaatgcagcagctggagctgtgggctcagtcgtggggcagattgcaaagctcaagggctgcaaagttgttggagcagtagggtctgatgaaaaggttgcctaccttcaaaagcttggatttgatgtcgtctttaactacaagacggtagagtctttggaagaaaccttgaagaaagcgtctcctgatggttatgattgttattttgataatgtaggtggagagttttcaaacactgttatcggccagatgaagaaatttggaaggattgccatatgtggagccatctctacatataacagaaccggcccacttcccccaggcccacccccagagattgttatctatcaggagcttcgcatggaagcttttgtcgtctaccgctggcaaggagatgcccgccaaaaagctctgaaggacttgctgaaatgggtcttagagcttccctactttgtaattgactga

SEQ ID NO: 253 - DNA, 4336 bp, Homo sapiens
  source 1..4336: mol_type = genomic DNA
agttcgccctgccggaaagcagcacgccgccgcggcattttacgacgtcggcggtgacaggccctgggactctgggaatacccagcttcctccccgcaacccggtgaaagccaacgcaatgttcggtgcgggggacgaggacgacaccgatttcctctcgccgagcggcggtgccagattggcctcactttttggactggatcaggcagctgctggccatggaaatgaatttttccagtacacagccccaaaacagcctaagaaaggccagggaacggcagcaacaggaaatcaggcaacaccaaaaacagcaccagccaccatgagcactcccacaatactggtcgcaacagcagtccatgcatatcgatacacaaatggtcaatatgtaaagcagggcaaatttggtgctgcagttctggggaaccacacagccagagagtataggattcttctttatatcagtcaacaacagccagttacggttgctaggattcatgtgaactttgagctaatggttcggcccaataactatagcaccttttatgatgaccagagacagaactggtccatcatgtttgagtcggaaaaggctgctgtggagttcaataagcaggtgtgcattgctaagtgcaacagtacctcttccctggatgcagtgctctcccaggacctcattgtggcagacggccctgctgtagaagttggagattctttggaagtggcctataccggctggctctttcagaatcatgtgctgggccaggttttcgactccactgctaacaaagataagttgcttcgcttgaagttaggatcaggaaaagtcatcaagggctgggaggatggaatgctgggcatgaaaaaaggaggaaagcgattgcttattgtccctccagcctgtgctgttggctcagaaggggtaataggctggactcaagcaacggactcgatcctggtgttcgaggtggaggttaggcgggtgaagtttgccagagattctggctctgatggtcacagtgttagttcccgcgattctgcagctccgtctcccatccctggtgctgacaacctctctgctgatcctgttgtgtcaccacccacatcaatacctttcaaatcaggggagccagctcttcgtaccaaatctaactccctcagtgaacaacttgcaataaatacaagtcccgatgcagtcaaagccaagttgatctctcggatggctaaaatgggccagcccatgctgcccatccttccaccacagctggattccaatgattcagaaatcgaagatgtgaacactctgcaaggaggtgggcagcctgtggtgactccgtccgtccagccctctcttcatccggcccatccagcgttaccacagatgacctcacaggcacctcagccatctgttactgggctccaggcaccttctgctgccttaatgcaagtgtcatctctcgattcccactcagctgtatctggaaatgcccaatcctttcagccctatgcaggtatgcaagcctacgcttatccccaggcatctgccgtcacctcccagctgcagcccgttcggcctttgtacccagcaccgctctctcagcctccccatttccaaggatcaggtgatatggcttcatttctcatgactgaagcccggcaacataacactgaaattcgaatggcagtcagcaaagtggctgataaaatggatcatctcatgactaaggttgaagagttacagaaacatagtgctggcaattccatgcttattcctagcatgtcagttacaatggaaacaagcatgattatgagcaacatccagcgaatcattcaggaaaatgaaagattgaagcaagagatccttgaaaagagcaatcggatagaagaacagaatgacaagattagtgaactaattgaacgaaatcagaggtatgttgagcagagtaacctgatgatggagaagaggaacaactcacttcagacagccacagaaaacacacaggcaagagtattgcatgctgaacaagagaaggccaaggtgacagaggagttagcagcggccactgcacaggtctctcatctgcagctgaaaatgactgctcaccaaaaaaaggaaacagagctgcagatgcagctgacagaaagcctgaaggagacagatcttctcaggggccagctcaccaaagtgcaggcaaagctctcagagctccaagaaacctctgagcaagcacagtccaaattcaaaagtgaaaagcagaaccggaaacaactggaactcaaggtgacatccctggaggaggaactgactgaccttcgagttgagaaggagtccttggaaaagaacctctcagaaaggaaaaagaagtcagctcaagagcgttctcaggccgaggaggagatagatgaaattcgcaagtcataccaggaggaattggacaaacttcgacagctcttgaaaaagactcgagtgtccacagaccaagcagctgcagagcagctgtctttagtacaggctgagctacagacccagtgggaagcaaaatgtgaacatttgttggcctccgccaaggatgagcacctgcagcagtaccaggaggtgtgcgcacagagagatgcctaccagcagaagctggtacaacttcaggaaaagtgtttagccctccaggcccaaatcacagctctcaccaagcaaaatgaacagcacatcaaggaactagagaagaacaagtcccagatgtctggggttgaagctgctgcatctgacccctcagagaaggtcaagaagatcatgaaccaggtgttccagtccttacggagagagtttgagctggaggaatcttacaatggcaggaccattctgggaaccatcatgaatacgatcaagatggtgactcttcagctgttaaaccaacaggagcaagagaaggaagagagcagcagtgaagaagaagaagaaaaagcagaagagcggccacgaagaccttcccaggagcagtcagcctcagccagttctgggcagcctcaagcacccctgaatagggagaggccagagtcccccatggtgccctcagagcaggtggtcgaggaagctgtcccgttgcctcctcaggccctcaccacttcccaggatggacacagaaggaaaggggactcagaagctgaggcactctcagagataaaagatggttcccttccacccgaactgtcttgcatcccatcccacagagttctagggcccccgacttcaattccacctgagcccctaggccctgtatccatggactctgagtgtgaggagtcacttgctgccagcccaatggcagctaagcccgacaacccatcaggaaaggtctgtgtcagggaagtagcaccagatggcccactacaagaaagctccacaagactgtccctgacttcagaccccgaggagggggacccactggccttagggcctgaaagcccaggagagcctcagcctccacagctcaagaaagatgatgtcactagctccaccggtccccacaaggagctgtcaagcacagaggcaggttccacagttgcaggagcagccctcagacccagccatcattcccagcgttccagtctctctggggatgaagaggatgaactgtttaaaggggcaactctgaaagctctgaggcccaaagcacagcctgaggaggaggatgaagacgaggtgagcatgaagggacgcccgcccccaacgcccctttttggagatgatgatgatgacgatgacattgactggctgggatgaagacccaggaaactggtgcaaaggtttctctgcaacccttccctaagcatgattttgcacagccaaccctgggtctaggcgaaccacagggtgaggtcaaggtgagcattctgggaacaatatttgggctcagagggtgggttggccaccttctgagccccacccccgccagacctggtgaagaggatcataaccctgtcttcaagaacactgggatttcagcagcaagttggaagaaggactggtaggttcccctccaagccagtcacctgtaagagtcctgtcctctgccagactttttaatctcttcattaactctcagactgacctgggagccctcctctacctgaatccagtgctcaactgtgccccggcaacaagacctgggctgaggtctccctggtagaactaagggagattacaccatctaaatcccagtgcagtcaacagcctggcctatagtcctgggacatgtatcttcttctttgccttaaatctgatacaagaggtcaatgactttgaaaataaaactaaaataaatgtctataatgaaacttg

SEQ ID NO: 254 - DNA, 7431 bp, Homo sapiens
  source 1..7431: mol_type = genomic DNA
gttttgatgaacacctggctttattcttgcaatgaagaaaggttctcaacaaaaaatattctccaaagcaaagataccatcatcatctcactctcctatcccatcatctatgtccaatatgagatctaggtcactttcacctttgattggatcagagactctaccttttcattctggaggacagtggtgtgagcaagttgagattgcagatgaaaacaatatgcttttggactatcaagaccataaaggagctgattcacatgcaggagttagatatattacagaggccctcattaaaaaacttactaaacaggataatttggctttgataaaatctctgaacctttcactttctaaagacggtggcaagaaatttaagtatattgagaatttggaaaaatgtgttaaacttgaagtactgaatctcagctataatctaatagggaagattgaaaagttggacaagctgttaaaattacgtgaactcaacttatcatataacaaaatcagcaaaattgaaggcatagaaaatatgtgtaatctgcaaaagcttaaccttgcaggaaatgaaattgagcatattccagtatggttagggaagaagttaaaatctttgcgagtcctcaatttgaaaggcaacaagatatcatcgctccaagatataagcaagttgaaaccgcttcaagatttgatttctctgatcctagttgaaaatccagttgtgacccttcctcattacctccagtttaccattttccacctccgttcattggaaagtttggaaggtcagccagtaaccactcaggatagacaggaggcttttgagagattcagtttagaagaggtagaaagactggaaagagacctagaaaaaaagatgatagaaactgaagagcttaagagcaaacaaacaaggttccttgaggaaattaaaaatcaagataaattgaataaatcattaaaagaggaggccatgttacagaaacagagctgtgaggaactcaagagtgacttaaacacaaaaaatgaattgctaaaacagaagaccatagaattaacacgagcatgtcagaagcaatatgagctggaacaggaattggccttttataaaattgatgctaaatttgagccactaaattattatccatcagagtatgctgaaattgataaagccccagatgaaagcccttacattggcaaatccagatacaagagaaatatgtttgccacagagagttatattattgacagtgctcaggcagtacagatcaagaagatggagccagatgaacaacttagaaatgatcacatgaacttgagaggccacacaccactggacacgcaactggaagacaaagaaaaaaaaataagtgcagcacaaactcgactatcagaactgcatgatgaaatagaaaaggcagaacaacaaattttgagagctactgaagaatttaaacaactggaagaagctatacaactaaaaaagatttcagaagcagggaaagaccttctttacaagcagttgagtggtagactacaacttgtaaataaattacgccaggaagctctggatctagaactgcagatggaaaagcaaaagcaggaaattgccggaaagcagaaggagattaaggacctgcaaatagccatagatagcctggattccaaagacccaaaacattcccatatgaaggctcaaaagagcggtaaagaacaacagcttgacattatgaacaagcagtaccaacaacttgaaagtcgtttggatgagatactttctagaattgctaaggaaacggaagagattaaggaccttgaagaacagcttactgaaggccagatagcagcaaatgaagccctgaagaaggatttagaaggtgttatcagtgggttgcaagaatacctggggaccattaaaggccaggcaactcaggcccagaatgagtgcaggaagctgcgggatgagaaagagacattgttgcagagattgacagaagtcgagcaggagagagaccagctggaaatagttgccatggatgcagaaaatatgaggaaggagcttgcagagctagaaagtgccctccaagagcagcatgaggtgaatgcatctttgcagcagacccagggagatctcagtgcctatgaagctgagctagaggctcggctaaacctaagggatgctgaagccaaccagctcaaggaagagttggaaaaagtaacaagacttacccagttagaacaatcagcccttcaagcagaacttgagaaggaaaggcaagccctcaagaatgcccttggaaaagcccagttctcagaagaaaaggagcaagagaacagtgagctccatgcaaaacttaaacacttgcaggatgacaataatctgttaaaacagcaacttaaagatttccagaatcaccttaaccatgtggttgatggtttggttcgtccagaagaagtggcagctcgtgtggatgagctaagaagaaaactgaaattaggaactggggaaatgaacatccatagtccttcagatgtcttagggaaaagtcttgctgatttacagaaacaattcagtgaaattcttgcacgctccaagtgggaaagagatgaagcacaagttagagagagaaaactccaagaagaaatggctctgcagcaagagaaactggcaactggacaagaagagttcaggcaggcctgtgagagagccctggaagcaagaatgaattttgataagaggcaacatgaagcaagaatccagcaaatggagaatgaaattcactatttgcaagaaaatctaaaaagtatggaggaaatccaaggccttacagatctccaacttcaggaagctgatgaagagaaggagagaattctggcccaactccgagagttagagaaaaagaagaaacttgaagatgccaaatctcaggagcaagtttttggtttagataaagaactgaagaaactaaagaaagccgtggccacctctgataagctagccacagctgagctcaccattgccaaagaccagctgaagtcccttcatggaactgttatgaaaattaaccaggagcgagcagaggagttgcaggaagcagagaggttcagcagaaaggcagcacaagcagccagagatctcacccgagcagaagctgagatcgaactcctgcagaatctcctcaggcagaagggggagcagtttcgacttgagatggagaaaacaggtgtaggtactggagcaaactcacaggtcctagaaattgagaaactgaatgagacaatggaacgacaaaggacagagattgcaaggctgcagaatgtactagacctcactggaagtgacaacaaaggaggctttgaaaatgttttagaagaaattgctgaacttcgacgtgaagtttcttatcagaatgattacataagcagcatggcagatcctttcaaaagacgaggctattggtactttatgccaccaccaccatcatcaaaagtttccagccatagttcccaggccaccaaggactctggtgttggccttaagtactcagcctcaactcctgttagaaaaccacgccctgggcagcaggatgggaaggaaggcagtcaacctccccctgcctcaggatactgggtttattctcccatcaggagtgggttacataaactgtttccaagtagagatgcagacagtggaggagatagtcaggaagagagtgagctggatgaccaagaagaacccccatttgtgcctcctcctggatacatgatgtatactgtgcttcctgatggttctcctgtaccccagggcatggccctgtatgcaccacctcctcccttgccaaacaatagccgacctctcacccctggcactgttgtttatggcccacctcctgctggggcccccatggtgtatgggcctccaccccccaacttctccatccccttcatccctatgggtgtgctgcattgcaacgtccctgaacaccataacttagagaatgaagtttctagattagaagacataatgcagcatttaaaatcaaagaagcgggaagaaaggtggatgagagcatccaagcggcagtcggagaaagaaatggaagaactgcatcataatattgatgatcttttgcaagagaagaaaagcttagagtgtgaagtagaagaattacatagaactgtccagaaacgtcaacagcaaaaggacttcattgatggaaatgttgagagtcttatgactgaactagaaatagaaaaatcactcaaacatcatgaagatattgtagatgaaattgagtgcattgagaagactcttctgaaacgtcgctcagagctcagggaagctgaccgactcctggcagaggctgagagtgaactttcatgcactaaagaaaagacaaaaaatgctgttgaaaagttcactgatgccaagagaagtttattgcaaactgagtcagatgctgaggaattagaaaggagagctcaggaaactgctgttaacctcgtcaaagctgatcagcagctaagatcgctccaggctgatgcaaaggatttggagcagcacaaaatcaagcaagaagaaatcttgaaagaaataaacaaaattgtagcagcaaaagactcagacttccaatgtttaagcaagaagaaggaaaaactgacagaagagcttcagaaactacagaaagacatagagatggcagaacgcaatgaggatcaccacctgcaggtccttaaagaatctgaggtgcttcttcaggccaaaagagccgagctggaaaagctgaaaagccaggtgacaagtcagcagcaggagatggctgtcttggacaggcagttagggcataaaaaggaggagctgcatctactccaaggaagcatggtccaggcaaaagctgacctccaggaagctctgagactgggagagactgaagtaactgagaagtgcaatcacattagggaagtaaaatctcttctggaagaactgagttttcagaaaggagaactaaatgttcagattagtgaaagaaaaactcaacttacacttataaagcaggaaattgaaaaagaggaagaaaatcttcaggttgttttaaggcagatgtctaaacataaaaccgaactaaagaatattctggacatgttgcaacttgaaaaccatgagctacaaggtttgaagctacaacatgaccaaagggtatctgaattagagaagactcaggtggcagtgctagaggagaaactggagttagagaatttgcagcagatatcccagcagcagaaaggggaaatagagtggcagaagcagctccttgagagggataaacgagaaatagaacgaatgactgctgagtcccgagctttacaatcgtgtgttgagtgtttgagcaaagaaaaggaagatctccaagagaaatgtgacatttgggaaaaaaagttggcacaaaccaaaagggttttagcagcagcagaagaaaatagcaaaatggagcaatcaaacttagaaaagttggaattgaatgtcagaaaactgcagcaggaactagaccaactaaacagagacaagttgtcactgcataacgacatttcagcaatgcaacagcagctccaagaaaaacgagaagcagtaaactcactgcaggaggaactagctaatgtccaagaccatttgaacctagcaaaacaggacctgcttcacaccaccaagcatcaggatgtgttgctcagtgagcagacccgactccagaaggacatcagtgaatgggcaaataggtttgaagactgtcagaaagaagaggagacaaaacaacaacaacttcaagtgcttcagaatgagattgaagaaaacaagctcaaactagtccaacaagaaatgatgtttcagagactccagaaagagagagaaagtgaagaaagcaaattagaaaccagtaaagtgacactgaaggagcaacagcaccagctggaaaaggaattaacagaccagaaaagcaaactggaccaagtgctctcaaaggtgctggcagctgaagagcgtgttaggactctgcaggaagaggagaggtggtgtgagagcctggagaagacactctcccaaactaaacggcagctttcagaaagggagcagcaattggtggagaaatcaggtgagctgttggccctccagaaagaggcagattctatgagggcagacttcagccttctgcggaaccagttcttgacagaaagaaagaaagctgagaagcaggtggccagcctgaaggaagcacttaagatccagcggagccagctggagaaaaaccttcttgagcaaaaacaggagaacagctgcatacaaaaggaaatggcaacaattgaactggtagcccaggacaaccatgagcgggccaggcgcctgatgaaggagctcaaccagatgcagtatgagtacacggagctcaagaaacagatggcaaaccaaaaagatttggagagaagacaaatggaaatcagtgatgcaatgaggacacttaaatctgaggtgaaggatgaaatcagaaccagcttgaagaatcttaatcagtttcttccagaactaccagcagatctagaagctattttggaaagaaacgaaaacctagaaggagaattggaaagcttgaaagagaaccttccatttaccatgaatgagggaccttttgaagaaaaactgaacttttcccaagttcacataatggatgaacactggcgtggagaagcactccgggagaaactgcgtcaccgggaagaccgactcaaggcccaactccgacactgtatgtccaagcaagcagaagtattaattaaaggaaagcggcagacagagggcactttacacagtttgaggagacaagtagatgctttaggggaattggtcaccagcacctctgcagattcagcgtcatcacccagtctgtctcagctggagtcttccctcacagaggactctcaacttggacaaaatcaggaaaagaatgcctcagccagatgaggaatactgtcttgtgtaaatatattcaaggaaaacacctccactacctcactgacttcataattggaatgtcacatggtttttttaatcaagatgcagtgaactgagattctgaaactccactgtagtttactttgcctgtaccattaatgccaatgtttttataaatcacttgtacatagtacatatgggaatagttgcatatgggaatttaaaccaacatgtggctgagcctttttttttttaatcttcgtaacatgtttaaaaaaaaacagtgattttaactgcatatttgaacctacaaactggtaaatcttattaacaaaaagaatgtacttaaggccctctttatttatagtgtcgagttatttttgaattttgcttaaaatctatttttcatatgaaaataaaagataacaatc

SEQ ID NO: 255 - DNA, 4087 bp, Homo sapiens
  source 1..4087: mol_type = genomic DNA
gcatgatgggagagtgtgtggagtgggcggggggtctccgcggaggaggtggaggaggcggcggcggcggcggaagagggcggagggtagtgggatgggggtcccgcggcagcggtgaaactccgggtgggcgtccatggtgctgctgcgctgacagggctgtgagcagccggccttccgctctcaccagttccgcgtcggaatagacggtccttccccggggagtcagttcctccccgggcccctgagccatgcccatcgcagccgccccgaaggagccaggtgtaaattaattatttgaaagcaactgaacaatggagccagacatcattcgaatgtactcttcatccccaccaccattagacaatggagcagaggatgatgatgatgatgaatttggggaatttggtgggttttcagaagttagcccttctggtgtagggtttgttgatttcgatacaccagattatactcgtcccaaggaagagtttgtaccttcaaaccattttatgccaattcatgaattctcagaaaatgtagatagccttacaagctttaagtccattaaaaatggtaatgataaggacatcactgctgaactttctgctcctgtgaaaggacagtctgatgttttactttctaccaccagcaaagaaataatttcatctgaaatgttagctacttccattgatggcatggaaagaccaggaaatttaaataaagtagtggagcagagacagaatgttggaacacttgaaagtttctctccaggagattttagaactaatatgaatgttgttcatcaaaacaagcagttagagagctgcaatggtgaaaagcctccttgtctggagattctaacaaatgggtttgcagtgttggaaactgtaaatcctcagggaacagatgatctggacaatgtagctgattcaaagggacggaagcctcttagcactcatagcactgagtataatttagactctgtacctagtcctgctgaggaatttgcagattttgccacattttccaaaaaggaaaggatacaattagaagaaatagaatgtgcagttttaaatgatagagaagcactaaccattcgggaaaacaataaaattaatagagtcaatgaactgaattctgtaaaagaagtggctttgggtagaagcttggataacaaaggagacactgatggagaggatcaggtttgtgtttcagaaataagcatagtgactaacagaggtttcagtgttgaaaaacaaggccttccaacactgcaacaggatgaatttttacagtcaggtgttcagtcaaaggcttggagtttggtagactcagctgataattcagaagccattaggagagaacaatgtaaaactgaagaaaaacttgacttacttacttctaaatgtgctcacctatgcatggattctgttaaaacttctgatgatgaagttggttctcccaaagaagaaagtagaaagtttactaatttccaaagcccaaacattgaccccacagaagaaaatgatttggatgattctttaagtgtaaaaaatggtgatagtagtaatgactttgtgacttgcaatgatatcaatgaagatgattttggtgattttggtgactttggctctgccagtggctcaactccaccttttgttactggtactcaagattcaatgagtgatgccacttttgaagagtcttcagagcactttccacattttagtgaaccaggtgatgactttggagaatttggggatataaatgctgtttcttgccaagaggagacaatattaacaaagtcagacctaaaacagacttctgataatttatcagaagaatgtcaattggcaagaaaatctagtggaacaggcactgaacctgttgcaaaacttaaaaatgggcaagaaggtgagattggacattttgattctgtgccaaatattcaggatgactgcaatggttttcaagactctgatgattttgcagacttcagttcagctggtcctagccaagttgtagattggaatgcttttgaggatgaacaaaaagatagttgttcttgggctgcttttggagaccagcaggctactgaatctcatcatcgaaaggaagcctggcagtcacataggacagatgaaaatattgatactccaggaacccccaaaacgcacagtgtaccttcagcaacttccaaaggagcagttgctagtggccatttacaggaatcagccacttcagttcagacagctttattaaaccgcctggagcgaattttcgaagcatgttttccttccatacttgtccctgatgctgaagaggaagttacttccctgaagcacttgctggaaacaagcactttgccaataaaaacgagagaggccttacctgaaagtggggaattgctagatgtgtggactgagctacaggatatccatgatgcacatggcttgagataccagtggggcggctcccatagcaacaagaagcttttgtcctccttgggaatagacacccgaaacattctcttcacgggcaataagaagcagcctgttatagtgcccatgtatgcagcaggattgggtatgttagagcccaccaaggaaccactgaaaccactttctgctgcagaaaaaatagcttccatcggtcagacagccaccatgtcaccagatatgaacacatgtacatctgatcagttccaggagtctctaccacccgtccagtttgactggagtagcagtggccttactaaccctttagatgctagtggaggttccactcttctgaaccttgatttctttgggcccgtggatgacagtagctctagcagcagcaccacaatcccaggtgtggatccggagttgtatgagttaacaacttctaagctggaaatctccacctcaagcctcaaagtgactgatgcatttgcaagactcatgtctacagtagagaagacaagcacatctaccaggaaaccgaaaagagaagagcacctaagtgaagaagctatcaaggtgatcgctggccttcctgacttaacattcatgcatgccaaggtgttgatgttcccagccacgttaacaccttccacaagctctcaagaaaaagcagacggataactgatgtgaattggacagtttctattgcttttccttttttccatcccttccctaccatcaaaagcatacctgctctaattaaaaaaaaaaaaaaaaaaaattcaagttcagctgatttgttggtaagccgcactagaaaggtatacatagtaatgtatatttatttacatactgaagtcctaaatttatattagaaaaatgtaaataatcgggggtaaacatttttgaagatttattctttttgtgttgctggggtgtatacatttatgtctttgtgaaatacactggtggtgtccttcttacaaaacttttgaaataaaaaaaaaactcaaatcttcactgtctgtgaaatccccttcagtcttttcagattgcattgactgtcctcttgatttttcatattacatgtcaaattacttttgctatcataaataagctccaaagtcccccatttaatttttttttaattttgtgtatgatgggtttcagatctggcttttgttaacattttggggcttttttaatcttttcaatctggcgtattgctgtttgaccttttgcaaggtacttaattgctcttttgttatagggtatggatcattgtcagaacttgattggaggggtttaaagagattgtgtctgtttaaaatcagtatgattcagagaaggaccaaattatatgaatgtcttacaatggaatttacttgttactgatttttttgttctattgtaccactattttttgaggattttgcacagtgtaaaatgacataatcatagattgctatggtttaggctgtatatacagtgaaaactatgggttttaaatgtttggggaaattcctatggaaaaaagagagacatgtagaagaacctctaacaaggttaatgtgcatgcccaaggtcttttgaaatttcagtgtgtaaatttccttttagcttatacaaaaataaaataattt

SEQ ID NO: 256 - DNA, 4014 bp, Homo sapiens
  source 1..4014: mol_type = genomic DNA
gcatgatgggagagtgtgtggagtgggcggggggtctccgcggaggaggtggaggaggcggcggcggcggcggaagagggcggagggtagtgggatgggggtcccgcggcagcggtgaaactccgggtgggcgtccatggtgctgctgcgctgacagggctgtgagcagccggccttccgctctcaccagttccgcgtcggaatagacggtccttccccggggagtcagttcctccccgggcccctgagccatgcccatcgcagccgccccgaaggagccaggtgtaaattaattatttgaaagcaactgaacaatggagccagacatcattcgaatgtactcttcatccccaccaccattagacaatggagcagaggatgatgatgatgatgaatttggggaatttggtgggttttcagaagttagcccttctggtgtagggtttgttgatttcgatacaccagattatactcgtcccaaggaagagtttgtaccttcaaaccattttatgccaattcatgaattctcagaaaatgtagatagccttacaagctttaagtccattaaaaatggtaatgataaggacatcactgctgaactttctgctcctgtgaaaggacagtctgatgttttactttctaccaccagcaaagaaataatttcatctgaaatgttagctacttccattgatggcatggaaagaccaggaaatttaaataaagtagtggagcagagacagaatgttggaacacttgaaagtttctctccaggagattttagaactaatatgaatgttgttcatcaaaacaagcagttagagagctgcaatggtgaaaagcctccttgtctggagattctaacaaatgggtttgcagtgttggaaactgtaaatcctcagggaacagatgatctggacaatgtagctgattcaaagggacggaagcctcttagcactcatagcactgagtataatttagactctgtacctagtcctgctgaggaatttgcagattttgccacattttccaaaaaggaaaggatacaattagaagaaatagaatgtgcagttttaaatgatagagaagcactaaccattcgggaaaacaataaaattaatagagtcaatgaactgaattctgtaaaagaagtggctttgggtagaagcttggataacaaaggagacactgatggagaggatcaggtttgtgtttcagaaataagcatagtgactaacagaggtttcagtgttgaaaaacaaggccttccaacactgcaacaggatgaatttttacagtcaggtgttcagtcaaaggcttggagtttggtagactcagctgataattcagaagccattaggagagaacaatgtaaaactgaagaaaaacttgacttacttacttctaaatgtgctcacctatgcatggattctgttaaaacttctgatgatgaagttggttctcccaaagaagaaagtagaaagtttactaatttccaaagcccaaacattgaccccacagaagaaaatgatttggatgattctttaagtgtaaaaaatggtgatagtagtaatgactttgtgacttgcaatgatatcaatgaagatgattttggtgattttggtgactttggctctgccagtggctcaactccaccttttgttactggtactcaagattcaatgagtgatgccacttttgaagagtcttcagagcactttccacattttagtgaaccaggtgatgactttggagaatttggggatataaatgctgtttcttgccaagaggagacaatattaacaaagtcagacctaaaacagacttctgataatttatcagaagaatgtcaattggcaagaaaatctagtggaacaggcactgaacctgttgcaaaacttaaaaatgggcaagaaggtgagattggacattttgattctgtgccaaatattcaggatgactgcaatggttttcaagactctgatgattttgcagacttcagttcagctggtcctagccaagttgtagattggaatgcttttgaggatgaacaaaaagatagttgttcttgggctgcttttggagaccagcaggctactgaatctcatcatcgaaaggaagcctggcagtcacataggacagatgaaaatattgatactccaggaacccccaaaacgcacagtgtaccttcagcaacttccaaaggagcagttgctagtggccatttacaggaatcagccacttcagttcagacagctttattaaaccgcctggagcgaattttcgaagcatgttttccttccatacttgtccctgatgctgaagaggaagttacttccctgaagcacttgctggaaacaagcactttgccaataaaaacgagagaggccttacctgaaagtggggaattgctagatgtgtggactgagctacaggatatccatgatgcacatggcttgagataccagtggggcggctcccatagcaacaagaagcttttgtcctccttgggaatagacacccgaaacattctcttcacgggcaataagaagcagcctgttatagtgcccatgtatgcagcaggattgggtatgttagagcccaccaaggaaccactgaaaccactttctgctgcagaaaaaatagcttccatcggtcagacagccaccatgtcaccagatatgaacacatgtacatctgatcagttccaggagtctctaccacccgtccagtttgactggagtagcagtggccttactaaccctttagatggtgtggatccggagttgtatgagttaacaacttctaagctggaaatctccacctcaagcctcaaagtgactgatgcatttgcaagactcatgtctacagtagagaagacaagcacatctaccagtaggaaaccgaaaagagaagagcacctaagtgaagaagctatcaaggtgatcgctggccttcctgacttaacattcatgcatgccaaggtgttgatgttcccagccacgttaacaccttccacaagctctcaagaaaaagcagacggataactgatgtgaattggacagtttctattgcttttccttttttccatcccttccctaccatcaaaagcatacctgctctaattaaaaaaaaaaaaaaaaaaaattcaagttcagctgatttgttggtaagccgcactagaaaggtatacatagtaatgtatatttatttacatactgaagtcctaaatttatattagaaaaatgtaaataatcgggggtaaacatttttgaagatttattctttttgtgttgctggggtgtatacatttatgtctttgtgaaatacactggtggtgtccttcttacaaaacttttgaaataaaaaaaaaactcaaatcttcactgtctgtgaaatccccttcagtcttttcagattgcattgactgtcctcttgatttttcatattacatgtcaaattacttttgctatcataaataagctccaaagtcccccatttaatttttttttaattttgtgtatgatgggtttcagatctggcttttgttaacattttggggcttttttaatcttttcaatctggcgtattgctgtttgaccttttgcaaggtacttaattgctcttttgttatagggtatggatcattgtcagaacttgattggaggggtttaaagagattgtgtctgtttaaaatcagtatgattcagagaaggaccaaattatatgaatgtcttacaatggaatttacttgttactgatttttttgttctattgtaccactattttttgaggattttgcacagtgtaaaatgacataatcatagattgctatggtttaggctgtatatacagtgaaaactatgggttttaaatgtttggggaaattcctatggaaaaaagagagacatgtagaagaacctctaacaaggttaatgtgcatgcccaaggtcttttgaaatttcagtgtgtaaatttccttttagcttatacaaaaataaaataatttaaaagaaa

SEQ ID NO: 257 - DNA, 1953 bp, Homo sapiens
  source 1..1953: mol_type = genomic DNA
gggagtatgggcttagaagccggaagtgggttgacgtagcccggaaggggaatacttccaagttgtagtgttgttgttttcagcctgctgctgctgctgctgttgcggctaggggaaccgtcgtggggaaggatggtgtgcgaaaaatgtgaaaagaaacttggtactgttatcactccagatacatggaaagatggtgctaggaataccacagaaagtggtggaagaaagctgaatgaaaataaagctttgacttcaaaaaaagcaagatttgatccatatggaaagaataagttctccacttgtagaatttgtaaaagttctgtgcaccaaccaggttctcattactgccagggctgtgcctacaaaaaaggcatctgtgcgatgtgtggaaaaaaggttttggataccaaaaactacaagcaaacatctgtctagatgtattgatggaatttctggctttctaaatgattttactttctgccttgaattttcaaggcatagatgtcaacttacagaataacatgttttaagataattaagtttaaaccagagaatttgattgttactcattttgctctcatgttctaaacagcaacagtgtaactagtcttttgttgtaaatggttattttccttataagaattttaagaactaagtggcaaattccatgaaaatatttctcagttctgtatgcacttttatttaacattattcatataattctccccccaccactttatttatagatactgcaaaagtgagaaggagataatagatactttgctctgaatttggcatccagagttaacatttctcccctcactcccttgctggtgtcatagttattagaatcagcagcctcttaactaattgcggtttcataggatatataaatgtttcaagccattattgctgaatggttctttagttattaacctagacccaaatcaaagaccagttggatttatgatattttttatttgttcttgcagccaaagtgccagtttctttaatatgtgaccaagaacacaaggagcatccatatggccaaataaatacactgaattttagaaaaacatattactttgaattcaaattgtcatgaaaaccagaacagtgtttgtccatgttgcatgtaatgaaaataaatccctgctctgagaaaagctctttgaagcaaaaaccaaacttttttttttttttttttacctcctgtcttgccccctaaaagaaataaatagagcaaacatcttgactctccctttttaaaatttgtttgttttttttttttttttttggatacaagagctcactctgttgcccagggtggagtgcagaggtatcatcaggctctctgcagcctccatctgctgggctcaagcaattcttccccctcagcctcctaagtagctggggactacaggcgtgtgccactgtgctcagctagtttttatttttagtagagatgaggactcactatgttgcccaagctgttctcgaacttctgatctcaagcaatcctctggcctcagccttccgaagtgctgggatacaggtgtgagccacagaacttggcctctctcttttttttttttttttttttttttttttaacactacaggtttcaaatgaatacttttcttatgttgccttcagaggttcaggacttctgcttttaaaacctgcagcctaccgtgggaaaccaaaaaagcattccctatttccaactgcagtatgtataaatacatatcactacaaaatgtatagaaagtgtgatgagatacatgaatggcatttttattggtcataacattttgatgaaaagcatttaaagttttaactttataaggcttttcaaaatgtgtttttctgagatacattgttatttattcatatccagaaaaattacaaggataatacagaatataataaataatttatctgagagca

SEQ ID NO: 258 - DNA, 2371 bp, Homo sapiens
  source 1..2371: mol_type = genomic DNA
aacttcttcgcgattgcacggattcagggacgctcagtggcgccgcgccgctccttggtttgacttttgtttttcagttgcgttccctgactcggagtcttagtgtgtcgttatttggacaagaggcacattgacccaatttggagacgtattttggaaggaggtgtgaaaaagacagcatgaactttaccccaacacacacccctgtctgcagaaagcgaacagttgtctccaaacgtggtgttgccgtcagtggtcccaccaagaggaggggaatggcagattcactggagtcaacccccttgccttcccccgaagatcgtctggccaaactccatccttctaaggagctcctggaatattatcaaaagaagatggctgagtgtgaggcagaaaatgaggacttgctgaagaaactggaactctacaaagaagcttgtgaaggacagcataaacttgaatgtgatttgcagcagagggaggaagagattgctgaattgcagaaagctctaagtgatatgcaggtctgcctcttccaggaacgggaacatgttttacgcctctactcagaaaatgaccgactgagaatcagggagctagaagacaagaaaaagattcagaatctcttggctcttgtgggaacagatgctggagaagtgacctatttttgtaaggagcctcctcacaaagtcaccattctccaaaagactatccaggctgtaggtgaatgtgagcagagtgaatcttcagctttcaaagcagatcctaaaataagcaaaagaagaccatcgagagagagaaaagaaagttctgagcattaccaaagagacatacagacactcatcctacaggtggaagcactgcaggctcagctgggagagcagaccaaactttctcgagaacaaattgaagggctcatcgaggacagacggattcaccttgaggaaatacaagttcagcaccagagaaatcagaacaaaatcaaagagctaaccaaaaatcttcaccacacccaagaactgctctatgagagcaccaaagattttctgcaactcagatctgaaaaccaaaataaagagaagtcatggatgcttgaaaaagataatttgatgtcaaagattaagcaatatagggtgcagtgtaagaagaaagaagataaaattggaaaagtgttgcccgttatgcatgagagtcaccatgctcaaagtgaatatattaagtccctaaaagataagttagtacaagagaaaaagctgtccaatatgtaccaagagcagtgcatttccttagaagaagaacttgcccgaattcgtgaggaagagggaatgaggagagagatcttcaaggatcgcactaacaagatggggaagcgtttacagataatgacaaaacgctatgaggcattggagcgtcgacgtatcctggaagtagaaggctttaagacagatattaaagttctccgacagaaactgaaagacttggagcaaatgttgtataaggcaacagttaatgcccgggcaaaccaggatcttgcccttctgtgtgaggtccgtgacagcaatagacgggcacataagatacaaggagaactgaagaatcttaagtcgaaagtgtttggtctggagaatgaacttagactctgttaatgtctacttttggaaatggcccccatttagaagaggtgtgcttcttgaaacctgaggacaaggtcatctgctgccagaaaatgtaaacctgagttgactagagtggtggtattcattattgtaaagacagcttgaagaatcggggaccactaggaaagcttttcttgcatactcagcttgctttatcatttttgctgtccttttaacacttgcgaggagtaggggcctggtcctgaatgacttggaggctttcattatttatcctgtctgtattgaccggtttttgttttttcagaaggcagtgatgatgaaaacttaggaagaaggtattttgcaataagcttggctgagtgtccatgggaagaatactttccctaaagagagagaagcactcacagaggctgcctttctcctgagctcggggagaaggcagcacatcacaacctgtcacattgaaataggcgctcattctgctatttcaccttccgtcctgagcagagcctgaattacgtttttgggcaatttcatggtgtttcaccagagggcgctagagactcaaacgaaatgtccatctggaaagattcgggagacactttgccgaggggatgaagctgagatgatgcttgtatggaaagtttgatatttttatcagtcacatggcttttgaaaaatgatgtatatattttaaattaactattttcaataaaatatttcactcaaaagat

SEQ ID NO: 259 - DNA, 2522 bp, Homo sapiens
  source 1..2522: mol_type = genomic DNA
cggagttgtcgtgtgttctggattcattccggcaccaccatgtcgaaggtttcctttaagatcacgctgacgtcggacccacggctgccgtacaaagtactcagtgttcctgaaagtacacctttcacagcagtcttaaagtttgcagcagaagaatttaaagttcctgctgcaacaagtgcaattattaccaatgatggaataggaataaatcctgcacagactgctggaaatgtttttctaaaacatggttcagaactgcggattattcctagagatcgtgttggaagttgttaatatctgctacttggaacatacgattgcctttcagaataaatattggtattttttgttgttgtaaaattgaaatcaggcatttaacatactatgaaaacaccaggagtcaatgattaatgaaaggtgactcatctgtccctttttgttgtccatactcttcctatgaagagggaatgcgtatgaattaaggctactactgtcacagaagatcatagtctttgatgctacctcacaacacaaacaggtagttcgttgggggcaaatgaattagccaactgttaactggaagcttttgataatttttttttttagaacaatttggaacattaaaatttactgaatcgtatatattcatctgagataaaaatataaaaagaattatggaccctggatggcaatttgcttgatagcatctgatttgcagactcataatttgatttttaattaaatatataggttgtgatgaagtgaatagacatatcagtgaacagttaactatattaaatttttatcatttactttttttaagattcagacctcagttatataaatttcagtttaatatcaaccaaaaaattaaaattttaatctaacccttatgtgtataaattggtgtcccataccagcttttaatggtggacctatagaatccagtacttttaatggtgggaatttacagtagaagcatcctttgctgagttatacattcctttatcaatctcttttgatacaacatttaaaacaagtagcttcaagaaaccactggtgttttgaggatagtatttctaaatagcattcaggaacagagtattattgcacagatctgaagatcaaaaaaaagctcaaggaaatacagatcggaagtgctgatgagttatatttattgaaaacccaacttttaaggaagtgctaagatcagtcacccatgtgaataagaagccaggaaaggaaagatggggaagcccagatcaccaggcttctattaaggaggaaagcaacagaggaaacagtgaaggggaacagaagggggtagcaaagtgttacagaaaagcggactggatagacaaaactgcagaaggtgtatgttggggagaactgaaagggaaaacaaaatacttgacatagtcttaagtagaagaaggcagttagagaaaacaaagtatctactggccttgtcaacatacagacttcaaaataccccttatgagaatccaaagaatgatgtgtgtaagggaagattttatttgcccttccggaagaaatcagtatctatgcaaatcttgaaagacgaaatcaaagcccattaatgattcagaatcagtgcttgacctcctgtattctgaatggtgaactctggaagcagggattgtgtctggctctttttagagctggaaatgtagtggctttcattaaatacttgctgtaaagtctttctaagaccaattattatcttagcatgtttcagtatcttctctatcataggccctaagttcattgggggaaaaaaaataagaagattcaacagaatcagcatttgaagtgtaccattggtagttgtttatgaaattaccagatattcataaatgtgacaaatgaacagcaggattatgaattatcaaaggaaaaagtatttgctgaggtgaaaaaatctgatgtttgaggaagtttttatttttatttatttgttttgtttttttttttttgaggcagactctctgtcgccaggcttctcctgcctcagcctcacgagtagctgggactacaggcatgcaccaccacgcccagctaatttttgtatttttagcagagacagggaggaagtttttatttttataaacaaaatctgatgttcagaggccccgtttcttacaataaatgttgagtcttagttaagcaggaatttatgaacacccatttcctgactttttgctttaatttagatttttctccatcctgtttctagcacaaaaatttgcctgctgtgttacaaaaataaatttatgttgtcctgtgccataaagtgatatatttaatatttttattctttggttttgaacattgtaagttcctaaaaacattttattaaacaagtagacattttgttattaaaaaaatgtgatctgtaatttctttgtgcagaatgatttgaagtattgtattcagtttacatgcgttattggtttataattaatatctaatgaaaatacatgttgttatattgtaaa

SEQ ID NO: 260 - DNA, 916 bp, Homo sapiens
  source 1..916: mol_type = genomic DNA
ggaagccgccgagtgattagtgagcggagaagctttcttccggcgggaagggccccggaggcgggcacttggggggaaagttgagacgtgattaccgggttgggcgggccccatctgggaggggtttgtgggtgaactcggggtccaccgcccgctgaggagatggatgaggacgggcttcctctcatggggtcaggcatagacctgaccaaggtgccagctattcaacagaaaagaacggtggcttttctaaaccaatttgtggtgcacactgtacagttcctcaaccgcttttctacagtttgtgaggagaaactggcagacctttcacttcgtatccaacaaattgaaacaactctcaatattttagatgcaaagttgtcatctatcccaggcctagatgatgtcacagttgaagtatctcctttaaatgtcaccagtgtcacaaatggagcacatcctgaagccacttcagagcaaccacagcagaacagtacacaagactctggactacaggaaagtgaagtatcagcagaaaatatcttaactgtagccaaggatccaagatatgccagatatctcaaaatggttcaagtgggtgtaccagtgatggcaataagaaacaaaatgatatcagaaggactagacccagatcttcttgagaggccagatgctccagtgcctgatggcgaaagtgagaaaactgtagaagaaagttcagatagcgaatcttcttttagtgattaagcttaattttgataagaattacatatgcatgcataggggtacatttacattctgtaagagattgagcctgaactctcttagtcataaaaacatcaaatggccacatgtccactaccaagcttcttctatgttaaaaaaataataataaagcagttttaacctgccagta

SEQ ID NO: 261 - DNA, 2763 bp, Homo sapiens
  source 1..2763: mol_type = genomic DNA
gacgcgcgcgatttaaaaccagctcaggagacgccaaggaaagatgggacctcccggcccagcactgccagccacaatgaataactcttcttcagagacgcgaggacacccccacagtgcctcctctccttcagagcgtgtgttcccgatgcccctgcccaggaaggcgcctctcaatattcctggcaccccagtcctcgaagactttcctcagaatgacgatgagaaggagcggctgcagcggaggcgctcgagggtctttgatctgcagttcagcactgactcacctcgcttattggcctccccctccagcaggagtattgacatttcagctactatccccaagtttacaaacacgcagattacggaacattactccacctgtatcaaactgtccactgaaaataaaatcactaccaagaatgcttttggtttgcacttgattgattttatgtcagagattcttaaacagaaagacaccgaaccaaccaactttaaagtggctgcgggtactctggatgccagcaccaagatctatgctgtgcgcgtggatgccgtccatgccgatgtatacagagtccttggggggctgggcaaagatgcaccgtctttggaagaagtagaaggccatgttgctgatggaagtgctactgaaatgggaacaaccaaaaaggctgtaaagccaaagaagaagcacttacacagaactattgagcagaacataaacaacctcaatgtctccgaagcagatcggaagtgtgagattgatcccatgtttcagaagacagcagcctcatttgatgagtgcagcacagcaggggtgtttctgtccactctccactgccaggactacagaagtgaactgctgtttccctctgatgtccagactctctccacgggagaacctctcgagttgccagagttaggttgtgtagaaatgacagatttaaaagcgcccttgcagcagtgtgcagaagatcgccagatctgcccttccctggccgggttccagtttacacagtgggacagtgaaacacataatgagtctgtgtcggccctggtagacaagtttaagaagaatgaccaggtatttgacatcaatgctgaagttgacgagagtgactgtggagacttccccgatgggtccctgggggatgactttgatgccaacgatgaacctgaccacaccgcagttggggatcatgaagagttcaggagctggaaggagccctgccaggttcagagctgccaggaagaaatgatttcccttggggatggagacatcaggaccatgtgcccccttctgtctatgaaacctggagaatattcttatttcagtcctcggaccatgtcgatgtgggctggcccggatcactggcgctttaggcctcgacgcaaacaagatgctccttcccaatcagaaaacaaaaagaagagtacaaaaaaagattttgaaattgactttgaagatgatattgactttgatgtatattttagaaaaacaaaggctgctactattctgaccaagtccactttggagaaccagaattggagagctaccacccttcctacagatttcaactacaatgttgacactctggtccagcttcacctcaaaccaggcaccaggttacttaagatggcccagggccatagggtagagactgagcattatgaagaaattgaagactatgattacaacaaccctaacgacacctccaacttttgccctggattacaggctgctgacagtgatgatgaagatttggatgacttatttgtgggacctgttgggaactctgacctctcaccttatccttgccatccacctaagacagcacaacagaatggtgacactccagaagcccaaggattagacatcacaacatatggggagtcaaacttggtagctgagcctcagaaggtaaataaaattgaaattcactatgccaagactgccaaaaagatggacatgaagaaactgaagcagagcatgtggagtctgctgacagcgctctccggaaaggaggcagatgcagaggcaaaccacagggaagctggaaaagaagcggccctggcagaagtggctgacgagaagatgcttagcgggctcacgaaggacctgcagaggagcctgccccctgtcatggctcagaacctctccatacctctggcttttgcctgtctcctacatttagccaatgaaaagaatctaaaactggaaggaacagaggacctctctgatgttcttgtgaggcaaggagattgagttcactatggagaagtcagcagcaggaggcccatcccttactcagttgccgggacatccccagtctcgggggaagaagatgccatgggcttatacccaggctgtagccaactaccaacgtgcctgtttgtttgttgctctttccttctctccatcatagtctgggtgccagcgccctgaagctccgtgctcaactgattaaactttactgccctatggtgaccatctaggagaggggagggcagagggggtgagggtactattctggattgagaaaacctatatccattctttatatcaatgtatagttttagtctcctaaattgatctgttattttccaaactattctcttgtagaaaattttccagtgggcacttaatggtgcccttgaagaacttcctaatccatgtacataaaatacatcatatgtacacttataaatgtatatagaatgctcaaaaataaaattcttaataatagaactggcaaaata

SEQ ID NO: 262 - DNA, 3601 bp, Homo sapiens
  source 1..3601: mol_type = genomic DNA
cgcgccggcgcgcgaggggcggggtgaaaggtcacagcgcggcagcgggtctggctggcggcagcggcgggagggagccgagagacccgagtgcacgtgtggagaagcggcggcacaagcgcggcggcgggagacactcccgcccccaccagactcaagccctcactcgactctcgcggccttcgttgctcgcacagctccctgcccaggctaggaggccggcttgcggggttgagtggcccgagctaagggtgcggagacctaagggcggcgactacgacggcgttgatatcggtggtaacgacggcctcagcaggcggggaagatgaaaggtagccggatcgagctgggagatgtgacaccacacaatattaaacagttgaaaagattgaatcaggtcatctttccagtcagctacaatgacaagttctacaaggatgtgctggaggttggcgagctagcaaaacttgcctatttcaatgatattgctgtaggtgcagtatgctgtagggtggatcattcacagaatcagaagagactttacatcatgacactaggatgtctggcaccttaccgaaggctaggaataggaactaaaatgttaaatcatgtcttaaacatctgtgaaaaagatggtacttttgacaacatttatctgcatgtccagatcagcaatgagtcggcaattgacttctacaggaagtttggctttgagattattgagacaaagaagaactactataagaggatagagcccgcagatgctcatgtgctgcagaaaaacctcaaagttccttctggtcagaatgcagatgtgcaaaagacagacaactgaacaaattacaaatgaactttcttgcacttgcttgtcgccaaataaaagagaggcccattgattcctcccccaccccaacacttttcttttaaagcttttctccctccttgttcttgtttttctttcttcctttccttttctctgagagttttaatactttcaaggactttaaaaaaataatcatgtttgaattgttttctcttatttttgtgaggtggtttgaaggaaggacaaggtagatctgtttagttttgcagttgaagttagatggtcctaaacatttaattgtcaaataatttcaaatttaatgtcctgctttcacattgaagggcagagcctacaaaacattgtatatttcaaaagacaaaaagaagcagcagcagtatcttgttctctaattcatagacaagttgagtgtgtttgtggtactttgggtttttaaacactttgggatactaatccctagacattgccttcactccacctttagtccttctgagcactctctcgggagttggaacattgttatccttgtaagaaatactaagcttatgttgatttttaagtaattatatcttctcttcttgctggtgggtggggcagtttggtttagtgttatactttggtctaagtatttgagttaaactgcttttttgctaatgagtgggctggttgttagcaggtttgtttttcctgctgttgattgttactagtggcattaacttttagaatttgggctggtgagattaattttttttaatatcccagctagagatatggcctttaactgacctaaagaggtgtgttgtgatttaattttttcccgttcctttttcttcagtaaacccaacaatagtctaaccttaaaaattgagttgatgtccttataggtcactacccctaaataaacctgaagcaggtgttttctcttggacatactaaaaaatacctaaaaggaagcttagatgggctgtgacacaaaaaattcaattactgtcatctaatgccagctgttaaaagtgtggccactgagcatttgattttataggaaaaaatagtatttttgagaataacatagctgtgctattgcacatctgttggaggacatcccagatttgcttatactcagtgcctgtgatattgagtttaaggatttgaggcaggggtaattattaaacatattgcttctattcttggaaaaatagaagtgtaaaatgttaataatacaaatgtcactgtgacctcctccactgagaggactggtttatgccagatcattttccggcacacacggagtggctttgacagattgataactttgtaagatgggagacatctgaaatattcatgttttccttttgtagtcccatctccactatttagaaatgttctcagactttaaaataatgcacagggcttgagctttctgtcatttgactttaaaaggaagtttcattcatatttatcctcttatgtaaaattgcggtataaagtctcatttccaaatatgttaaatgacaaaattattttataaaatgtttatgcacactttataaccttaagtttttatttgagaatgtgaaagtacaaagtgcagtagacttcaacaatcttgagtgccaagaataatacagaaaaagaagacagttgatgaatgagtttatagggttctaatcttaagatggtaaaaatgtagaaagaccttgctggttttttgggggtattcgtttcttaaacaatccaaatctaagcttagaagaaaagtttagcgttaagcacctttatcttcatgaataagcttcagcttgctcttggcaagagaagagtgcttgagttacagaaggcataagtagtttgaagaatgcagcagcctttttgtaaacttcccagatatcaaaatagactttgatatataaatggttttctgagatgacactgcctctatttctataaccatttcacctggactatctaatcagtcctatgaatgtatccctaaatgtggttattgaaaacctaatagctgcctcatgacaagtacatgttatttaaggaggaaaaaatattaaattttgaattgagtgtgtaggctccctatcattatatatagagtttctttttccacggtagtcagtgacttaacctgaattgtaaatgtttgtaaagggttaattgtcctacatcaaacttagttaaataattccatccacttatggaggaggaggagaatgtggaagaggtaaaaagctgggcacaagttcatatgcctatgagtcagtaaagactgaagtaatgtcctatgttgagctggttattttgatatatgataataattatctttgaagtagaacaattctgttaactggaaaatcacaggatatatccatcatatttttcaggacagatagtttttactgtggggcaaataggttaaaattacactatgttagttgcatttaggttttaaagcaaagaatctgtagagaaatctatgcaatatatagtttgtccagattagctttcatttggggaatgaagttctgaaatatctaaagcagtttactcatcaattgaaaagtcctccaaaaagagaactattgggaaaccatggtgtggtggtggaaaagaaaagctccctcagttttttggagggaataacttaaaaaaatacttaaatggctaagtttacttggtgcagttaagaattaaacttgtcaattttaacattgctgttacatctgaaataaacttatgtgatgttctggt

SEQ ID NO: 263 - DNA, 5257 bp, Homo sapiens
  source 1..5257: mol_type = genomic DNA
tctgggtagggggaagcgcccggcggccgcctccgccactgcagctgcagcccccgaggtcgccgcagtaatccggacccggcagcacccgcaccctcggcggccgcagcctcagcaccgcagagcggagagcggagcccggagcccgccgccccaggatggctgcagctcctccaagttactgttttgttgccttccctccacgtgctaaggatggtctggtggtatttgggaaaaattcagcccggcccagagatgaagtgcaagaggttgtgtatttctcggctgctgatcacgaaccggagagcaaggttgagtgcacttacatttcaatcgaccaagttccaaggacctatgccataatgataagcagacccgcctggctctggggagcagaaatgggagccaatgaacatggagtgtgcatagccaatgaagccatcaacaccagagagccagctgccgagatagaagccttgctggggatggatctggtcaggcttggtttagaaagaggggaaacagctaaagaagccttagatgtcattgtctccttgttggaagaacatggacaaggtgggaattactttgaagatgcaaactcctgccacagcttccaaagtgcatatctgattgtggatcgtgatgaagcctgggtgctcgagaccatagggaagtactgggctgccgagaaagtcacagagggagtgaggtgcatttgcagtcagctttcgctcaccactaagatggatgcagagcatccggaactcaggagttacgctcagagccaaggttggtggacgggagagggcgagttcaatttttccgaagtcttttctccagttgaggatcatctagactgcggtgctggcaaagacagcttagaaaaacaagaagaaagcatcacagtgcagactatgatgaacaccttacgggacaaagccagcggagtgtgcatagactctgagtttttcctcaccacagccagtggagtgtctgtcctgccgcagaatagaagctctccgtgcattcactacttcactggaacccctgatccttccaggtccatattcaagcctttcatctttgttgatgacgtaaaacttgtccccaaaacacagtctccctgttttggggatgacgaccctgccaaaaaggagcctcggttccaggagaaaccagaccgccggcatgagctgtacaaagcccacgagtgggcacgtgccatcatcgaaagtgaccaggagcaaggtcgcaagctgaggagcaccatgctggagctggagaagcaaggcctggaagccatggaagaaatcctgaccagctccgagccactggaccctgcggaagtgggggaccttttctatgactgtgttgacacggagattaagttctttaagtgaagtaagcgttccctttccccttcttatttaagacttcccaccttactaaattaccagcaaaacaaaccactctcctgtttgagtaaaatgagaaagttaatatgtggcctccttttctgaagccagatcaaactgttaccttgtgttccaccttgaatctcacagcgtccccttctgcaatgtaggtctccttcctgtgcagtgtaacatgtatcccgttgcctgttgttcggttgtgtgactaattgtggattttaagctgctattattgtatttcagtggcaatggacacattagccttttacaagaggactagagttcatcaagccttgaaaggcaggcttcacagtgccgagttggcgggaaaagcaaattcttttgaagtcttagtctttccctcagtagcggtttctttcaggttaacaagaggcatttgtgcacacacacagggctcttgtgtgtgttgtcaaggggaccctccgtggcctcccgtgagtgcatgcctgtagtgcacagtgtctctacaggtgtcttctggggggcagaaccaattggaaggaagaaagggacccctctccagtcctggctccttcctacatcctgggctcctgaagaagctgtcttcccattttccatgcgctgtgcttatgtgtggtggactgcagagctgcttccacttacaggagagctgataatttgttagctggaacctattcacttccgagattcagacatagccatgctggtggccttctgaatcactgcatggatgtcccaggaggcagctctccccacacagcagcacagccatcacaggattccttgtgtagaaatgattcccagtctagttaccaacagctagtctaggagtaattgaatggccctatggcacagttccacccacagagtagtgaatctctcagccaaggagggaaagaaaaggaagaactcttgactatttagattctagttaaatatctggaatcctagcagtcactacattatctcagcagagagactttaattaaactgatttgtttccaatgtcgggttcacttaaaggatttgacttaccaccagagcatagaaaagcatgcaaggaagaccagatgggcttagcattgggaagacagagggcaaggaggtgatagatggatatagaagcatttctctgcaggataccagttcaggccccaccattcctgccaaggccattacatcccacaaacccaaatacaaagcagctgacttccctggatcttccccccactcctcacacctcacatgtcccaggagctgccttcattcaggcgggtagctgcactgggcatggggtggtggtgggagcttaccgccacctattcaagctctcagctactcctgaaacgggcagagatgatgaacagaagtgtatgtaaatacagcagctagtgggagagcaccagttgggcctaatcctgcctcatcattcttggcaggaatctgcaaatggaaacattgtgagtatcagcaatctgggaagtgacagggttaataactccttcccagaagctgtatcatgagattttgaggggaccgagccctgttacatggatgtgaacagtgaggatcagaggttttatcagaacacattctttttttctaccaactctccagagcgtgagtataggagtgccatgagctttttagtcagcagttttgtaaactctgtatataaaatcattaaccacacattgtgggtgatgggaagacgatttcagctgacagagttaatggcaaccaataatggtggcctgtagctgctaagagcttcacgcaggtttggcctgggctttcactgttggtgaatttagagtgtccttttaggtggggcggctattctaaaagtgtctttctatcactgttaagggggggggaaagtgaggttcgaggatgacgtaggtaactctcccctcccaagtccatgttccaagtggctatgtaaagcaagatgatacagaaagctgctctaaaatctcactgagtgatttcaccttcgcctactatgaaatgtctcatcagacctgacatgtctgagataaccaaggtgattcaggatttgatcaaaagaagtctagtaagaattaattacacagaagcctcctttcatttctatgggccaaacaaaggccatggataaccctacccgctttatgtcattacccattgggaaacacaatggctacttctgttagggtacattgaccttggtcaagcatcttaaagaaggcaaccctaattgagagctgtcttggctaatactctgcaccacaattgtgatgtcctagtcctaccactagagggcatggtacagcctggcaaaagttaaaaggggtgtggcagctcccatcaggtctggaggtggtctataagcacagttgacagttgtgcattgggatgggtggagaaagacgacaagagagcagagaatctgctgatgtggctgcgcttacttttagtgactttatgtacttatattaacagctggaaataggttgttgggttttgagcaggctgttatagtgaggaatgttcatttttaaatgttcctaacagattttgcttttgaaaaatgcttgttacatgaataatttgtggaccagggattgcttttctgaaggcagtatagggaacatgaatattcaagatgaaatacaaaaattatgtttaagggtcatagtgtataagtagcttcctaggaaaccctttgtgtatcttttcagactggggtgggggctgagcatgcttgtgcagaaagaagccatagccagaaaggacagaatctctcccccactcccttgccccataaccaaacataagctagctagtcttgtctaatagatgggatttactataggtgaagatagccctcatattcaaggacagaagctctggcaggagtaaattagcaaagcagaaatagtaccctttcattcttggaggtgctttgaaattttaggtagaatataatcgaaattatggaggttccttagtgctcaataatataagacctggtgttattagaacgagtctttcttataaactaacagagcaggtatatgcctgttagaccttagctgtggggttcctttactattgggtgaatcattaggtataaaaaataatcatcaaccaggcaaattactttgcttcctagctgatgtcatcccacattggtacaggtgttattcagtactgggtggttcagcagggaagccgggtgggaccagtgtgtctgtcatgaaaccactaactgcattcctgactgaagagccatctgtcatttattggggaaggtcttcagttgagctctcagccttaggaaggaagcacgtggaggagggacggaggaggttcccttgctgggcatgcttcgtagagggccaggagcagcaggtcatgtgcacatgccgttgcagcacaagcttatgcttcccgtagccgtggcttttcattctgcacagtcccaggtcccagctcccctcttatggtttctgtcataatgtgctttatctgattgactccaaacatcccgaaatgtcacctgcagatttctcgtgggaaccaatatgtacatgtttgcaattatgctgtgagaatttaaatgtgttagatggaaaatgctattggcagggaataataataaaaaaaaaagaaaatcattctgtttcctgcagtgggaactggccatgtagtcttaacagtcttttgtacaaatatctacaaagcagataatatccctatccagtgcttgcccttggaattgtctctaaatgcatcaagcatacaataaaaaaaactgaaattaacatcca

SEQ ID NO: 264 - DNA, 3108 bp, Homo sapiens
  source 1..3108: mol_type = genomic DNA
tgggagcggtctagagcccgggcgcctcctggggggtggggaaacggtttcgtgaggagaatttgaggtaacctcgccaactcgcggtcggaagctcctctgaaccccgaaataggagagagctcccgtcctctctcggtcctgatgcagcacctcgcaagtggaaggggtcgtcgcggttaagcccccggataggggaatcgggccccttctgggattcgagcggatccaggccgctccctggagggatgaactgtcgaggggcccagggcagcccccgctagaggcccggtcgggtgtggggtcccctgtcccctgtcccgagcccggggagggggacactatttctggtactcccaggaggctgcgggtcgatgctcgtgccagcctgggacccaggcagcacggtttctctcccaaattgtgccagagaacacgcacgtcctggttttcattgttccccgcctcctgcgactcgtttgtggttaaaattataagacctaattatgagtgatcaaattaaattcattatggacagtctcaataaggagccctttaggaagaactataatttaatcacgtttgattccttggagccaatgcaactattacaagttctcagtgatgttctggctgagattgacccaaagcaacttgtggatatcagagaggagatgccagagcagacagccaaacgaatgttgagccttcttggtattcttaagtacaaaccttcaggaaatgccacagatatgagtacttttcgtcagggtttggtgattggaagtaaacctgtaatttacccagtgctccactggcttcttcagaggactaatgaactgaagaaaagagcatatttagctcgttttttaataaaacttgaggtaccaagtgagtttcttcaggatgaaactgtggctgacaccaataaacagtatgaagagttaatggaagcctttaaaactttgcataaagaatatgagcagctcaagatatctggattttctacagcagaaataagaaaggatatcagtgcaatggaagaagaaaaggatcagctcattaagagagttgaacatttgaagaaaagggttgagacagctcagaatcatcaatggatgcttaaaatagcaaggcaacttcgagttgaaaaagagagagaagaatatcttgcacaacagaaacaggaacaaaagaatcagctatttcatgcagtgcaaagattgcaaagagtacaaaaccagctgaaaagcatgcgccaagctgcagcagatgcaaagcctgaaagtttaatgaagaggctagaggaggagataaaatttaatttatatatggtaactgaaaaatttcctaaagaattagaaaataagaaaaaggaattacattttttacaaaaagtagtttcagagccagctatgggccattctgatcttcttgaacttgaatctaaaataaatgaaataaacacagaaattaaccagttgattgaaaagaaaatgatgagaaatgagcccattgaaggcaaactctcactgtataggcaacaggcatctatcatttcccgtaaaaaagaagccaaagctgaggaacttcaggaggccaaggagaagttagccagcctagagagagaagcatcagtaaagagaaatcagacccgtgaatttgatggtactgaagttttaaagggagatgagttcaaacgatatgtcaataaacttcgaagcaagagtacagttttcaaaaagaagcatcagataatagctgaacttaaagctgaattcggtcttttgcagaggactgaagaacttcttaagcaacgtcatgaaaatattcaacaacaactgcaaactatggaggagaaaaagggtatatctggatatagttacacccaagaagagctagaaagagtatctgcactgaagagtgaagttgatgaaatgaaaggacgaacattggatgatatgtctgaaatggtgaaaaaactgtattcattggtatctgaaaagaagtcagctcttgcctcagttataaaagagctacgacagttgcgtcaaaaatatcaagaactgacccaggagtgtgatgaaaagaaatcccagtatgatagctgtgcagcaggcctcgaaagcaatcggtccaaattagaacaggaagttagaagactccgtgaagaatgtcttcaagaagaaagtagataccattatacaaattgtatgattaagaacctagaagttcaacttcgtcgtgctactgatgagatgaaggcatatatctcttctgatcaacaagaaaaaagaaaggcaattagggaacagtataccaaaaatactgctgaacaagaaaaccttggaaagaaacttcgggaaaaacaaaaagttatacgagaaagtcatggtccaaatatgaaacaagcaaaaatgtggcgtgatttggaacaattaatggaatgtaagaaacagtgctttctgaaacaacaaagccaaacttccattggtcaggtaattcaggagggtggggaggaccggctaatactgtgaattcttgtgtcatcgtttggggttttacttgataccactagctataagcctaatctcataatgtatttcttttttgaaactgatttgtatagcattttgttttcagaagagccattctttattaagttttcatagaaaataatgttaaggtagatttagtttgaatgttttttcatatgaaaaagaggcttttattcttttccatagtttagacatcactggcgtcttctgagttttatgagacaggaaactaagtttactatctgtaaatgtaaacatatgtccattaagaaacatgtagtttttttttagaatgtaataacccagtggcttactgtttttcttaatctcttttaaaaaaactttagaagaatcttttaggaactaatatctcttgttctgaagaaacatttatctgacgttcagcagttcctacagttttacttcagtttatttttcttctgtaaaatgcaagaaaatttaatattttgactaacatgtcttttctgtttgtatcatttaaaggcaaataaacttggtacgtatttcatatctatttaaaaaatgtata

SEQ ID NO: 265 - DNA, 1195 bp, Homo sapiens
  source 1..1195: mol_type = genomic DNA
aataaggttacacccaagcgtgggtttctaaggcgcggaattttccgtacagaccgatttaaggctgcaaggaaggagtcctgggagcatggctttccctgagccaaagccgcggcctccagagctgccgcagaaacggttgaagacgctggactgcgggcagggggcagtgcgagccgtacgatttaatgtggatggcaattactgcctgacgtgcggcagtgacaagacgctgaagctgtggaacccgcttcgggggacgctgctgcggacgtacagcggccacggctacgaggtgctggatgcggccggctcctttgacaacagtagtctctgctccggcggcggggacaaggcggtggttctgtgggatgtggcatcagggcaggtcgtgcgcaaattccggggccacgcagggaaggtgaacacggtgcagtttaatgaagaggccacagttatcctgtccggctctattgattccagtatccgctgttgggattgccgctcacggaggcctgagccagtgcagacgctggatgaggccagagatggcgtgtccagtgtgaaggtgtcagaccacgagatcctggcaggctccgtggatggccgcgtgagacgctatgacctaaggatggggcagctcttctcagactacgtgggcagccccatcacctgcacctgcttcagccgggatgggcagtgcaccctggtgtccagcctggactccacattgcggctcctggacaaagacacaggggagctgctgggcgagtacaagggccataagaaccaggaatacaagctggactgctgcctgagcgagcgtgacacacatgtggtcagctgttctgaggacgggaaggtgttcttctgggacctggtggagggtgcgctggctctggccctgcctgtgggttccggtgtggtgcagtcgctggcctaccacccaacagagccctgcctgctgaccgccatgggaggcagcgtccagtgctggcgagaggaggcctatgaggcagaggatggagcaggctgaagccaggggacccaccaacaggaccaaggaccgagacacagacatggaaggacttcagataccatcttattctagagacgtagctgaccaaaaagtaggggaggggctgggtctgcaaattaataaatagaagagggggtaagaccttcctgggaccgc

SEQ ID NO: 266 - DNA, 2345 bp, Homo sapiens
  source 1..2345: mol_type = genomic DNA
ggccagggttcgctgacgctcagtgttttggcccggacggtcacatgtttcctttgttgtgagctgcggcagagactggtggctggaggagacgccggcgctggagagtgcgctgcgccgcccgccgctgagggaccgcggggttagccactgctggctgcttccagtgttcgccgagaggtaccgggggtgacagctccgggaccggccgaaaggcgaggaaccggtgtggaaattaaaagaacacacatattttgactggggctttgatcaaccaaatgctaaaaagccacataaagaagatccctaatagtcatttctcaacaattatatagtcaactgatgtaacaatggtactaatattgggacgcagactaaacagagaggatcttggggtgcgtgattccccagcaactaagcgaaaagtttttgaaatggaccccaaatctctgacaggtcatgagttttttgacttctcttcaggatcatcccatgccgaaaacatactccagatatttaatgaatttcgtgatagccgcttattcacagatgttatcatttgtgtggaaggaaaagaatttccttgccatagagctgtgctctcagcctgtagcagctacttcagagctatgttttgtaatgaccacagggaaagccgagaaatgttggttgagatcaatggtattttagctgaagctatggaatgttttttgcagtatgtttatactggaaaggtgaagatcactacagagaatgtacagtatctctttgagacatcaagcctctttcagattagtgttctccgtgatgcatgtgccaagttcttggaggagcaacttgatccttgtaattgcttaggaatccagcgctttgctgatacccattcactcaaaacactcttcacaaaatgcaaaaattttgcgttacagacttttgaggatgtatcccagcacgaagaatttcttgagcttgacaaagatgaacttattgattatatttgtagtgatgaacttgttattggtaaagaggagatggtttttgaagccgtcatgcgttgggtctatcgtgccgttgatctgagaagaccactgttacacgagctcctgacacatgtgagactccctctgttgcatcccaactactttgttcaaacagttgaagtggaccaattgatccagaattctcctgagtgttatcagttgttgcatgaagcaagacggtaccacatacttgggaatgaaatgatgtccccaaggactaggccacgcaggtccactggctattctgaggtgatagttgtcgttggaggatgtgagcgagttggaggatttaatcttccatacactgagtgctacgatcctgtaacaggagaatggaagtctttggctaagcttccagaatttaccaaatcagagtatgcagtctgtgctctaaggaatgacattcttgtttcaggtggaagaatcaacagccgtgatgtctggatttataactcacagttaaatatttggatcagagttgcctctctcaataaaggcagatggcgtcacaaaatggctgtcctccttggtaaagtatatgttgtcggtggctatgatgggcaaaacagacttagcagcgtagaatgttatgattccttttcaaatcgatggactgaagttgctccccttaaggaagccgtgagttctcctgcagtgactagctgtgtaggcaaactgtttgtgattggtggaggacctgatgataatacttgttctgataaggttcaatcttatgatccagaaaccaattcttggctacttcgtgcagctatcccaattgccaaaaggtgtataacagctgtatccctaaacaacctgatctatgttgccggtggactgaccaaggcaatatactgttacgatccagttgaagattactggatgcacgtacagaatacattcagccgtcaggaaaactgtggtatgtctgtgtgtaatggtaaaatatatatcctgggcggaagacgggaaaatggagaagccacagacactattctctgttatgatcctgcaacaagtatcatcacaggggtagctgcaatgcccaggccagtgtcctatcatggctgtgtgactattcatagatacaatgagaaatgctttaaactctgaagacaggatacctcaccgaagaagccacactgatccaagatgggaggttttaaaaactctacagtgggaacttcacatatctcctttgtgccatatgcaaaaaatagtaaaaataataatttggtgcctttctcctcaaaatatcaatctttcaaactataataaagcctttcctataattgaaaaaaaaaa

SEQ ID NO: 267 - DNA, 1576 bp, Homo sapiens
  source 1..1576: mol_type = genomic DNA
taaatattttttgctttagtttttcttataaggctaaaaattcacaaagcatatatcaatgaatcaggaggatctagatccggatagtactacagatgtgggagatgttacaaatactgaagaagaacttattagagaatgtgaagaaatgtggaaagatatggaagaatgtcagaataaattatcacttattggaactgaaacactcaccgattcaaatgctcagctatcattgttaattatgcaagtaaaatgtttaaccgctgaactcagtcaatggcagaaaaaaacacctgaaacaattcccttgactgaagacgttctcataacattaggaaaagaagagttccaaaagctgagacaagatcttgaaatggtactgtccactaaggagtcaaagaatgaaaagttaaaggaagacttagaaagggaacaacggtggttggatgaacagcaacagataatggaatctcttaatgtactacacagtgaattgaaaaataaggttgaaacattttctgaatcaagaatctttaatgaactgaaaactaaaatgcttaatataaaagaatataaggagaaactcttgagtaccttgggcgagtttctagaagaccattttcctctgcctgatagaagtgttaaaaagaaaaagaaaaacattcaagaatcatctgtaaacctgataacactgcatgaaatgttagagattcttataaatagattatttgatgttccacatgatccatatgtcaaaattagtgattccttttggccaccttatgttgagctgctgctgcgtaatggaattgccttgagacatccagaagatccaacccgaataagattagaagctttccatcagtaaaaggatgttttcttttttcacacagtaaaaattcttatcattcaaggatattggaaccacaggactatttggataaaaaacattatttgcaaattaatgcgcataggccatcttacttttattgcaaaatggcatgtgctgccatctattattcatttttaaatggtcatttcttattcagtgagtgctttagtgttttaaactatatggataagaatgcaggtagataatattctaggcataaaacatttaatgtaccttacctcatgcaatattctttggattctttgttgatttatgatattgctaatataatattttcttaaaatatataacaatatcttttatgcattttgagttccagctggtgcttctttatatttagaaattataatgggaaggtcatttaatttacagatggttttaaaattgaggtaatatctgaggtggcataatttaaaaatatttagcaaatttgtttcatatatactgtcttatttctagatttgtttaaaattggaatatgaaaaactaatggataaagctagcataaaattgatattttagtttgtattattaatatatcatgttaccttatatattaatctactcttgattctgctaattattaccaacaaaattgtattcatgacattttattaatcctctgtgaattttctgtaaataaaattatttctgaaaatctct

SEQ ID NO: 268 - DNA, 1579 bp, Homo sapiens
  source 1..1579: mol_type = genomic DNA
cggaagccacggttgcccggcaacaacaagtcccgtcgggtggcagcggctggcggcaaaacctctcgagtgagcccctgcccgagtgccgcgggggagaggccgcgagcgggaccgagaagtgggctgggagcagaggtcgcggaggtggcgagcgaggccggggcccaggcggggaccggcaggggcccgggagtggcgggcacgccagggtcagggtgccgggcgagggagggggcccggggttggggaagggggcccggggagggaggtaaacagccctgcaggcctcggggcaccgttgctgggcggcgccggcggcatgtgcgagggcccgtcccgcatctcggggcccatccccccagacccgacgctctgtcctgacaactacaggcggccgacctcggctcaagggcgcctcgagggaaacgcgctgaagctggacttgctgacttccgaccgggccctggacaccaccgctccccgtggcccctgcatcggtcccggtgccggagagatcctggagcgcggccagcgcggcgtcggggacgtgctgttgcaactcgaggggatctccctaggtcctggggcctctctcaagaggaaggaccctaaggaccatgagaaggagaacctgaggcggatcagggagattcagaagcgcttcagagaacaggagcgcagccgggagcagggccagcccaggcccctgaaagctctgtggcgctcacccaagtacgacaaggtggagtcccgggtcaaggcccagctccaggagcctggccctgcctctgggacagagtctgcccacttcctgcgggcgcactcccgctgcggccctggcctcccaccaccccatgtatctagtccccagccaaccccaccaggtcccgaagctaaggagccaggcctgggggtggacttcattcgtcacaatgcacgagctgccaagagagccccccggaggcattcctgctcactgcaggtcctggcacaagtgctagagcagcagcggcaggcccaggagcactacaatgccacgcagaagggccatgtgccacattacttgttggagcgcagggacctgtggcggcgggaggccgaggcccgcaagcagagccagccggaccctgccatgcccccaggccacacgcgcatgcctgagaaccagcggctggaaacactgaccaagctgctccagagccagagccagctgctgcgtgagctggtactgctgcctgctggggcagactcactgagagcccagagccaccgtgctgagctggaccggaagctggtgcaggtagaggaggccatcaagatcttttctcggcccaaagtcttcgtgaagatggacgactgagcccctttgggggacagtggcaaggagctccatgctgaggatcgccacatggctgcaaaggacagggttggacccaatcccagagcagaggtctgaagacaggagcaggggggtggccagtgtccctagagcactcttcccagtcaccagtggctgcagaagggccaccctagccttttaactgctttgtcaaaattaaacattttgtacacagga

SEQ ID NO: 269 - DNA, 2236 bp, Homo sapiens
  source 1..2236: mol_type = genomic DNA
actgcgccgaggggcggggctggacgcgcgctccaagatggcggcgaacgtgttcccgttccgcgacgcccgtgccgcaccggacccagtgctggaggccggcccggtggcacacgggccactgccggtaccgctggtgctggacaacgggtcgttccaagtccgcgctggctgggcgtgtcccgggcaggacccaggtcccgagccgcgcctgcagttccgcgcggtgtgcgcccgcggtcgtggcggggcacggggcgcgtcgggcccgcaggtggggaacgctctgggcagcctggagccactgcgctggatgctgcgctcgcccttcgaccgcaacgtgccggtcaacctggagcttcaggagttgctgctggactacagcttccagcacctgggtgtctcctcacagggctgtgttgatcatcccatagttttgacagaagctgtgtgcaacccactgtattcacggcaaatgatgtctgagcttctttttgagtgctacgggattcccaaggttgcctatggaatagacagcctcttcagcttctaccacaataagccaaagaactcgatgtgcagtgggctaatcatttcatctggataccagtgtacgcatgttttacccatcttagaagggagattagatgctaaaaactgcaagcgcatcaatcttggaggaagccaagcagctggttacctccagcgtctcctccagctgaagtaccctgggcacctggcagccatcaccctcagccgcatggaggagattctgcatgagcacagctacatcgctgaggattatgtggaagaattacacaaatggcggtgtcctgattattatgagaataatgtccacaagatgcagctcccattttccagcaagctcctgggcagcactctgacctctgaggagaaacaagaaaggcggcagcagcaattgcggcggctgcaggagctcaatgcccggcggcgggaggagaagctgcagctggatcaggagcgtctggaccgactgctatatgtgcaggaacttctagaggatggccagatggatcagtttcacaaagctctgatagagctgaatatggactccccagaagagctgcagtcctacatccagaagctcagtatagcagtggagcaggctaagcagaaaatcctccaagcggaagtcaacctcgaggtggatgtggtagacagcaagccagagacccctgacctggagcagctggagccgtctttggaagatgtggaaagcatgaatgattttgatcccttgttttcagaggaaacacctggagtggagaagccggtcaccactgttcagcccgtgtttaacttggcagcatatcatcagctatttgttgggacagaaagaattcgagctccagagattattttccagccatctctcataggagaagaacaggctgggattgcagagactcttcagtacattctggacaggtacccaaaggacattcaggaaatgctggttcagaacgttttcctcactggcggcaacacgatgtatcctggcatgaaagccagaatggagaaggaactgttggagatgagacccttccggtcttcttttcaggttcaacttgcctcgaaccctgtgctggatgcctggtacggtgctcgtgactgggccttgaaccacctagatgataatgaagtttggatcaccaggaaagagtatgaagaaaagggaggagagtacctcaaggagcactgtgcttccaacatctatgtccccatccgcctgccgaagcaggcctcccgctcctcagatgcccaggcatccagcaagggctccgctgctggtggaggtggtgctggtgagcaggcatagcagaggccctccagagagactgccctgcacgccatgccttgggccacgttggcagtgtgacaggactgtgattgtgctagatgtacctgcccaagtctgctggtcacatttggcagcaaaatggatttctcctggggagaacaaagttaagggacactgagacctgcccttcagaattcggttcacttgggggcttctgtggtagagactaactggccttctgatgtctttgttcaactgtggccagctgtggcatcagcttcctggagcagtaaatgaagacagagtggaggacacaaatgtacaaaatgcacaagactgatttcttaccacattttagtctttcttgttttaaaaaaaattctttaaaattta

SEQ ID NO: 270 - DNA, 2458 bp, Homo sapiens
  source 1..2458: mol_type = genomic DNA
ttccggaagaggtcgccatggcttcccgggaggaggtactcgccttacaagctgaagttgcccaacgtgaggaggaattgaattcgctgaagcagaagctggcgtcggctcttttggctgagcaggaaccgcagccagaacggctggttccggtgtcgccgctgccgccgaaggccgctctgtcccgagatgagattctgcgctatagccggcagctagtgctgcccgagctgggcgtgcacggacagctgcgcctggggaccgcgtgcgtgctaatcgtgggctgcggtgggctcggctgtccactagcgcagtacttggcagcggccggcgtgggccgccttggccttgtggactatgacgtggtagagatgagcaacctggcccgccaagtgctgcatggcgaggcactggctggccaggccaaggccttttcggccgccgcctcgctgcgccgcctcaattcggcagtggaatgcgtgccgtacactcaggcccttacgccagccactgccctagacctggtccgccgatatgatgtggtggctgactgctcggacaacgtgcccactcgctacctggttaatgacgcatgtgtgctggcgggtcggcccctcgtgtctgccagtgccttgcgcttcgagggccaaatcacagtctaccattatgacggtggcccttgctatcgctgcatattcccccaaccacccccagcggagacagtgaccaactgcgcggacggcggggtgctcggtgtcgttaccggggtcctgggctgcctgcaggccttggaagtgctgaaaatcgctgcgggtctgggcccctcttacagtggcagcttgttgctctttgatgccctgagagggcatttccgctctattcggctgcggagccgcaggctcgactgtgcagcttgcggggaacggcccactgtgactgatctgctggactatgaagccttctgtggctcctcagccactgataaatgccgctccctgcaactactgagcccagaggagcgtgtttctgtcaccgactataagcgactgctggattctggggcattccacctgttgctggacgtcaggcctcaggtggaggtggacatttgtcgtttgcctcatgccctacacatccctctgaaacatttggaacgcagggatgcggagagcctgaaactcttaaaagaagcaatctgggaagagaagcagggcacacaagaaggggctgctgtccccatttatgtgatttgcaaactgggaaatgactcacagaaagccgtgaagatcctccagtccttatcagcagctcaagagttagaccctttaacagttcgggatgttgtggggggcctcatggcctgggctgccaaaatcgatggaacatttccacagtactgaggtgactggtatagtctgatgagaaagatgtggattgccataatacctcaaagatacacttgtttgcatttttcggtaatatacataggagctggggattctacagtatctgtgaatacgtggactcctttttataaggagttttaaaaattgttatgtattggatgaatgacttattaatggattataccgtttctgagaaccatcattttttttttcagcacacggaggatgtcttggacatgtgagatgtaacgtgacaggattttgcattttaaactgcagatcatttacatgtccttattttccacctcccccagtcaaaatgctttctaaatcattttcacagattatatacttcggatctgtttactgttcagttaagaaattcttggatcttattaatatttcagatgatagaatacatcctacagaaatacatgtttaaaatgtaaattgttttaattattcagaaagagggtcattctatttggccttttgaattagtatcaaaatgagattttttttttttttttgagatggaatctctctctgttgcccaggctggagtgtagtggtgcgatctcagctcactgcaacctccgcctcccaggttcaagcgattctcctgcctcagcctcctgagtagctgggattacaggcgcacgccaccacgcctggctaatttttgtatttttagtacagagggggtttcaccatgtttgtcaggctggtctcgaactcctgacctcgtgatccgcctgcctcgacttcccagagtgctgggattacaggcgtgagccaccacaccctcccgagatctttaaagtttaccaaaataaaggaaaccacctttgtagtctgtcagtgtctcttataaattgctactgttttcttaaagttaacttcagggtccaccttatgttgcacacatatcacatcgtttaaattgcatactatggtttgacttgctttggaattttcaagtcaaagtcccaaccctttgcctctccccctttaatttgccttttctcttttgatttaatgtttttttattc

SEQ ID NO: 271 - DNA, 2137 bp, Homo sapiens
  source 1..2137: mol_type = genomic DNA
ctctcccatcgcagtgccccttgccttctcctgccctagtaactgcctgcggggatccaggagcccccaggccgcgccgaactgcagtggataggggggaggggggcggtaaggatgagggctacggggaggcagaaatgggttgggggaaggggtggtggaagggaaaagaaaaaaccggaggcatgcaagcggctccccagccagctgttccagctgctgcttcctccggcgcgggccaggcggtgcaatattcccccccgctccatctttctcaccactacctgtccccccaacccaccacacgcactcatccctcccacccacacccctagtagcggatctccggcctgtaagggggtagtagggaggagctggggggagggggaggcctgcgagtttctaaccttgttcttataaacaaacccacatgtgcagctgccgctgctgcaactcaccccacaatcccggatataagtcctgcccctttaagaggaaaaaaaagattcccccgcctgcctcccaccccacccatccacaagagagaggaagcttgaagccaatatggagtccgtcagttgctccgctgctgctgtcaggaccggagacatggagtcccagcgggacctgagcctggtgcctgagcggcttcagagacgcgaacaagaacggcagctggaagttgaaaggcggaaacaaaagcggcagaaccaggaggtagagaaggagaacagccactttttcgtcgccacctttgttcgggagcgagcggccgtggaagagcttctggagcgcgcggagtcggtcgagcggctggaggaggcggcctctcggctccaggggctgcagaaactaatcaacgactcagtttttttcctagccgcttacgacctgcggcagggacaagaggcgctggcgcggctgcaggcggccttggccgagcggcgccgggggctgcagcccaagaagcgtttcgctttcaagacccggggaaaggatgctgcttcgtctaccaaagtagacgcggctcctggcatccccccggcagttgaaagcatacaggactccccgctgcccaagaaggcggaaggagacctcggccccagctgggtctgcggtttctccaacctggagtcccaagtcttggagaagagagccagcgagttgcaccagcgcgacgttcttttgaccgaactgagcaactgcacggtcagactgtatggaaatcccaacaccctgcggctaaccaaggcccacagctgcaagctgctctgcggtccggtgtctacctctgttttcctggaggactgcagtgactgcgtgctggcagtggcctgccaacagctccgcatacacagtacgaaagacacccgcatcttcctgcaggtgaccagcagggccatcgtggaggactgcagtgggatccagttcgccccttacacctggagctacccggagatcgacaaggacttcgagagctctggtttagataggagcaaaaataactggaacgatgttgacgattttaactggctggcccgggatatggcctccccaaactggagtattcttcctgaagaggagcgaaatatccagtgggactaagcagttgtcactctgttcttcactcctaccaaatactttccacgttggactttcccccttattgggtctcgaagtttacttattgtcacactgtgtatgttttcagcattttaaggctagagattgtaatgggctcctacttgtaatttccattaaattcgtaacaggtataacactaaagcatttttgctattttcgtcatgcctttgagactgagtcttactccgtcccccagcgtggtggcgcgctgggattacaggcgcgcgccaccacgcgaacttgtatttttagtagagacggggtttcgccatgttgtccgggctgctctcgaactcctgacctcaggtgatccacccgcttcagcttcccaaagtgctggcattacaggcgtgagccaccacgccagggctttatttatttatttttaccacaatagtttgaagcagtaagggggaaggagggtgattatattgctttgtaatggtttgtgatacttgaaacatcacggtgcataataaagtaggtctgcagt

SEQ ID NO: 272 - DNA, 1749 bp, Homo sapiens
  source 1..1749: mol_type = genomic DNA
gtttatctcgttggggactaaggcgtcggttggcgcgcaacgggttctaggctgcaggcagctcgaggacccgcggccccgccccggctcggcctggcagatagcagaggcagcaggccgtgccgggggggcatgttgctgtaaccagtggcccaggggatgttacggtggacagtgcacctggagggcgggccccgcagggtgaaccatgctgcagtggctgtcgggcatcgggtatactccttcgggggttactgctctggtgaagactatgagacactgcgtcagatagatgtgcacattttcaatgcagtgtccttgcgttggacaaagctgcccccggtgaagtctgccatccgtgggcaagctcctgtggtaccctacatgcgctatggacactcaaccgtcctcatcgacgacacagtcctcctttggggcgggcggaatgacaccgaaggggcctgcaatgtgctctatgcctttgacgtcagcggactgtttttccaatgacattcacaagctagataccagcaccatgacatggactcttatctgtacaaagggcagccctgcacgctggagggacttccactcagccacaatgctgggaagtcacatgtatgtctttgggggccgtgccgaccgctttgggccattccattccaacaatgagatttactgcaaccgcattcgagtctttgacaccagaactgaggcttggctggactgtcccccgactccagtgctgcctgaggggcgccggagccactcggcctttggctacaatggggagctgtacatctttggtggttataatgcaaggctgaaccggcacttccatgacctctggaagtttaatcctgtgtcctttacctggaaaaagattgaaccgaaggggaaggggccatgtccccgccggcgccagtgctgctgtattgttggtgacaagattgtcctctttgggggtaccagtccatctcctgaggaaggcctgggagatgaatttgaccttatagatcattctgacttacacattttggactttagccctagtctgaagactctgtgcaaactggccgtgattcagtataacctagaccagtcctgtttgcctcatgatatcaggtgggagctgaatgccatgaccaccaacagcaatatcagtcgccccatcgtctcctcccatgggtaggaggaagtttctgccacctcccctcctgagcctgctgtcatcttcactgcccctgcccatctgtcacccacctgctcctttgacccctggacttggtatacctccatgtggagttgttgggcgagaggtgttctctgtgctgtgaattcagtggggagctgtagcggggtgggggctaggttcctccccccttgggccgagggccccttccccttggtgctctgtccccatccacctcctttcagctgctcctgggcctcagctctgcccagggccagccaggttctgctgggaagggaagggaatggggagaagggagaagcaagcagtgtctgagcctcaggagcttccccctccccctttgcctatcccctcccctctgcttgagccttgagccttgactgggagctgaaaggagttgcagctgttggcatgagacctccttctccccgtcttggggaggtggggaccagcagataaatcccacccttccttgagctgtcgctgtactctgaagttcagccagctcagattttataaaaattaattaaaatctc

SEQ ID NO: 273 - DNA, 2832 bp, Homo sapiens
  source 1..2832: mol_type = genomic DNA
agtaactgactacttttctcccttctctagggtcctagcacagtgtctgatggagctttcctaccagaccctgaaattcacgcatcaggcgcgggaagcggtatatcgatacagcaaatgctttggagcaagaaactaaactggggttacgacggtttgaagtttgtgacaacattgatcttgaaactattttgatggaatatgagagttattattttgtaaaatttcagaaataccccaaaattgtcaaaaagtcatcagacacagcagaaaataatttaccgcaaagaagtagagggaagaccagaaggatgatgaacgacagttgtcaaaatcttcccaagatcaatcagcagaggccccggtccaaaaccacagcggggaagacaggggacaccaaatcgctcaataaggagcatcctaatcaggaggtagttgataacactcgcctggaaagtgccaacttcggcctacatatatcaagaatccgtaaagacagtggagaggaaaatgcccacccacgaagaggccaaatcattgacttccaagggctgctcacagatgccatcaagggagcaaccagtgaacttgccttgaacaccttcgaccataatccagacccctcagaacgactgctgaaacctctgagtgcatttattggcatgaacagtgagatgcgagaattggcagccgtggtgagccgggacatttatctccataatccaaacataaagtggaatgacattattggacttgatgcagccaagcagttagtcaaagaagctgttgtgtatcctataaggtatccacagctatttacaggaattctttctccctggaaaggactactgctgtacggccctccaggtacaggaaagactttactggccaaagctgtggccactgaatgtaaaacaaccttctttaacatttctgcatccaccattgtcagcaaatggagaggggattcagaaaaactcgttcgggtgttatttgagcttgcccgctaccacgccccatccacgatcttcctggacgagctggagtcggtgatgagtcagagaggcacagcttctgggggagaacatgaaggaagcctgcggatgaagacagagttactggtgcagatggatgggctggcacgctcagaagatctcgtatttgtcttagcagcttctaacctgccgtgggagctggactgtgccatgttacgccgcctggagaagaggattctggtcgatctccccagccgggaggccaggcaggccatgatctaccactggctgcctcctgtgagcaagagcagggccttggagctgcacacagagctggagtacagtgtgctgagccaggagactgagggctactcaggctcagatattaagctcgtctgcagggaagcagccatgcggcccgtgaggaagatctttgatgcacttgaaaatcaccagtcagaaagcagcgacttacccaggatccagttggatatagtaaccactgccgactttctggatgtgctaactcacaccaagccctccgcaaagaatctggctcagagatactcagactggcaaagagagttcgagtctgtctgaaaccacatttaccctgacctggccacaaaggcaaccacaaagacctcctagtttattaatgtccgtgggagaacaaaatgattggaatggaaaagagaaaattatttttgaagactggattaacttgagccactgtattgttttggatagctgagatatatttattaacttaccattatcgatgtcagcaaaatattgagagtttcagttacatacatatatgtgctattgggtcatacaatggagatttttctgacaattagactccataaaattttaatgaacaattttctgtaatgttactcatttgtaaactttttaagaaaaagatgtacttagaaaagttgtgttggccacacacaggatgaccctgagttggggcagccaagtagaagctaagcttgacaggcactgcccagctgacagtcccagggtgaaggaggacggaagcagggaaggcaatgcagtctgtttctcattccggacaatattctgaatctcatcagctccccctaattctgactccatccagctttgtcagcagcaaacccctcccaaactaagccccactcagaaatgtcactgagcattctgatgctagagctaatagccagggtgactagcacaccatcaccatcagctgccagtctgattgttttgggttctggcccccaataacatcttttcactcttcacacctcacatccggtgtgctctgcccttctctttccattgccgcagcttctcatcagatccaaagcttaggatggggcacctaagcttcgagaacattcatcccaagtcttccctgctcttaggctcttccccctctccttaaggggttataaacaactagacgcatctctctcagaaacccacaatccgaggcatctactttcaacccttgataaattttgaaggcttctactaagtaatgccacttcttttcccccactagaacttacctatgggaaatcaccttcttttctcttccttgccttgtcttcatcatccctgcagacagactcttcaagaggaaaaacctccagaaagagacactttggatagctaagtatcccaaaggattttacccttttaaacaaaaccaaagcatttttttcggtatcgattattttgagattattctcaaatgcctctttaaacatcatttcatggaaaatgtcaaattgaaaatataccttatttaacaaattgaaaataaaaaagatttcatctc

SEQ ID NO: 274 - DNA, 10293 bp, Homo sapiens
  source 1..10293: mol_type = genomic DNA
ccgagccgggagccgagcgcgctgggcgcggccgtcccgctgccgccgccaagcccggagtgcgccagcggccatggttcccgcggcggcgccgggcgcctgagccccgggacgcaagcgctggaggcgggctgccggctgtgcgggcgctccggagagaccgacagaaggtgagcactgtgggctatgggatggatgaggtggagcaggaccagcatgaggcccgactcaaggagctgtttgacagttttgacacgacgggcacagggtccctggggcaggaggaactcaccgacctttgccacatgttgagcttggaggaggtggccccagtgctgcagcagacattacttcaggacaacctcttgggcagggtacattttgaccaatttaaagaagcattaatactcatcttgtccagaactctgtcaaatgaagaacactttcaagaaccagactgctcactagaagctcagcccaaatatgttagaggtgggaagcgttacggacgaaggtccttgcccgagttccaagagtccgtggaggagtttcctgaagtgacggtgattgagccactggatgaagaagcgcggccttcacacatcccagccggtgactgcagtgagcactggaagacgcaacgcagtgaggagtatgaagcggaaggccagttaaggttttggaacccagatgacttgaatgcttcacagagtggatcttcccctccccaagactggatagaagagaaactgcaagaagtttgtgaagatttggggatcacccgtgatggtcacctgaaccggaagaagctggtctccatctgtgagcagtatggtttacagaatgtggatggagagatgctcgaggaagtattccataatcttgatcctgacggtacaatgagtgtagaagattttttctatggtttgtttaaaaatggaaaatctcttacaccatcagcatctactccatatagacaactaaaaaggcacctttccatgcagtctttcgatgagagtggacgacgtaccacaacctcatcagcaatgacaagtaccattggctttcgggtcttctcctgcctggatgatgggatgggccatgcatctgtggagagaatactggacacctggcaggaagagggcattgagaacagccaggagatcctgaaggccttggatttcagcctcgatggaaacatcaatttgacagaattaacactggcccttgaaaatgaacttttggttaccaagaacagcattcaccaggcggctctggccagctttaaggctgaaatccggcatttgttggaacgagttgatcaggtggtcagagaaaaagagaagctacggtcagatctggacaaggccgagaagctcaagtctttaatggcctcggaggtggatgatcaccatgcggccatagagcggcggaatgagtacaacctcaggaaactggatgaagagtacaaggagcgaatagcagccttaaaaaatgaactccgaaaagagagagagcagatcctgcagcaggcaggcaagcagcgtttagaacttgaacaggaaattgaaaaggcaaaaacagaagagaactatatccgggaccgccttgccctctctttaaaggaaaacagtcgtctggaaaatgagcttctagaaaatgcagagaagttggcagaatatgagaatctgacaaacaaacttcagagaaatttggaaaatgtgttagcagaaaagtttggtgacctcgatcctagcagtgctgagttcttcctgcaagaagagagactgacacagatgagaaatgaatatgagcggcagtgcagggtactacaagaccaagtagatgaactccagtctgagctggaagaatatcgtgcacaaggcagagtgctcaggcttccgttgaagaactcaccgtcagaagaagttgaggctaacagcggtggcattgagcccgaacacgggctcggttctgaagaatgcaatccattgaatatgagcattgaggcagagctggtcattgaacagatgaaagaacaacatcacagggacatatgttgcctcagactggagctcgaagataaagtgcgccattatgaaaagcagctggacgaaaccgtggtcagctgcaagaaggcacaggagaacatgaagcaaaggcatgagaacgaaacgcacaccttagaaaaacaaataagtgaccttaaaaatgaaattgctgaacttcaggggcaagcagcagtgctcaaggaggcacatcatgaggccacttgcaggcatgaggaggagaaaaaacaactgcaagtgaagcttgaggaggaaaagactcacctgcaggagaagctgaggctgcaacatgagatggagctcaaggctagactgacacaggctcaagcaagctttgagcgggagagggaaggccttcagagtagcgcctggacagaagagaaggtgagaggcttgactcaggaactagagcagtttcaccaggagcagctgacaagcctggtggagaaacacactcttgagaaagaggagttaagaaaagagctcttggaaaagcaccaaagggagcttcaggagggaagggaaaaaatggaaacagagtgtaatagaagaacctctcaaatagaagcccagtttcagtctgattgtcagaaagtcactgagaggtgtgaaagcgctctgcaaagcctggaggggcgctaccgccaagagctgaaggacctccaggaacagcagcgtgaggagaaatcccagtgggaatttgagaaggacgagctcacccaggagtgtgcggaagcccaggagctgctgaaagagactcttaagagagagaaaacaacttctctggtcctgacccaggagagagagatgctggagaaaacatacaaagaacatttgaacagcatggtcgtcgagagacagcagctactccaagacctggaagacctaagaaatgtatctgaaacccagcaaagcctgctgtctgaccagatacttgagctgaagagcagtcacaaaagggaactgagggagcgtgaggaggtcctgtgccaggcaggggcttcggagcagctggccagccagcggctggaaagactagaaatggaacatgaccaggaaaggcaggaaatgatgtccaagcttctagccatggagaacattcacaaagcgacctgtgagacagcagatcgagaaagagccgagatgagcacagaaatctccagacttcagagtaaaataaaggaaatgcagcaggcaacatctcctctctcaatgcttcagagtggttgccaggtgataggagaggaggaggtggaaggagatggagccctgtccctgcttcagcaaggggagcagctgttggaagaaaatggggacgtcctcttaagcctgcagagagctcatgaacaggcagtgaaggaaaatgtgaaaatggctactgaaatttctagattgcaacagaggctacaaaagttagagccagggttagtaatgtcttcttgtttggatgagccagctactgagttttttggaaatactgcggaacaaacagagcagtttttacagcaaaaccgaacgaagcaagtagaaggtgtgaccaggcggcatgtcctaagtgacctggaagatgatgaggtccgggacctgggaagtacagggacgagctctgttcagagacaggaagtcaaaatagaggagtctgaagcttcagtagagggtttttctgagcttgaaaacagtgaagagaccaggactgaatcctgggagctgaagaatcagattagtcagcttcaggaacagctaatgatgttatgtgcggactgtgatcgagcttctgaaaagaaacaggacctactttttgatgtttctgtgctaaaaaagaaactgaagatgcttgagagaatccctgaggcttctcccaaatataagctgttgtatgaagatgtgagccgagaaaatgactgccttcaggaagagctgagaatgatggagacacgctacgatgaggcactagaaaataacaaagaactcactgcagaggttttcaggttgcaggatgagctgaagaaaatggaggaagtcactgaaacattcctcagcctggaaaagagttacgatgaggtcaaaatagaaaatgaggggctgaatgttctggttttgagacttcaaggcaagattgagaagcttcaggaaagcgtggtccagcggtgtgactgctgcttatgggaagccagtttagagaacctggaaatcgaacctgatggaaatatactccagctcaatcagacactggaagagtgtgtgcccagggttaggagtgtacatcatgtcatagaggaatgtaagcaagaaaaccagtaccttgaggggaacacacagctcttggaaaaagtaaaagcacatgaaattgcctggttacatggaacaattcagacacatcaagaaaggccaagagtacagaatcaagttatactggaggaaaacactactctcctaggctttcaagacaaacattttcagcatcaggccaccatagcagagttagaactggagaaaacaaagttacaggagctgactaggaagttgaaggagagagtcactattttagttaagcaaaaagatgtactttctcacggagaaaaggaggaagagctgaaggcaatgatgcatgacttgcagatcacgtgcagtgagatgcagcaaaaagttgaacttctgagatatgaatctgaaaagcttcaacaggaaaattctattttgagaaatgaaattactactttaaatgaagaagatagcatttctaacctgaaattagggacattaaatggatctcaggaagaaatgtggcaaaaaacggaaactgtaaaacaagaaaatgctgcagttcagaagatggttgaaaatttaaagaaacagatttcagaattaaaaatcaaaaaccaacaattggatttggaaaatacagaacttagccaaaagaactctcaaaaccaggaaaaactgcaagaacttaatcaacgtctaacagaaatgctatgccagaaggaaaaagagccaggaaacagtgcattggaggaacgggaacaagagaagtttaatctgaaagaagaactggaacgttgtaaagtgcagtcctccactttagtgtcttctctggaggcggagctctctgaagttaaaatacagacccatattgtgcaacaggaaaaccaccttctcaaagatgaactggagaaaatgaaacagctgcacagatgtcccgatctctctgacttccagcaaaaaatctctagtgttctaagctacaacgaaaaactgctgaaagaaaaggaagctctgagtgaggaattaaatagctgtgtcgataagttggcaaaatcaagtcttttagagcatagaattgcgacgatgaagcaggaacagaaatcctgggaacatcagagtgcgagcttaaagtcacagctggtggcttctcaggaaaaggttcagaatttagaagacaccgtgcagaatgtaaacctgcaaatgtcccggatgaaatctgacctacgagtgactcagcaggaaaaggaggctttaaaacaagaagtgatgtctttacataagcaacttcagaatgctggtggcaagagctgggccccagagatagctactcatccatcagggctccataaccagcagaaaaggctgtcctgggacaagttggatcatctgatgaatgaggaacagcagctgctttggcaagagaatgagaggctccagaccatggtacagaacaccaaagccgaactcacgcactcccgggagaaggtccgtcagttggaatccaatcttcttcccaagcaccaaaaacatctaaacccatcaggtaccatgaatcccacagagcaagaaaaattgagcttaaagagagagtgtgatcagtttcagaaagaacaatctcctgctaacaggaaggtcagtcagatgaattcccttgaacaagaattagaaacaattcatttggaaaatgaaggcctgaaaaagaaacaagtaaaactggatgagcagctcatggagatgcagcacctgaggtccactgcgacgcctagcccgtcccctcatgcttgggatttgcagctgctccagcagcaagcctgtccgatggtgcccagggagcagtttctgcagcttcaacgccagctgctgcaggcagaaaggataaaccagcacctgcaggaggaacttgaaaacaggacctccgaaaccaacacaccacagggaaaccaggaacaactggtaactgtcatggaggaacgaatgatagaagttgaacagaaactgaaactagtgaaaaggcttcttcaagagaaagtgaatcagctcaaagaacaactctgcaagaacactaaggcagacgcaatggtgaaggacttgtatgttgaaaatgcccagttgttgaaagctctggaagtgactgaacagcgacagaaaacagcagagaagaaaaattacctcctggaggagaagattgccagcctcagtaatatagttaggaatctgacaccagcgccattgacttctacacctcctttgaggtcatagccaaaccaaagggtacactcatatttgtgcactttactgaaatagatgaacatttcagtaggttctcaacttaaaattaagcctaacctaaaactgccagcaacacaactggagtttccatttatcataattagtttttctaaatagacccttatgggagtttgaaaataaatactcacatatttcactacttaaattattcccaagatttgaatttattttaaaattttaatagccaccaagaatgtggacatatgaaaattcaagaacctaaaaaataccagttttgaatgagtttttgtggttttggttttttttttaattattacaaatctatgtgtaaaatctagatatttgaagtttgagatctgatgagaatggttgttataaactttattttaaaaccaaatttaggtgttcttacatatttaaatactggaaagtcattataatagttttggttctttgaattggtagacaattagtagagtataattggttaggaggcagggcttattaagtggttattaaccgctgacatcagacaaacccaaatctgtagaattctaaccttctaacacctgtgacagtattaccactcttcttgtattatagatttagaactgatttactcaattgcactcttaactaatgttaaaagcttacttgctttaaacagccttttcttctttctcttaaaagtttcatttggggagctggtcttctaagaaacggataaagccacataattaaagcagttgaactatagggaaagcactgaacaaaccactttggagtaaatagctactcttagaaaagagggataagcagaccatgtaggttttctgtctctcaaatcttagagttcataaatttacttgaggttgcctcaagaactcagggaacaatactgtaaactgtcttcctgaactactgtagggcctctctaagaatttgaaatgtataaaccatgtgacctcatttatttgtcttatatatttacagccatactagaatttttatttctacgtttttagtaaatttaatattctgggggaaaaaaggccttgattttagggttaaaaacctgacttatagaagagtttatttaatataggtcaaaattttctgtgtttcttattccttctatacctcaaatctgattctaagaatttcttactgtgataatcattggcatgccacctgaggtcaaggagtgccaaataggactttccactcatgctcaagatcaaaactttatagaacagtcaacattttagattcggtaaccttttttttcttccaattataatctctgctagccacttccgccagcagttggtggaagacttactaggtgcagggcactttccaagttcatcacaacaacctgcttgttttcatgagacaataatccgaaaagttcgctttgatatattcctggagggccaagcccatctatttacaaaaggtgaacagcaaaatcaagcactgctttatgggcaggaacacaagagaaagcaaactgcccaagaagtcatcatgtcagaaactcaatctcaacaaaataatttccatcagggaacttcagggtttcttgggggcttatgagtctcaccggtcaacccaggaggcctcactacaagagccttgacaaggcactgttttttgtgggactgggagttcacactgatgaagcaaacctttgaatttttgcacagctcttgtcagaaagccctgagttccccctggataaagagttaattttaatccttccctataattatacttcaaaatatttgacatctgctattatgccttctttagatctttcttctgtggtgcagacatttctagtaagtgtttgactacttgtatggcattagctttcacagaaaattgtttcacttaaaactgtggattggcctaggctaaggacaaaaataaactaagtacctgtagtgtatttatgtgatatgtgtcaagttactcaaagttattgctgttggaactgaacaataatatttcccagatagctggccttagcatgtgatcacggttgttgtatttttaatttttgtcttttacagtatgagaggtgtaggttaatttgtttatttcctataaatttgtatttatgtgtatataaaatgtacaatgaatgtaaatatgactttctggaaagtttagactacatttagaatctctattcaaaatcaaaatgctgctcaaatgaatttaaccaacatctaggtgcttaatttctcattttatcccacttatgagattgggaaaaagatcaatatgagaaataccatacagataccttaaatgtatgcatttgtgcaacaatttttgagaaggtgagtggcaatttataatttagttggcaatttataatagaacttatagcttttaaaagaccttttaaagacattaaatgtaaacttaaaaatgtttagatcttgtttcaaactttacaatagcattcttcaaaatattaagttatatattttataggcatttagttgcttattaaaagcactgattttcaaactttttgatttaagaacaattatttaagatcgtctcagaagatgggatcttcgtttcaagaaaagggaatcaagtttgcctttgagataatacgttacactaagaaaaggaaaatgtggatagtaaaacccacctctctcatcctattgtactctcttctgctttttagaagcctgcacttaagcttagatttgtgaagggagagtagaaggggagaagtagaaccacagtgttttatttatttttctaaaactcttactaaatccagattttttaaactgttttaaatgtgaattcttcccagaaatttcaatgcattgcatatttagccttcggcatatttttcatgaatagatcatgaagtcataggcttccaaggcataggaagagatcttgcaggtctagtattttaataatgcactattacccagggcagatattatgagaaactgtttcttctctaagggtttatggcagactttgcttttttaacatgtgagaaatgaattttttattttgtgatttatgtgatttcttttgctgagtgaaggaaaggagaaattgttgctattgtcagcatcttaaaggtatttccagtcaaggcaaggctaagtgctttgtgatagtattaagcaagtcatgttttgaatggattacctgtagtgactcattggaatgatataattatacaagtaatgccaaaaaccaagtcaaagcctaattaaccaaagcactcatttaaaaatcatcatgtttggacctatctggacctctcagcactgtaaaatagttttggttttgtggcatatgaatagctgtttaacaaatcaaagttagctttttgcttctcagcttttttgggcaatacaagttaagttcttaatggggagacattatcatggcatgacttaagggaacattggtttgtgaaggaaaaacagattatctaaagccatctctatgtttctgttcagataaagattaatgagttctgtgtttatatcagctttgtatatttcatcttagccattctatcctagaaagattttaatgtgagcttaagatgtaaataaataattttgcaaacatgccttttgttttctatataccctgaccttttaataaagtttcagtgtatttatca

SEQ ID NO: 275 - DNA, 2431 bp, Homo sapiens
  source 1..2431: mol_type = genomic DNA
ggcggccccgtggagcagcgcagtatggcgggcggggcccgggaggtgctcacactgcagttgggacattttgccggtttcgtgggcgcgcactggtggaaccagcaggatgctgcgctgggccgagcgaccgattccaaggagcccccgggagagctgtgccccgacgtcctgtatcgtacgggccggacgctgcacggccaggagacctacacgccgcgactcatcctcatggatctgaagggtagtttgagctccctaaaagaggaaggtggactctacagggacaaacagttggatgctgcaatagcatggcaggggaagctcaccacacacaaagaggaactctatcccaagaacccttatctccaagactttctgagtgcagagggagtgctgagtagtgatggtgtctggagggtcaaatccattcccaatggcaaaggttcctcaccactccccaccgctacaactccaaaaccacttatccctacagaggccagcatcagggtctggtcagacttcctcagagtccatctccatccccggagcatctgtatgattcagaagtacaaccacgatggggaagcaggtcggctggaggcttttggccaaggggaaagtgtcctaaaggaacccaagtaccaggaagagctggaggacaggctgcatttctacgtggaggaatgtgactacttgcagggcttccagatcctgtgtgacctgcacgatggcttctctggggtaggcgcgaaggcggcagagctgctacaagatgaatattcagggcggggaataataacctggggcctgctacctggtccctaccatcgtggggaggcccagagaaacatctatcgtctattaaacacagcttttggtctcgtgcacctgactgctcacagctctcttgtctgccccttgtccttgggtgggagcctgggcctgcgacccgagccacctgtcagcttcccttacctgcattatgatgccactctgcccttccactgcagtgccatcctggctacagccctggacacagtcactgttccttatcgcctgtgttcctctccagtttccatggttcatctggctgacatgctgagcttctgtgggaaaaaggtggtgacagcaggagcaatcatccctttccccttggctccaggccagtcccttcctgattccctgatgcagtttggaggagccaccccatggaccccactgtctgcatgtggggagccttctggaacacgttgctttgcccagtcagtggtgctgaggggtatagacagagcatgccacacaagccagctcaccccagggacacctccaccctctgcccttcatgcatgtaccactggggaagaaatcttggctcagtatttacaacagcagcagcctggagtcatgagttcttcccatctgctgctgactccctgcagggtggctcctccttacccccacctcttctcaagctgcagtccaccgggtatggttctggatggttcccccaagggagcagcagtggagagcatcccagtgtttggggcactgtgttcctcttcgtccctgcaccagaccctggaagccttggccagagacctcaccaaactcgacttgcggcgctgggccagcttcatggatgctggagtggagcacgatgacgtagcagagctgctgcaggagctacaaagcctggcccagtgctaccagggtggtgacagcctcgtggactaaagttcccagtgtgggagaaaggagctagtttgcaataaaaacagctggatgcaggagcccagtgtcttcatgcagaggagctcaatgtcgcgggactagctacaccaacatatgcactttttacatttagaaacactgtgattagaccacagaacaataaatatgtgccatcagaccaaaaaaaagtagagaaaggagctgaactccactctcgatgctacttacagaggacatctgtaaagtcttcataaaagaccttgaatgatgcctaggatggcagagcccctgggtcctactccatcctccagcctttgtccttgtcctggcctcctgctctccagatctgtaaactgggctcaaggactgtacaagcagagtacaactacccgcctccccggtgccagggcgcctgttgggtttggtcctgtgtagatgattcccagagtctcattcatccagctcctcttcagacagaaggtccccatggtcagacagctggtctgcattgctggtactggttgcatcatcctcatcctcagagctggcttcacaggcagtgtggaagagctgcatgagttctcgaaaatggtgggaaacctaagaaaggaggagggctgtattcactgatccttagtaacatgttaacatttatgaagcactatatattgatttgcaaaatcttttgtttattcca

SEQ ID NO: 276 - DNA, 2201 bp, Homo sapiens
  source 1..2201: mol_type = genomic DNA
agagcaaggaagggcaggggacctgggaaggaagttctggaaggcagtggggtttgagattggacccagggtcaagatagaacatgaaggtgggatgaggacatgaacagaacatggccaagaaggatctgggggagcagccaggacgaggcggagctgatccgagaggacatccagggggctctgcacaattaccgctcgggccgcggggagcgcagggcggcggcgctcagggccacgcaggaggagttgcagcgcgaccgctcgcccgccgctgagaccccgcccctgcagcgccgcccgtcagtccgcgcagtgatcagcaccgtagagcggggcgcgggccgcggacgaccccaggcgaagcccattcccgaggcagaggaggcgcagaggcctgagccggtggggacctcgagcaacgctgactcggcctccccggacctgggtccccggggtcctgacctggcggttctgcaggcggagcgggaagtggacatcctgaaccacgtgttcgacgacgtagagagctttgtatcgaggctgcagaagtcggcggaggcggccagggtgctggagcaccgggaacgcggccgcaggagccggcgccgggcggctggggagggcttgctgacgctgcgggccaagccgccctcggaggccgagtacaccgacgtgctgcagaagatcaagtacgccttcagcctgctggcccggctgcgcggcaacatcgccgacccctcctctccggagctgttgcacttccttttcgggcctctgcagatgattgtgaacacgtcgggggggccggagttcgcgagcagtgtgcggcggccgcatctgacatcggatgccgtggcgctgctgcgggacaacgtcactccacgtgaaaacgagctctggacctcgctgggggactcgtggacccgccccgggctggagctgtccccggaggagggacccccatacagacccgagttcttcagcggctgggagccgccggtcactgacccgcagagccgcgcctgggaggacccagttgagaaacagctacagcacgagcggaggcgccggcagcaaagcgccccccaggtcgctgtcaatggtcaccgagacttggagccagaatctgagcctcagctggagtcagagacagcaggaaaatgggtcctgtgtaattatgacttccaggcccgcaacagcagtgagctgtcggtcaagcagcgggacgtactggaggtcctggatgacagtcgtaagtggtggaaggttcgggacccagcggggcaggagggatatgtgccctacaacatcctgacaccctaccccggaccccggctgcaccacagccaaagccctgcccgcagcctgaacagcactcctcctccaccaccagccccagccccggccccacctccagctctggctcggccccgctgggacaggccccgctgggacagctgcgatagcctcaacggcttggaccccagcgagaaggagaaattctcccagatgctcatcgtcaacgaggaactgcaggcgcgcctggcccagggccgctcgggaccgagccgcgcagtcccagggccccgcgccccggaaccgcagctcagcccgggctcggacgcctccgaggtccgcgcctggctgcaggccaagggctttagctccgggaccgtggacgcgctgggtgtgctgaccggggcgcagcttttctcgctgcagaaggaggagctgcgggcggtgagccccgaggagggggcacgtgtgtacagccaggtcaccgtgcagcgctcgctgctggaggacaaagagaaagtgtcagagctggaggcagtgatggagaagcaaaagaagaaggtggaaggcgaggtggaaatggaggtcatttgacctgccaggcgcccttcgcaaagagtgacgaggccccgtgggagaacggactcctcagactctccccaatagcggaagtcgatcttctgaaggatggccaatctgctccggccctggtcttcccccatcccggtggacagacttaacgatccttgctgcagtccctccggagaggatctggactggctgggagtggggagggcgtggagacagtctacggaaagcgctagcagacccccgagagggtgcagtggagccctgagcattgtaatatgcggcccagcctataaacagcctccgtgcttagc

SEQ ID NO: 277 - DNA, 2246 bp, Homo sapiens
  source 1..2246: mol_type = genomic DNA
ccacccccggccccgaagctccgccacccgccgccatgagtagctttggagctggcaaaaccaaagaagttatcttcagtgtggaggatggctccgtgaaaatgttcctgaggggccgccctgtgcccatgatgatcccagacgagctggcacccacctacagcctggacacacgctcggagctgccttcttgccggctcaagctggagtgggtctatggctaccgtggccgagactgccgggccaacctttatttgctgcccaccggggagatagtgtactttgtggcctccgtagccgtgctatacagcgtggaggagcagaggcagcgacactacctgggacacaacgatgacatcaaatgcttggccatccacccagatatggtcaccatcgccacgggacaggtggcgggaaccactaaggaagggaagccgctgccgccccacgtgcgcatctgggactcagtttccctctccaccttacacgtgctgggcttgggggtgtttgacagagccgtgtgctgtgtgggcttctccaaatctaatggaggcaacctgctgtgtgcagtggatgaatccaatgatcacatgctctcggtgtgggactgggccaaggagaccaaggtggtggatgtcaagtgctccaatgaggctgtattggtggccaccttccaccccacggaccccactgtgcttatcacctgcgggaaatctcacatctacttctggaccttggaggggggcagcttgagcaagcggcaaggcctctttgagaaacatgagaaaccgaagtatgtgctgtgtgtgacctttttggaaggtggcgacgtggtcacgggggactctggggggaacctctatgtttggggcaaaggtgggaaccgtatcacacaggcggtgctgggcgcccacgacggcggcgtgtttgggctctgcgccctgcgggacgggacgctggtgtctggagggggccgtgatcggcgggtggtcctctggggttctgactacagcaagctgcaggaagtggaggtccctgaggactttggccctgtgcgcaccgtggcagagggccacggagacacactgtacgtggggaccacccgcaattccatcctgcagggctccgtgcacacaggcttctcactgctggtccagggccatgtggaagagctgtggggcctggccacacaccccagtcgggcccagtttgtgacctgcgggcaggataagctggtgcatctatggagctcagattcccaccagcccctgtggagcaggatcatcgaggaccctgcccgctcagccggcttccaccccagtggctctgtcctggctgtgggtacagtgactggcagatggctgctgctggacacggagacccatgacctggtggctatccacacagacggcaatgaacagatctcagtggtcagcttctccccagacggggcgtacctggccgtgggctcccacgacaacttggtgtacgtgtacacggtggaccagggcggccgcaaggtcagccgcctgggcaagtgctcgggccattccagttttatcacccacctggattgggcccaggacagcagctgctttgtcaccaactccggggactatgagattctgtactgggacccggctacctgtaagcagatcaccagtgcggatgctgtgaggaacatggaatgggccacagctacttgtgtcctagggtttggggtgtttgggatctggtctgagggggcggacggcactgatatcaacgctgtggcccgctctcatgatgggaagttgctggcttcagctgatgactttggcaaagttcacctgtttagctacccctgctgtcagcctcgagccctcagccacaagtacggtggacacagcagccatgtgacaaatgtggccttcttgtgggatgacagcatggccctgaccacagggggcaaggacaccagtgtgctacagtggcgggtggtctgatgcggccagggaagagtcaggtgtcagggcaggaattctattttcgggagatgtctattgccgagtagagtaatatatacccagagtatgtctatagcagagggggttatgggggcgggagggtagactgacatacagaagtctctatttatccgggtgggaagagggagtcacatcgctttggggatccattggtgtttggtttggggtgttttttaagttttttcttttatatcatccagaaataaagacacgtacact

SEQ ID NO: 278 - DNA, 2042 bp, Homo sapiens
  source 1..2042: mol_type = genomic DNA
ttccggcttccccgccccgccccgtccccgggcgtctccattttggtctcaggtgtggactcggcaagaaccagcgcaagagggaagcagagttatagctaccccggccgcggagccggctcactgcactacccccgcccccttctttcctccagacgccgaagtcgcgggcgctcatggcgggcctggaggtactgttcgcatcggcagcgccggccatcacctgcaggcaggacgcgctcgtctgcttcttgcattgggaagtggtgacacacggttacttcggcttgggtgtcggtgaccagccgggtcccaatgataagaagtcagaactgctgccagctgggtggaacaacaataaagacctgtatgtcctccggtatgagtataaggatgggtccagaaagctccttgtgaaagccatcaccgtggagagcagcatgatcctcaatgtgctggaatatggctcacagcaagtggcagacttgaccctgaacttggatgattatatcgatgcagaacacctgggtgacttccacaggacctacaagaacagtgaggagcttcggtctcgtattgtgtctggaatcatcacacctatccatgagcagtgggaaaaggctaatgtaagcagtccccaccgggagttcccccctgctaccgccagagaggtggacccactccggattcctccacaccacccacacaccagtcggcagcctccctggtgtgatcccctgggcccgtttgttgtcgggggagaagacttagacccttttgggcctcggagaggtggcatgattgtggatcccctgagatctggcttcccaagagcacttattgacccttcctcaggcctcccgaaccgacttcctccaggcgctgtgcccccaggagctcgctttgacccctttggacccattgggaccagcccacccggcccgaggcctgacagacgcgggcagtgatgagccctgttctggagtggaaagagcacgatagagcaccaggctaagaggcacgagatcaaggcggtagtcacttccgctctgcagctagcatttcaaccatatgtggatcctttcatttctcagctccctggattccttcccctaaattaggacctattatttacctgtaggtaagcaagctactgtagctcttctgaggtatctgccaggctgttttctgtagcctcagattgcctatctgcttagcctgagaacaggtagatgaaaactaaactgatgcctaggcccagggtcagtctcagatggaagctgggcctgggtggggaggctagcatgcgtggctccctgggtatttctgtcagtccccatggcaagcagtgatttagtaaaacaccccagagtcagggaagccaaccaccttgaaacctttagaacatctctgctttggagaaagacccagagatcaggcagaggtgcagattcaatcattactcataacctttgagagatggcaaatgggaggagtgttagtctttgttttggaattggaccattcttgcaaccaaaaggacttagagcagtttgctcataaagacatcctttattataaaaggaagtatttaaaggatgatagagaccatcagatagaagcagggaaggtagataacttttaggaccttgatgtgaggaaaagataaaatttaaacaataaatttgccacttagattttctagcagcaaagtccgaaaagatagttatatacaaaattctgttttctgaaaacaaaattgtgattcaccttcagaattggccattttttttgtgagtttccttgcatcaaggacactgagaaacacagtcattgtcttaggtgttctatgggaggaagtgaatagagcctttaggaacttcctggtcaagcttatggtgcttattttgatctgggccacttccctccttccagtcatgagtaatcatcaaggagcaagttggagtgtttcaggtgtatattttgtagaacccaaaagattggagccttaacaataaacatcagcactaagtgacctgttc

SEQ ID NO: 279 - DNA, 595 bp, Homo sapiens
  source 1..595: mol_type = genomic DNA
gggcctaagacataagctgaacctctggcctgcagttccagatccaaggtgactgagacaaactgccagctgccactggcttatcaggagcacctgaatctgctgacacatcaaggccacttttcttaggagccccctgacttccaaaatcagtgcctttggattcatctcttccgggagagttcagtgtcttctgaaatgttacaaaacgtccttcagagcaagaaggcgtacacgaggagctcgactctgtagaaaggagatggacaacatgtctcccaggctgagagccttcctctccgaacccattggagaaaaggatgtctgctgggtggatggcatcagccatgagctcgcgatcaatttggtcaccaaaggtatcaataaggcctacatcctgctgggacaattccttctgatgcacaagaatgaagccgagtttcagaggtggctcatttgctgttttggtgccactgagtgtgaggcccagcagacttctcactgcctcaaggagtggtgtgcctgcttcctgtagacacaaacctcattgctgccccccaccaccctctggggaaaatgacgccttctccaccta

SEQ ID NO: 280 - DNA, 1619 bp, Homo sapiens
  source 1..1619: mol_type = genomic DNA
ctttacaagtatgaactcatttaattccctcaactctgtgatataagcagtggccggtgtccagctgcctactttctgcccggatctctggctcctcatctctccggtctccgcagactaaagccctcgggatatgcagcagccatgcctgtgcacacgctgagccccggagccccgtccgcccccgccctaccttgccgcctgcggaccagggtccctggctacctgctacgggggccggcagatggtggagcccggaaaccgagcgctgtggagcgcctggaggccgacaaggccaagtacgtcaagagcctgcacgtggccaacacccgccaggagcctgtgcagcccctgctgtccaaacagccgctctttagccctgagactcgccgcacagtgctcacgcccagccgccgagccctgcctggcccctgccgacggccccagctggacctggacatcctcagcagcctcatcgacttgtgtgacagccccgtgtcccctgccgaggccagccgcactcctggacgggccgagggagccggccgtcctcccccagccacccctccgcgaccgccgcccagtacctctgcggtccgccgggtggacgtccgccccctgcccgcctcgcctgcccggccctgcccatcacccggccctgccgccgcctccagcccagcccggccgccgggtttgcaacgctccaagtcggacttgagcgagcgcttttctagggcagccgctgatctcgagcgcttttttaacttctgcggcctggacccggaggaggcgagagggttgggtgtggcccacctggcacgggccagctcggatatcgtgtccctggcagggcccagtgctgggccgggcagctctgaagggggctgctcccgccgcagctcggtgactgttgaggagcgggcccgggagcgcgttccctatggcgtgtcggtggtggagcgcaatgcccgcgtgatcaagtggttgtatgggctaaggcaggctcgggagagcccagcagctgaaggctaggcgccactgggcctggaattcgccacaggacggatcttacagaggcaagtggtccctggacctctcttgcatccattctctagacggccgtgtcagaggctccaccctgttgtgaacttggtatggaggcaaaggcttagaggctggaccagcattgttgggcaaggactgactctccaagggttttgttcttggctttggacacctgagaaccccctcctcccctcccccaatacaaggtttttgacatgagtgtactcctgcttagttcctcttgtggggctgcatttgcggtgctttgccctccccactgtgagtgaggggccaagggatctcctcaatcctgtctccccagcggctctgtttcctccttccttccttggcctctgtcctttgctgacttcctcttccttacccagcagaactcaccctggggtcggggcagtggggaggggcctatccactgctcttcctagtccttggcagctggcctaggtgggcagactataggagggactggttaggagtctgcattgctttgacttccctctccttggttaataaacacaaatgcttgtttctcaagg

SEQ ID NO: 281 - DNA, 1231 bp, Homo sapiens
  source 1..1231: mol_type = genomic DNA
acgagccaggacatgtgctaataatgccctaagccggttataaagacgtggaaattgaggggagaaaaaaaaagggaaaaaaagggtctgtccttcctgggattcctagccgaggccagtctgctgccgtgtgcgtgtgcgtcagggctctccgggcggcaatgggggcttgagagccgggtccccagcgccgggaagggagcgcggtggccgccaccgccaccgccccggagtccggcgccgaagctgcgggcgggcgggcgggcaccagctcggtcaggggctgcttggcgcggcactgtgcggtgcagcggcggcgcggcgcggtgcgggcttttcccaggcgccccggggtcgggtggccaacggcgcggccgcgggcgctgagcgcgaccggttcgcggtagcggtggcggcggcgtgcgtgccaggggctgggggctccgccgcctctcttgcggctcaccgagctccgcgcttccctctctccagggcaggcggcttctcagagcacaacagctccagctggcagcatcacttcccgccaatttatccaacttctgccaaggctctgaaatgccaacaacgtcgaggcctgcacttgatgtcaagggtggcacctcacctgcgaaggaggatgccaaccaagagatgagctccgtggcctactccaaccttgcggtgaaagatcgcaaagcagtggccattctgcactaccctggggtagcctcaaatggaaccaaggccagtggggctcccactagttcctcgggatctccaataggctctcctacaaccacccctcccactaaacccccatccttcaacctgcaccccgcccctcacttgctggctagtatgcacctgcagaaacttaatagccagtatcaggggatggctgctgccactccaggccaacccggggaggcaggacccctgcaaaactgggactttggggcccaggcgggaggggcagaatcactctctccttctgctggtgcccagagccctgctatcatcgattcggacccagtggatgaggaagtgctgatgtcgctggtggtggaactggggttggaccgagccaatgagcttccggagctgtggctggggcagaatgagtttgacttcactgcggactttccatctagctgctaatgccaagtgtccctaaagatggaggaataaagccaccaattctgttgtaaataaaaataaagttacttacaaa

SEQ ID NO: 282 - DNA, 1155 bp, Homo sapiens
  source 1..1155: mol_type = genomic DNA
tagtttgcgttttcacctggtcgcccggcggccatggcggccgttctgaagccggtgctgctgggccttcgagatgcgccggtgcacggcagccccacagggccgggtgcctggactgctagcaagctgggcggcattccggatgctctgcccaccgtggctgcgcccaggcccgtgtgtcagcgctgcgggcagccgctcgctctggtcgtgcaggtgtattgcccgctggaaggctccccgtttcaccgtctgctgcacgtgttcgcgtgcgcctgccccggctgtagcaccggcggtgcgcgcagctggaaggtgttccgctcccagtgcctgcaggtgccagagagagaggcgcaggacgctcagaaacagggaaacagccttgcagctgaggactggtgtgaaggtgctgatgactggggaagtgatactgaggaggggccttcaccacagtttaccttggattttgggaatgatgccagcagtgccaaagacgtagactggactgctcggctccaagacctccgcctgcaggatgctgtcctgggtgctgcccatcctgtgcctcctgggctgccgctcttcctgccctactacatctgtgttgcagatgaggatgattacagggactttgtcaacctggatcatgcccacagccttctgagggactatcagcagagagaaggcattgccatggatcagttgctttcccaaagccttcctaatgatggtgatgaaaaatatgagaagaccataattaaaagtggagatcagacgttttacaaattcatgaagcgaattgctgcttgtcaggagcagattttgaggtattcctggagtggagagccactctttttgacctgccctacatcagaagtcaccgagctcccagcctgcagccagtgtggaggccaaaggatatttgagtttcagcttatgccagcactggtcagcatgctcaagagtgctaatttaggtctttctgtggaatttggaacaattctagtttacacatgtgagaagagttgctggcccccaaatcatcagactcccatggaagaattttgtattatacaagaagacccagatgaattattgtttaagtagagcatttccttttattaatataaattaaaacaaatgtttacatcc

SEQ ID NO: 283 - DNA, 1833 bp, Homo sapiens
  source 1..1833: mol_type = genomic DNA
gaggaaggagcccctccctgggagccagacccccacaccatggcgagcgtggtggtgaagacgatctggcagtccaaagagatccatgaggccggggacacccccacgggggtggagagctgctcccagctagtcccagaggctccccggagggtgaccagccgggccaaggggatcccgaagaaaaagaaggccgtgtcgttccacggggtggagccccagatgtcccatcagcccatgcactggtgcctgaacctcaaacggtcctcggcctgcaccaacgtgtcactgctcaacctggccgccatggagcccactgactccacggggacagactccacagtggaagacctcagcggccaactcacactggctgggccccctgcctcccctaccctaccctgggatccggatgacgcagacatcacggaaatcctgagtggggtcaacagtggattggtccgcgccaaagactccatcaccagcttgaaggaaaagaccaaccgggttaaccagcacgtgcagtctctgcagagcgagtgttctgtgctgagcgagaatctggagagaaggcggcaagaggcagaagagttggaggggtactgcattcaactcaaggagaactgctggaaggtgacccggtctgtggaagatgctgaaatcaaaaccaacgtcttgaagcagaattctgccctgctggaggagaagctgcgctacctccagcagcagctgcaggatgagacgccgcgacggcaggaggccgagctgcaggagccggaggagaagcaggagccggaggagaagcaggagccggaggagaagcagaagccggaggctggcctctcctggaacagcctgggccccgccgccacgtcccagggctgccccggcccgccagggagtcccgacaaaccctcgcggccacacggcctggtccccgcaggctggggaatggggcctcgggctggcgagggcccctacgtgagcgagcaggaattgcagaagctgttcaccggcatcgaagagctgaggagagaggtgtcctcactgaccgcccggtggcatcaggaggagggggcggtgcaggaagccctgcggctgctcgggggcctgggcggcagggtcgacggcttcctaggccagtgggagcgggcacagcgcgaacaggcacagacggcgcgggacttgcaggagctgcgaggtcgggcggatgagctgtgcaccatggtggagcggtcagcagtgtctgtggcttcactgaggagcgaactggaggggctgggcccactgaaacccattctggaggagttcgggcggcaatttcagaactctcgaagagggcctgacctctccatgaacctggatcggtcccaccaaggcaactgtgcccgctgtgccagccaggggtcgcagttgtctacggagtccctgcagcagctgctggaccgagcactgacctcactagtggacgaggtgaagcagaggggcctgactcctgcctgtcccagctgtcagaggctacacaagaagattctggagctggagcgccaggccttagccaaacacgtcagggcagaggccctgagctccacccttcggctggcccaagacgaggccctgcgggccaagaacctactgctgacagacaagatgaagccagaggagaagatggccactctggaccatctacacttgaagatgtgctccctccacgatcatctcagcaacctgccacttgaggggtccacgggaacaatggggggaggcagcagtgcaggaacccccccaaaacaggggggctcagcccctgaacaataaatggcctctcatgct

SEQ ID NO: 284 - DNA, 2973 bp, Homo sapiens
  source 1..2973: mol_type = genomic DNA
agcaaaccaatcgcaagcctcgttgagtggaaggggtgggatcttccccggaagtgttggttaaagcccctccaatcagcggctcggtgcggcaagtttgaatttcgtggaggctcgggttgtgagggttcctgcttcggagtcggcggtggtcgtccagaccgagtgttctttactttttgtttggttgaggtttcacgctagaaggtggctcaggatgtcttcatcacattttgccagtcgacacaggaaggatataagtactgaaatgattagaactaaaattgctcataggaaatcactgtctcagaaagaaaatagacataaggaatacgaacgaaatagacactttggtttgaaagatgtaaacattccaaccttggaaggtagaattcttgttgaattagatgagacatctcaagggcttgttccagaaaagaccaatgttaagccaagggcaatgaaaactattctaggtgatcaacgaaaacagatgctccaaaaatacaaagaagaaaagcaacttcaaaaattgaaagagcagagagagaaagctaaacgaggaatatttaaagtgggtcgttatagacctgatatgccttgttttcttttatcaaaccagaatgctgtgaaagctgagccaaaaaaggctattccatcttctgtacggattacaaggtcaaaggccaaagaccaaatggagcagactaagattgataacgagagtgatgttcgagcaatccgacctggtccaagacaaacttctgaaaagaaagtgtcagacaaagagaaaaaagttgtgcagcctgtaatgcccacgtcgttgagaatgactcgatcagctactcaagcagcaaagcaggttcccagaacagtctcatctaccacagcaagaaagccagtcacaagagctgctaatgaaaacgaaccagaaggaaaggtgccaagtaaaggaagacctgccaaaaatgtagaaacaaaacccgacaagggtatttcttgtaaagtcgatagtgaagaaaatactttgaattcacaaactaatgcaacaagtggaatgaatccagatggagtcttatcaaaaatggaaaacttacctgagataaatactgcaaaaataaaagggaagaattcctttgcacctaaggattttatgtttcagccactggatggtctgaagacctatcaagtaacacctatgactcccagaagtgccaatgcttttttgacacccagttacacctggactcctttaaaaacagaagttgatgagtctcaagcaacaaaagaaattttggcacaaaaatgtaaaacttactctaccaagacaatacagcaagattcaaataaattgccatgtcctttgggtcctctaactgtttggcatgaagaacatgttttaaataaaaatgaagctactactaaaaatttaaatggccttccaataaaagaagtcccatcacttgaaagaaatgaaggtcgaattgctcagccccaccatggtgtgccatatttcagaaatatcctccagtcagaaactgagaaattaacttcacattgcttcgagtgggacaggaaacttgaattggacattccagatgatgctaaagatcttattcgcacagcagttggtcaaacaagactccttatgaaggaaaggtttaaacagtttgaaggactggttgatgattgtgaatataaacgaggtataaaggagactacctgtacagatctggatggattttgggatatggttagttttcagatagaagatgtaatccacaaattcaacaatctgatcaaacttgaggaatctgggtggcaagtcaataataatatgaatcataatatgaacaaaaatgtctttaggaaaaaagttgtctcaggtatagcaagtaaaccaaaacaggatgatgctggaagaattgcagcgagaaatcgcctagctgccataaaaaatgcaatgagagagagaattaggcaggaagaatgtgctgaaacagcagtttctgtgataccaaaggaagttgataaaatagtgttcgatgctggatttttcagagttgaaagtcctgttaaattattctcaggactttctgtctcttctgaaggcccttctcaaagacttggaacacctaagtctgtcaacaaagctgtatctcagagtagaaatgagatgggcattccacaacaaactacatcaccagaaaatgccggtcctcagaatacgaaaagtgaacatgtgaagaagactttgtttttgagtattcctgaaagcaggagcagcatagaagatgctcagtgtcctggattaccagatttaattgaagaaaatcatgttgtaaataagacagacttgaaggtggattgtttatccagtgagagaatgagtttgcctcttcttgctggtggagtagcagatgatattaatactaacaaaaaagaaggaatttcagatgttgtggaaggaatggaactgaattcttcaattacatcacaggatgttttgatgagtagccctgaaaaaaatacagcttcacaaaatagcatcttagaagaaggggaaactaaaatttctcagtcagaactatttgataataaaagtctcactactgaatgccaccttcttgattcaccaggtctaaactgcagtaatccatttactcagctggagaggagacatcaagaacatgccagacacatttcttttggtggtaacctgattactttttcacctctacaaccaggagaattttgaatttaaaaataaatccaaacattttccttcatattatcaatgcttatatattccttagactattgaaattttggagaaaatgtatttgtgttcacttctatagcatataatgttttaatattctgtgttcatcaaagtgtattttagatatactctttctcaagggaagtggggatattttgtacattttcaacacagaataaaaaatgtactgt

SEQ ID NO: 285 - DNA, 2037 bp, Homo sapiens
  source 1..2037: mol_type = genomic DNA
acgcttctctcgcgccctctgcaggaacctgggccgagggccgccccgcctcgctgcccccaggctcataaatggcctctgcgccctggccggagcgggttccgaggctgctcgctccgcgcttaccctcttacccgcccccacccccaacagtgggattacggtccatggagcaggaggagacctacctggagctctacctggaccagtgcgccgctcaggatggccttgccccacccaggtctcccctgttcagcccagttgtaccttatgatatgtacatactgaatgcatccaatccggatactgcatttaattcgaaccctgaagtcaaagaaacatctggtgatttctcatctgtggatcttagcttcctaccagatgaagttacccaggaaaataaagaccagcctgtcattagcaaacacgaaactgaagaaaattctgaaagccaaagtccacaaagtaggttgccatcacccagcgaacaggacgttgggctgggcttaaacagcagcagtttgtcaaattcccattcacagctgcaccctggtgatactgactcagtccagccctctcctgagaaaccaaactccgactccttgtctctggcatccataactcccatgacaccaatgacccctatttcagaatgttgtggaattgtacctcaactacagaatatagtttccactgtaaacctggcctgtaagttggatctgaagaaaatagctttgcatgcaaaaaatgcagaatataacccaaagaggtttgctgctgtcataatgaggatccgagagcccaggacaacagcccttatatttagctctgggaagatggtctgcacgggagccaaaagtgaagagcagtctcgacttgcagcaagaaaatatgctcgtgtggtgcagaagcttgggttccctgccagattcctcgattttaaaattcagaacatggttggaagctgtgatgtgagatttcccatcaggctggaaggtttggtgctaacccatcagcagttcagtagttacgagcctgaactgtttcctggtcttatttatagaatggtaaaaccacgaattgtgttgcttatctttgtatctggaaaagttgtgttgacaggtgccaaagaacgttctgagatctatgaagcatttgaaaacatctatcctattctaaaaggttttaaaaaagcctgagcatatcattcagcatctcacattattctggtttgaatatgtccataagcccagcacagaaacagctggattcttctacgtttaattgtagatgttacaagtacgttacttattaaagggcgactctgtgtaagtaacctaagaaacgaagaaaaattcttattcaaaatgactccttttgtgttattttaaaaactgaacaagtaaacatttcaaaatttgagagatttagggtctcactagaatgatattgtagcatcatgaagactcaatgcgtttccttttagccggaagggccatcttccagtaatttgccaaaatgacgaacacaaagggaaagaggtgaggcacctgatacatgttctctaggccttttagaaaagatggagttgttcctttggccacatacatgcgaatctacgaaaaaggtgatattgtagacatcaagggaatggctgcttttcaaaaaggagtgctccgcaaatgttaccacagcaaagctggaagagtctacagtgttacccagcatgctgttggcattgtaaacaagggcaagatttttgccaagagaatgaatgtgcttactgagccaggctggtcttgaactcctgacctcagttgatccatctgcctgggccttggcactctaagagccaagtaagtttcctgaaacgcgtgaaggtaaataatcagaaaaagacgtcaaagggagaggtgtctgagttcaactgaagcgccagcctgctccacccagacaagcacttagaaccaatggagggagcctgggctgctggaacctattccctatgagttcatggcataataggtgtcaaaaaaa

SEQ ID NO: 286 - DNA, 993 bp, Homo sapiens
  source 1..993: mol_type = genomic DNA
tctgcctccgcatcctcgtgggccctgaccttctctctgagagccgggcagaggctccggagccatgcaggccgaaggccagggcacagggggttcgacgggcgatgctgatggcccaggaggccctggcattcctgatggcccagggggcaatgctggcggcccaggagaggcgggtgccacgggcggcagaggtccccggggcgcaggggcagcaagggcctcggggccgagaggaggcgccccgcggggtccgcatggcggtgccgcttctgcgcaggatggaaggtgcccctgcggggccaggaggccggacagccgcctgcttcagttgcacatcacgatgcctttctcgtcgcccatggaagcggagctggtccgcaggatcctgtcccgggatgccgcacctctcccccgaccaggggcggttctgaaggacttcaccgtgtccggcaacctactgtttatgtcagttcgggaccaggacagggaaggcgctgggcggatgagggtggtgggttgggggctgggatccgcctccccggaggggcagaaagctagagatctcagaacacccaaacacaaggtctcagaacagagacctggtacaccaggcccgccgccacccgagggagcccagggagatgggtgcagaggtgtcgcctttaatgtgatgttctctgcccctcacatttagccgactgactgctgcagaccaccgccaactgcagctctccatcagctcctgtctccagcagctttccctgttgatgtggatcacgcagtgctttctgcccgtgtttttggctcaggctccctcagggcagaggcgctaagcccagcctggcgccccttcctaggtcatgcctcctcccctagggaatggtcccagcacgagtggccagttcattgtgggggcctgattgtttgtcgctggaggaggacggcttacatgtttgtttctgtagaaaataaagctgagctacgattccg

SEQ ID NO: 287 - DNA, 2475 bp, Homo sapiens
  source 1..2475: mol_type = genomic DNA
gtggggccatggtggtcttgcgggcggggaagaagacctttctcccccctctctgccgcgccttcgcctgccgcggctgtcaactcgctccggagcgcggcgccgagcgcagggatacggcgcccagcggggtctcaagattctgccctccaagaaagtcttgccatgattggataggacccccagataaatattcaaaccttcgacctgttcacttttacatacctgaaaatgaatctccattggaacaaaagcttagaaaattaagacaagaaacacaagaatggaatcaacagttctgggcaaaccagaatttgacttttagtaaggaaaaagaagaatttattcactcaagactaaaaactaaaggcctgggcctgagaactgaatcaggtcagaaagcaacattgaatgcagaagaaatggcggacttctacaaggaatttttaagtaaaaattttcagaagcacatgtattataacagagattggtacaagcgcaattttgccatcaccttcttcatgggaaaagtggccctggaaaggatttggaacaagcttaaacagaaacaaaagaagaggagcaactaggagtccactctgacccagccagagtccaggtttccacaggaagcagatggagctcctttcacaggggctctgagaaaaactggagctgatctcaagaagccccacatcttcctaaggggccccatggcctgtttgggggcagggtaggtcctggggcactgtgggccgcctgcctgctgatgtgggctctaggccagcttgttgtcacgtacgtggtgtgaaataaagcccaagcactgggtgcccgtttcctgtgtttcgaattataccaattcaaaacagaactatttaaaaatattggccaggcacggtggctcacacctgtaatcccagcactttgggaggccgaggcgggtggatcacttgagatcaggagttcaagatcagtctggacaacatggcaaaaccctgtctctacaaaaaattagctgggtgtggtggcacgcacctgtaatcccagctgctctggaggctgaggcatgcgacgcttgaacccaggaggcggaggttgcagtgatccaagatcgcaccactgcactccagcctggaagaccaaacgagactctgtatcaaaaaataataataattaataaagttttactggaaaaaagaagtctgctgacgggaatgatgtggaagctgactgccaagcgatcggtgtgctggccgtggagtcagcaccaccctcactgtgagtcgtcagctggtgggtcctcacaggctgcgtcctgaatgcagtgcggtgtgaggacatgaaagcaaatgcaattttattgcatgccaaaaagtttaacttgattcttggtgttaactatgttagtagattcttcaatgctataagcaaattaacaagaaacagcagcactattttcctcttttcttaaacacgaaggttaaatggccaggcatggtgactcatacctgtaatcccaacaatttgggaggccaaggcaagcaaatcacttgagctcaggagttcgaaccagtttgggcaacatggcgaaaccctgcctctacaaaacatgcaaaaattagctgggcatggtagcatgcgcctgtagtcccagctactcgggaggctgagcttcgaggattgattgagccagtgaggtccaggctgcactaagccaagatcctaccactaggcaacagagccagaccctgtctcaaataaaaatttaaaaaaataataaaaaaggccgggcgcactggctcacgcctgtaatctcagcactttgggtggccaaggtgggcggatcacctgaggtcagttcaagaccagcctggccaaacatggtgaaaccctgtctacaaaaattagccaggcatgatggagggtgcctttagtcccagctctttgggaagctgaggcgggagaatagcatgaaccagggaggtggagggtgcctgtaatcccagctccttgggaggctaaggcaggagaatagcatgaacccggtaggtggaggttgcagtgagccgagatcgcgccactgcactccagcctgggcgacagagcaatactcccgtctcaaaaaaaaaaaaattaaatgattgtgatatgtgttacttttggtcacaaataaattgtaattaagattattctggccaggtgcggtggctcacgcctataatcccagcactttgggaggccgaggtgggcagatcatgaggtcaggagatcgagaccatcctgcccaacatggtgaaaccccgtttctactaaaaatgcaaaaattagctgggtgtggtggcgtgtgcctgtaatgccagctactcgggaggctgaggcacgagaatcacttgaacccagcaggcagaggttgcagtgagccaagattgcgccactgcactccagcctgacgacaaagcgagactccgtctc

SEQ ID NO: 288 - DNA, 3690 bp, Homo sapiens
  source 1..3690: mol_type = genomic DNA
gggccagggccgtgacacctgcgacgagccccgcctggcgccagggggcgcggaagcgcgtccgcccccaggccccatgccgggctcgccccgcccctgccggccacacccccctaccccgccctccctccgtgaggaccggccgctcccggctcccggcccccggccccgcttccggcgcaggcgcagtcccgcgttccctcggcggctgccggcgtagtgagcccgccgccgtggagtgtagcggaaagggctcgccgtcctcctccgtttctcgctgcttcgggacgcgctctctgcggctctgtgagcgcccctgagcgccggcagcggccgcggtgggttcttcaggttatcttatgatgaggcttttgctatggctaatgatcccttggaaggcttccatgaagtaaaccttgcttcacctacttctccggaccttcttggtgtgtatgaatcaggaactcaagagcagactacctcaccaagtgtcatctaccggccacacccttcagctttatcctctgtacctatccaggcaaatgcattagatgtttctgaacttcctacacaacccgtgtattcatcccccagacgtttaaattgtgcggaaatatctagtatcagctttcatgttacagacccagccccttgctctacctctggagtcacagctggattaactaaattaactacaagaaaggacaactataatgcagagagagagtttttacagggtgctactataacagaggcttgcgatggcagtgatgatatttttgggttgagtactgatagtctgtctcgtttacgaagcccatctgttttggaagttagagaaaagggctatgaacgattaaaagaagaactcgcaaaagctcagagggaactgaagttaaaagatgaagaatgtgagaggctttcaaaagtgcgagatcaacttggacaggaattggaagaactcacagctagtctatttgaggaagctcataaaatggtgagagaagcaaatatcaagcaggcaacagcagaaaaacagctaaaagaagcacaaggaaaaattgatgtacttcaagctgaagtagctgcattgaagacacttgtattgtccagttctccaacatcacctacgcaggagcctttgccaggtggaaagacaccttttaaaaaggggcatacaagaaataaaagcacaagcagtgctatgagtggcagtcatcaggacctcagtgtgatacagccaattgtaaaagactgcaaagaggctgacttatccttgtataatgaattccgattgtggaaggatgagcccacaatggacaggacgtgtcctttcttagacaaaatctaccaggaagatatctttccatgtttaacattctcaaaaagtgagttggcttcagctgttctggaggctgtggaaaacaatactctaagcattgaaccagtgggattacaacctatccggtttgtgaaagcttctgcagttgaatgcggaggaccaaaaaaatgtgctctcactggccagagtaagtcctgtaaacacagaattaaattaggggactcaagcaactattattatatttctcctttttgcagatacaggatcacttctgtatgtaacttttttacatacattcgatacattcagcagggactcgtgaaacagcaggatgttgatcagatgttttgggaggttatgcagttgagaaaagagatgtcattggcaaagctgggttatttcaaagaggaactctgatgctctgcgtgggaccatgcctgaactccccgaataactgaaaaatggctgaatatttttatggttacttgatatttatttccaaggagtgagcctaagacttttttccccttttgcaaattgctctaagaagtaccatgatttcttttaaactgatctatgctgtgtttgcttattctttagttgaacacactatgaagaattccaggtgtactagtgaatgtaatttatagttgccaaaaaaaaaaaaaacctgaaataaataaatgttagattgaatgtgtgtacattttctcttctagctctgacatggcatttagggttagcagaatgtattaaatagtaattttcaaactacacagtagcttccttccttgtgagaggcaagaaagaagtctgagtggatagtactcactttccaaggcccccacctctagaatggctttatttttatctgttttctatattgggtttcaaaaaagattttatttgaagaaatacttctgctgctacaaagtttgaaagttactattttaattattctgctctctgtaactgaaagaatccctttattttggttattcattaaaatataatagaaggcagtcagattttatcccagagatgtattcctgagtgtcttgatatagtgtattcatgttttatatgtgttgaccactatattgtcattggagggacatagatgtaaatgagtttgacgtgtgtcaaaggggtttaaaggggtgtggattgaatgaatggtacgtgcgaagtatatgctgattatagaaccacttgatctctgcattccaaattgtaaaactgactcaactggagaaattataacaaagaggtttgtggtagacatgtaataagtatagaaaagcaaaaagaaaagagaaactgctttagtttctgtttagagaaagctgctgttaatatttttggatagtagcctttcagctttcagatattttctacttacatatgcatatttttgaaacaaaaagtaggctttttttttgctttttaaacctaaacattaaatatattttcccttgggtaaacctacacatcctaatccctgtttatagaattttaacataatttaattgtgtttggagatgaggtggttttcagtttatttttcatattataatgctgtgacgagtatccttatctgtacacttctgaacattgtggagttctttcatgtggatgcctggagataaaattgtgtcgagatatatatgtatttttaaatgtttgatctgcattgctagattgccatccagaaaagttaatcaatttgtattcacagcagcagtgtacaagagggctggttttctgaagataacatttttttcagtcctgttcagaggtttggtcaatcttacctgtagatgacttcagccaccaggctggatgggagcccacagacaaaaggacattggtgtatgttatggtgaaaaccatcagtaccatgcctagctcaagaatgtgaaattgaacctgaaaaaaactttgaacctacaattttatgttctgaaaatagttattctaatgtgagggcattaataagaatatgtaccatcaaagcttcagaagattttccgtacaaactaaaatcacttttggagaaagtacctaaataaaaagagaaacaaatccaggagatactgtacggtttgaaagaaaggtaatcaaatactcagaaaaagtttgttgatgacttaaaaaggataaataaaaagtaagactaaagaaaatcagtatacccattaataataaatctttagtaatctataaggggaagaatgcttttcaaccttatacactagaagcatgctctttaaaattaatgcaacaggatgacgacttgatgtagaaactatatgtggaattatagattaaaatgtgattgaaacata

SEQ ID NO: 289 - DNA, 1848 bp, Homo sapiens
  source 1..1848: mol_type = genomic DNA
aatcacgcctcagccacctcccgcaagcctctcactgcctcagccacgctttccaggctggtttctggtccccatccgcggctggtccggccctgggaccgaatcacttcccagcgagaggaaggtcaaatttctcgaccggctacgggaaggtcgcggccgccgccctgtcagccgcctcggcgcccccaggacccctcgggtctctttaaccggaagcggaagtgcgtgtcggcgggatcatggcgactttggtcgaactgccggactcggtcctgctcgagatcttctcttacctcccggtacgggaccggatccgcatctccagggtctgtcaccgctggaagaggctggtggacgaccggtggctgtggcgacatgtcgacctgacgctctacacgatgcgacctaaagtcatgtggcacctccttcgaaggtacatggcatcccggctccattccctgcggatgggtggctacctgttctctggctcccaggccccccagttgtcccctgctctgttgagagccctgggccagaagtgccccaacctgaagcgcctctgcctgcacgtggccgacctgagcatggtgcccatcaccagcctgcccagcaccttgaggaccctggagctgcacagctgcgagatctccatggcctggctccacaagcagcaggaccccaccgtgctgcccctgcttgaatgcatcgtgctggaccgcgtccccgccttccgtgacgagcacctgcagggcctgacgcgcttccgggccttgcgctcgctggtgctgggtggtacctaccgtgtgaccgagacagggctggatgctggcctgcaggagctcagctatctgcagaggcttgaggtgctgggctgcaccctgtctgccgacagcaccctgctggccatcagccgccacctccgagatgtgcgcaagatccggctgaccgtgaggggcctctctgcccctggcctggctgtgctggagggaatgccggccctggagagtctgtgcctgcagggtcccctcgtcaccccagaaatgccctcccccactgaaatcctctcctcctgcctcactatgcccaagctcagagtccttgagctgcaggggctggggtgggagggtcaggaggcggagaagatcctgtgtaaggggctgccccactgtatggtcatcgtcagggcttgccccaaagagtctatggactggtggatgtaactactccacctgcccttgggacccatcccagttttcatcattgagccccagaccctctgagcagcaccttgaagagggcagataatcagacttgaggaaactgaaagccccaggttgagagaacagaggcctagggacctccagaccattggaatcactgtttgccagctgtgtggccttggtcatatcatcagcctctgggaagcctagttcccacatctggaaataaggatgatcatagctacctcacggttacattgcaaagccttactctaaaagctcccagcctccagaggctctcaatgaagagtcaccttcatggtcgtcttcaggaacaggacggatgaagaaggggtggggttaagactcaggggcacctgagggtctgagcccccttatgagtacccaagaaggactgtctatgcatgcacacccacaagcctatacaccatttatatacctacacgcacgcaagagacgcggagagataggcgatgcagactcgcgattcaatgatcgatatgctcataaaagtgctcaattatattttctgtattttgtatgctgtattttccaagacgtatattattttactattaaagaaaaaaatcatttttttttcccg

SEQ ID NO: 290 - DNA, 3969 bp, Homo sapiens
  source 1..3969: mol_type = genomic DNA
gggcggctccgggctcgggttctgcggcggcgcctgcagcgcggatcccccacgtccccgctcgggccgggcctcagaaacgggcgagcccgggcgcgggaggaagcggcggccccggctcgggtcctgcgacgcccagctcccctccggggcgccccccgaggggtccccgccccccgccgcggccccgcccctgcctcaaggccccgccccccgtggccggcgctggccccgccccttggcccgggctgctgggagtccccggcggggcgggggtcagctctggtcccgttggtcctgggcgcggcgccatggcctccgaggcggtgaaggttgtcgtgcgctgccgtcccatgaaccagcgggagcgagagctgcgctgccagcccgtggtgactgtggactgcgcgcgcgcccagtgctgcatccagaacccgggcgccgccgacgagccgcccaagcagttcaccttcgacggcgcctaccacgtggaccacgtcaccgagcagatctacaacgagatcgcctatccgctggtggagggcgtcactgagggctacaatggcaccatctttgcctacggccagacaggcagcgggaagtccttcaccatgcagggcctgccggatccgccctcccagagaggcatcatccccagggccttcgagcacgtgttcgagagcgtccagtgtgcagagaacactaagttcctggtccgggcctcctacctggagatctacaatgaagatgtccgggacctccttggggctgacaccaagcagaagctggagctgaaggagcacccagagaagggcgtgtacgtgaaggggctgtccatgcacacggtgcacagcgtggcccagtgtgagcacatcatggagactggctggaagaaccgttcggtcggctacacgctgatgaacaaggattcctcacgctcgcactccatcttcaccatcagcatcgagatgtctgccgtggatgagcggggcaaggaccacctccgggcgggcaagctgaacctggtggacctggcgggcagcgagcggcagtccaagaccggggccacgggcgagcggctcaaggaggccaccaagatcaacctgtcgctctcggcactgggcaatgtcatctcggcgctggtggacgggcgctgtaagcacgtcccctaccgtgactcgaagctgacgcggctgctgcaggactcactgggcggcaacaccaagacgctcatggtggcctgcctgtcgcctgcggacaacaactacgatgagacactcagcacgctgcgctacgccaaccgggccaagaacatcaggaacaagccgcgcatcaatgaggaccccaaggatgcgctgcttcgcgagtaccaggaggagatcaagaagctcaaggccatcctgacacagcagatgagccccagcagcctgtcagccctgctgtccaggcaggtgcccccagaccctgtgcaggtggaggagaagctgttgccccaacctgtgatccagcatgacgtggaggccgagaagcagctgatccgggaggagtatgaagagcgcctggcccggctgaaagccgactataaggccgagcaggagtctcgggccaggctggaggaagacatcactgccatgcgcaactcatatgacgtcaggctgtccacgctggaggagaacctgcggaaggagacagaggctgtcctgcaggtgggagtcctctacaaggctgaggtcatgtccagggctgagtttgccagcagcgctgagtacccgcctgcttttcagtatgagacagtggtgaaacccaaggtcttctccacgactgacactctgcccagtgacgatgtctccaagactcaggtttcctccaggtttgcggagctgcccaaggtggaaccctccaaatctgagatttctctgggctccagtgagtcatcctcgctcgaagaaacctctgtgtccgaggctttccctgggcctgaggagccctccaacgtggaggtctccatgcccactgaggagtccaggagcagatacttcctggatgagtgcctcgggcaggaggccgctgggcacctgctgggggaacagaactacctcccgcaagaggagccgcaggaggtgcccctgcaggggttactaggcctgcaggacccgtttgccgaggtggaagccaagctggccagactctcctccaccgtggccaggacagatgcaccccaggcagacgtccccaaggtccctgtgcaggtccctgcgccgacagacctgctggagcccagtgatgccaggcccgaagccgaggcggctgatgacttcccgcccaggcctgaggtagatctggcctcggaagtggccttagaggtggtgcggacagcagagcctggcgtgtggttggaggctcaggccccggtggccctggtggctcagcctgagcccctgccggccacagctggtgtgaagagggagagcgtgggcatggaggtggcagtgctgactgatgacccgctgcccgttgtggaccagcagcaggtgctggcccgtctgcagctgttggagcagcaggttgtgggtggagagcaggccaagaacaaggacctgaaggagaagcacaagcggcgcaagcgctacgcagacgagcgcaggaagcagctggtggctgccctgcagaactcggatgaggacagcggggactgggtgctgcttaacgtctacgactccatccaggaggaagtgcgggccaagagcaagctgctggagaagatgcagaggaagcttcgggcagcagaggtggagatcaaagatctgcagtccgagtttcagctggagaagatcgattacttggccaccatccgccggcaggagcgtgactccatgctcttgcagcagctcctggagcaggtgcagcccctgattcgcagggactgtaactacagcaacctggagaagattctgcgtgagtcctgctgggacgaagataacggcttctggaagatcccacatcccgtcatcacaaaaaccagcctcccagtagcagtttcaactgggccacagaacaaaccagcccgcaaaacctctgcagcagacaatggcgagccgaacatggaggacgaccgctacaggctcatgctcagtcggagcaacagtgaaaacattgccagcaactacttccgatctaagcgggccagccagatcctcagcacagacgccaggaagagcctcacacatcacaactcgccaccaggcctcagctgcccactcagcaacaactctgccatcccacccacccaggcccctgaaatgccccagccccggcccttccgcctcgagtccctcgacatccctttcaccaaggccaagcgtaagaaaagcaaaagcaactttggcagtgagcctctgtgagcacagctgcttgccattgcctgccttataggcatgtagagactgccaggccctcccagggcagccccaaccaggtctcctcccacctgccacacagcgctccggggcctgagggctccctcagccctgggaagacacattcccttccctgttccccagagagcccacctccgccctgggcaggagcccctcggaggctgtatagtcctccttagagaggcctgctccagctgttcataccacatcagtgtttccgtctgctcacctgccacagagcccacacccatgcccaccagtgttggtctttgcctcaaagcctgagacctgcttcacggccttcaccagccctgatggagagggcagcagctgccacgtggaggaagctcaatatcagctgggaaggaactgtgcctctgtctgactggccccacttcctaagcactgccctgccccatggggtggcacaggggtcccacagcaggtcttcctgcactgcccacccctggctggtctgtggcccaaggaaggccactccacattaagctgcccaataaactgcttttaagat

SEQ ID NO: 291 - DNA, 1000 bp, Homo sapiens
  source 1..1000: mol_type = genomic DNA
aacctcacgaggccttacgtgcctagagcggttcctctccgtggcgccctaccgccttcggcgcgaaggtggctggtgcgtaccgtcccgaaccctaggagccgaggtgagcgccgcgaagacccccgacattaagaagtggtgtccaccgcagcccccttaagccggataccctcccccaccccgaggagcaagcctgccttccgccacgcgccgcccgtcttccgcgcccgcgcagaacctcgcggctgtgcccgcctaaagccacgcccatcctctcttggccacgccctcagagactcctcccctgtcgcccagatcccacccgcaggaccccaaaacccaatgatcctgcagcagcccttgcagcgaggcccccagggaggggcccagcgcctcccgcgggccgccttgggggtgacttggggcctggacgccagctcccctctccgaggagctgtgcccatgagcaccaagcggcgcctggaggaggagcaggagcctctgcgcaagcagtttctgtctgaggagaacatggccacccacttctctcaactcagcctgcacaatgaccacccctactgcagcccccccatgaccttctccccagccctgcccccactcaggagcccttgctctgagctgcttctctggcgctatcctggcagcctcatccctgaggccctccgtctgctgaggctgggggacacccccagtcccccctaccctgcaaccccagctggggacataatggagctctgagtgctggtggacagtgcccctcccaccttccttcttccccacaacagaagagaccagcgactcccgcaaagggacaaggttcctccctctcctgcagagtaggcatctgggcaccaagaccttccctcaacagaggacactgagcccaacggagttctgggatgggaggggtgggagcatgggaagggaggcatcccacccccaagaagaactgaataaagattgctgagcaaaggaa

SEQ ID NO: 292 - DNA, 3718 bp, Homo sapiens
  source 1..3718: mol_type = genomic DNA
acctgcgctgggcgggcgggaacggcgcgcggcgagctgagggtggcggcggtcgacatgttccaggtcccggatagcgagggcggccgcgccggctccagggccatgaagcccccaggaggagaatcgagcaatctttttggaagtccagaagaagctactccttccagcaggcctaataggatggcatctaatatttttggaccaacagaagaacctcagaacatacccaagaggacaaatcccccagggggtaaaggaagtggtatctttgacgaatcaacccccgtgcagactcgacagcacctgaacccacctggagggaagaccagcgacatttttgggtctccggtcactgccacttcacgcttggcacacccaaacaaacccaaggatcatgttttcttatgtgaaggagaagaaccaaaatcggatcttaaagctgcaaggagcatcccggctggagcagagccaggtgagaaaggcagcgccagaaaagcaggccccgccaaggagcaggagcccatgcccacagtcgacagccatgagccccggctggggccgcggcctcgctctcacaacaaggtcctgaacccaccgggaggcaaatccagcatctccttctactaagagaagccactgctccacccggagccagaccagaaactcaagagatagggtagccatgttttcatttccttttgcccaaatgagcggggtgggaagagggttagtcttatgtgagcctggctgctcagcgtctcctggccgtcatgacagctgcttggagacccgtgccttccagatggctgggagatgcctctgtggggatgaaatggggcacccctggccatcactcatgtgtagtccaggtttgagaggaactggaaggggggtgagggtggggaggtggggcagggcatggtccttggatcaacagcccgccagctgattggatgtctaggaatgactgaaagaaaccaaaacagcctgtccactgctgctgtgggatggaggaggcgtaagcagaaacactaacagtatattgacctcttagcagaaccgcttccattctggagatcacggctgctaaatccagcatccccacttcattttacccccagcatattgttctgtagtcttttcttgaaacatcttgattgcttttcctcggcagctttcaaaaaaccaaataataatagttatccgtcttctacttcatggaagattgttttggtgccctgaccctctgaagtgcccagttcctgccatctgaaacctcggcctgatctgatctcatgttggaatctgcctgtctttcacacagggctggtcttggtcctttacatgccagttttgcttgtgaattcttgcttttttcctctcatcagccttaagtttaggcgtttgttgttctccagtgatgtagacagttcccttcacaagtcacagttcttcccataaatgaggcccgctgacctctgcgggactttaaaaatctattcagatatttccgagtaagtggcttgtttaaattcttcctgtgtctttctttattccttaattggttggtggaaagaagagatgcttgggaaccttgggttcttaggtttggattctttaataatatctaaaaagctaaattttaaataccagctttacataaatgattgttgactctggtctgtttctgacacctttccagaaaaaagtcaattgttcaggtacaccaaagaggaagaagagctgtggaggccaccctctacaaagctttatagaacttctggatctaactcacaaacaagcttccagaagagactagagaccttaggccaggagatgaaggagttcagtagcaaagtcacacctgtccaattccctgagctttgctcactcagctaatgggatggcaaaggtggtggtgctttcatcttcaggcagaagcctctgcccatccccctcaagggctgcaggcccagttctcatgctgcccttgggtgggcatctgttaacagaggagaacgtctgggtggcggcagcagctttgctctgagtgcctacaaagctaatgcttggtgctagaaacatcatcattattaaacttcagaaaagcagcagccatgttcagtcaggctcatgctgcctcactgcttaagtgcctgcaggagccgcctgccaagctccccttcctacacctggcacactggggtctgcacaaggctttgtcaaccaaagacagcttcccccttttgattgcctgtagactttggagccaagaaacactctgtgtgactctacacacacttcaggtggtttgtgcttcaaagtcattgatgcaacttgaaaggaaacagtttaatggtggaaatgaactaccatttataacttctgtttttttattgagaaaatgattcacgaattccaaatcagattgccaggaagaaataggacgtgacggtactgggccctgtgattctcccagcccttgcagtccgctaggtgagaggaaaagctctttacttccgcccctggcagggacttctgggttatgggagaaaccagagatgggaatgaggaaaatatgaactacagcagaagcccctgggcagctgtgatggagcccctgacattactcttcttgcatctgtcctgccttctttccctctgcgaggcagtggggtgggattcagagtgcttagtctgctcactgggagaagaagagttcctgcgcatgcaagccctgctgtgtggctgtcgtttacatttgggaggtgtcctgtatgtctgtacgttggggactgcctgtatttggaagatttaaaaacctagcatcctgttctcaccctctaagctgcattgagaaatgactcgtctctgtatttgtattaagccttaacacttttcttaagtgcattcggtgccaacattttttagagctgtaccaaaacaaaaagcctgtactcacatcacaatgtcattttgataggagcgttttgttatttttacaaggcagaatggggtgtaacagttgaattaaacttagcaatcacgtgctcagagcttttgcctgtcagttgtgtgtgtcccttatagtcccttcccccacagctcttgctgaaagagtttgccttgttttgttttgttgttttgtatttagccagaggatgccaaaattagtcttctcaaagctttgagtagagtaagtgtgggaataagccagtttttttttttctgtttctgtaacttaaatgaacgggtttttttcccttgtatgccacttgtcctaacatgtccttaaggtgtttaacctgcctctgacctggcttgcaatgcataggtgaggagaagcagagagcttgtcatatgcaagtcctgtcaagaaaacaggtgggcatggtggctcaggtctgtagtctttgggtctttgggaggccagggtgggaggatcacttgagctcaggagtttgagaccagcctagacaacatactacgaccctgtctatacaaaaaaaaacttctctaaattagccggatgtggtggtgcatgcctgtagtcccagctactcgggaggctgagtgaggcaggaggatcacttgagaccaggaggttgtggctgtagtgagtgatgatcatgccactgcacttcagcctggaccacagagcaagaccctgtgtaaaaaaataaaataaaaaacagattggatgtctttcttctga

SEQ ID NO: 293 - DNA, 4282 bp, Homo sapiens
  source 1..4282: mol_type = genomic DNA
gtgagtcagcattggcggcggccccagcgcgtggcagccgtgcgccgccaaggtgcgggtctcgttactcggcggtcaggagcgggccctcccttaggtgcgccccccgccaggttctgcgttagacctgcatcttagcaatgtgaatattgcatccctagagaaggacctggaagagcaagacggccacgacctgggagcagcaggtcccaggtcgctggccggctctgcacctgtcgccatccccggctccctgcccagagcaccatcgctacactcgccatcctctgcgtccacctcgccgctcggttcgctgtcccagcccctcccagggccggtgggctcctcagccatgacgcctccccagcagccgccacccctgcgttcagagccgggcacactgggctctgcagcctcatcctacagccccctaggtgagtgccggctccctccatgctggcgttgccgtgaagcctccgtggggctccctcccagatgccgtcctgactgaggggcctcacacggaaccttgtgccctatctgtggtggcaaaccacatgacctgctgctcacaggttcccccacgccgcagaccgagtctcgctctgtcgcccaggttggactgcaatggtttgaacggtgtccccgggagcatctgggactttgtttccggcagcttctcccccagcccctcccccatcctgagtgccggccccccatcctcttcgagtgcaagtccaaacggagctgagctggcccgggtcaggcggcagctggacgaggccaagaggaagatccggcagtgggaggagtcctggcagcaggtgaagcaggtctgcgatgcctggcagcgagaggcgcaggaggccaaggagcgtgcccgtgtggccgatagcgaccggcagctggcgctgcagaagaaggaggaggtggaggcacaggtgaagcagctgcaggaggagctggagggcctgggcgtagcctccacactgccggggctgcggggctgtggggacatcggcaccattcccctgccgaagctgcactcgctgcagagtcagctgcgcctggacctggaggcggtggacggcgtgatcttccagctccgcgccaagcagtgtgtggcctgccgggagcgggcccacggtgctgtcctgcggccctgtcagcaccacatcctctgtgagccgtgtgcggccaccgcacctgagtgcccctactgcaagggccagcccctgcagtggtgacctcagcggggacagccacctcctgctgggcaccctggctccagcgctcctcctgaccacggacatgtcgtcactcgcttctggtgccaccgacgtgaggaccgaggctgggagcccttcctgttacacgttatcatgaggctgggagccccgcctgcgcttggcctgacagcctttcctgtcacacgttgtcacctatctagtcctaccgacggtttcaaggtattttcctcaaaaaccttaaatgcaaacccacagaacccgcctgcctgtccctgaggggcctggtgcctccgggatccacgcggcgctgtgatcacagcagtttgtggtcctgacactactgtgactaggccactgggagctggggtctttcaaagcactttgtaaaccgaggaatttagttagaggttataaattgctctaagctgctttctgtttttttttaatatgcgataatatgaagctttatatgtgtactgtgaacttaaatatttcatatcagtttattgtcaattcatagtatgctaaatatattagatttcatattctgaaactagtacttatgaaatgagtgtttatctagtagtaagacctaggatttttacattttccaattaagtgcaaatagtatttataagcagagtgattatggattgagatgtttttaacttgatggaaggagctagttttcctgagcctgtgtgtgcaccaggcactggggctgatgttccagcctcgtggcgtgggagcaggagagctccgtcctgcatttctgtggtccgtggccgctgtttctgtgcgcctgcgcctcggagagcaagtgaaggagcatcatgggttttgttttctcccttaaccctctgaaagacagtttgatactaacaaaaaacgcagcagaggggatccgacgtcagagcttttagaattacttttttaagcagctgtcttctggctgggtgcggtggctcatgcctgtgatcccagcactttgggaggcgggtggatcacctaaggtcaggagttcaagaccagcctggccaacatggtgcaaccccgtcttagtaaaaatacaaaaattggcctggcgtgagagcgggcacctgtagtcccagctactcgggaggctgaggcaggagaatcgcttgaacctgggaggcagaggttgcagtgagccgagatcgcgccaccgcactccagcccgggtgacagagcgagactctggctcaaaaaaaaaaaaaaaaagctgttttctgattactcagagctgtcctaggcaatggtgctttgtagctccttggagatgtcgctgggcgtcctggcaggggtcaggcagtgaactgggagagtggttgcctccccagcacccgtgaccaccctggtcctgctcgtgtgggagatgctcgggccgtgtgtgcgccagggtccggggtgccgggtgtatgtggcagtcacctgacccgcgctgccagttatcatcggagctcatccatgtggccagtgaggtcacaggagaggacccggccacagcctctcagtggcctggagcacacgggggaagcgaccccccccaggtcccggctctgctgtggtcccctgtcccgtctgcccctggagcgacagtgtggtttcggccgcagcagaaacgtgactgagaacgcatccccgcgatgacctgacccttctgctcagggctgggactgtccctaggagttgagcaggaacaggcatctgtggtttacggcgacctggctctccgcgggccacgtgggtggtgagggcacacgagtgggaagcggcaccgacgtgtttctccccgaccgtggctttgccaaagacttttaatagcattttttaagtgcaaaacgtctaggtaaaaatctttatcatcagtgaccaaattagaatgtatttaatatagtaggtggtttaagaactgttttaacgtaagacaaactgatagcaacattctgttgttttaaaggaagtgggtccgtgacattctgcagctagtccactactccaaggtaactatcgacttggtttcagtgaatctattttgtttttaactacagtgatttattagctcagtatctagaaattacgtatattttgtgctactgtcatcgatgtgtaaactctgtttttatttgtatttatgcacttggttcccatttggagcctctggtcttttctgggataagtggtgtctgccgagacatctcccggttgtcagtggtcaggagcagctgagctctagtctgccagctgctctgctctttctgggaaggaggtggcgcccgcccctcagggtgtctccagggctcagcttccggggtggtagagctggggagccccaggggtggggggacagctgggagatggaggtggcacctgctcccctagatcagtactggctctgaggacaggtgagcagtgggaagaccaaagaatggctggcagcgctgccagggttggaaatgggggcaagatcctggggctgtgtgccctggggcctccctcacctgtcttggtggccatggcctcagggatggctcctaggtggctgaggcacagcagtggctggaaggtgccccgtggaggctgaggtggaggcgcgcccagcagctcccccctgtggccatggcgggcacggggcgtaggagctggctggcggccggctctgcatgttcttgttgcctgtcgtctgtaactctagtgttcgacattcgccgtgatacagtggtgtcacgacgtgtgtaactgtggtcagcagaccttgttccgcgtggacgcctcaagtggattaatttctggaagcctcaatctgtatgtttgagtatttacatgagaatgttatttgaatggaattttcttaacccagaaggtagtatttataatcatttacttgtagcgaactgtttaaagttaacacttgtttaaatttttttacactatagcatttatgcaatggtttacagaattcatggagttatttttatcagtatgggaattaattaaaaccttgaatcttt

SEQ ID NO: 294 - DNA, 5612 bp, Homo sapiens
  source 1..5612: mol_type = genomic DNA
attcagcctcttcggaccctctctcactccctgtcttccggagcgtgagtgaagcccgggtgaggtgttttcccacacgccgggggcccggagctgagaaggggcatggccagcatcacgcagctgttcgacgacctgtgtgaggccctcctgccggctgccaagactcacctgggccagcgcagtgtgaaccggaagagggcaaagcggagcctcaagaaggtggcctacaatgctcttttcacaaatctttttcaagatgagactcaacagctgcagcctgacatgtcaaaactaccagcgagaaacaagatcctcatgttgtcctttgacttgagagtgggtggcctgggccccaaggccgaccgtttggaggagcttgtggaggagctggaagcagccccttgctgtccgcttttggaggtggggtctgttttggacctcctggttcagctggcagggagtggtccccctcaagttctgccgagaaaacgagactacttccttaacaacaagcatgtggggagaaacgttccgtacagcggctatgattgcgacgacctgagtgtgtttgagatggacgttcagtctctgatctccagagaagagtgtttgtgtcacagcatgatccaggaaacacttcaggttatggaggctgctccaggcactggcctgcccaccgtcgggctcttctcatttggtgacccttgtggtgacaggttcgagagagacacccgggtctcgctcttcggggcccttgtgcacagccgcacttatgacatggacgtccgactgggcctgccccccgtgccagacaatgcggacctctctgggctggctattaaggtcccaccgagtgtggatcagtgggaagacgaaggattccagtcagcgtccaacttgactcctgattcccagtctgagcccagcgtgaccccagacgtggacctgtgggaagccgcacttacctatgaggccagcaagcggaggtgctgggagcgagttggctgcccccctggccacagagaggagccttacctgacggaggcgggaagggacgctttcgacaagttctgcaggctccaccaaggggagctccagctgcttgctgggggcgtcctacaggccccgcagcccgtgctggtgaaggagtgcgagctggtgaaagacgtgctgaacgtcttgattggggtcgtgtctgccacgttttcgctctgccagccggcccaggcctttgtggtgaagcggggcgtccacgtgtcaggagcgtctcccgagagcatcagcagcctgctctcggaagtggccgagtatgggacctgctacacgcgcctgagtcatttctctctgcagcccgtcctggactctttgtacagcaagggcctcgtgttccaggccttcaccagtggcctgaggaggtacctgcagtattaccgggcctgcgtcctttccactccgcccaccctgagcctcctcaccattggttttctcttcaagaaacttggccggcagctcaggtacctggccgagctctgtggcgttggcgctgtgctcccgggcacctgtggaggaggccccagggccgcgtttcccaccggcgtgaagctgctgtcctacctctaccaggaggctctgcacaactgcagcaacgagcactaccctgtactgctgtccctgctgaagaccagctgcgagccctacacccggttcatccacgactgggtgtacagcggggtgttcagagacgcttatggcgagttcatgattcaggtgaaccacgagtacctcagcttccgagataagttgtactggacacatggctacgtgctcatctccaaagaggtggaggactgtgttcccgtgtttctgaagcacattgcccacgacatatacgtctgcggaaagaccattaacctgctgaagctctgctgcccccggcattacctctgttggtccgacgtccctgtcccccggatctcggtgattttctcccttgaggagttgaaggagattgagaaggactgtgccgtctacgttgggcgcatggagagggtggcccgccacagctctgtcagcaaggaggagaaggaattacgtatggaaattgcaaaacaagaattaatcgctcatgcccgggaagcagcatccagggtcctgagtgcactgagtgaccggcagatgtcagaacggatggccttggatgcccggaagcgtgagcagtttcagaggctgaaagaacaatttgtgaaggaccaggagcgacgccaggcggccaggcaggaggagctggatgatgacttcagctacgcccgtgaactccgagacagggagagaaggctgaagtccctggaggaggagctggagaggaaggcgaggcaggcactggtcgaccactacagcaagctctctgcagaggcagctcgtcgggagcagaaggcactgtggagaatccagaggcaccgactggagagtgcacggcttcgttttctcttagaagatgagaaacacattcaggagatgctgaaagcagtgtctgaggctcaccagccccaggagccgccagacgtcctcttgagcgtgcacccccaggtcacgtctccgggccctgagcacccagagggaggccaaggctgtgattctgggtctgcagagcaacactcgcctgcctgggatggctggaacaggccaggcctgctgaccccacagccccttaagcctctagcagtgggggctggtggcagggggctgcagcaggcggagggggccagacccttctctgacagcctcagcattggagacttcctacctgtgggcccaggggctgagccgtccgtgcagactggcatggtccctctcctggaggtggcgctgcagaccattaacttggacctgcccccctcagctcctggggaggcacccgcagcagccagcactcagccctccaggccacaggagtacgactttagtactgtcctgaggccagctgtggccacctcacctgcaccagggcccctgcaggctgcagagtgcagcttgggcagctcagggctacagctgtgggaggacagttgtgggaagatggatgcctgtggctccgcctcgcgggagactctgctcccctcacacccacccaggcgtgctgctctggaggaggggagcagccagcccacagagcggctctttgggcaggtgtcagggggtggtcttcccacaggggactacgcttctgaaatagctcccacccggccacggtggaacacccacgggcacgtgtctgacgccagcatcagggtcggggagaatgtgtcagatgtggctcccacccagccacggtggaacacccacggacacgtatccaatgccagcatcagcttaggggagtctgtgtcagatgtggctcccactcggccacggtggaacatccatggacatgtgtccaacgccagcatcagggtcggggagaatgtgtcagatgtggctcccaccaggccacggtggaatacccacgggcacgtgtccaacgccagcatcagggttggggagaacgtgtcggacgtggctcccacccggccacggtggaacacccatggacacgtgtccgatgccagcatcagcttgggggagtctgtgtcagacatggctcccgcccggccacggtggaacacccatggacacgtgtctgatgccagcatcagcttgggggagtctgtgtcagacatggctcccacccggccacggtggaacacccacggacatgtgtctgacaccagcatcagggttggggagaacgtatcggacgtggctcccatccggtcacggtgcaacacccatggacacgtgtccgacgccagcatcagcttgggggagcctgtgtcggatgtggtttccacccggccacggtggaacacccatgtacccatccctccgccccacatggtgctgggggctctctcaccagaagctgagcccaacacacccaggccccaacagagcccccctggccacacgtcccagtcagcgctcagcctgggagcacagagcactgtgctggactgtgggccacggctgcctgtagaagtggggccatctctgtcctcccccagctcgggctgcggggaggggagcatcagcgtgggggagaacgtgtcagacgtggctcccacccaaccatggtggcccaacaccccgggagacagtgtctctgaagaactaggccctgggaggagcggggacactgaggacctctctccaaattggcctctcaactcacaggaagacacagctgcccagagcagcccaggccgtggtgaggaggcggaggcatcggcggcggaggctcagggtggggagcaggcctacctggcaggcctggcagggcagtaccacttggagcggtacccggacagttacgagtccatgtccgagccgcccattgctcatcttttgcgccccgtgcttccccgggccttcgccttccccgtggacccccaggtccagtctgccgctgatgagactgctgtgcagctgagcgagttgctgacgctgcccgtgctcatgaagcgctccatcacggcaccgctggccgcccacatctccttggtgaacaaggccgctgtcgactacttcttcgtggagctgcacctggaggcgcactatgaggcactgcggcacttcctgctgatggaggacggcgagttcgcccagtccctcagcgacctgctctttgagaagcttggagctgggcaaacgcccggagagctgctcaacccgctggtgctgaactctgtgctgagcaaggccctgcagtgcagcctgcatggggacaccccgcacgcctccaacctctccctcgctctcaagtacctgcccgaggtgtttgcccccaacgccccggatgtgctgagctgcctggagctcaggtacaaggtggactggcctctcaacattgtcatcaccgagggctgcgtgagcaagtacagcggcgtcttctccttcctgctgcagctgaagctcatgatgtgggcgctcaaggacgtctgcttccacctcaagcgcacagccctgctgagccacatggccggctctgtgcagttccgtcagctgcagctgttcaagcacgagatgcagcatttcgtgaaggtcatccagggctacatcgccaaccagatcctgcacgtcacctggtgcgagttcagggccaggttggccaccgtgggcgacctggaggagatccagcgtgcgcacgcagagtacctgcacaaggccgtcttcaggggcctgctcacggagaaggcggcgcccgtcatgaacgtcatccacagcatcttcagcctcgtgctcaagttccgcagccagctcatctcccaggcctgggggccccctgggggcccgcggggtgcagagcaccccaactttgcactcatgcagcagtcctacaacaccttcaagtactactcccactttctcttcaaagtggtgaccaagctggtgaaccgcggctaccagccccacctggaggactttctgctgcgcatcaacttcaacaactactaccaggacgcctgaggctgctctgcgggggacgtgcacaataaaggtgttctcggaccctg

SEQ ID NO: 295 - DNA, 2788 bp, Homo sapiens
  source 1..2788: mol_type = genomic DNA
ccgctgagcgctgactgggtgcgagtggggaagctgctaacccgacccggattggcgctgaggtggcccgtggggcagggcagatgattctggaccagatgaagcctgaggagccttccagctctaagatagcaggataggagacttctaagattggagctgcagaagacttgccagcccaccagcacaatgtcaggaagccatacacctgcctgtggccctttctcagccctgactccgagcatatggccccaggagatcttggccaagtacacgcagaaggaagagtcagcagagcaaccagagttctactacgatgagtttggtttccgtgtgtacaaggaagaaggtgatgagcctggctccagtctgctggcgaactcccctctgatggaggatgctccacagaggctgcggtggcaggcccacctggagttcacccataaccacgatgtgggggatctcacctgggacaagattgccgtctccctaccccgctctgagaagctccgctccctggtgctggccggcatcccacatggcatgaggccacagctgtggatgcggctctctggggccctgcagaagaagaggaactctgagctgtcctaccgcgagattgtgaagaacagctccaacgatgagaccatcgctgccaagcagatcgagaaggacctgctccgcaccatgcccagcaacgcctgcttcgccagcatgggtagcatcggggtgccccgcctgcgcagggtgctccgggccctggcctggctctacccagagatcggctactgccagggcaccggcatggtggccgcctgcctcctgctgttcctggaggaggaggacgccttctggatgatgtctgccatcatcgaggacctgctccccgcctcctacttcagcaccaccctgctgggtgtccagactgaccagcgggtcctgcgccacctcattgtccagtacctgcctcgcctggacaagctgctccaggagcatgacattgagctgtccctgatcacactgcactggttcctcacggccttcgccagcgtggtggacatcaagctgctcctgcgcatctgggacctgtttttctacgagggctcccgggtgctgttccagctcacgctgggcatgctgcacctcaaggaggaagagctgatccagtcagagaactcggcctccatcttcaacacgctatcggatatcccgtcgcagatggaggacgcggagctgcttctgggggtggccatgcggctggccggctccctcaccgatgtggccgtggagactcagcgccgcaagcacctggcctatctcattgcagaccagggccagctcctgggggccggcaccctcaccaacctctctcaggttgttcgccgcaggacccagcggaggaagtccaccatcactgctctgctcttcggggaggatgacctggaggcactcaaggccaagaacatcaagcagacggaactggtggctgacctccgggaagccatcctgcgcgtggcacgccacttccagtgcacagaccccaaaaactgcagcgtggagctgactccagactatagcatggagagccaccagcgggaccacgagaactacgtggcgtgctcacgcagccaccggcgccgagccaaggccctgctggactttgagcggcacgacgacgacgagctgggcttccgcaagaacgacatcatcacaatcgtgtctcagaaggacgagcactgctgggtgggggagctcaacggcctgcgaggctggtttccagccaagttcgtggaagtcctggatgagcgcagcaaagagtactccatcgcgggggatgactcggtgacggagggggtcacagacctcgtgcgagggaccctctgcccggcccttaaggccctgttcgaacatggactgaagaagccatccctgcttgggggcgcctgccacccctggctgtttatcgaggaggctgcaggccgggaggtcgagagagactttgcctccgtgtattcccgtctggtgctctgtaagaccttcaggttggatgaagatggcaaagtcctgaccccggaggagctgctctaccgggctgtgcagtctgtgaacgtgacccacgatgcagtgcatgcacaaatggatgtgaagctccgctcactgatctgcgtggggctcaatgagcaggtgctgcacctgtggctggaggtgctctgctccagcctgcccaccgtggagaagtggtaccagccctggtccttcctgcgcagcccgggctgggtccagatcaagtgtgagctccgagtcctctgctgctttgccttcagcctctcccaggactgggagctccctgcgaagagagaggcgcagcagcccctgaaggagggcgtccgggacatgctggtgaagcaccacctcttcagctgggatgtggacgggtgaccccctcctccccagcccaacctcgggcctgcgtctgaggtggcccaggaccccaagctgcagagcccagggaagagcagctccagagccctggccggggccgcgggatatcaatatcaggctgccccactccacgttccccagcacatcccaggtggtgggagcagagggtaccctgccccaccagggtccttagggatgctctaggccaaaccacagtttgtaccaaaaaccttgtgaggaggtgggggagccatgtctgtgctcaggaagagggaaggggatgggggtggctagtaggctcctggcctctttggtttataaataaactgtgtctgtctttgagaaa

SEQ ID NO: 296 - DNA, 2751 bp, Homo sapiens
  source 1..2751: mol_type = genomic DNA
ggactgccccgccctggtccagtgattgatcagcagtgattactgaggctttaatggtccgcttggatgggaattaattctgggatggataaataatgcatcgaggtttatgtagtccaaggcgagccgtccgtccggagccaggagaggtagccgagggagcctgacgggtgacgccagcggccacggggccccgaacgagcaggacatgaggggcgactaggcgcgaggacgagcaaaagcaagtggatgacagcatgaacggccctgcggggctggccggacggctgcaagaacatgctgagcccaaagatcaggcaggccaggagggcccgctccaaaagcctagtgatgggggagcagagccggagccctgggcggatgccgtgccctcacaggctgggccccgtgctgaaggcgggctggctgaagaagcagaggagcatcatgaagaactggcagcagcgctggtttgtgctgcgtggggatcagcttttctactacaaggacaaagatgagatcaagccccagggatttatttctctacaagggacacaggtgactgaacttcctcctggccccgaggacccagggaagcacctctttgagatcagcccaggtggtgccggggagcgggagaaggtgccggccaaccccgaggcgctcctgctcatggccagctcccagcgtgacatggaggactgggtgcaggccatccgccgagtcatctgggccccgctgggcggagggatctttgggcagcgcctagaggaaacagtccaccacgagcggaagtatggcccccgcctggcgcccctgctggtggagcagtgtgtggacttcatccgggagcgcgggctcactgaggaggggctgttccgcatgccaggccaggccaacctggtgagggacctgcaggattccttcgactgtggggagaagccactgtttgacagcacaacagacgtgcacacggtggcctccctgctgaagctgtacctgcgggagctccccgagcccgtggtccccttcgccaggtacgaggacttcctcagctgcgcccagctgctcaccaaggacgagggggagggcactctggagttggctaaacaagtgagcaaccttcctcaggcaaattacaacctgctcagatacatctgcaagtttctggatgaagttcaggcatactcaaatgtcaacaagatgagtgtccagaatctggcaaccgtttttggacctaacattctgcggccacaggtagaggacccagtaaccatcatggaaggcacttccctcgtccagcacctgatgaccgtcctcatccgcaaacacagccagctcttcacggcaccggtcccggaagggcccacctccccgcgcgggggcctgcaatgcgcagtggggtggggctccgaggaggtcaccagggacagccaaggagagcccggcggccccggcctgcccgcgcacaggacctcttccctggacggggcggccgtggcggtgctctccagaacagcccccacggggccggggagccggtgcagccctgggaagaaggtgcagaccctgcccagttggaagtcctccttccggcagccgaggtccctatcgggaagcccgaaggggggcggctcatccctggaggtgcccatcatctcctccggcgggaactggcttatgaacgggctgtcctccctgcgcggacaccgccgggcctcgtcgggagaccggctcaaggactcgggctccgtgcagagactctccacctacgacaatgtgcccgcgccgggcctggtccccggcatacccagcgtggccagtatggcgtggtccggggcctcgtccagcgagtcgtcggtggggggctcactcagcagctgcacggcctgccgcgccagcgactcgtctgcccgcagttccctgcacaccgactgggccctggagccctccccgctccccagcagcagcgaggaccccaagtccctggacctggaccacagcatggacgaggcgggcgcgggtgccagcaacagcgagcccagcgagccggacagccccacccgggaacacgcgcgccgctccgaggccttacaggggctggtcactgagctcagggccgagctgtgccgccagcggactgagtacgagaggagtgtgaaaagaatcgaagaagggagtgctgacctgagaaaacgaatgtcccggttagaagaagaactggaccaggaaaagaaaaaatacatcatgctggaaataaagctgcggaactctgaacgggcgcgggaggatgcggagaggaggaaccagctgttgcagagggaaatggaggagtttttttcgaccctaggaagcttgactgttggggcaaaaggtgccagggccccaaagtaaaaggaatggcagagctcacttctgtaccacgtctgctggtctccagccttgtatggagttagaagcgtctgtatctctggagcagccaggcgctctggagccagctggagagagagagatcctgatacctctgtggggactgtggggacttttgggaccccacacactccaggtgggatcagatgctgctccaaccatgcagttcctggtgagggtcagaaggggacggtaccaagagtagcgcttagcccttacccaggaaatatccttcatggccacagaaatggagggcgcccaggatccaggcagccaccgggaacagtcagctttctttattaaatgtgctcacaaagcatg

SEQ ID NO: 297 - DNA, 1537 bp, Homo sapiens
  source 1..1537: mol_type = genomic DNA
agcgagctgtgaacaactcgtgtccaaataagtggctgagaggtggtcctaagtaagcacaagtttagtagtagagtactcgtaacacagaactggctgaaaccccgccctcttgtctacgggcgttctttcagggcgactttgtcagtaccccaaactgtccccgcatgaggtcactctgcacggtcacgtgctcgagcccgcgggagcgccacatcgccagccgcacccctccacccccaacctgcccacgtgacccggcctagtttctccaggcccgtccctacgtctcactcgggaagccccgccccacgctgagcgctccgcctgcgaccctccgccacttacccaccccggctcaagcacgacccgtggatccacgtgctttttcttgtccaatgggagccggctcccgggcgcgaaggggcggggaggaaaggaacgactgtgctacgttgccagaaggggcgggacctgcaacgtccgacagaacgaggggacgtaacggaggcaggttggagccgctgccgtcgccatgacccgcggtaaccagcgtgagctcgcccgccagaagaatatgaaaaagcagagcgactcggttaagggaaagcgccgagatgacgggctttctgctgccgcccgcaagcagagggactcggagatcatgcagcagaagcagaaaaaggcaaacgagaagaaggaggaacccaagtagctttgtggcttcgtgtccaaccctcttgcccttcgcctgtgtgcctggagccagtcccaccacgctcgcgtttcctcctgtagtgctcacaggtcccagcaccgatggcattccctttgccctgagtctgcagcgggtcccttttgtgcttccttcccctcaggtagcctctctccccctgggccactcccgggggtgagggggttaccccttcccagtgttttttattcctgtggggctcaccccaaagtattaaaagtagctttgtaattccttgagcgcctggtttgactggggacttggggggatggggttggaagaatgactgccctttcccaccaaaaaagggagaactctttagattcagattgtgggtatgtagacttaataagtgaaacatcacagaagaagcctttattatacaatgacaaccaaacaagtactccggatatgcagtagaggaatcctctaagaaccatagagacttcttttctgtgatttttgttccccacccttgaacaccatctctaggatggagttggcctaagagtgaatgctgcaagatctgtgtttatgcctcttttcctcattcttcctcagtttgttcgtctgcttgaaagttggccaaaaaatcctgctgctcaccgacttcccgtggtcagctgctgtcaagcgttcactttctcttctgtcattcctcatggaatgagggtggttttgtcttcccgcttcccttgacctcaaaatcaggattaaaacctggggtagcctctgtgctcctttcttctatgccctggtttgttctgtggttctgggcttctt

SEQ ID NO: 298 - DNA, 2278 bp, Homo sapiens
  source 1..2278: mol_type = genomic DNA
aggccctgaactatttaaggatccaggtgttgcaaggcggtaagttttgcagccagtgtccatgaggtcggggctgggactagattagggtagatctaagcctgggcttgggagtgcagctagcgcagaaagatctgaggaactagagcaaaaagccatgcggatggattgtggtcgtcagaggctcccgtagtctttagcggcgctggcttccgcaggctccgccctctcttgcccacccggaaacagcctcgccccgcctacgcgggacccaaccgcggcgaccggacgtgcactcctccagtagcggctgcacgtcgtgccaatggcccgctatgaggaggtgagcgtgtccggcttcgaggagttccaccgggccgtggaacagcacaatggcaagaccattttcgcctactttacgggttctaaggacgccggggggaaaagctggtgccccgactgcgtgcaggctgaaccagtcgtacgagaggggctgaagcacattagtgaaggatgtgtgttcatctactgccaagtaggagaaaagccttattggaaagatccaaataatgacttcagaaaaaacttgaaagtaacagcagtgcctacactacttaagtatggaacacctcaaaaactggtagaatctgagtgtcttcaggccaacctggtggaaatgttgttctctgaagattaagattttaggatggcaatcatgtcttgatgtcctgatttgttctagtatcaataaactgtatacttgctttgaattcatgttagcaataaatgatgttaaaaaaactggcatgtgtctaaacaatagagtgctattaaaatgcccatgaacctttagtttgcctgtaatacatggatatttttaagatataaagaagtcttcagaaatagcagtaaaggctcaaaggaacgtattcttgaaggtgacggaaatacctaaaaactcctaaaggtgcagagcacaccttccaaatctctcaaaagatcagtatcttttattttaagttatctccatctgcaaagcaactgatgatattcctgaaaccccttctttgattttggaatgtagaacctaacctcaccactgaaggaaagcacatgacctctaatctagcctctgcttaattcaggcagttttgttttgtttaataaaaaacagactcctgagcactagaagcagtttgttttgcagctgtctcaatgtgctttacttgggatgaggcaggtggcggagagcggccggaaagactctataacccagttctgggaagaactccaagctgggagtcagtcacactgactctaccacttactagctgtgtaaccacaggcaagttactcaccccgtccaaacctcagttttctcttctataaacaaggttcttagaataaaatgagaattcaaggaagcacttaacatagcacctggtttgtggtacctcccaaatcaatggtagctttcccaaatgaacacaagtatttgaggctcctcatgtttgttctaaagtcaagagtccagttagtaactaaccactagttgtcctgccatgactaggtcaagtgaggccacagtgattcagtgattcttaaagccaccttgcaaagcaggtaatacagttatttcctgtcctgcagaattcaagaacctttatgcagttcctgtcctatgatttaaagaggtcagtgactccgctactctcactacatcttagagtagagtggtagagtagttgatctgagacagtaaggttccaggagatggtcttgccctactatatgtcaggaacagctagccttagaattcagtatacttggtggcccacccctaccccatgccccagtgccttatttggtctaaagcacctaacttttccattcttaatcagctgattatgctaaatgcgtaaaaaagaaaaacaccttacaaatccacagggaaatcaaagaacaattcaggtttaacagaaatagtctattaacaataaaaagttggatgaaaaagcacactaaaggttctaggggctaccataataaaggtagataggaagagttttcattttttttgtcttcactgtacaaaagaaatacattatatacatgtattaagtgcctcgtttgtatccagtttttcattttcccgatgtgttattttgctgttgctgctctgccaaggcttgctgaaggcgcatccgcttccgggaatagtgctgccaatgtagaatctgctgttcatcaataaatttcgcacactgagcattcacca

SEQ ID NO: 299 - DNA, 1580 bp, Homo sapiens
  source 1..1580: mol_type = genomic DNA
gcaggggtgaagggtgaaaagcgtcattcgaggtccgggtccggcttgcggggtcagcgaactggagaggcgccatgggctggatcacagaagatcttattagacggaatgctgaacacaacgactgtgtcattttttccctggaggaactctcgttgcatcagcaagaaatagaaagactagaacacattgataaatggtgccgggatttaaaaattctctatcttcaaaataatcttattgggaaaattgaaaatgttagcaaactcaagaaacttgaatatttgaatttagctttaaacaacattgaaaaaatagaaaacttggaaggatgtgaagagctggcaaaacttgacctgactgtgaatttcattggagagctgagcagcattaaaaacttgcagcacaatatccatctgaaggagctctttctcatggggaacccatgtgcttcctttgaccactatagggagttcgtggtagcaactcttccacaattaaagtggttggatggtaaagaaatagagccttcagaaaggattaaggcattgcaggactattcagtaattgaaccacaaatcagagagcaggaaaaagatcactgtcttaaacgagccaaactcaaggaagaggctcagaggaaacaccaagaagaggataaaaatgaagacaagagaagtaacgcaggctttgatggacgttggtacacagacatcaatgctactctttcctctttagagagcaaagaccacctacaggcaccagacacagaggaacacaacacaaagaaattagacaacagtgaagatgacttggaattctggaataagccctgtttgtttactcctgaatcaagattggaaactcttagacacatggaaaaacaacggaagaaacaggaaaaattaagtgaaaaaaagaagaaagtgaaaccacccaggactttgatcactgaagatgggaaagccctaaatgtgaatgagcccaaaattgacttctctttgaaagataacgaaaagcagatcatcctggaccttgctgtctataggtatatggatacctctttaatcgatgttgatgtgcaaccaacttacgtgcgagtaatgatcaaaggaaagccatttcagcttgtccttcctgcagaagtgaaacccgatagtagttctgctaaaagatctcagacaacgggtcatttggtcatctgcatgcccaaggtaggagaagtaatcacaggtggtcagcgagcattcaaatctatgaaaactacctcggacaggagcagagaacaaacaaatacaagaagcaagcacatggagaaactagaagtagaccctagcaagcactcattccctgatgtgactaacatagttcaagagaaaaaacacacacccagaagacgacctgaacccaaaattataccaagtgaggaagacccaacctttgaagacaaccctgaagtgcctccgctgatttgaaacatctggctgcgttgccattggctgagacccaccaggtccagttttggttggtgtagagaccatatgcatattattcctgggataaacacagagttatttgtc

SEQ ID NO: 300 - DNA, 4615 bp, Homo sapiens
  source 1..4615: mol_type = genomic DNA
cctccctcttgttcgtcctccctccccctgtggactgcggcgctggcgttccgcgcacgccggctcactgcgcctgcccggcgtgtggacgccacacgctcccggaagtgggaggtggccgctggagtttgtgtggccgccgccgcgggaacgcgagcccggtaatttttcaacggagaaaggcgaggctttcgggctctgcagagtgagagttagcaagtgtccggctccagcaactctcctctggcgtgacagccggcatggaggatccacagagtaaagagcctgccggcgaggccgtggctctcgcgctgctggagtcgccgcggccggagggcggggaggagccgccgcgtcccagtcccgaggaaactcaacagtgtaaatttgatggccaggagacaaaaggatccaagttcattacctccagtgcgagtgacttcagtgacccggtttacaaagagattgccattacgaatggctgtattaatagaatgagtaaggaagaactcagagctaagctttcagaattcaagcttgaaactagaggagtaaaggatgttctaaagaagagactgaaaaactattataagaagcagaagctgatgctgaaagagagcaattttgctgacagttattatgactacatttgtattattgactttgaagccacttgtgaagaaggaaacccacctgagtttgtacatgaaataattgaatttccggttgttttactgaatacgcatactttagaaatagaagacacgtttcagcagtatgtaagaccagagattaacacacagctgtctgatttctgcatcagtctaactggaattactcaggatcaggtagacagagctgataccttccctcaggtactaaaaaaagtaattgactggatgaaattgaaggaattaggaacaaagtataaatactcacttttaacagatggttcttgggatatgagtaagttcttgaacattcagtgtcaactcagcaggctcaaataccctccttttgcgaaaaagtggatcaatattcggaagtcatatggaaatttttacaaggttcctagaagccaaaccaaactgacaataatgcttgaaaaattaggaatggattatgatgggcggcctcactgtggtcttgatgactctaagaatatcgcccgaatagcagttcgaatgcttcaggatgggtgtgaactccgaatcaacgagaaaatgcatgcaggacagctaatgagtgtgtcctcttccttaccaatagagggcactccaccaccacaaatgccacattttagaaagtaacaacagttttgtgtgtggatcattccaattgaagttgctatgaagaggtagcagatgaatctcattgaattagtcctgtagtgcaaactttaagcaccttaaaacatttaaaatcttattacaggtgatagagatagatacatgtatgtgaacagattttgtaggaaggcatactgaattctttgtcaccagcacttttgatatgaacagtattcgttacatagtaacagttcctgcttacaactgaattttataatttaaggtgttcaagatatattctttttggttttaaaatgcaaaatcttattggctgttctgttgaatgtcatatcttactggtgtttaaatatgtaatgtgtttctttattaacatcactagatgaaaccatatcttaaaatgcagaaatgattggaaggtagatcttatctagcctttggatttcaagaatatcatagtccttttgattttcaaagtttatatgtgaagttcaccatgtatgtggtgaatttcgtaaggtacttggtatacatatctgcctatgtttcttttcaactcataattggaagaattatgatggattatagggtttggttaaaaatccagttactgaaggaattaatgaaaacgtagaagaaagtactaaaaggaatatcataagggctgtagctcaaacttcataatacataaatcactggggtctttttggatttggttgtttgattcgccttccttttttgacatatgtatgccttaattcttaaatctgagggaccatgctttgaaatagactgaaaattaagggtcaccacctaattttactttgtattcagtatcgtaagtgaggttaataaagtcaatactttctaccatatattacgtttttgttattaaaaaacttcattggccactagtgaagttagtcaataaaagacttgtttttctgattttacatagtaaatggctgctaagtattgagtaattcttaactaattctaaaaactaaaatgtgcatttcgacttgataaggtaaaactcttatctagaggctaaacccatgtattttcagaattgaatttttctccttgtagctttcagggaacaatttcattgacattgcttgcttcctgccttttaccttttaataaaaattgtgatgctactttattctaaagatttatattttataaccagatgaatttcctcaaaggtttccaaacctatatcatatagggtgaaaagcaggaaagtagacatttttcttggcgtgggaattctctacatagggcagtagatttcttaagccaatgaatttctgcttttcagcagtagtcatataatcagtatcataaagaataatgtgtaaataacagaaggcatatgagagtgtggtgttcctagatgaactgttacagattatagtaaaataaggaaatctaagtgctttaagtttatacagttaactcttaggataagagggatgtatgctgagatgtttgtgcatcccagatagcactgtacaataacctgtaaagtattactgaatactgaatagctgaaactgcaattggaaaatctgatgatgacgaggaaatattacgtttccagtttttttagctctatctgctaatttctttgcctgttttcactttcgccaagtaccaacaagctcatgttgtatttctttttaagaacttcaacattataagctctcagtaccctattttgttgttgttgttgtttgagacagagtttttgctcgtctgccaggatggagtgcagtggtgcgatcttggctcactgcaacctccgcctcctgggctcaggtgatcctcttgcctcagcctcctgagtagctcagattacaggcgcgtgccaccacacccgcctaatttttgtatttttggtagaggcggggtttcaccatgttggtcaggctggtcttgaactcctgacctcaagtgatttgcccaccttgacctcctacagacgtgagccactgcgctcagccatagattttactgtcttaacccattttaattcctctgttgagtctctgtcctcccctccaatttgatttgggattttgctgatgagatgatactaaacattgagagtactgctttttactctgacttttattgtgttgtctttgaaagacaaatagtacaactttttacaaggaaacacgtaagagatggatgtccatgaaaacaatattagtatattctattattgtttcttattaatagttacttagtatttacaaacaatttattattagctgtgttaacttttattctatgcttcatatgctctgacattgacatagtggatttctgctgatttttttcaaatccgcaatctttataaccaactgaagtatataatagagcattacattttatctttatttgtgttctgttggatcaagtatttaacatttgctctgaaaaaaatgtttttgtgatgtgtctttgttgccttgagatagatccatttatcctgcctcctagggagaagtttctgcctggattgaaacaaaaaaacacaggcgtcacaagcatgttacctattaagagagagagggtatctctgaagactaattaaaatggtaatttttaaaaagatgtgaccagttgacttttagtatatcatcccaagtattatccccaaaatgataatgcaaaacagaataatttggagaccaggagaaaaactggtatgattactggggaggggaagaagcacaggtggtcaagataataatgcatgtttggcctcagctgtagttgccaaagaaactacctgcctcacagatgagcacgcacgggtgcattgtcaaagtctgagaaggatgtattgtactttgaaggaagactttccatttctaagctaccatggagaagtatatgctcctcgagaccagagactgtgacttctgcatctttgattccagcgacatatgataaaatgttttgcacatagttgaatccagcgttgatacatgaaggacagcattacatcttttttctattatacttagaaatttcctctttgttctgcaccaccaacctgtatatcaagcctccttgccccacaaagcttccaaagcccgtaaatttgttaatctagagcaggggtcagcaaactaccacccatgggccaaatctggctgctgcctatttttgtatggcctacaaactatggtttttatattcccttttgttaatggctcaaaataatattttgtataatacgaaaattacgaaattttagtttctctaaataaagttttggaaagaac

SEQ ID NO: 301 - DNA, 1705 bp, Homo sapiens
  source 1..1705: mol_type = genomic DNA
aataaaagcaggctgcctgagccggcagcagcaacctgctctggttcccttccacgctgtggaagctttgttcttttggtcttcatgataaatcttgctgctgctcactcgttgggtccgtgccacctttaagagctgtaacactcaccgcgaaggtctgcaacttcactcctggggccagcaagaccacgaatgcaccgagaggaatgaacaactctggacacaccatctttaagaaccgtaatactcaccgcaagggtctgcaacttcattcttgaagtcagtgaggccaagaacccatcaattccgtacacattttggtgactttgaagagactgtcacctatcaccaagtggtgagactattgccaagcagtgagactattgccaagtggtgagaccatcaccaagcggtgagactatcacctatcgccaagtggcctgattcagcaggaagcatctcagacaccaaccactatgctgtcagcagttgcccggggctaccagggctggtttcatccctgtgctaggctttctgtgaggatgagcagcaccgggatagacaggaagggcgtcctggctaaccgggtagccgtggtcacggggtccaccagtgggatcggctttgccatcgcccgacgtctggcccgggacggggcccacgtggtcatcagcagccggaagcagcagaacgtggaccgggccatggccaagctgcagggggaggggctgagtgtggcgggcattgtgtgccacgtggggaaggctgaggaccgggagcagctggtggccaaggccctggagcactgtgggggcgtcgacttcctggtgtgcagcgcaggggtcaaccctctggtagggagcactctggggaccagtgagcagatctgggacaagatcctaagtgtgaacgtgaagtccccagccctgctgctgagccagttgctgccctacatggagaacaggaggggtgctgtcatcctggtctcttccattgcagcttataatccagtagtggcgctgggtgtctacaatgtcagcaagacagcgctgctgggtctcactagaacactggcattggagctggcccccaaggacatccgggtaaactgcgtggttccaggaattatcaaaactgacttcagcaaagtgtttcatgggaatgagtctctctggaagaacttcaaggaacatcatcagctgcagaggattggggagtcagaggactgtgcaggaatcgtgtccttcctgtgctctccagatgccagctacgtcaacggggagaacattgcggtggcaggctactccactcggctctgagaggagtgggggcggctgcgtagctgtggtcccaggcccaggagcctgagggggtgtctaggtgatcatttggatctggaggcagagtctgccattctgccagactagcaatttgggggcttactcatgctaggcttgaggaagaagaaaaacgcttcggcattctccttaggacttatctgcttgtagatttggctgatccaattaacatgtggggttcttggtgtgggtctggggagctgaaggattttatggagctggtgctttggaggaatcttaagggaaaggagtagaagctcaggcctttgaaggatttcagctcctcctctctgtaatttgtgctttaagcattttttttcctaaaataaactcaaatttatcctcaa

SEQ ID NO: 302 - DNA, 1742 bp, Homo sapiens
  source 1..1742: mol_type = genomic DNA
ggtggtggcagaggcgcctgcggttactggccgggccgacgggtcctgagtctccagagctcggtgaggcgtcccggaggcggcgatcacggttcttacatccccgcgtccccaggtttagcctgagcagggttgtggaaggccgggacccattgacagcacgatggtgacggagcaggaggtggatgccatcgggcagacgctggtggaccccaagcagcccctgcaggcccgcttccgggcgctgttcacgctgcgtgggctcggcggcccaggcgccattgcatggatcagccaggccttcgatgacgattccgccctgctcaagcacgagctggcctactgcctgggccagatgcaggatgcccgcgccatccccatgctggtggacgtgctgcaagacacccgtcaggagcccatggtgcgccatgaggcaggggaggccctgggggccatcggggacccggaagttctggagatcctgaagcagtattcctcggaccccgtcatcgaggtggccgagacctgccagctggccgtgcgcaggctggagtggctgcagcagcacggcggggagccggcggcgggaccctacctctccgtggaccctgccccgccggctgaggagcgtgacgtggggcgcctgcgggaggcgctgctggatgagtcccggccgctcttcgagcgataccgcgccatgttcgccctgcgcaacgcgggaggcgaggaggccgccctggcgctggccgagggtctgcactgtgggagcgccctcttccgccacgaggtcggctacgtcctgggacagctgcagcacgaggcggcggtgccccagctggcggccgccctggcccgatgcaccgagaaccccatggtgcggcacgagtgcgcggaggccctgggcgccattgcccggcccgcctgcctggccgcgctgcaggctcacgcggacgacccagagcgcgtggtgcgtgagagctgcgaggtggctctggacatgtatgagcacgagaccgggcgggccttccagtacgcggacggcctggagcagctgcgcggggccccctcctagggccccaccctcacccggagctcccggaggactcttgagggccgctcctcccccgcagagctttggcgtctaaaccgggtgtgtgtaaatcggtgtcatcgcttgtgtcttgctgggcgcatggttgctgtccccctcctccgtctgggaccgaggagctgccgttgtgctgtgactccctgagtcccctgactgctcctcggggcctggcgcagggctgtagcgtggaagtttccaggcttggggtgggactctgcgggaggctctgggatgcccggctcaggacaggggaggattgcgagggaagccaggggaggatcgcgagggaagccaggggaggatcgcgagggaagccaggggaggatcgcgagggaagccaggggaggatcgcgagggaagccaagggaggatcgcgaggggagccaggggaggatcgcgagggaagccaggggcagagctggggctctgggaagaggctgacgttatggtggcttcagcttcactaggaatgggacacagggtctgggggcctctgactcccccaccccgaggcctgggtagggacagggtggtggtccctgagtgggtcaggtagggcacaggggccagggagggacaagcagacctcagagcgctgcccagatggaatattaaattatttttgccaagc

SEQ ID NO: 303 - DNA, 4483 bp, Homo sapiens
  source 1..4483: mol_type = genomic DNA
gtcggtgcctgcagggctctccgtggccgctcgggagaggtgctcttcgctcaggctcccccggagacttgagggggtgcgcgctggcgtgcatggggcctgttctgtccttggtttggggatgctcctaaggggggagaaagggatacctcgggtgcttggaggtcgagagacggatacgtaagtgcgcaagggccactgattagggcacgggaagggctcgctagaatgagctcttaaactggttgggtgtaagcggttttgggctagtctaaaccaaacaactgagaataaacgcggggttcctgcaggttgagagagtacctgtctgcaaatgtccagtagtgatggattgccttgtaggccccagagcaatcggggaagttagcattcttgttcaagaagctgctggttcacttagagctataaaagaatgttgtgagtttggattttcttccaaacgttcaggattgaggttagggctggtggtgagggatcatgtaaagaggtttgagtggctcagccttaggtcccggtgtggaaagcttattcttttggtgtcatcacgtggccgtgggaattatttagaatgtgatctgccctcatgagaagaaaggagctctgaagccgttgcagttcttcctccctatgtggaaaatcgaatttctggaaacatcctccgtattgggagattttgcctatgtaaaggctatccttattggctagcggcactaattactttaaaagtaggatggaagtacaagtatctcaagcatcattgggtttcgagctcacttctgtggaaaagagtttaagggagtggtctagactttccagggaagttattgcctggctgtgtccctctagtcctaattttatacttaactttcccccacctccttcagcctcatctgtttcaatggtgcaactcttttcatccccttttggttaccagtcaccttcaggccattcagaggaggaaagagaggggaatatgaagtcagccaagccccaagtgaaccacagtcagcatggggaaagccagcgggccttgagccccctgcagtctactctgagttctgctgcatctccttcccaagcgtatgagacctatattgaaaatggactcatatgccttaaacacaaaattagaaacatcgagaaaaagaagctcaaactggaggattataaggatcgcctgaaaagtggagagcatcttaatccagaccagttggaagctgtagagaaatatgaagaagtgctacataatttggaatttgccaaggagcttcaaaaaaccttttctgggttgagcctagatctactaaaagcgcaaaagaaggcccagagaagggagcacatgctaaaacttgaggctgagaagaaaaagcttcgaactatacttcaagttcagtatgtattgcagaacttgacacaggagcacgtacaaaaagacttcaaagggggtttgaatggtgcagtgtatttgccttcaaaagaacttgactacctcattaagttttcaaaactgacctgccctgaaagaaatgaaagtctgagtgttgaagaccagatggagcagtcatccttgtacttttgggaccttttggaaggtagtgagaaagcagtggtaggaacgacatacaaacacttgaaggatctactgtctaaattgctgaactcaggctattttgaaagtatcccagttcccaaaaatgccaaggaaaaggaagtaccactggaggaagaaatgctaatacaatcagagaaaaaaacacaattatcgaagactgaatctgtcaaagagtcagagtctctaatggaatttgcccagccagagatacaaccacaagagtttcttaacagacgctatatgacagaagtagattattcaaacaaacaaggcgaagagcaaccttgggaagcagattatgctagaaaaccaaatctcccaaaacgttgggatatgcttactgaaccagatggtcaagagaagaaacaggagtcctttaagtcctgggaggcttctggtaagcaccaggaggtatccaagcctgcagtttccttagaacagaggaaacaagacacctcaaaactcaggtctactctgccggaagagcagaagaagcaggagatctccaaatccaagccatctcctagccagtggaagcaagatacacctaaatccaaagcagggtatgttcaagaggaacaaaagaaacaggagacaccaaagctgtggccagttcagctgcagaaagaacaagatccaaagaagcaaactccaaagtcttggacaccttccatgcagagcgaacagaacaccaccaagtcatggaccactcccatgtgtgaagaacaggattcaaaacagccagagactccaaaatcctgggaaaacaatgttgagagtcaaaaacactctttaacatcacagtcacagatttctccaaagtcctggggagtagctacagcaagcctcataccaaatgaccagctgctgcccaggaagttgaacacagaacccaaagatgtgcctaagcctgtgcatcagcctgtaggttcttcctctacccttccgaaggatccagtattgaggaaagaaaaactgcaggatctgatgactcagattcaaggaacttgtaactttatgcaagagtctgttcttgactttgacaaaccttcaagtgcaattccaacgtcacaaccgccttcagctactccaggtagccccgtagcatctaaagaacaaaatctgtccagtcaaagtgattttcttcaagagccgttacaggctacttcttctccagttacttgtagctcaaatgcttgcttggttactaccgatcaggcttcttctggatctgaaacagagtttatgacctcagagactcctgaggcagcaattcccccaggcaagcaaccgtcttcactagcttctccaaatcctcccatggcaaagggctctgaacagggcttccagtcacctccagcaagtagtagttcagtaaccattaacacagcaccctttcaagccatgcagacagtatttaacgttaatgcacctctgcctccacgaaaagaacaagaaataaaagaatccccttattcacctggctacaatcaaagttttaccacagcaagtacacaaacaccaccccagtgccaactgccatctatacatgtagaacaaactgtccattctcaagagactgcagcaaattatcatcctgatggaactattcaagtaagcaatggtagccttgccttttacccagcacagacgaatgtgtttcccagacctactcagccatttgtcaatagccggggatctgttagaggatgtactcgtggtgggagattaataaccaattcctatcggtcccctggtggttataaaggttttgatacttatagaggactcccttcaatttccaatggaaattatagccagctgcagttccaagctagagagtattctggagcaccttattcccaaagggataatttccagcagtgttataagcgaggagggacatctggtggtccacgagcaaattcgagagcagggtggagtgattcttctcaggtgagcagcccagaaagagacaacgaaacctttaacagtggtgactctggacaaggagactcccgtagcatgacccctgtggatgtgccagtgacaaatccagcagccaccatactgccagtacacgtctaccctctgcctcagcagatgcgagttgccttctcagcagccagaacctctaatctggcccctggaactttagaccaacctattgtgtttgatcttcttctgaacaacttaggagaaacttttgatcttcagcttggtagatttaattgcccagtgaatggcacttacgttttcatttttcacatgctaaagctggcagtgaatgtgccactgtatgtcaacctcatgaagaatgaagaggtcttggtatcagcctatgccaatgatggtgctccagaccatgaaactgctagcaatcatgcaattcttcagctcttccagggagaccagatatggttacgtctgcacaggggagcaatttatggaagtagctggaaatattctacgttttcaggctatcttctttatcaagattgaaagtcagtacagtattgacaataaaaggatggtgttctaattagtgggattgaaggaaaagtagtctttgccctcatgactgattggtttaggaaaatgtttttgttcctagagggaggaggtccttacttttttgttttccttcctgaggtgaaaaatcaagctgaatgacaattagcactaatctggcactttataaattgtgatgtagcctcgctagtcaagctgtgaatgtatattgtttgcacttaatccttaactgtattaacgttcagcttactaaactgactgcctcaagtccaggcaagttacaatgccttgttgtgcctcaataaaaaagttacatgc

SEQ ID NO: 304 - DNA, 2899 bp, Homo sapiens
  source 1..2899: mol_type = genomic DNA
ctcagttccctccgccctcctcgggctccagcggtggcggagcgaacgggaccggcccggcttcagagcgcgaggtggagggtggaacgcgggcgcctgaaggagttgttgtctcggcagcgcccgcggagacgtgaagaggtggttgtgggaagagaagtttgcagaactgaaatggaggtcagagcttcattacagaaggttagtggatcatctgattctgtggctacaatgaacagtgaagaatttgttttggttcctcagtatgcagatgataattctacaaaacatgaagaaaaacctcaactgaagatagtttctaatggtgatgaacaattggaaaaagccatggaagagattttgagagattccgagaaaaggccaagcagtcttcttgttgattgtcaaagttccagtgagatttcagaccattcgtttggagatattccagccagccaaacaaataagccatctcttcagttaattttggatccgtctaacacagaaatttctacacccagaccatcttctccaggtggactacctgaagaagatagtgttttatttaataaactgacctacttaggatgtatgaaggtttcttccccacgtaatgaagtagaggctttacgggcaatggcaaccatgaaatcttccagtcaatacccctttcctgttaccctgtatgtaccaaatgttccagaaggttctgtgagaattatagaccaatccagcaatgtggagatagcatcttttccaatctataaggtgttattctgtgcacgtggacatgacggaacaacagagagcaattgctttgcatttacagagagttcccatggttcggaagaatttcagatacatgttttctcctgtgaaattaaagaggcagtaagcagaattttgtacagtttctgtacagcattcaaacgttcttccagacaagtgtctgatgttaaagactcagttattcctacccccgacagtgatgtgtttaccttcagtgtctccttggaggtaaaagaagacgatggaaaaggaaactttagccctgtgcctaaggatagagataaattttatttcaaattaaagcaaggaatagagaagaaggttgtgattacagtgcagcaactttctaacaaagaattagctattgaaagatgttttggaatgttattaagcccaggtcgaaacgtgaagaacagtgacatgcatttactggatatggaatccatgggaaagagctatgatgggagagcttatgtcatcactggcatgtggaaccccaatgcaccagtatttctggcacttaacgaggaaaccccaaaagataagcaagtatacatgactgtggcagtggatatggtagtcacagaggtggtggagcctgttcgctttctcctggagacagtagtccgtgtgtaccctgcaaatgagcgattttggtatttcagcagaaagactttcacagagactttcttcatgagattgaaacagtctgagggaaaaggccataccaatgctggagatgcaatatatgaggtggtgagtctacagcgagagtctgacaaggaggaaccagtcactcctactagtggagggggtccaatgtcaccccaggatgatgaagcagaagaggagagtgataatgaactctcaagtggaacaggtgatgtgtctaaggattgtcctgagaagatcctgtattcttggggagagttgctaggaaaatggcacagtaaccttggtgcacgaccgaaagggctgtctactctggtgaagagtggtgtccctgaagcattgagggcagaggtatggcagttattggcaggctgccatgacaaccaggcaatgctggatagataccgaattcttatcacaaaggactcagcccaggagagtgttattactcgagatattcatcgtacatttcccgcacatgattactttaaagatactggaggagatggtcaagaatcgctctataagatctgcaaggcctactctgtgtatgatgaagacattgggtactgtcaagggcagtcttttcttgctgctgtattactgctgcatatgccagaggaacaagcattctgtgttttggtgaaaatcatgtacgactatggtttgagagacctctacagaaacaacttcgaagatcttcattgcaaattctaccagttggagagactaatgcaggaacagctaccggacctgcatagccatttttctgatctgaacctggaagctcatatgtatgcatcccagtggtttctcactctttttactgccaagttcccactctgcatggtgttccacatcattgacttactgctttgtgagggtttgaacataatctttcatgtagctttggctctcctaaagacctcaaaggaagaccttctgcaggctgattttgaaggtgctttaaagttctttagagttcagcttccaaagagatacagggcagaggaaaatgcaagaagactgatggagcaggcttgcaatattaaagtaccaaccaagaagctgaagaaatatgagaaagaatatcagacaatgcgagagagtcagctgcaacaggaagacccaatggatagatacaagtttgtatatttgtaggtaactccagctgttgcatttatactgggaatcttcataagaagctgagagaaagagaggggaaaaagaaagtggctttctactttcaaaaatgaaacaaaaaggaaaaatggcaaagtactgttttagctgtgcatgtcatatccacaaagacttttagcaggtgaactgttccaagactgacacaaggatgtttcaaacttgcctctgtctgtagaaaatgttaaaaataccaactcacttggaaggaaaaataaaaatcacaaaggtatattga

SEQ ID NO: 305 - DNA, 1026 bp, Homo sapiens
  source 1..1026: mol_type = genomic DNA
tggcagcggagcccgcgcagggtttgccaggcgaaggcggagcgctaacgtctaacgctaacggcggtcgtgccccgccgctgctgtcacccccggccgctgctgccctccccgccgaggttctactgctctccttcttaagaagggtgggaggcactcggtctctccccacacctctcgcctgaggccaggcgccaggtgtcgcctgaagccagacagccggtttgggagcgagcctgaggtcaaccaatcaatggctcagacagataagccaacatgcatcccgccggagctgccgaaaatgctgaaggagtttgccaaagccgccattcgggcgcagccgcaggacctcatccagtggggggccgattattttgaggccctgtcccgtggagagacgcctccggtgagagagcggtctgagcgagtcgctttgtgtaactgggcagagctaacacctgagctgttaaagatcctgcattctcaggttgctggcagactgatcatccgtgcagaggagctggcccagatgtggaaagtggtgaatctcccaacagatctgtttaatagtgtgatgaatgtgggtcgcttcacggaggagatcgagtggctgaagtttttagcccttgcttgcagcgctctgggagttactattaccaaaactctcaagatagtgtgtgaggtcttatcatgtgaccacaatggtgggttgccccgaatcccattcagcaccttccagtttctctacacgtatattgccgaagtggatggggagatctgtgcatcacatgtcagcaggatgctaaactacattgaacaggaagtaattggtcctgatggtttaatcacggtgaatgactttacccaaaaccccagggtttggctggagtaacagcacaattttggcaattttaaaggaagatacagaggtgattgtacttcagaatgataaacccatataccacctaaaatcaattttcttgtacaactggtacacactaataaacaaacatgtgagatcagaaa

SEQ ID NO: 306 - DNA, 2176 bp, Homo sapiens
  source 1..2176: mol_type = genomic DNA
agtcacagcagccagctgctgtagaagaggggaggaaacaagccagtgcaaggggagcaaaagagaaaaggagccaggctgggcttcctgatcccacagcatcgcagagctcgggaggcacagctcacagacacaggaaacacaggactgctattctgctctcctgcccacggtgatctggtgccagctggtggaacagtgggtgatggcgtccctgctgcaagaccagctgaccactgatcaggacttgctgctgatgcaggaaggcatgccgatgcgcaaggtgaggtccaaaagctggaagaagctaagatacttcagacttcagaatgacggcatgacagtctggcatgcacggcaggccaggggcagtgccaagcccagcttctcaatctctgatgtggagacaatacgtaatggccatgattccgagttgctgcgtagcctggcagaggagctccccctggagcagggcttcaccattgtcttccatggccgccgctccaacctggacctgatggccaacagtgttgaggaggcccagatatggatgcgagggctccagctgttggtggatcttgtcaccagcatggaccatcaggagcgcctggaccaatggctgagcgattggtttcaacgtggagacaaaaatcaggatggtaagatgagtttccaagaagttcagcggttattgcacctaatgaatgtggaaatggaccaagaatatgccttcagtctttttcaggcagcagacacgtcccagtctggaaccctggaaggagaagaattcgtacagttctataaggcattgactaaacgtgctgaggtgcaggaactgtttgaaagtttttcagctgatgggcagaagctgactctgctggaatttttggatttcctccaagaggagcagaaggagagagactgcacctctgagcttgctctggaactcattgaccgctatgaaccttcagacagtggcaaactgcggcatgtgctgagtatggatggcttcctcagctacctctgctctaaggatggagacatcttcaacccagcctgcctccccatctatcaggatatgactcaacccctgaaccactacttcatctgctcttctcataacacctacctagtgggggaccagctttgtggccagagcagcgtcgagggatatatacgggccctgaagcgggggtgccgctgcgtggaggtggatgtatgggatggacctagcggggaacctgtcgtttaccacggacacaccctgacctcccgcatcctgttcaaagatgtcgtggccacagtagcacagtatgccttccagacatcagactacccagtcatcttgtccctggagacccactgcagctgggagcagcagcagaccatggcccgtcatctgactgagatcctgggggagcagctgctgagcaccaccttggatggggtgctgcccactcagctgccctcgcctgaggagcttcggaggaagatcctggtgaaggggaagaagttaacacttgaggaagacctggaatatgaggaagaggaagcagaacctgagttggaagagtcagaattggcgctggagtcccagtttgagactgagcctgagccccaggagcagaaccttcagaataaggacaaaaagaagaaatccaagcccatcttgtgtccagccctctcttccctggttatctacttgaagtctgtctcattccgcagcttcacacattcaaaggagcactaccacttctacgagatatcatctttctctgaaaccaaggccaagcgcctcatcaaggaggctggcaatgagtttgtgcagcacaatacttggcagttaagccgtgtgtatcccagcggcctgaggacagactcttccaactacaacccccaggaactctggaatgcaggctgccagatggtggccatgaatatgcagactgcagggcttgaaatggacatctgtgatgggcatttccgccagaatggcggctgtggctatgtgctgaagccagacttcctgcgtgatatccagagttctttccaccctgagaagcccatcagccctttcaaagcccagactctctcaatcccataccgacatctacaactaatctttcccatcaactctgtgtgaaggcaggttgcaactagaaattcagaggggctt

SEQ ID NO: 307 - DNA, 7780 bp, Homo sapiens
  source 1..7780: mol_type = genomic DNA
agctctgaggaggcggggccaggacggcgggaccggccgctgggtcccagcgagggctgagccgggcggtgggaggaggtcaggatggtgggggaacggcatgctggggacctcatggtgcccttagggcctcggctgcaggcatatcctgaagaactcattcgacagaggcctgggcatgacgggcatcctgaatacctgatccgatggagtgtcctgaagtgtggggaagtgggcaaagtgggtgtggaagaaggcaaagcagagcacatcctcatgtggctgtcggctcctgaggtctacgccaactgccctgggctgttaggtgagcgggcactatctaagggacttcagcacgaaccagctggggtttcaggaagctttcctcgagatccaggaggcctggatgaagtggcaatgggagagatggaggctgatgttcaggcgctggtacgcagggcggccaggcagctggcagaaagtgggaccccaagcctcacggccgctgtgcttcacaccatccacgtgctcagtgcctacgccagcatcgggcccctcactggtgtcttcagggagacaggagccctggacctgctcatgcacatgttatgcaatcctgagcctcagatccgccggagtgcaggcaaaatgctgcaggctctggcagcccacgatgctgggagtcgggctcacgtccttctatcactgagccagcaagatggcatcgagcagcacatggattttgacagtcgctatacattgctggagctgtttgcagaaaccacatcctctgaagaacactgcatggcctttgagggcattcatctgcctcagatcccaggaaagctgcttttctccttggtgaagcgctacctttgtgtcacgtccctcctggatcagctgaatagcagtccagagctgggagctggagaccaaagctccccatgtgccacaagagagaaaagccggggacagcgggaactggagttcagcatggctgtgggcaacctcatctctgagcttgtgcggagcatgggctgggcccggaacctcagcgaacagggcatgtcacctccccggccaacccggtccatctttcagccctacatttcaggccccagccttttactccccaccattgtcaccacccccagaagacaagggtgggtcttccgccagcgctctgaattctccagccgtagtggctatggagaatatgtgcagcagacactccagccagggatgcgagtgcggatgctggatgattatgaggagatcagtgctggggacgagggcgagttccggcagagcaacaacggcattccccctgtgcaggttttctggcagtcgacaggccgcacttactgggtgcactggcacatgctggagatcctgggccctgaggaagccactgaggataaggcttcagcagctgtggagaagggggcaggggctactgtgttgggcacagcatttccctcctgggactggaatcctatggatgggctgtaccctttgccgtacctccagcccgaacctcagaagaatgagagagtgggatatctgacccaggctgaatggtgggagctgcttttctttatcaaaaagttggacttgtgtgagcagcagccaattttccagaatctttggaagaacctggatgagaccctgggtgaaaaggccctaggtgagatctctgtgtccgtggaaatggccgagagtctgctgcaggttctcagtagtcgatttgagggcagcactctcaatgacctgctcaactcccagatctacaccaagtatgggctgctgtctaatgaaccaagcagctcgtctacttcacgaaatcactcctgtaccccagatccagaagaggagtccaagtcggaggccagcttctcagaggaagagactgagtccctcaaagcaaaggccgaggcccctaagacagaggccgagcccaccaagacaaggaccgagacccccatggcacagagtgattctcagctgtttaaccagcttctggtgactgaggggatgaccctgcccactgagatgaaggaggcagccagtgaaatggccagagccttgcggggtcccggtcctcgcagctccctggatcagcatgtggcagcggtcgtggccactgtgcagatatccagcttggacacaaacctgcagctttcagggctctctgccctctctcaggctgtggaggaggtcactgagcgggaccaccctctggtccgtcctgacagatcgctgagagagaagctagtgaagatgctggtggagctgctgaccaaccaggtgggagagaagatggtggtcgtgcaggccctgcgcctcctttacctgctcatgaccaagcacgagtggcggccgctctttgccagggagggtggcatctatgctgtgctggtctgcatgcaagaatataagacttctgtcttggtgcagcaggctgggctggcggcactgaagatgctggccgtcgccagctcctcggagatccccacttttgttactggccgagattctatccactctttgtttgatgctcagatgaccagagagatcttcgccagcatcgactcagccacacgcccgggctctgagagcctgctcctcactgtccctgcagccgtgatcctgatgctgaatactgaggggtgctcttctgcagcgagaaatggcttactcctgctcaacctacttttgtgcaaccaccacactctgggagaccagattataacccaagagctgagagacacgttgtttaggcactcagggatagcaccaagaacagaacctatgcctaccacacgcaccatcctcatgatgcttctcaatcgctactcagagccgccgggcagccctgagcgtgcagcactagagacccccatcatccagggtcaggatgggtcccctgagctactgattcgatccctggttgggggcccatctgcagaactactcctggacttggagcgtgtgctgtgccgtgagggcagccccggaggtgccgtgaggcccctcctcaagcgcctccagcaggagacccagcctttcctcctgttgctgcggactctggatgctccggggcccaacaagactctgctgctgtctgtgctgagggtcataacccgactgctggatttccctgaggcaatggtcctcccctggcacgaggtcttggagccctgcctcaactgcctgagtggccctagcagtgactccgagattgttcaggagctgacctgcttcctacatcgcctggcctcgatgcataaggactatgctgtggtgctctgctgcctgggagcaaaagagatcctctccaaagtcctggacaagcactcagctcagctgctgctgggctgtgagcttcgggacctggtgacagagtgtgagaagtacgcacagctctatagcaacctcacctccagcatcctggccggctgcattcagatggtgctgggccagatcgaagaccacagacgaacccaccaacccatcaatatccccttctttgatgtgttcctcaggcatctctgccagggctccagtgtggaagtgaaggaggacaagtgctgggagaaggtggaggtgtcctccaacccgcaccgagccagcaagctgacggaccacaaccccaagacctactgggagtccaacggcagcaccggctcccactacatcaccctgcacatgcaccgtggtgttcttgttaggcagctcactttgctggtggccagtgaggactcaagctacatgccagccagggtggtggtgtttgggggtgacagcaccagctgcatcggcactgagctcaacacggtgaatgtgatgccctctgccagccgggtgatcctcttggagaacctgaaccgcttctggcccatcatccagatccgcataaagcgctgccagcagggcggcattgacacccgggttcggggtgtggaggtcctgggccctaagcccacattctggccactgttccgggagcagctgtgtcgccgaacatgtctcttctacacaattcgggcacaagcctggagccgggacatagcagaggaccaccggcgcctcctccagctctgtcccagactgaacagggttttgcgccacgagcagaattttgctgaccgcttcctccctgatgatgaggccgcccaggcactgggcaagacctgctgggaggccctggtcagccccctggtgcagaacatcacctctcccgatgcggaaggcgtgagtgccctgggatggctgctggatcagtacttagaacagagagagacctctcggaaccccttgagtcgagcagcgtcctttgcttctcgagttcgtcgcctttgccacttgctggtgcatgtggaacctcctcctgggccttctcctgagccatccactcggcccttcagcaagaacagcaagggtcgggaccggagcccggcgccttcgccagtgcttccaagcagcagcctgaggaacataacccagtgctggctgagcgtggtgcaggagcaggtcagcagattcctggctgcagcttggagggccccagactttgtgcctcgttactgtaaactctatgagcacttgcagagagcaggctccgagctgtttgggcctcgggcagccttcatgctggctctgcgcagtggcttctctggcgccttgctgcagcagtccttcctcactgctgctcacatgagtgagcagtttgccaggtacattgaccaacagatccagggtggcctgattggtggagcccctggagtggaaatgctggggcagcttcagcggcacctggaacccattatggtcctttctggtctggaactggccacaacttttgagcacttctatcagcattatatggcggaccgtctcctgagctttggttcgagctggctggagggggctgtgctagagcagattggcctctgttttcccaaccgcctcccacagctgatgctgcagagcctgagcacctctgaggagctgcagcgccagttccacctcttccagctccagcggctcgacaagttgttcttggagcaggaagatgaggaggaaaagagactagaggaagaggaggaggaagaggaggaagaggaagctgagaaagaattatttatcgaagatccaagtccagccatttctatactggtcctgtcaccacgctgctggcccgtctccccactctgctacctgtaccatcccagaaagtgccttcccacagaattctgtgatgcccttgaccgtttctccagtttctacagccagagtcagaaccatccagtcctggacatgggaccacatcggcgactgcagtggacgtggctgggccgggctgagctgcagtttgggaagcagatactgcatgtgtccaccgtgcagatgtggctgctgctgaaattcaatcagacagaggaggtgtcagtagagaccttgctgaaggattctgacctctccccagagctgctgctccaggcactcgtgcccctcacctcagggaatggccctttgaccctgcatgagggccaggactttccacacgggggtgtgctgcggcttcatgagcctgggccccagcgcagtggggaggccctgtggctgatacctccccaggcatacctgaacgtagagaaggatgaaggccgaaccctggaacagaagaggaatctcttgagctgtcttcttgttcgtattctcaaagcccatggggaaaagggcctccacattgatcagctggtttgtctggtgctggaggcctggcagaagggtccaaatcctcctggaaccctgggccacactgttgctgggggtgtggcctgtaccagtacagatgtcctctcttgcatcctgcacctcttaggccagggctacgtgaaacggcgtgatgaccggccccagatcctgatgtatgccgctccagagcccatggggccctgccggggtcaggcagatgtccctttctgtggcagccagagcgaaacctccaagcccagcccagaagctgtggctaccctggcatctctacagctgcctgcaggccgcaccatgagcccccaggaagtagaagggttgatgaagcagacggtgcgtcaggtgcaggagacgctgaacttagagccagatgtcgctcagcaccttttggctcattcccactggggcgctgaacagctgctgcagagctacagtgaggaccctgagccactgctgctggcagctgggctgtgcgtacaccaggctcaggctgtacccgtacggcctgaccactgccccgtctgtgtgagccccctggggtgtgacgacgacctgccctctctctgctgcatgcactattgctgtaagtcttgctggaatgagtacctgacaactcggatcgagcagaaccttgttttgaattgcacctgccccattgccgactgccccgcccagcccaccggagccttcattcgtgccatcgtctcctcgccagaggtcatctccaagtatgagaaggcgctcctgcgtggctatgtggagagctgctccaacctgacctggtgcaccaacccccagggctgcgaccgcatcctgtgccgccagggcctgggctgtgggaccacctgctccaagtgtggctgggcctcttgcttcaactgtagcttccctgaggcacactaccctgctagctgtggccatatgtctcagtgggtcgacgacggtggctactatgacggcatgagcgtggaggcgcagagcaagcacctggccaagctcatctccaagcgctgtcccagctgtcaggctcccatcgagaagaacgaggggtgcctgcacatgacctgtgccaaatgtaaccatggattctgctggcgctgcctcaagtcctggaagccaaatcacaaagactattacaactgctctgccatggtaagcaaggcagctcgccaggagaagcggtttcaggactataatgagaggtgcactttccatcaccaggcgcgggagtttgctgtgaacttgcggaaccgggtgtctgccatccatgaagtgcccccgcccagatccttcaccttcctcaatgatgcctgccagggactggagcaggctcggaaggtgctggcctacgcctgcgtgtacagcttctacagccaggacgcagagtacatggatgtggtggagcagcagacagagaacctggagctgcacaccaatgccctgcagatcctcctggaggaaaccctgctgcggtgcagagacctggcctcctccctgcgcctcctgcgggccgactgcctcagcacgggcatggagctgctccggcggatccaggagaggctgcttgccatcctgcagcattctgcccaggatttccgggttggtcttcagagtccatcagtagaggcctgggaggcaaaaggacccaacatgcctggcagtcagccccaggcctcctcagggccagaggcagaagaggaggaggaagacgatgaggatgatgtgcccgagtggcagcaggatgagtttgatgaggagctggacaatgacagcttctcctacgatgagtctgagaacctggaccaagagactttcttctttggtgatgaggaagaggatgaagatgaggcctatgactgagggggcagatgcaggaaacacctagagcagccccagagtcacggggctgagggggcgggagctgcccctgtcatagggagggggattcccagcgtctgtagtgcttcctgtttgctgaataaaggtctctttctcacacaca

SEQ ID NO: 308 - DNA, 2535 bp, Homo sapiens
  source 1..2535: mol_type = genomic DNA
cctcatccggggctctcacccacatccgggaccctcatgcctgggcggaggagggggggccctcattcgggaccctgcactccgtcgccggaagtgccaccgagaagcgccggcctcggggctgtctacagcggcccgggagaggctgtggtggccccgagcgcgagtgtgtaggtgacaggacagcggccaggcccgcccctcccctcgtgatggtcattgtcctccagagcagtgatggaggaaataccagcccaggaagcagcagggtcaccaagggtccagtttcagtctttggagacccagtctgagtgtctgtccccagagcctcagtttgtgcaggacaccgacatggaacagggactcactggggatggagagaccagagaagagaacaagctgttgattcctaagcagaaaatttcggaagaagtgcattcatacaaagtgagagtaggaagactcaaacacgatattacccaagttcctgagactagagaagtgtataagtctgaggacagattagaaagacttcaggaaattctaaggaaatttctgtacctggagagagagtttaggcaaataacaatcagcaaggaaaccttcaccagtgagaagaacaatgaatgtcatgaacccgaaaaaagcttcagtctggactctactattgatgcagatcagagagttcttagaatacagaataccgatgacaatgataagtatgacatgagcttcaaccagaattcagcctctggtaaacatgaacacttaaatctaacagaggattttcagagtagtgaatgtaaggaaagcttaatggatctctcccaccttaataaatgggagagcatccctaacactgagaaatcctataaatgtgatgtatgtgggaaaattttccatcagagctcagcccttactagacatcagagaatccatactagagagaagccctacaaatgtaaagaatgtgaaaagtctttcagtcagagctcaagtcttagtcgacataaaagaatacacactagagaaaaaccttacaaatgtgaagcatctgataaatcctgtgaagcgtctgataaatcctgtagtccaagctcaggcataattcagcataagaaaattcacaccagagccaaatcttacaaatgtagcagttgtgaaagagtcttcagtcgtagtgtccaccttactcaacatcagaaaattcacaaagagatgccctgtaagtgtactgtatgtggcagtgacttctgccatacttcatacctacttgaacatcagagggtccatcatgaagagaaagcctatgagtatgatgaatatgggttggcctatattaaacaacaaggaattcatttcagagaaaagccctatacgtgtagtgaatgtggaaaagacttcagattgaattcacatcttattcagcatcaaagaattcacacaggagagaaagcacatgaatgtaatgaatgtggaaaagctttcagtcaaacctcatgccttattcagcatcacaaaatgcataggaaagagaaatcgtatgaatgtaatgagtatgagggcagtttcagtcatagctcagatcttatcctgcaacaagaagtcctcaccagacagaaagcctttgattgtgatgtatgggaaaagaactccagtcagagagcacatctagttcaacatcagagcattcataccaaagagaactcatgaatgtaatgaagatgggaagatatttatcaaattcaggcttcattcagcatctgagagttcacaccagggagaaatcatgtatgtactgcatgtggtaaagccttcagtcatagctcagccattgctcagcatcagataattcacaccagagagaaaccctctgaatgtgacgaatgaagaaaaggtattagtgttaaactcttaatcgactcctgcaaatctataccagtgagaaatcttacaaatgtattgaatgtggcaaatttttcatgctattagtattttcataccttagtcacatttggagaattcacatgggaataaaattccattgctgcaatgaatgtgaaaaagccatcagtcaaagaaactaccttgtttagtatcaaattcacgccatgcaaaaagattataaatgtaataagcatgtatgtgtgtgaggagattcagtcataacccaacgctcattcaacatcaaagaatttatacctaagagaacttatttgggtgtagtaaatggcagatctttcaataggagtttaactagtctttgtcatatcagaatatccatagtagacaagaatttgatgtaacgcaaatggaaaaactcgacaccacatttcaggctttacccaacatcgaaataatggagagaaaattgttgattatttgtttatgaaattgttaatacatagtcccaatctttttcattgcacaaaaatctagggttgacttggtaaatgcagtgacattttctcatggagttcctttatttaatatgtattctaagtaggtacgtttatttttacttttttattataa

SEQ ID NO: 309 - DNA, 2884 bp, Homo sapiens
  source 1..2884: mol_type = genomic DNA
ggagaacatattgtgatgttcgtgcctcagagctaaaactatgagtgaatttcggattcaccatgacgtcaatgaactgcttagcctgctgcgtgtccacggaggagatggggctgaggtctacattgacctgcttcaaaagaacaggaccccgtacgtcactaccactgtctctgctcacagtgccaaggttaaaattgcagagttttctcgtactccagaagactttctaaagaaatatgatgaactgaaatctaaaaatacaaggaaccttgacccgctggtgtacctgttgtcaaagctcacggaagacaaagagactctgcagtacttacaacagaatgcaaaagaaagagctgagcttgcagccgctgctgtgggcagcagtaccaccagcatcaacgtccctgccgcggcctccaagatctccatgcaggagcttgaggaactgaggaagcagcttggcagcgtggccacaggctccacgctgcagcagtctctggaacttaaaagaaagatgcttcgagacaagcagaacaaaaaaaattcaggccagcacctccccatcttcccagcatgggtgtatgagagacctgccctgatcggggatttcctgattggtgctggcatcagcacagacaccgctttgccgataggcacgttgcccctggcctcgcaggagtcggccgtggtggaggacctgctgtacgtgctggtgggcgtggacgggaggtacgtcagtgctcagcccctggctgggaggcagagccggaccttcctcgtggaccccaacctggacctgtccatcagggagctggtgcacaggatcctcccagtggccgccagctactccgctgtgaccaggttcattgaagagaagtcttccttcgagtacgggcaggtgaaccacgccctggcggccgccatgcgcaccctggtgaaggagcacctgattctggtgtcacagctggagcagctgcacaggcagggcctcctttcgctgcagaagctctggttctacatccagccagccatgcgcaccatggacatcctggcctccctcgccacctcggtggacaaaggcgaatgtcttggggggtccacgctgagcctgctccacgacaggagcttcagctacacaggggacagccaggcgcaggagctatgcctgtacctaaccaaggcggccagtgctccctacttcgaggttctggagaagtggatctacaggggcatcatccacgacccatacagtgagtttatggtcgaggagcacgagctgcggaaggagaggatccaggaggattacaacgacaagtactgggaccagcggtacaccatcgtccagcagcagatcccgtccttcctgcagaaaatggcggacaagatcctcagcacaggaaaatatctaaatgtggtcagagagtgtggccatgacgtcacctgcccggtggctaaagagatcatctacacgttaaaagagcgggcgtatgtggagcagatcgagaaggcgtttaactacgccagcaaggtgctgctggacttcctgatggaggagaaggagctggtggctcacctcaggtccatcaagcgctacttcctcatggaccagggcgacttcttcgtgcacttcatggacctcgcggaggaggagctccggaagccggtggaggacatcacgccccctcgcctggaagcgctcctggagctggcgctgcgcatgagcacggccaacactgaccccttcaaggacgacctcaagatcgacctgatgccccatgacctcatcactcagctcttgcgcgtcctggccatcgagaccaagcaggagaaggcgatggcgcacgccgaccccacggagctggcgctgagcggcctggaggccttctctttcgactacatcgtcaagtggcccctttcgctcatcatcaacaggaaagccctcactcgctaccagatgctcttcaggcacatgttctactgcaagcacgtggagcggcagctctgcagcgtctggatcagcaacaaaaccgccaagcagcactcgctgcactccgcccagtggtttgctggggctttcactctgcggcagcgaatgctcaacttcgtccagaatattcaatactacatgatgtttgaagtgatggaaccgacctggcacatcctggagaaaaacctgaaatccgcctccaacattgacgacgtccttggccaccacacaggcttcctggacacctgcctgaaggactgcatgctcaccaaccccgagctgctgaaggtcttctccaagctcatgtctgtgtgcgtcatgttcaccaactgcatgcagaaatttacacagagcatgaaattagatggcgagctgggcgggcagacgctggagcacagcaccgtcctggggctgcccgcaggggccgaggagcgggcccggaaggagctcgccaggaagcacctggctgagcacgcagacactgtgcagctggtgtccggcttcgaggccaccatcaacaagtttgacaagaacttctcagcccacctgctggacctcctggcccggctgagcatctatagcaccagtgactgtgagcacggcatggccagcgtcatctccaggcttgacttcaatggtttctacacggagcgcctggagcgcctgtctgcagagaggagccagaaggccaccccccaagtgcctgtcctgcgggggcccccggctcctgcacccagggtcgcagtcaccgcacagtgagccctggctgtgacaggaaggaagggtgtggggtcagcagggactggtgcaaatgggtccagaattttcaaatcgaatgctctgtgttctgtctttgcagtttaaatataaagcaggaatgattgactcagctca

SEQ ID NO: 310 - DNA, 3935 bp, Homo sapiens
  source 1..3935: mol_type = genomic DNA
gcaacggccgttagaggagctgagggagggaaccaccgctcaccgcagacgtggtggctgcagtcagtcttcccgagtgagggatttcgccgcccgctttcaggcccgtttggcttaaataactgtgattgatggccatgcaggagaaatatccaactgaggggatctctcacgtcacttcaccgagttccgatgtgattcagaagggcagttccctggggactgaatggcagaccccagttatctcggagccctttcggagccgcttcagccgctgttcaagtgtagccgacagtggggacacagccattggtacatcatgctcagatattgcggaggatttttgcagctcaagtggcagtcctcctttccagcccatcaaaagccacgtaaccattccaacagcccatgtgatgccttctactttagggacctctcctgccaagccaaattctacacctgttggaccctcttcctctaaactccctttgtcagggttggctgaaagtgtgggaatgacaagaaatggagacctcggtgcaatgaaacattctccaggcctatctagagatctcatgtatttctctggtgctactggagaaaatggaattgagcagtcctggtttccagcagtgggccatgaaagacaagaagaggcgaggaagtttgatattcctagcatggaatctaccctcaatcagtcggcaatgatggagacactttattcagatcctcaccaccgagtccgcttccacaacccaagaaccagcacaagtaaggagttgtacagagtgttgcctgaggccaagaaggcaccgggcagcggggcagtgtttgagcggaatggaccacattctaatagcagtggggtcctccctttgggactccagcctgctcccgggctctccaagcctctgccctctcaggtgtggcagccgagtcctgacacttggcatccccgagagcaatcttgtgaactcagcacttgtcggcagcagctggaattgattcgtttacagatggagcaaatgcagcttcagaatggagccatctgccaccatcctgctgcttttggtccttcactgcccatcttagagccagcacagtggatcagcatcttgaacagtaatgaacaccttctgaaggaaaaagagcttctcattgacaagcagaggaaacacatctctcagctggagcagaaagtgcgagagagcgaactgcaagtccacagtgccctcttgggccgccctgccccctttggtgatgtctgcttgctgaggctacaggaattgcagcgagaaaacactttcttacgtgcacagtttgcacagaagacagaagccttgagcagagaaaagattgaccttgaaaagaaactctctgcttctgaagttgaagtccagctcatcagagagtcgctcaaagtggcgttgcagaagcattctgaggaagtgaagaaacaggaagaaagggtcaaaggtcgtgataaacatatcaataatttgaaaaagaaatgccagaaggaatcagagcagaaccgggagaagcagcagcgtattgagaccttggagcgctacctggctgacctgcccacactggaagaccatcagaagcagagccagcagcttaaggattctgagttgaagagcacagagctgcaggagaaagtgactgagctggagagtttgctggaggagacccaggcaatctgcagagagaaggagattcaactggaaagcctgaggcagagagaagcagaattctcctccgctggacatagcctgcaagataaacagtctgtggaggagaccagtggagaaggtccagaagtggaaatggagtcctggcagaagcgatacgattcgctccaaaagattgtggagaagcagcagcagaagatggatcagttgcgctcacaagtacagagcctagagcaggaagtggctcaagaagaaggaacaagccaggccctgagagaggaggcccagcgaagggattcagccctgcagcagctgcgcacagccgtgaaggagctttcagtgcaaaaccaggacttgattgagaagaatctgacactccaggaacacctgcgccaggcccaaccagggtctccaccttcaccagacacggcccagctggcacttgagctgcaccaggagttggccagttgccttcaagatctgcaggctgtctgtagcattgtgacccagagggcccagggccatgaccccaatctctccctgctcctgggcattcactcagcacagcacccagagactcagctagatttgcagaagccagatgtgatcaagaggaaactagaagaggttcaacagctgcgtcgtgacattgaggacttaaggaccaccatgtcagacagatatgcccaggacatgggagaaaactgtgtcacacagtgaggaattctgggggattcccccagggaggagctgggctgctgagagcctagtccagcaggtttctgccctgacattctcttgtctgctattcccagagaggtctcagaggggaggggagagcctgcatctgggggccaagggctgattagggaactgtgtcctacccacactggcatgttggattacgtttgtcctgttaattcactctagacggtgagttactaattaacttttggcaggtacaacagataagtcctcacaaactgttcccagccctaggctgacatgagagacgaacaggctgtccacctttcttctccatccaatgggatggatccatgttcattcccacttcacaccttggtcctgctgattagagagctcatcagaggggcctggaaaggctgagcaagtaccagtgacaatggccatttaagaattctcaggccccatgtgccagccttcttgggaactgagctggctttctgggttttctcatgcctggtcttactgcttcttcctcagggctcttgttctcccagaagcctcagggtaatgtgttggttagcacgtaactactaggattggggccctagggattatagccaggactctaatctgcctaccatgccatttaacaagagatcccactctccagctgccttgtgtccctagggtcctggccatgtgtttagtgtgctaaactttctcctttgttctcaggccttccaggtagtccccttcctggacttaagagtgcaaactcttctctgtggttctagccttgggcagaattatatcccagagaccacagagcaactgtcaagctgcttaccccctcacccagggctacagcctgtgcccagccctctaatttgtgcctctcttgtgttgggggtggtgggggttattcctttccctttcctgctctggcctccttgaaagttcagagtacccagtacaagtcagctttaaagtacagcttttagtgtttcctgggttgtttctctggggctttagtgagggacctttgccctctggtttttcttgcctcctggtttagggagcatctcacacttgttagtatctggttgttgggccagccgtgcctcctctagatctggagccaggccaggcaggggccacgtgtgggccagtcagccactacaagatttttgctaagctttgggctgttggcagcatcttggacctcatgcctgggcctgaatgaggctctttcttaagtgtttttacaagtttgtgttttatttatggagtgacttatcccttccattcagagcagccccacccagccagcccttcagcctctgggctcctgctgcttaaaggcagagccgcctggttggtctccaccctgtgcattgggagcccagccaccatgctgacgggtatttttcctcataaagtttataaccagttatttatatgaatctttgttatgtccatttgtttgtattgcgtattttgattataaaataaagtatcttaacagac

SEQ ID NO: 311 - DNA, 3453 bp, Homo sapiens
  source 1..3453: mol_type = genomic DNA
tccgcggcggggatgctgaggagcgctgggtccgggagcagccctggcccctgcggacttccgaggccgtgaaaacccctgcgctgcggcccttcccaggcccccgaggccgttcgccgttcccgaagcccgactgggggaagagtccagcaccaaagcggccgttctcggattccggagcgttctggagccccgagagacgccccggggttctagaagctccccggcggcgcccagtcccggcttcattcgggcgtccctccgaaacccactcgggtgcacgggtcgtcggcgagccgcgaccgggtcctggcgcgcaccatgatcgtggcggactccgagtgccgcgcagagctcaaggactacctgcggttcgccccgggcggcgtcggcgactcgggccccggagaggagcagagggagagccgggctcggcgaggccctcgagggcccagcgccttcatccccgtggaggaggtccttcgggagggggctgagagcctcgagcagcacctggggctggaggcactgatgtcctctgggcgagtagacaacctggcagtggtgatgggcctgcaccctgactactttaccagcttctggcgcctgcactacctgctgctgcacacggatggtcccttggccagctcctggcgccactacattgccatcatggctgccgcccgccatcagtgttcttacctggtaggctcccacatggccgagtttctgcagactggtggtgaccctgagtggctgctgggcctccaccgggcccccgagaagctgcgcaaactcagcgagatcaacaagttgctggcgcatcggccatggctcatcaccaaggaacacatccaggccttgctgaagaccggcgagcacacttggtccctggccgagctcattcaggctctggtcctgctcacccactgccactcgctctcctccttcgtgtttggctgtggcatcctccctgagggggatgcagatggcagccctgccccccaggcacctacaccccctagtgaacagagcagccccccaagcagggacccgttgaacaactctgggggctttgagtctgcccgcgacgtggaggcgctgatggagcgcatgcagcagctgcaggagagcctgctgcgggatgaggggacgtcccaggaggagatggagagccgctttgagctggagaagtcagagagcctgctggtgaccccctcagctgacatcctggagccctctccacacccagacatgctgtgctttgtggaagaccctactttcggatatgaggacttcactcggagaggggctcaggcaccccctaccttccgggcccaggattatacctgggaagaccatggctactcgctgatccagcggctttaccctgagggtgggcagctgctggatgagaagttccaggcagcctatagcctcacctacaataccatcgccatgcacagtggtgtggacacctccgtgctccgcagggccatctggaactatatccactgcgtctttggcatcagatatgatgactatgattatggggaggtgaaccagctcctggagcggaacctcaaggtctatatcaagacagtggcctgctacccagagaagaccacccgaagaatgtacaacctcttctggaggcacttccgccactcagagaaggtccacgtgaacttgctgctcctggaggcgcgcatgcaagccgctctgctgtacgccctccgtgccatcacccgctacatgacctgactcctgagcaggacctgggcccggttcagctccccacaaggacttctctgtctggagacagccccagacccttttgtgtcccatgcccaccctccccacgctgcagtgggcttgtgtgtgatgtgcagtcccgaagccacaccctcccttttcctcactggaatggacagttcattgcactgactctgggatctcagccctgctcctgggagctggaagagcacttggagatcctaagggaccacacccttcctccttcccctgcccacagaggcagagggcacaggaaagaagccgggccaagctcggaattaatgtgccacaagtgttgtggccttcctgaactgggaagtccctggctggcccccgggggagaggggcaaatgcctccgggactgacactccaggcagctttgccttctctcccctgtcatttccagatttcattacctcctacttgccattcacccatcaatgtgaaagtcagggtcacagctggtctgtgtgtccagttccctaaaagcctgttctgttgggcagcctgaggctgttgcccgaatcctagttcagttttttgacttcctttgccctttttcccttttctccatgcttaatggtgtgaggcgtcaggagagaggccaagtacataaaaaaaaaaaaagcagattatctctagagagtttgagcctttgctggtcacattgccttctgaagaggagggagtattagattataaatcctctttattttggtcctttatgcttgaggttccaacctggagccacagtgtgtgagaggaggaggagagggagaattctgttctcccagagctgcacctgcctcgcagaggccagcaccccactctcctgcctccagtggccctgccgcagatgtctcccaaaaagttgagcctttctagatggcttaggtggcaccatggctcagcaggaggggcgggaggcaccagggttcttgtttggaccctgcccctgggccatggccaggtgaccatggctacattgccaaacctctgactgccacagctgcagactgagagggtgggtctgagtccccacaatgtctgaagctgcccctgggattctcaggccaacctgccaacagcaagcggattttcttgcaagatcagggaccccatttctgcagccagtgtctcctgggtgccttctgaggactcccacccccatcccagtatctcatctgtcccctctcctggggcttaagtgggttgcttccaggcagaagcagccaaggaccgattccaggcactttctgtagcaaatgactgtgaattacgacttctcttgcccttcttctagcagtctgtgcctcctctctgaccagtttggagggcactgaagaaaggcaagggccgtgctgctgctgggcggggcaggagaggagcctggccagtgtgccacattaaatacccgtgcaggcgcggagaagcaaccggcacccccttccggcctgaaagccctccctgcaagaaggtgtgcaggagagaagaggccccggcatggggatctgggttctagagggcatgtgatgactgtaaatgttcactgggtgggtagggagtggtatccagtgttcaagtgcagaaatctttggctttgctaccagttccatatgatgagaaataaacgttcgctgaggttttgtttcata

SEQ ID NO: 312 - DNA, 1962 bp, Homo sapiens
  source 1..1962: mol_type = genomic DNA
tccggcggcgccgggcgagaagcgcgactggagtctggggctgcggcttcccagaggcgcgagtcgcttttccaggagccgaggcccaaacggggccgggcctgaagggtcccccgccagcccgcggccgcgccatcaatcgccgccgcctcgtcccgcttctcggctgaggcgccgcgcggccaggcagcgggtccaggcctcagccgcgcgcccaggggcctccggggccctcccgggtcagcatgcccggggtgaaactgaccacccaggcctactgcaagatggtgctgcacggcgccaagtacccgcactgcgccgtcaacgggctcctggtggccgagaagcagaagccgcgtaaggagcacctccccctgggcggccccggcgcccaccacaccctcttcgtggactgcatccccctcttccacggcaccctggccctcgcccccatgctggaggtggctctcaccctgattgattcatggtgcaaagatcatagctacgtgattgctggttattatcaagctaatgagcgagtaaaggatgccagtccaaaccaggttgcagagaaggtggcctccagaatcgccgagggcttcagcgacactgcgctcatcatggtagacaacaccaagtttacgatggactgcgtagcgcctacgatccacgtgtacgagcaccatgagaacagatggcggtgcagagacccacaccatgactactgtgaagactggccagaggcacagaggatctcagcctcgctcctggacagccggtcctacgagacgctcgtggatttcgataaccacctggatgacattcggaatgactggacaaacccagagatcaataaagctgtcctacacttgtgctaggcaggcaccgctgtgactgggctccgggcctttccactacgttgaagaagaaaacctatttttaaatgtaaataaaatatcttgtagcctgtgtggaaagctgaccgttttaagaagtggcatgtgccttgaaagggggcagaatgttcagtcggtcgtgtttttaacacagagtctctagaagaggtgcagacatcccgtctgactgtccctgtggactctctcagttgtatgttgctataatcctccaaatcaaagctctttctgcttgtgcaagattgttcctattaaacagttttaactaaccttttataatctggagagaatactttttaaggcttttgaactatctttttttaaaaaaaaaaaaaaaagcccacatcttatactccaatgagtgtgtttgtgagtttttatcctgtttgaattttgatgtcgtccaggcgtcctgggatcagggtagacacgtggagtgctggtgctgagctgtttgagaagctctgtgtgggtgtttctgtggtcaggtaggctgggctgtgaacagcactgctccacatggtgtcggctcacagagccaccgcaactctgcccagcgggagtgacaccactgatgccacagaagcctttatcgttaggggcaaaagcagacatctctggtagcaggagctcagtgtggtgctcttcagccacgcagaaagctcacgtgcctgcagggccaggaaagggaaatgatcgtttcttttgtattaggaaaaacaagacttagacttcccgagttgtgcagagtgacgtctgtactttttatacttagaacatttggtcaagttttgtaaccaaaccttagggaattgagagggaaactttatggtacgtttaccttttttcctttttatatgaattattttgtacaaagttcagagagcggtacctttcctactgtcttttctttgactccatggaggaatttgtaacgatcggtgtgacctgaaagggtttgtgatacagcggtcactattttctcttaacacataggaaaaaagttcagacatcgctacaataaatgtgctttatttgatccaccaaa

SEQ ID NO: 313 - DNA, 2329 bp, Homo sapiens
  source 1..2329: mol_type = genomic DNA
gtccttcccaagaccacacccaggtccagtcattccctaggacttggcagagagctgtactcacagccaagatcacagcaaaatcagcaaagggaaaaggcatgcagagtgaagtccagaggcaaccagacagaagcatccagaatcctctcacagtggggtcacacaccccatgcttaactcccccaacaatgagttgtaacaacagtcaggtgtggtggtgtgtgcctgtagtcccagctacttgggagcctgaggcaggaggatcacttgagtccagcagttcaagactgcagtgagctatgatcataccactgcactccagcctgagtgacagagtgaaactctgtctctaaaatagggctcacctgcttgaggaaacaggaactgcctcggggcagccagccccgccccattgacgtgcagaccttgaatcgaaacccaggctcctgcaggcactggcacagctacagcgagggcctcggccatccaagggtctcccaggtgaccttccctccaccccaggaagctatgacagaggccgggaagctgcccctaccgctacccccacggctggactggtttgtgcacacccagatgggccagctggcccaagacggggtccccgagtggttccatggtgcaatctcaagagaggatgctgagaacttgctggagtcacagccactgggatcctttctcatcagggtcagtcacagccatgtgggctacacactctcctacaaagcccaaagcagctgctgccatttcatggtgaagctcttggatgatgggactttcatgatccccggggagaaggtggcccacacctcgctggacgccctggtcaccttccaccagcagaagccaattgagccgcgcagggagctgctgacacagccctgcaggcagaaggatcccgcaaacgtggattacgaggatctcttcctctactccaacgcagtggccgaggaagctgcctgcccggtgtctgcccctgaggaggcctccccaaagccagtcctgtgtcaccaatcaaaggaaaggaagccgtcagcagagatgaacagaataaccaccaaggaagccacttcctcctgccccccaaaatcccctcttggagagacccgccagaaactctggaggagcctcaaaatgctccccgagagaggccagagggtccggcagcagctaaaaagccacctcgccactgtgaacttgtcgtcactcttggatgtccggagatccacggtgatctcaggccctgggaccggaaaaggcagccaagatcactcaggggatcccacctcgggggacagaggctacacggatccctgtgtggccacatctctcaaaagcccctcacagccccaggcaccaaaagacagaaaggtccccaccaggaaggccgagaggtcggtcagctgcattgaggtgaccccaggggacaggagttggcaccaaatggtagtgagagccctatcctcccaggagtccaagccagagcaccagggcttggcagagcctgagaacgaccagctcccggaggagtaccaacaaccgccaccctttgcccctgggtactgctagagaacaggtccaccctggctctgggactcgctgccaggggctgccacactcctgaatgccttaacatttcttccatggccccacaccatggcatccgggggtcttcgggaacccgggaaatggaataaagatgtttttggggtctgttcctgcactcacccatggggtgagctggttattttagcaacaatcatcagagtgacgctgatggtttggggcaccagctatacatcagccccagtgccagaccttctattcattattttacgcctcagagcaaggccctcagggagggtcatcctccatgttttgaagaagagactgaggttcagagaggataagaggcgtgaccaaggccacagagctatgggtgtcagcaccaggatttgaagccaggtgaatccgagcccttttcccatatcatctgtttgttctgttgtctaaaagcacactgcaagccgggctcagtggctcatgcctgtagtcccagcactctgtggggccgaggcaggcagatcgcttgaggtcaggagttcgagaccagcctggccaacatggtgaaaccccgtctatactaaaaaattcaaaaattacccggacgtggtggcgcatgcctgtaatcccagctacttgggagcctgaggcgggagaattgcttgaacccgggaggcagaggttgcagtgagccgagatcgcatcactgcagtccagcctggatgacagagtgagactccatctc

SEQ ID NO: 314 - DNA, 960 bp, Homo sapiens
  source 1..960: mol_type = genomic DNA
tgacaccatgacccactgttgttccccttgctgtcagcctacgtgctgcaggaccacctgctggaagcccaccactgtgaccacctgcagcagcacaccctgctgccagccctcctgctgtgtgtccagctgctgccagccttgctgccgcccaacttgctgtcaaaacacctgctgccagcccatctgtgtgaccagctgctgccagccttcctgctgcagcacaccctgctgtcagcccacctgctgtggccaaaccagctgtgggtccagctgtggtcagagcagctcctgtgcacctgtgtactgcagaagaacctgctaccaccccacgactgtctgcctgcctggttgcctaaaccagagctgtggctccaactgctgccagccctgctgccgcccagcctgctgtgagaccacctgctgcaggaccacttgcttccagcccacctgtgtgtccagctgctgccagccttcttgctgctgatcacgttccaagagaaccaccatcctcacacaacaaatttctgctcaactgactcatcttttgggggactaatttaatttgctgctgacagccaccatgctctcacccaaatttttatgaattctctacatgtttaaaatcttggaaatctgcttgagggagggcagaatacttcatcctgattctctttttccttacaccttgtggatcatgtgccagcttcatctgttctcaagtttgagtcatggtctcagctttgactctaaagtcaagagcttcattccctgcttctaaggaatttaggtttctgcaactgatcgatgatctttgcaatcttttttttgttttcaatatcctcctcatcgttcttgtatccttctttcttcttttcatgataaatttgtgttgtgtccctggtagcagaaatccttacctatatgtttctgaataaattctgaaccatcctcatctca

SEQ ID NO: 315 - DNA, 1843 bp, Homo sapiens
  source 1..1843: mol_type = genomic DNA
agctgggaccggagggtgagcccggcagaggcagagacacacgcggagaggaggagaggctgagggagggaggtggagaaggacgggagaggcagagagaggagacacgcagagacactcaggaggggagagacaccgagacgcagagacactcaggaggggagagacaccgagacgcagagacacccaggccggggagcgcgagggagcgaggcacagacctggctcagcgagcgcggggggcgagccccgagtcccgagagcctgggggcgcgcccagcccgggcgccgaccctcctcccgctcccgcgccctcccctcggcgggcacggtatttttatccgtgcgcgaacagccctcctcctcctctcgccgcacagcccgccgcctgcgcgggggagcccagcacagaccgccgccgggaccccgagtcgcgcaccccagccccaccgcccaccccgcgcgccatggaccccaaggaccgcaagaagatccagttctcggtgcccgcgccccctagccagctcgacccccgccaggtggagatgatccggcgcaggagaccaacgcctgccatgctgttccggctctcagagcactcctcaccagaggaggaagcctccccccaccagagagcctcaggagaggggcaccatctcaagtcgaagagacccaacccctgtgcctacacaccaccttcgctgaaagctgtgcagcgcattgctgagtctcacctgcagtctatcagcaatttgaatgagaaccaggcctcagaggaggaggatgagctgggggagcttcgggagctgggttatccaagagaggaagatgaggaggaagaggaggatgatgaagaagaggaagaagaagaggacagccaggctgaagtcctgaaggtcatcaggcagtctgctgggcaaaagacaacctgtggccagggtctggaagggccctgggagcgcccaccccctctggatgagtccgagagagatggaggctctgaggaccaagtggaagacccagcactaagtgagcctggggaggaacctcagcgcccttccccctctgagcctggcacataggcacccagcctgcatctcccaggaggaagtggaggggacatcgctgttccccagaaacccactctatcctcaccctgttttgtgctcttcccctcgcctgctagggctgcggcttctgacttctagaagactaaggctggtctgtgtttgcttgtttgcccacctttggctgatacccagagaacctgggcacttgctgcctgatgcccacccctgccagtcattcctccattcacccagcgggaggtgggatgtgagacagcccacattggaaaatccagaaaaccgggaacagggatttgcccttcacaattctactccccagatcctctcccctggacacaggagacccacagggcaggaccctaagatctggggaaaggaggtcctgagaaccttgaggtacccttagatccttttctacccactttcctatggaggattccaagtcaccacttctctcaccggcttctaccagggtccaggactaaggcgtttttctccatagcctcaacattttgggaatcttcccttaatcacccttgctcctcctgggtgcctggaagatggactggcagagacctctttgttgcgttttgtgctttgatgccaggaatgccgcctagtttatgtccccggtggggcacacagcggggggcgccaggttttccttgtcccccagctgctctgcccctttccccttcttccctgactccaggcctgaacccctcccgtgctgtaataaatctttgtaaataact

SEQ ID NO: 316 - DNA, 3530 bp, Homo sapiens
  source 1..3530: mol_type = genomic DNA
ctctcgggccagcctcagccgccgcgcctcagtccgccgtccgccctccgcgcccgcgccgctagcatgaccgacgcgctgttgcccgcggccccccagccgctggagaaggagaacgacggctactttcggaagggctgtaatccccttgcacaaaccggccggagtaaattgcagaatcaaagagctgctttgaatcagcagatcctgaaagccgtgcggatgaggaccggagcggaaaaccttctgaaagtggccacaaactcaaaggtgcgggagcaagtgcggctggagctgagcttcgtcaactcagacctgcagatgctcaaggaagagctggaggggctgaacatctcggtgggcgtctatcagaacacagaggaggcatttacgattcccctgattcctcttggcctgaaggaaacgaaagacgtcgactttgcagtcgtcctcaaggattttatcctggaacattacagtgaagatggctatttatatgaagatgaaattgcagatcttatggatctgagacaagcttgtcggacgcctagccgggatgaggccggggtggaactgctgatgacatacttcatccagctgggctttgtcgagagtcgattcttcccgcccacacggcagatgggactcctgttcacctggtatgactctctcaccggggttccggtcagccagcagaacctgctgctggagaaggccagtgtcctgttcaacactggggccctctacacccagattgggacccggtgtgatcggcagacgcaggctgggctggagagtgccatagatgcctttcagagagccgcaggggttttaaattacctgaaagacacatttacccatactccaagttacgacatgagccctgccatgctcagcgtgctcgtcaaaatgatgcttgcacaagcccaagaaagcgtgtttgagaaaatcagccttcctgggatccggaatgaattcttcatgctggtgaaggtggctcaggaggctgctaaggtgggagaggtctaccaacagctacacgcagccatgagccaggcgccggtgaaagagaacatcccctactcctgggccagcttagcctgcgtgaaggcccaccactacgcggccctggcccactacttcactgccatcctcctcatcgaccaccaggtgaagccaggcacggatctggaccaccaggagaagtgcctgtcccagctctacgaccacatgccagaggggctgacacccttggccacactgaagaatgatcagcagcgccgacagctggggaagtcccacttgcgcagagccatggctcatcacgaggagtcggtgcgggaggccagcctctgcaagaagctgcggagcattgaggtgctacagaaggtgctgtgtgccgcacaggaacgctcccggctcacgtacgcccagcaccaggaggaggatgacctgctgaacctgatcgacgcccccagtgttgttgctaaaactgagcaagaggttgacattatattgccccagttctccaagctgacagtcacggacttcttccagaagctgggccccttatctgtgttttcggctaacaagcggtggacgcctcctcgaagcatccgcttcactgcagaagaaggggacttggggttcaccttgagagggaacgcccccgttcaggttcacttcctggatccttactgctctgcctcggtggcaggagcccgggaaggagattatattgtctccattcagcttgtggattgtaagtggctgacgctgagtgaggttatgaagctgctgaagagctttggcgaggacgagatcgagatgaaagtcgtgagcctcctggactccacatcatccatgcataataagagtgccacatactccgtgggaatgcagaaaacgtactccatgatctgcttagccattgatgatgacgacaaaactgataaaaccaagaaaatctccaagaagctttccttcctgagttggggcaccaacaagaacagacagaagtcagccagcaccttgtgcctcccatcggtcggggctgcacggcctcaggtcaagaagaagctgccctcccctttcagccttctcaactcagacagttcttggtactaatgtgaggaaacaaacatgttcaggccctgaacatttccggtgctgactcggccttaaacgtttgtgccataatggaaaatatctatctatctgttctcaaatcctgtttttctcatagtgtaaactcacatttgatgtgtttttatgaaggaaagtaaccaagaaacctctaggaattagtgaaaaaagaacttttttgaggtgtgttactatactgctgtaagttatttattatataaagtattgtaaatagaatagtgttgaagatatgaaatatggctatttttaatggtgacaattatgacttttagtcactattaaattggggttacctatatcagtacaatttgtagttgtttccaggtttggctaataatcattccttaacctagaattcagatgatcctggaattaaggcaggtcagaggactgtaatgatagaattaaattagtgtcactaaaaactgtcccaaagtgctgcttcctaataggaattcattaacctaaaacaagatgttactattatatcgatagactatgaatgctatttctagaaaaagtctagtgccaaatttgtcttattaaataaaaacaatgtaggagcagcttttcttctagtttgatgtcatttaagaattactaacacagtggcagtgttagatgaagatgctgtctacaaggtagataatatactgtttgatactcaaaacatttttcattttgtttaaagtagaagttacataattctatattttaagtcttgggtaaaaaagtagttttacattttataaagtaaagatgtaaatgattcaggtttaaagctctatttgacttcctttttttgtttgagatagcgtcttgctgtgttgcccaggctggagtgcagtggtgtgatctcagctcagtgcaacctccgccccctgggatcaagcgattctcctacctcagcctcccaaatagctgggactacaaggtgccctccagcatgcctggctgatttttgtatttttagttgaggtgaggtttcaccatgttggccaggcgggtttcgaaatcctgacctcaaatgatccacccacctcagcctcccaaagtgctgggattacaggcatgagccaccacaaccgtcccactattttactttttaaaatgacattcctactgattgatttttatcttgctataagttcgatgacaccgtgaatctaataaggttcactgttgacacagtacaagttacatagctaaaatacatagcattgaagactaattttaaggattgacaagagtttattttctattgtgcaatatcttaaaggaagcaaccacctttgggaaagtgtatctgctgctcctagggccatgcttgtatacatatttaaataaacatattcatttacccg

SEQ ID NO: 317 - DNA, 1815 bp, Homo sapiens
  source 1..1815: mol_type = genomic DNA
gccccggccccgccccgcgagcgccgagacttgttggccgcggagactgcgaccctcttctctcagtctgccttactaccatgccgctctacgagggcctggggagcggcggggagaagacggcggtcgtgatcgacctgggagaggcctttaccaagtgtggatttgctggagaaactggtccaagatgtataattcctagtgtgataaaaagagctgggatgcctaagcctgtcagagttgttcagtataatatcaatacagaagaattatattcctacctaaaggaattcatccacatactatatttcaggcatctattggtgaatcccagagaccgccgagttgtgattatcgaatcggtattatgtccttctcacttcagagagacactcactcgtgttcttttcaaatattttgaggttccatctgtcttgcttgctccaagtcatctaatggctcttctgacgcttggaattaattctgccatggtcctagattgtggatatagggaaagcctggtgttacccatatatgaaggaatcccagttctaaattgttggggagcactacccctaggaggaaaagctcttcacaaagagttggaaactcaactattggaacaatgtactgttgacacaagtgttgctaaagaacagagccttccctcagtgatgggttcagttccggaaggtgtcttagaggacattaaagcgcgtacttgctttgtaagtgatctgaagcgaggactaaaaatccaagcagcaaaatttaatattgatgggaataatgagcgtccctccccacccccaaatgttgactatccattagatggagagaagattttacatatccttggatcaatcagagattcagttgtggaaattctttttgaacaagataatgaagagcaatcagttgccactttaatattggattcccttatacagtgtccgatagacaccaggaagcaactagcagagaatttggtagtcataggtggcacttctatgttgccaggatttctccacagattgcttgcagaaataaggtatttggtagaaaaaccaaaatataaaaaagcacttggcactaagacatttcgaattcatactccacctgcaaaagctaattgtgtggcctggttgggaggggctatttttggagcattacaagatatacttgggagccgttctgtttcaaaggaatattataatcagacgggccgtatacctgattggtgttctctcaataacccacctttggaaatgatgtttgatgtcgggaaaactcaaccacctctgatgaagagagcattttccactgagaaatagaagtttgattaaaaatcaaccttgcttcatatcaaatatttaaccaattataagcaaattgtacaaagtatgtaggatgttttgttatagaggactatagtggaagtgaaagcattctgtgtttactctttgcattaatatataattcttttgactttgtttctcttgtgtagtggtaaaatggtagctggtgcttattgagatttgctgtatttatatcaataaagtatagtaaagcagtttgattttggaagtttgttatgtggctttttttttttttttttttttgagacggagtctcgctctgtcacttaggctggagtgcagtggcacaatctctactcattgcaagctccgcctcccgggtttacgccattctgtctcagcctcctgagtagctgggactataggcatacgccaccccgcccggctaattttttgtatatttagtagagacggggtttcaccatgttagccagga

SEQ ID NO: 318 - DNA, 3014 bp, Homo sapiens
  source 1..3014: mol_type = genomic DNA
ccacctcctgccctgctggggtccagccatgtcccagcctgcgggaggcaggaggaagcccaggaccctagggccgcctgtgtgcagtatccggcctttcaagtcgagtgagcagtacctggaggccatgaaggaagacctggctgagtggcttcgcgacctctatgggctggacatcgacgcagccaacttcctgcaggtgctggaaacgggcctggtgctgtgccaacacgccaacgttgtcactgacgctgccctggccttcctggctgaggcacctgcccaagcccagaagattcccatgccccgggtcggggtctcctgcaatggggccgcccagccaggtaccttccaggccagggacaatgtctctaacttcatccagtggtgtcgaaaggagatgggcatccaagaggtgctgatgttcgagacggaggacttggtgctgcgcaagaacgtgaagaacgtggtgctgtgtttgctggagctgggccgccgggcgtggcgctttggtgttgcggcgcccacactcgtgcagctggaggaggagatcgaggaggaggtgcggcgggagctggccctgcccccgcccgacccctcgccgccagcgccccccaggcgccagccctgccacttccgcaacctggaccagatggtgcagagccttgtgagccactgcacgtgcccagtgcagttctccatggtcaaagtgtctgaggggaagtaccgtgtgggtgactccaacaccctcatcttcatccggatcctccggaaccatgtgatggtacgtgtagggggcggctgggacacactgggccattacctggacaaacatgacccctgccgctgcacatccctctcacacaagccaggcagcttcctgaagcccccggccccaccagtgcagcatgaagtaagggtacaggatggaccctcacagacccagcctacaatgaccatcagccgctcacagagcccaccaccccctgtggactggaagacatatacctcttcagaccgaaggctgaggccccccaccccatcctcccccagaccccgcagggaacggggagcagggacgggggcctccagagagatggcaccattcctgaggtgccaggagaggtctctcatcccatcttggaggcagccgacagctggggacagcccacccagcccccagtcctcatctacccaaaaaggccgagacccacagtgtacctcgtcaggaaagagggaggagagatacccccctgaactccccaggggaaggattcccacatcttgggttcatgaagaaacagacagctggggaaccgacgccgggaaccccaccccacaaagactccgagccattgaggccaccaccaaagggatatcagcaagaggaccatctcccctgcctcgttcctttggcccagccgagtgcctgggcctcaggctgccactccgggatgaggccaagggtgcgttcttccagttcagggagccagagtctgtccgttctccaacccctgtccaaggcctaaccaagatccccatccggctgccccctgctcgccccccaacaccaggaaggagctttcctggtgctacaagtggaagtcccaggacagaacttgggagagaccccatcccactaagggccgtcactgtggacctggctgggtccacgcatggggactgctctgtggaagtgaggcaggaggaccagcagctggacatccaggtcatggcagaggccagagagtcctgggacctgggcctacaggagcaggaggggcggtacacacctctgcccttgggcgggaacaaggagcaagccatctactgtagccttgaagaggagattttgggcaacatgaagctgctagaagtcaggagtgcctgtccgcagggcacaaggtctggggtcatccctcgcagtggggtctacatccccaggctggctgggcagtggcctgagcctgggggtccttatgacaaagccatccaagaactggctcaggggtccccatccctccttaaagtggacctggaagcctggaaggcagccccgactggctcccctaagccagctgttaccccaggaccgggaagcctcaaagggaagttgggagccagacagagtgggcccaggacaaaggcaagcctgagtgccaagggcacccacatgaggaaggtcccacctcagggagggcaggactgctcggcttctactgtgtctgccagcccggaggcccccacaccttcgcccttggaccccaactctgacaaagccaaggcatgtctgagcaagggcaggagaactctccggaagcccaagagggtcccgtccatctacaagctgaagctgagacccaggattcggccccggagagaccacaggcctgagaagcagccttcacgaatccccaggccactggcctatgtcttcctgggtccagccaggcagccccccaaggacaggctgttgagagctgtgctgggcagcaagggaggggaggcatcccgggtggatggagcttcagtaggtgaggaggaggaggaaggaaaggaggagaaagagccagccgctccattggagagcagcccccaacctccagagggcctgcaacctcactggcttaatcaagctccacttccacctgaggaggagtcctgggtctgaggcacatgagcgtgttgggtaggagggaagcaaaaaggatggccatgtatacactggattcacagctgcgggaacagaagggatgttccctcacctccacacagggccttgggcaggagtgggtcagaagacaaatatagactccatctgctcatctgagcaaaggggcaacccactgctctcactccaactccagaggtaggccaggggcagtaggaccatcctgtatctcattactctcccctagaacggctcaccacactcctggcctctggcccctggccatgcccacctgtttccataactcccataagttattaaatgcatgtgattctgcccttga

SEQ ID NO: 319 - DNA, 14862 bp, Homo sapiens
  source 1..14862: mol_type = genomic DNA
aacggttctaacagctgggtgcgggtggagctgcgggcgatcgccagctcgagtgcagattccttgctgtgaccgaggttcagagtgagctctgtcggtgtgtcagtttgcctcttcaggcactcttcaatgaaacctcatcagcagatcgggctctcttcccttgccttgcctcctaacccccctaggccaggtgagggggacagggtactgggaggtaagaaggaactcttctgcaaggagggctctcacgtctgtcttaggcctgctccttaccagagtctttggggaagcagtagggagggcctgagggtctcaggaaaggctctctgctggtctggctctgctctgtagctccatctatttccctgtcccaggtcctttcttcctcctaaccccattgactctgaccatcccctgcccagagcctgaggtcccttctctggcccctctgctgggctggcccatgcaggtgaggccccgcatctggcatcctggaactggcagttggagcctgagctatgggcaaggtcacttcgacagcagttgaatgcccagctcctcatggtcccggaggagaggagggtaggtttgtcttctgatgagacatcatctgattcccttaagtcttggcactccatatgtgtcttggacagcaaagaacagcccttggcctgccagcagaaacagaggcagttcgtgaagccagtgactgagtcagagcagcccacagtgctggaactcctgctagctgagctccgaactctgttctcagctgtgttgcaggacagtagccctgcagcttggcgctatcttcatgcagtactgggtctactgcctccatatcgtgagttgctagttggccaccttgatttgctgcccttcctggagcagctgtactgctgggcaccctgggtccaaacccacctccatctggacctgctaggtgccattgtccaggcctttcctccagacagctctttgttagacagtgcttcccatgctgactgctgtccccagaagcggaggctccatcacaggcccccatgcccagcttgcccttttgtgcaggcccagtggagcaggcagcaagtaaaggaggagctggccacctggctgcgaccattgacactgcctgagctacagcgctgcctgggcattgttggtgctcaggtggccctagaagaggctgtgtggctggatggacttagtctccttcccttggcactggcagcggacatccctgtacggtatgaaagcagtgacactgacaatgcagaggtggagcctgttggaagaaaagagaccaggtctcagcttgactatgaagttcccagggaaaaggccttccaaaagagcagcaccggcttttcacctgagacttccttcctggatagccaggtgatgactgctctgaagatggagagatacctgaagaagatccacttcctctatctcaatgtggctcccagccggtactttaggccttacagcctgatggtggtgccacccgacaaggtgaatcccgagcactacatcttctctccctttgggatcttgcatgtacatcctgtggaaggtagcgagacgatgacactgggtacctggcaccatcactgtgttctctggcagcagctccagttcattccattctttaagtattgcctcttacgcaagtcctttacctgttggaagaagaatgtgagattacaggggctgcatcgactccagaaattcctagagaatcatctgctcttggctgtgccccactttggagctgggctactccatattagcaggcttctgcaggagctacactctgtgtcctggctaccccaggaactggatcggtgctatgagctgctggacctgcagacggctctagccgaggagaagcataaggctctacggctgctccatcgttgcctaaacctctgcacatccattcttcgactggttcacgaggacacataccacatgcaacagtgcctacaggagcgagtacaaaactgtgacaggatcaggacaggccaaggctccatataccttcagagggtacagcacaagcaactggagcagaagctgaagcaagcagaggcctggtggctgcagctgggaaagtttgcccgcctggttgactacatgatttgtcagagcctcatttctgtcttggaagagcagataacctcttttgtggccaacatccttcaagccccaaggcagaaaccctttctctcatcacagctggtctttgatgatcatggtcaactgtctcatgtgccctgtgttgaaaatatgatccagactctaactggaggcctacagtctgtcaagacctctgccttgcaggtagtgcagtctgcagacctgaagacctcctcggattccctgtattctgaagaagaagatgaagaggaggactcaaaagacgaatttctgatgcccaagttccagggccagcccagcgatgctgtgagcatcttctgtggcccgaatgtgggattggtgtggccctggaagtctcacccaattgctggtatcttggaggtccgtggatgtcggctgcggggccaatacttcccccacaattataagcagctggaggaagacctggacaacaaccctaagatccagcaggcactgaatatacaacaggtgctgctggagggcgtgctgtgcaaggtgcaggaattctgcagggaacatcattggataacaggcatttatgaattcctgcaatcctgggggcctcagaagctggaagacatgagaggtggtcccatcaagaactacgtgacgctggtgagccgcctgaatgtttggcaggcccgtgtctccagtatgcctatcgagttgctcacaaaaggcgggttgctgctacttagctgccatgatgtacaggcagagatggaatccaagctgaacagcataaggaaggacattcttgcacacgtgcaaaatgagtgctggaacctcagtcaacaactcatgacagagctcacagatttcatgcatatcttccgaaccatcaactcagatattcatgccattgcacagtgcacccagaagttgaatgaagccaatgaacagtacgtcgagctggaggagcgaatggaatacgtacgggcactccacgaactcatccgcaaccactttagcctctttagtgctgagaatgaagcactggacatctcggtgagaaggcaattcggggagtcacccatccctccctgccctcctcccccacaaccacatctactccactgccctctgcttgccccacagcttctggatatgtgggaggcatttcagtttgagaaaagccaggcttcagagttcctgctcagcaagcgacatgccattatgcccaagctgcagcagctgatggcagcagcattggcagagctggaaggcctgcttgcgaaggccctctccggtccctttatggaccccacacaagatcagaggagtactgagcaccagctcgtctccctagagcgtcagttccagaacacagtcagcgacctcagtgaactgcaccacgcctatgccatcttcactgaggatgagactcctgtgcccttgccaatctgtgggacacgtcctattgtgcagcagcagcgcatatggcacctgtaccgagtcatctccgaaaacatcagcgagtggaagtgcatggcttttgccaagttcagcccagctatggcccaggagaagacagagggctggctgacagaggcagcacggatgagcacaaccctggagctgcacagccccgtgctgcagcactgcatgcgcatcctgggggagtttcgcagctacctgcccctgctcactaagctgggcagcctccacccacagagcctcaactgccagtgtctcctgcgtgcccttgggctgggcagtctccaaactatagaactcctaacgctgggccagctgcttacttatccactgctggagtttgcagatcgaatcaaccaggtctggcagaatgaaaatgaacgaattcatgcccaagagactatacggcggttgcagcggtactgggaagcgcgccagctgcgcctgctcaacttcatcctgcatgtaccctacgagcccccagcctcagagcgctccaagaggcaggtgctccgcagcccccaatgggaggtagtggacaaagatagtggcaccttcatcctctcagattacagcaacctgcaggattccatccaggaaagtcttcaggtgttgtccaagatcttggccatcgaaaagtcaggagatttaaacaaaatagctttggagtgggtggccatcatgcatggcctgggtgccctgctggaggtgtggctgactttccagcagaagtggatttttctgaataaagttctgcatgagatgaagatccagtttcctaatgctgacctgaactctcgtttcaaggtcatggatgaccagtatcgaaccctgatgcgcatctctgtagctgaccccatggttctgtcacttgtagtgcccagtgccgagaggagcccttacttccaaggccagcagctgcaacaactgctgcaagcaggatcggtggagctggagggcatcatcatgagtctggagagcgtgctctatggggtgtgtgctcacttcccccgcctcttcttccttagtgacagtgagctggtagccctgctggctgctcgactggaatcatgcgaagcccagctatgggtacgacgctgctttcctcatgtgcatgctgtgagcttcaggtcttgcccaactggtgagaaaaacacagatgactgggagtcaagcccaaacacacagactcaggtggaggcacttgcagtgctaggggcaggtggggaggaggtgaagctgcagggtccccttcctctgcatccagatctccctaagtggctggcctctctggagaagtgtctgcgcttggcactggtgcacatgctgcagggctgtgtggctgctcgccttgctcgaggcccatctctaggtgaggccctcaagcaactgcccaagcaaaacaagttgtacctgcaactgtatgtccagcactggatcgacttagtccaggccttcccatggcagtgtgtgctggtggcagaggaggtggtatggcgggccgagatggaggaggctctgcttgagtggggtaccctggccatggtctccatgcatatgcgcaagcttgaggtactggtgaattttatgcgggcccagagggcttcccaaggtgggcagtccctgccttctgtccgccagaccagccttctcagtgccctgctggtcatggcagtgactcaccgggatatagcacagctgctggaacagcaccaggtcagtgatctcacagactttcactgggtccgccaactcaagtatcacttgggttcacctcacataatccccaaaagccccctacagagtcttaagactattgcatcttctgaaccctctctgtcaccagcggcatgctggatagatgtgctaggcaggtccttcctgtacaattacgagtatctgggacctagactagggcctctacccagcctactgcctgaacggccagccctggtactattattggccctagaggaggtggcctgtgggaccgtactgggtcctaatggtgtgggcaagagagctatagtgaacagcctggcacaggccctgggccgccagctggtgatgctaccctgctcacctcagatagaggctcaatgcctgagcaactatctgaatggtgccctgcagggtggtgcctggctgctgttggagaaagttcatcagctgccccctggcttgctctctgccctgggccagcgcctgggtgaactgcaccacttgtatgccccactgtaccaggaggcttcccgaaacacaagcaccatagaccccacccagccccagctccttggcagtagcttctttgaaaaacatcacgtgtctgtgcgccttggctatggctgtctcctggtactgcgtgccctgagctctgctgtgcctgccaacctgcacctgctgctgcggcctgtggcattggcattgcctgatctgcggcaagtggcagagctgactctgctgggtgcagggatgagggatgccttccagatggctacccgcctatccaaattcttctctctagagcgtgagctggtgtctgggcccctgccctgccgcctgccactgctcaagcagatactggaagacacaatacggacactaaatgtgaccaaggaggaaccgaagtgccagaagcctcgcagcctagctgccattgaggaggctgccctactgcgctcaccactgtttagcattctcaatgggctccacctgcacaacctccgagggctgttgtgtgcgcttttccctagcgccagccaagtgctggcagaacctatgacttacaagctgatgaagccattggtggtggaggaactgcaacaggtaggtctggatcccagccctgacattttggggtccttggaacagttgagccaggccctgagccgggcctcaggcattctgctcctgggccctgcgggcagcggcaagaccacttgttggcacagcttatttaagatccagaatcggctggcagccatggaggacacctcaacccaaggctgccagcctgtggaaattacccacctgtaccccagtggcctcagcccccaggagttcctgggatggctagagggctcctgctggcatcatggcatctttcccaaggtacttcgtgcagccggtcagtgtaacaacatgggccaaaagaggcagacagaggaatcaatcgggatccagcactggataatatgtgatggagcctccaatggtgcttggctggactccatcacttgcctcctgagtgagcttccccagcttagtctccccagtggacagcagatagcacgacccccaggcacctttctcttgatggaggtggctgacacaacaggcatatcccccacagtggtaggctgttgtgccctagtctggtgtggtggagagcagacttggcagtgtatacttagtgccctgatggcatcccttccttatgagtaccgcctgcagcaccggacagtcgctgagctcaaccacatggctgaggttctggtgcctgcaacattgcgattcctcacctgccaaggtgtcagctctctgctgcaggtacacgggcagcaggctgtttgtgcaggtgtggcagaagttaccagcatggcacgcatcttgcatagtctgcttgacctccaccttcgcctaaaggaggagaaggcccctggcccagaggacctcagctatagtgatcctgtggcccaaagcttcaggtcttcaaaaagcagctttctaaaccggtcccaggttgacagtgacgatgtgccagataagtgcagggaacacttgctggctgtcagcagttttctttttgccttgatctggggctttggagcccaccttccctccaggttctggcccatctttgataccttcataagggattctattagtcgcctctccaactaccctgagccaccaccctcagccttggtgtttgatctacatgtaagccctgaagatggaacactggtccccttcactggccaatacctgagcagccacatcaaaggaactttgggcacctttcacccttctatccagactgaacggctcttgtatgtggtggacctgcttctgtcagggggacagccagtgttgctggctggagaggcagcaacagggaagtcagcctttgtggaggtgctggtagagccacatcacccttacatatacagccccatccaccctgccttcagttcctcccacctccgtctcctgctgagcagaggaatccagggccaaacacaagccagcccacagcctgggcatcaccaggattctaaaccctccctcctcttcttgctggaggacctgcacctagccacttctgacccagagaagagctgccagccagtgttggagactctgcgccaggccatggatggcactgtgtatgcccacagcaccttggaactgcagacgctgcagcctacagtcaacttccttgccactgtcacagtgccaggatactgtgagcgcccactgtgtccacgcctctttcgactcttcacagtcctggccctggaaagcatgacccaggccaccctgctggaaagacatgtgcctatcattcaggcttggcttgagcgtttcccttctgtggaacgggagcgtgctctggcacgaggtctggttagggcctcagtagaggcctgggaggctgtgtgcaattgcttcatgccttcacccctccacccacactaccacttctccctacactctgtgagccacctactgagcagcctgcagctgctgcccaacagaacaggctcccgaggttttgtggactatcccaaccaccaggagcacttgcgccgggtgtcaggcctgcgaggcacttgtctgaccgttatgatggccacacgcaatgtggtgcgtctttggttgcatgaggcacagagaaccttttgcgaccggctggacagccccagggaacgctcctactgtgccaagctgctcctagtagtagctcaaagtgtcttctgctgtgggccagggccccagcacctgggcaaggaccatcaggagagtgaggaggaggaggaggaggagagggtgcccgaagtagaatctgaaggggagttggcccagtgggaggacttcagcaacagcaatagtgaaacagaggaggaagaggaaccttatggccttcaggtcgccagagtctcaaactccagagatccaagtctaacaccatccataggaccagtaagcagggggatgaaggaaagcataagtcacaagataaggcaagagaaaggcacaagggcatccaactataggctccaggtaaggagatcattcaagacttggtggcagaagaaaccccagatggacctgatctcacccttgttgttaccagtgttactactacatccccaggaaaagccctcagacctggtcttcagtcaggagctgatactggggcctaactctgagacccccaacttgtacctggaacgacagtgggagaagctagaggagcagttggccacctcagctgctcaactgaagttgagcccccacctggcccggtgtcattccatggcccagcacgtggcccgcctggtccgggtgctggccaggccccggcagcatggcctgctgctctcgggggctctgggtactgggcgccacactgccatcactctggcttctagcatttgtcaggcccatttctttcatctaccatctgggtcagaggaggccattctccaatgtctacgagatgccagctggcatgctggcatgttaagccagccagtggctctgttggtacccagtggtgtggatctcactacacttcatcgcctcctggccctggcaacctcaggcagtttccctggccagtacacagaagcagatttggaccgcattggagaacacctccccagggagaaccttggtgtcaaacagaacatcaagaaggaaatggtgttgcagaggttccaccagcaagtgtgcagccaccttcacctgttcttcctgattggagataaacaggcccacaagcagctgccctccacccttttcctgaggctccttcaactggccactgccagcattgaccgctatgaaccctgggaccaagctgccctggccaaggtggcccagcatcacctggagggtgctcagagtgtgccccttgatgacggctcctggaagtacccagacctccaggcctcaattcccagtgtggccaaagccatggctcttatccacctttcggccacccactaccatgagcacctgtgccctgcattgccactcgtcacccccaagaccttcctagacttcctggacactttcctgatgctgcagcaacagacaatcctgaagattaagaacaaggcccagcgggtccagaatgccttggagaatctgagaatgctgattaaggagcacggtacccatgccaatctgatctttgacttggaacagcagctgaaagactccggcaagagtctcagcatgtttcagcagcagctagagcaaagcaagctcctatacaagcagcagctggaagagtgtcggcatcaagagaacctcattgagaacctggccaggcaacgggatgccctgcaagctcagcgagaggctttcctggagcagatgagcaaggcatttctggagcctctgagccagctgcaggtggctgactttgaggagatacggagctatcgagcaccaccagaatctgtggtccgggtaactgatgcaatgtgtgacttgttccaccatgaaacaggctgggccagtgccaaacagctgttatgcactgaggatttttatcaggagctggtgttcttccccaaggagaagataacagactcagagctgataaagttacatctaattctgaaggctccaggtatggacgatgcagccctgcgggcagtgagccgacctgcagccagcctggcagcctggctctgggctgttctgcactatgggctggcgcattgccggggactgcccacggacctgctgctgcagcaagtggaggcaacactcactcgggagcaggcccgcctgggctactaccagtttcaggcccaggagaccctggagcataatttggccctggctaagatggtggaggatgcccaagcttcccacaactgcgtggcaaagaccctcagtcaagcacagtgtgggcagtatcacaaatggcccatgaaggctgcactgctcacgcctatgcgtgcctggactacacagctccagaagctgaagggacgctgcatgactgtgtttggagataccctcctatgttcagctgccatcatctacctgggtcccttcccaccattgcggcgccaagagctactggacgagtggttagctctgtgtaggggctttcaggaggctctgggcccagatgatgtggcacaggcactgaagcggaagcaaaaatctgtcagcataccaccaaagaaccccctgctggctacacactctcccttcagtattctgtccttgctgagctctgaatcggagcagtaccagtgggatggaaacctgaagccacaggcaaagtcggcccacctggcaggcttgcttctgcgaagccccacacactacagtagttgccgttggcctctgctgcttgaccccagcaacgaggccctcatctggttggacccgctgcctctggaagagaatcgatcttttgcgccagccctcactgagggtagagggaaaggcctcatgagaaatcaaaagagagagagtaaaacggacatgaaagaggaagatgatgagagtgaagagagtaatgaggctgaggaccagacaaaagagcagaaggcagaggaaagaaaaaatgagcaggagaaagagcaagaggaaaatgaagagaaagaggaggagaagacagagagccaggggtcaaagccagcctatgagactcagcttccatcccttccctaccttagtgttctttcaggtgctgacccagagctgggttctcagctccaggaggcagctgcttgtggcctgcctgtgttactgaccaatgtggagctgggtctagggtgcgaagaactgcaatggctgctgcaacgggagcagctgagtccaccccaggtgcagcctggcttctgtctgtatctcagcaccaccctctccctctgtgccatggaaaaagtgctaggttgtgaactgctaaaggggctgaatgtgttggatctgggcctgaacatggaaatactggaagaacagatgctgcatgaaatcttgtgcagagagtatcctgaactcgagacccgctggcaggacctaaagatcagagccctagatacctgcaaggctgtggaggctgctgaggagcggctgctgacgatgctgctgttccagaatccgaagcgtcagaagccagccaagtttctgcggaacatagtgagggcccaaggaaagctatgccagctgcgtgctcattgtgaagagttagaagggcagaaactacaggagatggtattgtgggcaccctatcgacctgtggtttggcatggaatggccatggtaaaggccctaagccaactgcagaacctgctgccacttttctgtatgagcccagagaactggctggcagtcactaagcaggctctggacagcatgaagccacgtgagattaatcacggggaggacctggccagccatctactgcaattgagagcacacctgacccgccagctgctgggcagcaccgtgactgcactgggccttacccaagtacccttggtgggtgcattgggcgctttggctctgctgcaagcaacagggaaagcatcagagctggaaagactggcactctggcctggactagcagcctctcccagcacagtccacagcaagccagtctcagatgtggctcgaccggcctggcttgggccaaaagcctggcatgaatgtgagatgttagagctgctgcccccatttgttggcctgtgtgcctccctggcaggccactccagtgcttggcaggcttacctgtcactgtcatccacagtgctgggtcctgcacctgggccagggcctgagccactcagcctcctccagaagctgatcctgtggcgcgttctgcgacctgagtgcctggcaggtgccctggcagacttcaccactagcctcctgggtcggcccctggatgaaaacacgtatgctcccaccatgccctttaaacatagtcaggctactcagcccatgctgatcttgttgccaccgcctggccacccctcagccactctgcatcctctgactgtcatccagaaactggctgccaagtatcagcaggggcagaagcaactgcaggtgatagccctgggctctgaagcctgggacccagtctcagttgtggtcagcactctatcccaggctatgtatgaggggcactggctggtgctggacaactgtcatctgatgccccattggccgaaagagctgctacagctcttgctggaactgttaggcagagccaaggtggttgcagacctggaatcagaacagcttttagaccaacctgaaagcaggaatgtaagcactgttcacagagattttcgtctttggcttattgtgcctgcagagtctagtgcttctttgccagctgtgctgactcagcactccatgcctgttttctggaaccagtccctggagctgggccatgttttgattgacagtgtggagctagcccagcaagtactctacatgcaaccccccacccaggcactacctctgctcctcctccatggcctcctgctacaccggcagctctatggaacaaggctgcaggcacacagggggcgctggagtcaagtgactctaacccaggttcttcagacccaagaccagctgtgggcaagtcttagcaatccccgtgctgccatgcaagagctggctgcttcagttttctacgggggtcctctgggggacactgaggacagggaggccctgattagcctcacacaagcctgcctgagccccagtagtgggagctgggtccagccacacacacctcagtctttgctggccacgctcatgcccctcccagagctaagggagctggatgcaatggcagagtgcaaggcccagatgcacctactgccctcaccacctgaaccccggctctgcggactgagtgagggcccccaagcctggctgttgcgacgccagagtcgcgctctcttgagtgcgctgcagcggagttcacccgtgtgggttcctgagtctcgaagaggcgcccagcttgcggaaaggcgactgcggcaacgcctagtgcaagtcaaccggaggctggagtcactgcaggatctgctgacccacgtgattcgccaagacgagtccgacgccccgtggtcagtgctggggccaaatgcacggcggcctctggagggcgtcttagagaccgaggctctagaactgagccagttggtgggcacgctacaacgcgaccttgattgcctgttgcagcagctgaagggcgcacccccgtgcccctcccgccgctgtgctgcggtggcccacgctctctggactggccgcctacccttgccttggcgacctcatgcgccggccggtccgcagccgccctggcactggctgcgacagttgtcgcgccgtgggcaactgttggttcgttacttgggcgtgggcgcggacgcgagcagtgatgtaccagagcgcgtcttccacctgtcagcctttcgccacccgcgccgcctgctgctggcattgcgtggggaagctgccctggaccagaatgtgcccagctcgaatttccctggtagccgaggctcggtctccagtcagctccagtataaacgtctggagatgaacagcaaccctctgcacttcagggtggagaatggtccaaatcccacggttccagagagagggctgctgctgatcgggctacaggtcctacatgcggagtgggacccaatagctggagccttgcaggacagtccttccagccaacccagccctctgcctcccgtcagcatcagcacacaggccccgggcaccagtgacctgccagccccagccgacctgactgtgtactcgtgtcctgtgtacatgggagggccccttggcaccgctaagctgcagagcaggaacatcgtgatgcatctgcctttacccaccaagctcacccccaacacctgtgtccaaaggagggtccatgtgtgcagcccacccctgtcttgagcccgtctaccaaaataaagttgtagtgattccatg

SEQ ID NO: 320 - DNA, 1490 bp, Homo sapiens
  source 1..1490: mol_type = genomic DNA
gggccacgccgcgcgccgattggtggcgtccgggactctccctgcaggtgactgacggcgccggccgcccctgcccgtcgcccgcccgctgctgccgcccgcccggggtgtggagcccggccgctgctcgcgggctgagtgtctgtcgctgctgccgcctccacccagcctccgccatggacctcttcggggacctgccggagcccgagcgctcgccgcgcccggctgccgggaaagaagctcagaaaggacccctgctctttgatgacctccctccggccagcagtactgactcaggatcagggggacctttgctttttgatgatctcccacccgctagcagtggcgattcaggttctcttgccacatcaatatcccagatggtaaagactgaagggaaaggagcaaagagaaaaacctccgaggaagagaagaatggcagtgaagagcttgtggaaaagaaagtttgtaaagcctcttcggtgatctttggtctgaagggctatgtggctgagcggaagggtgagagggaggagatgcaggatgcccacgtcatcctgaacgacatcaccgaggagtgtaggcccccatcgtccctcattactcgggtttcatattttgctgtttttgatggacatggaggaattcgagcctcaaaatttgctgcacagaatttgcatcaaaacttaatcagaaaatttcctaaaggagatgtaatcagtgtagagaaaaccgtgaagagatgccttttggacactttcaagcatactgatgaagagttccttaaacaagcttccagccagaagcctgcctggaaagatgggtccactgccacgtgtgttctggctgtagacaacattctttatattgccaacctcggagatagtcgggcaatcttgtgtcgttataatgaggagagtcaaaaacatgcagccttaagcctcagcaaagagcataatccaactcagtatgaagagcggatgaggatacagaaggctggaggaaacgtcagggatgggcgtgttttgggcgtgctagaggtgtcacgctccattggggacgggcagtacaagcgctgcggtgtcacctctgtgcccgacatcagacgctgccagctgacccccaatgacaggttcattttgttggcctgtgatgggctcttcaaggtctttaccccagaagaagccgtgaacttcatcttgtcctgtctcgaggatgaaaagatccagacccgggaagggaagtccgcagccgacgcccgctacgaagcagcctgcaacaggctggccaacaaggcggtgcagcggggctcggccgacaacgtcactgtgatggtggtgcggatagggcactgaggggtggcgcgcggccaggagcacgcatggtattgacttaaaaggttcattttgtgtgtgtgcacattgtgtgttttgtgtactcctgtgggactcccatggttgtaaataaaggtttctctttttttttcctag

SEQ ID NO: 321 - DNA, 6662 bp, Homo sapiens
  source 1..6662: mol_type = genomic DNA
actgaccccgctgtaccacggccctcttgcggacagccccggggacgtcgttgggacatcgctgggaccccgggctctgcagccacaaccatgtttggccggaagcgcagtgtctcctttgggggcttcggatggatcgacaagaccatgctggcaagtctgaaggtcaagaagcaggagctggccaacagctcggatgcgaccctcccagaccggccgctctcccctcctctcacggcacctcccaccatgaagtcgtcggagttctttgagatgctggagaaaatgcaggggatcaagcttgaagagcagaagccgggaccccagaagaacaaggacgactatatcccataccccagcatcgacgaggttgtggagaagggaggcccgtaccctcaggtcatcctgccacagtttgggggctattggatcgaggacccggagaacgtgggcaccccaacatcgctggggagcagcatctgtgaggaggaggaagaggacaacctcagccccaacacatttggctacaagctcgagtgcaagggtgaagccagggcctaccggaggcacttcctggggaaggatcatctaaacttttactgtaccggcagcagcctggggaacttgatcctgtccgtcaagtgcgaggaagcagaggggatcgagtacctccgggtcatccttaggtccaaactgaagacggtacatgagcggatccccttggctggactgagcaagcttcccagtgtccctcagattgcaaaggctttctgtgatgatgcagtgggactgagattcaatcctgtcctgtaccccaaggcctcccaaatgattgtgtcctatgatgagcatgaagtcaacaacacattcaaattcggagtcatttatcaaaaagccaggcagaccctggaggaggagctatttgggaacaatgaggagagcccagcttttaaggagttcttggacctgctgggggacacgatcacactgcaggatttcaaaggtttccgaggaggcctggacgtgacccacggacagacaggggtggaatcagtgtacacaacattccgggacagggagatcatgtttcacgtttccacaaagctgccatttaccgacggagacgcccagcagctccagagaaagagacacattggaaatgacatcgtggccatcatcttccaagaggaaaacacgccgtttgtcccagacatgatagcctccaatttcttacatgcctacatcgtcgtgcaggtcgagaccccaggcacagagaccccatcctacaaggtctctgtcactgcgcgggaagatgtgcccacctttggtccacctctgcccagtccccccgttttccagaagggcccggaattcagggagtttctgctcaccaagctcaccaatgccgagaacgcctgctgcaagtcggacaagtttgcaaagctggaggaccggaccagggctgccctcctggacaaccttcacgatgagctccacgcccacacacaggccatgctgggactgggcccagaggaggacaagtttgagaatggaggccacggggggttcctggagtcttttaagagggccatccgcgtacgcagccactccatggagaccatggtgggcggccagaagaagtcgcacagtgggggcatccctggcagcctcagcgggggcatctcccacaacagcatggaggtcaccaagaccaccttctcgcctccagtggtggcggcaacggtgaagaaccagtcacggagtcccatcaagcgacgctcggggctcttcccccgcctgcacacgggctcagaaggccagggcgacagccgggcacgatgtgacagcacatccagcacacccaagaccccagatggtggacactcctctcaggagataaagtctgagacctcatccaatcccagctctccggaaatctgccccaacaaggagaagcccttcatgaagttgaaggaaaacggccgtgccatctcccgctcctcctccagcaccagcagcgtcagcagcactgcaggggagggcgaggccatggaggagggcgacagtgggggcagccagccgtccacgacctcacccttcaagcaggaggtgtttgtctacagcccgtccccgagcagcgagagccccagcctgggggcagctgccaccccgatcatcatgagccggagtcccacagatgccaaaagcagaaactccccgagatcgaacctgaaattccgctttgacaagctcagccatgccagctctggtgcgggtcactaatgtgaaagtggagtccttcgcctgtccaagggaatcccctcttctgtcctggaaaaggctcctgtaccagcagtttgggagtgccgtccacgaccctgacagtcccagccctgctgccccatggccacgtgcccacagatgtgctgttggtccaggtgtcccagtctggccacagccctgcctccgccctcacctacatgccctcccagcccctcccatctctggacgaggcctccttcctcaggttcctcctgctcctgacctcccagtgtgatgtccgggtcctttatcatcctattcatcctggagaggaaaagtgtcgggcaaagggggatctggggggagctcagcagtgactggggagctggtctgcctcagagacagagtagggggtgggagcagagcctcggtgagggtcttggccacagggcagtgccttcctgaacgtggcaggctttactaccaggaacgcactcggtggtggaggccccatgttcccaggagccaagattcgtagcatccttgaggccatcctgataaaattcggcgctattgcccccgtagctctggagctctaaaccgtctatctgcttctgtgctgaacgcctttcccatctgctgacgtaggcccagggctgccctgcccctgctgccagtgtaccgtgagcggggctccagccagttcaagctcagagccagagctggacgggccagaactgcgctgcacacttcctggactgaggcggggactttgggtcccacccggtttctcctgattatggctgctgtggggtgaggggagggaggggcagccccgaggcagtctcttccctttgagaagatattttcccacaaaggggtgggaagccaggagtgagaaggaattcagggagagcaaaggagccagtgctgagatgctgctgtgttggttgaggaaaacctcgggcctgagggccaggccggagcccaggtctctgctgacaatgggggttcaaggaagacgtcgttatctcccctccccacttactcgaggagagaggtgagggggggatgacttgcgggttctgatcaggcccctgggtggggaaggggcacagtgtccctcagcagcttacgcccctggagtcttggggggcccagcctggccctggggccttttccagctactgtgcccttgggcagctgcgtctggggctcaaccccccaatcctgttcccctctccagctgcgggtctgtaggcagctgtcacatctgaagggtttctgcaacctggaccccatctgggtgtgggtcagaccctgtgacccacatgccacccccaccctccacagagcccccttgctgggacagccagctcacctccaaggacatcccctcctggcttctcccccttccgagtctgcagcgccgtgggcttctctgccgatgggcccgggttggggttaaggtgggcatcctccaggtacaacgagcctgaagagcccctttcagtgcagacggggctgcagagtgacactggctgggcacctgccccacgaccaatgacaaggatttccagctgaatgctttattcccatagggatctggacctgtgcccaagatataaatactacactttttttttttttttttaactgacattgtgaaattctccctatagcttttgccattcaagcaacattgtgatctttcttccccgccacgtgtgtgggaatgattgagtcctgtttgcaagctggagaggagctctccctttgctagtactttctctaaagtactagtctagtaaaatttattcttgttagaaggtcaacaaaatatctgtttagcttttatgaagagtcaccgtagcagcccccacggctggaaagaggcctgtacgttctggacgcgttttgttggctgggcttctggaggcactggcaaggtcaaactgcatttctttaagaacagttgcaggatctggctcgcctctgtgggaagccggcattacaggtgcttggtggatgggccgtgtcacattgccatctggggtcctttggggtttccaggttgtcaccatgctgtcccatttgggaatcccatacctgcctgtccccactgcgctggctgacccttgctgcctgctgcctcttgggagggctttgtccctgcctctgagctggtgggcaggatggctgggtggcccccagagaagcacagacctgagatggggtctccatgcccggtttgctgttggaatgatctgaacaggaccccaaatgcctcttccctctggtcatgcctcactatctctaggagctccatcctgtggcttccagagtgtgcacttccagcccacccgggcagtgctgagagggaggaggagaacaaggatggcccagcctcccctccctcccctagaccacggggcgggcagctcgggttcctggagggctgtttcccccacgctgtccctacatctgctctgatctaaaatgtctttccttttatgctgcgcccagtcttggggctcaaagatttgcccaaacctcattggccctcgtgactaggctcatctagatggtgctcacgctggtgtttgaggcatttccactgtgatctccacgaggggatgttttccgggacacatctctggctctgggaactgcctgactcactgaagaaactacttttcaggcactgtagggtcacccatatgcctccagctcagttgacgcttaaaaacaggtgcagaaaagctcgcgatggaaggtcttaatgagagtgtctgtctatgccaatcatgtaaaatgacgtttcttgaaaaagattcagtggttcagctttgtcagcatcatctcaacacaagcctgctggctctttttagcatctcatccaaccatgtcatcgtccagatgagaaatcttagcccaggtgaggggagtaacttgcttgaggtcacacagctggctgttggcaaagctgggattagaaccctcaacccagggtcccttcctctgcagcgcctacatggttggttgaataagtggctgcgtttcctggggccctgggttttggggaagccagttagctgctgctttggcactggcatggaggtgagcagtcaaggatgctggtgaggctgcagtttctgctctttttcatcaggggggatagtctctaggatttttcagtgaggacccttgggctttggatgcagcttgaaccaagaaaacgaggagggaaagggattcagtgaactattcctcagtgggatcggttcttcagctcctgatgggggctgtgtaatgggggcagaggccagggaaaaagatgctgttcacccaccctcagcttcccttttcctaaattaagaggaaaagtggtcaaagaaaaactcttcatttctccctgattcttaaacgaaggtggttaatagaaactcaggctcccgtgacaaggcaggacaagagcctgtttcgctttcctccctgaccctgccaggtgccaactcaaacactacctttctcattggtttctaagtcagtagagacagatctgttttaagcagttgggggttcgagtagatctcatgggtacaggaggccagcagggaccaggccagtcagccatgctcaggacccctcggctcctcccccagcctctagctaccctgtatcgaggcaaggggaggccagtaaagtttgccaagcctgatcctgcagcctggtggggctggctggggtattcttttaccaaactctgttttaccgccagccccttgtacaccccaatcccatgtctccctcccttcagctggaccgtgtgcccctttgggaggaagaagacaagccccactagggccaagggcagcagagccctgccgagtgagaggctgtggggcagcggctctgtcctgtgccttaccagccctggggaggggggcatttggctggaagactggaatttaattgccatcgtctttgattttgtgacatttctgcttggaagtgtgaactacccccccccccccgcttcctgctccttagcatgcgtgcagctctctcctgttttgggtgttccccttggacactccagctcggggactgctggcgtgtgaatgtgcagattcccctgtgtggtcgaacctaagaactgtggcttggaagtgatgctccatgtgacgacgactttgctttctttcctcttagtgaggaggtgattcgtagatcccaactgcctatgtaatgtaaataatgtacatttaatttattgctatggtagcacattgtatttgttaatgtacaaaacaaattctaaaaggttgacaaatgtatattttgttgcttaaatgtgtctttgcagaaattgacaataaataacatattttgtgtcc

SEQ ID NO: 322 - DNA, 1335 bp, Homo sapiens
  source 1..1335: mol_type = genomic DNA
aaaagaggtgggatcgtttgtcgcgatgtggagtggccgtaagctgggctcctccgggggttggtttttaagagtgctggggcctggaggctgtaatacaaaagctgcgcgtcccttaatttcctcggcggtttatgtgaagaaccagctcagtgggactctacagattaaaccaggggttttcaatgaatacagaaccatatggttcaaatcctacaggacgatcttttcctgtttgaacagaataaagagtttcaggtacccttgggcgagactgtacagtacttcccaaaccactgtcgacagcggtgaggtaaaaaccttcttggccctggctcacaaatggtgggatgaacaaggagtatatgcacctcttcattccatgaatgacctgagggtgccatttattagggacaatcttctgaaaacaattcctaatcaccagccaggaaaacctttgttggggatgaagattcttgacgttggctgtggtggtgggctgttaactgaacctctagggcggcttggggcttcagttattggaatcgaccctgtggatgagaacattaaaacagcacaatgccataaatcatttgatccagtcctggataagagaatagagtacagagtgtgttccctggaagagattgtggaagagactgcagaaacatttgatgctgttgtagcttctgaagttgtagaacatgtgattgatctagaaacatttttacagtgctgctgtcaagtgttaaaacccggtggttctttattcattactacaatcaacaaaacacaactttcctatgccttgggaattgttttttcagagcaaattgcaagtattgtaccaaaaggtactcatacatgggagaagtttgtttcacctgaaacactagagagcattctggaatcaaatggtctgtcagttcaaacagtggtaggaatgctctataaccccttctcaggttactggcattggagtgaaaataccagccttaactatgcagcttatgctgtgaaatccagggtccaggaacacccagcctctgctgagtttgttttaaagggagaaacagaagagctccaagctaatgcctgcaccaatccagctgtgcatgaaaagctgaagaaatgaattgtttctgagaactatagtaatatggcttggatatctgatgttttcaaatacaaaaatgtacaatttatcctttgagagagaatcatgaagaaaagaaggtcaataaaaagggctaaaaccttggacaaaagtttttgttatttcgtctaatagctactttcaagggattctgtgaataaaaagttttgtcaagatat

SEQ ID NO: 323 - DNA, 1912 bp, Homo sapiens
  source 1..1912: mol_type = genomic DNA
gctactcccaccccgccccgccccgtcattgtccccgtcggtctcttttctcttccgtcctaaaagctctgcgagccgctcccttctcccggtgccccgcgtctgtccatcctcagtgggtcagacgagcaggatggagggctgcatgggggaggagtcgtttcagatgtgggagctcaatcggcgcctggaggcctacctggcccgggtcaaggcgctggaggagcagaatgagctgctcagcgcggagctcggggggctccgggcacaatccgcggacacctcctggcgggcgcatgccgacgacgagctggcggccctgcgggccctcgttgaccaacgctggcgggagaagcacgcggccgaggtggcgcgcgacaacctggctgaagagctggagggcgtggcaggccgatgccagcagctgcggctggcccgggagcggacgacggaggaggtagcccgcaaccggcgcgccgtcgaggcagagaaatgcgcccgggcctggctgagtagccaggtggcagagctggagcgcgagctagaggctctacgcgtggcgcacgaggaggagcgcgtcggcctgaacgcgcaggctgcctgtgccccccgctgccccgcgccgccccgcgggcctcccgcgccggccccggaggtagaggagctggcaaggcgactgggcgaggcgtggcgcggggcagtgcgcggctaccaggagcgcgtggcacacatggagacgtcgctgggccaggcccgcgagcggctgggccgggcggtgcagggtgcccgcgagggccgcctggagctgcagcagctccaggctgagcgcggaggcctcctggagcgcagggcagcgttggaacagaggttggagggccgctggcaggagcggctgcgggctactgaaaagttccagctggctgtggaggccctggagcaggagaaacagggcctacagagccagatcgctcaggtcctggaaggtcggcagcagctggcgcacctcaagatgtccctcagcctggaggtggccacgtacaggaccctcctggaggctgagaactcccggctgcaaacacctggcggtggctccaagacttccctcagctttcaggaccccaagctggagctgcaattccctaggaccccagagggccggcgtcttggatctttgctcccagtcctgagcccaacttccctcccctcacccttgcctgctacccttgagacacctgtgccagcctttcttaagaaccaagaattcctccaggcccgtacccctaccttggccagcacccccatcccccccacacctcaggcaccctctcctgctgtagatgcagagatcagagcccaggatgctcctctctctctgctccagacacagggtgggaggaaacaggctccagagcccctgcgggctgaagccagggtggccattcctgccagcgtcctgcctggaccagaggagcctgggggccagcggcaagaggccagtacaggccagtccccagaggaccatgcctccttggcaccacccctcagccctgaccactccagtttagaggctaaggatggagaatccggtgggtctagagtgttcagcatatgccgaggggaaggtgaagggcaaatctgggggttggtagagaaagaaacagccatagagggcaaagtggtaagcagcttgcagcaggaaatatgggaagaagaggatctaaacaggaaggaaatccaggactcccaggttcctttggaaaaagaaaccctgaagtctctgggagaggagattcaagagtcactgaagactctggaaaaccagagccatgagacactagaaagggagaatcaagaatgtccgaggtctttagaagaagacttagaaacactaaaaagtctagaaaagaaaaag

SEQ ID NO: 324 - DNA, 8375 bp, Homo sapiens
  source 1..8375: mol_type = genomic DNA
cgcggcggcgattggccggccgcggcgcccgctcccagaatgcagcgcatggcgcgtcattgaagagagaccatgatggcggcggcgctggggcccccagaagtgatcgctcagctggagaacgcggctaaagttctgatggcaccaccttccatggtcaataatgaacaacgccagcatgcagagcacatattcttatcatttaggaaatcaaaatcaccatttgcagtttgcaagcatattttggaaactagtaaagtggactatgtcctctttcaagctgccacagccataatggaagcagttgtccgagagtggattctcttggaaaaaggtagcatcgagtctctgcgaacattccttttaacctatgtcttacaaaggcccaaccttcaaaagtatgttcgggaacagattctactagcagtagcagtaattgtaaaaagaggatcattagataaatcaattgactgcaaaagcatttttcatgaagtcagccagttgattagtagtggcaatcccactgtgcaaactctggcctgttctattctgactgcgctattgagtgaattttcaagttcaagtaaaactagcaacattggattgagcatggaattccatggtaactgcaaaagagtttttcaggaagaagaccttcgtcagatcttcatgttaactgttgaagttctgcaggagttcagcaggcgggaaaacctcaatgctcagatgtcttcagtatttcagcgttaccttgcactcgccaatcaagtcttgagctggaactttcttcctccaaatttgggcagacattatatagctatgtttgaatcctcgcaaaatgtgctgttgaagccaacagagtcctggcgggagactcttctggacagcagagttatggagcttttcttcacagtacatcgaaaaatcagagaagattcagatatggcacaagattctctgcagtgccttgcccagttagcttctcttcatggacccatcttcccagatgaaggatcacaagttgattatctagcacacttcattgagggattactgaatactatcaatggaattgaaatagaagattctgaagctgtggggatctccagcattatcagcaacctgataaccgtgttcccacgaaatgttttaactgccattccaagtgaacttttctcctcctttgttaactgcctcacacacctcacttgttcttttgggcgaagtgctgcattggaagaagtgcttgataaagatgacatggtatacatggaagcatatgataaattgttggagtcctggttaactttggttcaagatgacaaacatttccataaaggcttttttacccaacatgcagttcaagttttcaattcctatattcagtgccacctagctgctccagatggcacaagaaatttgactgccaatggtgtggcctctcgtgaggaggaagaaataagtgaacttcaagaggatgatcgagaccagttttctgatcaactggccagtgtaggaatgctaggaagaattgctgcagaacactgtatacctcttctgacaagtttattagaagaaagagtaacaagactccatggtcagttacaacgacatcagcaacagttacttgcttcaccgggttcaagcactgttgacaacaaaatgcttgatgatctctatgaagatattcactggcttattttagttacaggctacctcttagctgatgatactcagggagagactccgctaatacctccagaaataatggaatattccattaagcattcatctgaagttgacattaatacaacacttcaaattttgggatctccaggagaaaaggcttcttccatcccagggtacaacagaacagattctgtgattaggctgttgtctgccattctcagagtttcagaagttgaatctcgagcaataagagcagatctcactcatctactaagtccccagatgggcaaagatattgtttggtttttaaaacgctgggcaaagacttatctcctggtggatgaaaaactgtatgatcagataagtctgccattcagtacagcgttcggagcagatacagagggttctcagtggataattggctacctcttacaaaaagtcatcagtaacctctcagtctggagtagtgagcaggaccttgcaaatgacactgtgcagctccttgtcactttggtggaaagaagagaaagggcaaacttagtaattcaatgtgagaactggtggaatttagctaagcagtttgcaagccgaagcccacctcttaatttcttgtcaagtcctgtgcagaggacattgatgaaggctctagtcttaggaggttttgcacatatggacacagaaaccaaacagcagtattggacagaggttcttcagccacttcagcagcgattcttaagagtgataaaccaagaaaacttccagcagatgtgtcagcaagaggaagtcaagcaggaaatcactgccacactagaggccctgtgtggcattgctgaggctacccagattgacaacgtagcaatcctgtttaattttttaatggacttccttaccaattgcattggattgatggaagtttacaagaataccccagagactgtcaatctcattatagaagtttttgttgaagttgcacataaacagatatgctatcttggagagtccaaagctatgaacttatatgaagcctgccttactttgttgcaagtgtattctaagaataatttagggcggcaaagaatagatgttacagcagaagaagagcaataccaagacctgcttctcattatggaacttcttactaacctgctgtcaaaagaattcatagatttcagtgatacagatgaagtgtttagaggacatgagccaggtcaagcagcaaacagatctgtgtcagcagcggatgttgtgttgtatggagtaaacctaattctgcccttgatgtcacaggatctcttgaagtttccaaccctttgtaatcagtactacaaattaatcacatttatctgtgagatttttcctgaaaaaataccacagcttcctgaggatctgtttaaaagtctgatgtactccctagaattaggaatgacatcaatgagttcggaggtttgccagctttgcctggaggccttgacaccgttagctgaacagtgtgcaaaagcacaagaaacagactcaccactttttctagcaacacggcactttcttaagctggtttttgatatgctggttttgcaaaagcacaacacagagatgaccactgcggctggcgaagctttctacacgttggtgtgtttgcaccaggctgaatattctgaactggtcgaaacattactatcaagtcagcaagacccagttatttaccagagattagcagatgccttcaacaagctcactgcaagcagcactcctcctacgctggatcggaagcagaagatggccttcttaaagagtttagaagaatttatggcaaatgttggtggtctcctttgtgtaaaataaacaacagaactttatgcttaatttagatcctttctgcaaagtgcactgaattgctgaaagttgacttgagtcttgtcctattcctcagttcatttggccattttggattttggagagcctgaaactttgatatgtatgtaatacagtgaaacaggagaggtcaacttggcatcagcttctgctgttaagtgttagccacaatctgtcatatatatgtcttttagattctgaatggtgatttaaaattttcaaaatgaaattccatatatgtgcaaacagatatgggcaccacgaaatacatatgcagtgccttttttccttttaacataggtggctagccaaagtttagaatttttgtcattaaatatgaaatggatatatgctaggcagtgtttctcaaaatctccatagatcgcctgcatcacttgaggagctggtgaaaaggcagattcttaggcccaactgtagaccttcagagtcagaatgtctggttgttgggcccaggagtcttcatgttaataagcttctccctttcgtcaccccaaaagttttgaatcaatgaaagagacattgaaaactcttaagaggttttgtgctttctagcttttcctccctttgatgattgggttttataattcagcaggaaggggaaacatcaccaggggtttgttggctttttcttagcttgctttcttgcttgcttgctttcttgcttttcttgctttctgtctctctctttcttttctctctctctctcacatcaacccagtgctgcaggttttgtgtaatacaagtcactaatcatactctgatgcctgaacttgaggaggaaaatacatgtatatttttgttccgtaaaaataaccttaggaactgtagccatttcattgccttaattttaagaggaaaatacaaaaacagctgatttgttttagtaagaaaccacgtcttgatgcttcagagttggtttagggtgttagctgctatgaacctgttgcccctttcgatcgtgtatttatgtaggtttatcagtgaaatgaaaggcttgtttccgtctagtctaactttttgagtgtgtttctatccagccacatagcccatatctactctaaatggcttgcttaagcaataattattttaaaggatgtgaatcactgattcacacagactattgcacgttggggcattaggggcaataattcttatccagacatgggagccagtgaatttaatttcagagattaaaaattcactttagatcctctagtttgatctcttaatcaggatttttatacagctgccaggctcccctaattcagtgtgccagcttacaatgtggaaatgaaagctaatttatacacagcaggcatatgaaactccactcattgcagtactttcacagcacagtgacaggtagaggactctggcacaggtgcactcatgaaactctgcttccaccatgttcctgacacctatctattaaaccattctgcaaatacggtttttctacctgattgcatatagcatatgtgtcattacatgtgatgctgtgcaaaactttgtataattctgtgttattaacagttaacaaaactggagcatctgaattacatccaacctgtgcatgtgatgttaggtagatgtgaatgcagggccttgggccataacttacatttctctcaatttgattagctttgagtcacaattaaggggaagcaaaaacatcttgaaaagactgctaggaaggaaattaatatcagtcatccagaagtacacgtttctgtattttaaaaaatactttgatgcatttatttttaggtgttttttttttccccttaaaaaacttgaagtgatatgcagcagtaatctatttgttttgcattgttcttggtgttttgtgtttcccagatccctcaagctttctcagctgttgtgaattatgtgtatctgtgtgtgtgctaagtacagtctctttaccaaagggcactgaaacacacaattgactggacaggtccacgcgccatgacaaaactataatcaagttattaaaactaaagaggagtgggaaaggaatgccttggtaagtaaaaaggcatctatatttaataacttttatccagatggcaacatatttgcaaaatttgcccagatcctattacaatactaaaaatagaaaatttcacctccatattcctgaggtgtaatttcattagactagttttagtttaaaaagaccttcttcagattggaccaaataatacttataagatcagcagaatgttgaatattagctcactggggtggggagaagccactaccattttttaggtgatggggatgccactgagttgcaacggctagaccttttcagggtggttgtgtccatgtttgcctgattggatgcttattcactttgtgttttcttttgttttattttgtccaattttgtctttagctgtgtttattaacttctccggtcttgttttgttttaatgctcttggcccagtgggtgtcaagaacactggcttaattcaagtcagttgattttttttctattaaaactgttgttaaaatattttttaaaacaaaaacattatttgtgccctcttttatatatgtcaaagggacactgtcaagtatttcatttttagatttttgttttataaaatttctgttgttcatatagtatcctttaacctctagttttccatacatcctttgtttgtttctcattttattttccttgacccatttatttcccaaggcacaatcactaaagactttgtactttcacagtctgttaatgtggtagcacctgtaactgtgttcttgttctgttaaaaggattgatttgcttttatagtccttgtgctggatgagtggctgcctcagtagcaaaactacctgacagtatttgacagtgtcctttccagcaccattatttgggtctttcagggtggccatctctgttagaagacagtagcatgttaacatcactgcattgagtttttgtctggtgtaaagtatgacttttaatgtaaacaaactgcaggtttttttcaaactaattttaagaatttagtcttatttcgttgtaaactgtgtatctaattatattacattactctgttcagatgggatggttactaccacttgtccatgattttcatttgaaaagcaagtatctatatcatttccccccagtcagcattatttaacactccccttaactgtctttgaactttctcttttaacaaaaatgtcaagtctttatagttgtaatatcaccatgtttcccatttctgttaatacttctatgaacccctaaagtattgaagggaactagctgtcagtttcaaggattacaagtttgagtctcctagtattcaacatcattctgaaccctgaaataatatttttctctgttaaacaatttttatctgtttgccacctctgttgttagaggtggttgtcaattgaccttactaagttagctgtctttgatgaggaattattgttattggttcctgaataaaacattaaccttttaagtcagaaggaacctcggtacttcttaaggtttgtttgtgttttctaaaaccagagaataaggaactgatttggctatgaggtttaacattataattttctgtaagctttcccacaaaaaaacattgttgatttgaggatataataatgttttaatctttttaaaatataagtggttattctctgacttggtaactatgttctgaaaacactgcatttaagaatttttaaaaattggttttctaaaattaaaatgtccaaattaggcatattgctgagctcaaattgatgtgaaatgccatggttccagttgaattttaagcatattttcatttagatataaaatatatgaagtatgctttgttgattatagtgagaacccatgacatagttaaccaaagaatatgtttggttcaaataaaaatagaagcttaatactgggcattcatactttttaaagagaatgaatgaagaaatcggtttcctgctgtagttctctatgggtaagtcttagtaaagacgagaatgctgaagtcggccgtggcgattccctcctaggaactgggaggtgtggcttgcccattacccgcttgaagctcacatctttaccctcctctcccactgtggtttgatcttcacctattcccaggccctcccagcaattggagaggtgtctttttttttggttttggttttttttctccccgtctgcattcttaggcctcttagctattaggaactgtcagatacatactagtagctaattttcctagcctgaaattatatactgcatctgcactatgtacctactagggatctgacctcaagtgttttctgagcccaggcttcctggtgtggtgtcttttaccacataaaattattacaaattgcaaatgttggtattgtgatttgattatctgtacaaagaaagaagctctatgcagtgagtttgtggtttaatggtcacaaaaatgttagcactgctaccactcagcacgtgtaaaattttttaaatttataaatattaaaattttaaacttacactaagacttttcagttttatttaaagacccagggatgagtgtactgtttaaatatttacctctattaacataactaatgaaggtataaaattgcatttagtttttcagaagatgctgcaatatgattttaggaaataaggctatgtattgagccagttataggctgaatatcaggttgataaaattttatttgtatttttaaaattcataaatgggagttaaaatgtgtcttttcactaaatatttttattaca

SEQ ID NO: 325 - DNA, 2618 bp, Homo sapiens
  source 1..2618: mol_type = genomic DNA
atggcggcgggtgggagcggcgggcgtgcgtcgtgcccgccgggggtcggggtcggcccgggcacggggggcagtcccgggcccagcgccaacgccgccgccaccccggcccccggcaacgcggccgccgccgccgccgccgccgccgccgccgccgccgcccctgggccgacgccgcccgccccgccgggccccgggacagacgcgcaggccgcgggcgcggagcgggcggaggaggcggcgggcccgggggcggcggcgctgcagcgcgaggccgcgtacaactggcaggccagcaagcccaccgtgcaggagcgcttcgccttcctcttcaacaacgaggtgctgtgcgacgtgcacttcctggtgggcaaggggctcagctcgcagcgcatccccgcgcacaggttcgtgctggccgtgggcagcgccgtctttgatgccatgttcaacgggggaatggccacaacatccacggagattgagctgcccgacgtggaacccgctgccttcctcgcactgctcaagtttctctactcggacgaggtgcagattggcccggagacggtgatgaccacgctatacaccgccaagaagtacgcggtgccagcgctcgaggcccattgcgtggagttcctgaagaagaacctgcgagccgacaacgccttcatgctgctcacgcaggcgcgactcttcgatgaaccgcagctggccagcctgtgcctggagaacatcgacaaaaacactgcagacgccatcaccgcggagggcttcaccgacattgacctggacacgctggtggctgtcctggagcgcgacacactgggcatccgtgaggtgcggctgttcaatgccgttgtccgctggtccgaggccgagtgtcagcggcagcagctgcaggtgacgccagagaacaggcggaaggttctgggcaaggccctgggcctcattcgcttcccgctcatgaccatcgaggagttcgctgcaggtcccgcacagtcgggcatcctggtggaccgcgaggtggtcagcctcttcctgcacttcaccgtcaaccccaagccacgagtggagttcattgaccggccccgctgctgcctgcgtgggaaggagtgcagcatcaaccgcttccagcaggtggagagtcgctggggctacagcgggaccagtgaccgcatcaggttctcagtcaacaagcgcatcttcgtggtgggatttgggctgtatggatccatccacgggcccaccgactaccaagtgaacatccagattattcacaccgatagcaacaccgtcttgggccagaacgacacgggcttcagctgcgacggctcagccagcaccttccgcgtcatgttcaaggagccggtggaggtgctgcccaacgtcaactacacggcctgtgccacgctcaagggcccagactcccactacggcaccaaaggcctgcgcaaggtgacacacgagtcgcccaccacgggcgccaagacctgcttcaccttttgctacgcggccgggaacaacaatggcacatccgtggaggacggccagatccccgaggtcatcttctacacctaggctgcccgacaccgacaccgccctccctccgtggggatagccgcagccccaggccatcatctgctgctggggcccccccaccacgcggtgccaggcccagtgtcccccaggccgtctgtccactccatgccacctttctcagcatcaggacggggttgccctgtgttcaccacgagtgtggctgctggatcagggcagccggggaggtggccaggccagtggccaggccctgtggagacaatccctcaggactagggacagggctgtgccggcctgggccagggcccacggacccgcagctcagggcgcctgcccacgtcgtctgccggcggtgcgccgcgggcgtccctcgcgtctcttcactgcacattgcaatgcatttgcgattcccatttctctgctaggagccagcctgggtggcgctgctcccagagccgtgggtcccagaccttgcgttccttttgttcctgtccgtttatcaggacacgggccccacctgtcacgtgcccgaggccacccaagcccagcctgcggggcgttcccactgcctggatgccggcttgagttctgcgcacgcaggattcagtgtggggacggcccctgccggataggcctagccctggcccaggtggtgagcggtttgcagtgtccgttctcatccacctgatgggcccagataaaggcccccgctgtccagcctccctggacggccctcgcggtccctgcagcccaagatgggactcagaccctgtgccccagagctcccctgccgcagaatggggccccagccggccccgaccgggtccaggagcactgctcgcctgtacatactgttgccctagcccacctggtgccgtgggagccacccccaggtgctgggggcacagcccctccccactccggccacgcccccacccaccccgcgtgtttctgccctgtgactcctggaacctgcgtcctccccaaagccatgggaggggtgtcctcctcagaccatgcccccagatgatttttttaaataaagaaacaaatgcacctgc

SEQ ID NO: 326 - DNA, 2276 bp, Homo sapiens
  source 1..2276: mol_type = genomic DNA
ccgcggtgcggccctggcggccgttgaaaaatggcgactgtggcagagttgaaggctgttttaaaggacaccttggaaaaaaagggggtattagggcatttaaaagcaaggatccgagctgaagttttcaatgccctagatgatgaccgtgaaccccgaccatcattgtctcatgaaaaccttctaattaatgaattaattcgagagtatttagaattcaacaaatataagtatacagcatctgtcctcatagcagaatctggtcaacctgtagttccgttggacagacagtttctcatccatgaactaaatgcatttgaagaatcaaaggataatacaatacctcttttatatgggattttagcccatttcttgcgtggaactaaggatggcatccagaatgcatttctgaaagggccttcacttcagccttcagacccaagtcttggcagacaacctagtagaagaaagccaatggatgaccacctaagaaaggaggaacagaaaagtactaacattgaagatcttcatgtttctcaggcagtcaacagataatgctttgtttggggtatcttttgtcttaaaattgtattattaattaaataacttatttattgtcccaatgttaccaaaatgcaccactaatgtttgtagaaattggagtttctacaaaacacccctcatgtttaactacatttgtgaataaaagctaactcttgtcatctagcttattggatttgacttgaaaaaaaaagtattgtttttacgaagtattttttgtttttttgagatggagtctcgctctgtcacccagactggagtgcagtggcacgatctcggctcactgcaatctctgcctcccggattcaagtgattctcctgcctcagcctcccaagtagctgggaaaacaggcctgtgccaccacaccggagtagtttttgtatttttagtagagatggggtttcaccatgctggccaggctggtcttgaactcctgacctcaggtgatctgtgtgccccagcctcccaaagcgctgggattacaggtgtgagccactgagcccagccatttaggaagtattataaaggcccttaaagtttgtaaggaaatgaaagggctttgtattaccttttcaataggcaacaatgtactttttctttccttagactttggcttactggaagatttaattaaaaggtagaggagaagtaaatttgctgtaataattttgctgtaaataaaacaaagagtttattttattagataaagaatgtgaagtaagcatgaagagacaggctttgggagaaataccagaaagggatttttcaaagatggcattgtttaatctccgtgtggccctcggttgtgcaatcacagatgagccagaagagggccagccccctacttgtttgggctccgaaactcttaccaaacatcaatttttattcttgggatagaaaaatagtatgtgctatctctaatacgctacttcgatatttattaaagaagtatttttaatgtagtgtccacaggctcatttcattgaaaacaactgactatgatgatagacagctcctgattggcaaaagttcgatggtatattcagaattaaattttgcctgcacacctaaacactgacaacatttagcttaaaggttttccatggagaagagtggtaagagctgtagttagcaaaattggcatcctctttagggtgtcaattctgtgctgctttgcaaattgttgaaacttttgattttctgtttggcaatgctagtcagtgttcacttcttacagattagccaagaatttttatctaaatgcagaaacttattaatgaaatccatttaaactatacttacacaacattttgggaggccctgctggtaaaattatatatggatgcagaagtattgcaagagtccattttccatttttaaatctgcaatatctgattacattgatgaattccgttgtattgtatgtgtgaatataaatatctgaattctcccgggggacttggttttcgtccaaggatgttggcagtggacacttagtttacctcaggaattgcaatcatgtaagactatattcggaaaaaatgctggagtatataattttggatactgatataaaatcatcaagatggaagttaagcagaattgtcacgtgtagtccatagcgcttttatatgcattattctgtaatttgtttgtactgcggcaactttttatactttcaatgtatcatttaataaaaaaaataagcaagtca

SEQ ID NO: 327 - DNA, 2216 bp, Homo sapiens
  source 1..2216: mol_type = genomic DNA
agcatccgggctcccggcagcggcgctgcggcggctcgcgggagacgctgcgcgcggggctagcgggcggcggagcggacggcgacggggcgctctcgggctgccggcggggccgagcgccgcgcgtcccgagcatggcaggctccctgcctccctgcgtggtggactgtggcaccgggtataccaagcttggctacgcaggcaacactgagccccagttcattattccttcatgtattgccatcagagagtcagcaaaggtagttgaccaagctcaaaggagagtgttgaggggagttgatgaccttgactttttcataggagatgaagccatcgataaacctacatatgctacaaagtggccgatacgacatggaatcattgaagactgggatcttatggaaaggttcatggagcaagtggtttttaaatatcttcgagctgaacctgaggaccattattttttaatgacagaacctccactcaatacaccagaaaacagagagtatcttgcagaaattatgtttgaatcatttaacgtaccaggactctacattgcagttcaggcagtgctggccttggcggcatcttggacatctcgacaagtgggtgaacgtacgttaacggggatagtcattgacagcggagatggagtcacccatgttatcccagtggcagaaggttatgtaattggaagctgcatcaaacacatcccgattgcaggtagagatattacgtatttcattcaacagctgctaagggagagggaggtgggaatccctcctgagcagtcactggagaccgcaaaagccattaaggagaaatactgttacatttgccccgatatagtcaaggaatttgccaagtatgatgtggatccccggaagtggatcaaacagtacacgggtatcaatgcgatcaaccagaagaagtttgttatagacgttggttacgaaagattcctgggacctgaaatattctttcacccggagtttgccaacccagactttatggagtccatctcagatgttgttgatgaagtaatacagaactgccccatcgatgtgcggcgcccgctgtataagaatgtcgtactctcaggaggctccaccatgttcagggatttcggacgccgactgcagagggatttgaagagagtggtggatgctaggctgaggctcagcgaggagctcagcggcgggaggatcaagccgaagcctgtggaggtccaggtggtcacgcatcacatgcagcgctacgccgtgtggttcggaggctccatgctggcctcgactcccgagttctttcaggtctgccacaccaagaaggactatgaagagtacgggcccagcatctgccgccacaaccccgtctttggagtcatgtcctagtgtctgcctgaacgcgtcgttcgatggtgtcacgttggggaacaagtgtccttcagaacccagagaaggccgccgttctgtaaatagcgacgtcggtgttgctgcccagcagcgtgcttgcattgccggtgcatgaggcgcggcgcgggcccttcagtaaaagccatttatccgtgtgccgaccgctgtctgccagcctcctccttctcccgccctcctcaccctcgctctccctcctcctcctcctccgagctgctagctgacaaatacaattctgaaggaatccaaatgtgactttgaaaattgttagagaaaacaacattagaaaatggcgcaaaatcgttaggtcccaggagagaatgtgggggcgcaaacccttttcctcccagcctatttttgtaaataaaatgtttaaacttgaaatacaaatcgatgtttatatttcctatcattttgtattttatggtatttggtacaactggctgatactaagcacgaatagatattgatgttatggagtgctgtaatccaaagtttttaattgtgaggcatgttctgatatgtttataggcaaacaaataaaacagcaaacttttttgccacatgtttgctagaaaatgattatactttattggagtgacatgaagtttgaacactaaacagtaatgtatgagaattactacagatacatgtatcttttagttttttttgtttgaactttctggagctgttttatagaagatgatggtttgttgtcggtgagtgttggatgaaatacttccttgcaccattgtaataaaagctgttagaatatttgtaaatatc

SEQ ID NO: 328 - DNA, 1735 bp, Homo sapiens
  source 1..1735: mol_type = genomic DNA
gtgcgcgggggcccgaccaccgcggggccgggacgcgatggcggcggcagagcccgcgagctcgggccagcaggcgccggcagggcaggggcagggccagcggccgccgccgcagcctccgcaggcgcaagccccgcagccgcccccgccgccgcagctcgggggcgccgggggcggcagcagcaggcacgagaagagcctggggctgctcactaccaagttcgtgtcgctgctgcaggaggccaaggacggcgttctggatctcaaagcggctgctgatactttggctgtgaggcaaaaaaggagaatttatgatatcaccaatgtcttagagggaattgacttgattgaaaaaaagtcaaaaaacagtatccagtggaaaggtgtaggtgctggctgtaatactaaagaagtcatagatagattaagatatcttaaagctgaaattgaagatctagaactgaaggaaagagaacttgatcagcagaagttgtggctacagcaaagcatcaaaaatgtgatggacgattccattaataatagaacattttcctatgtaactcatgaagacatctgtaattgctttaatggtgatacacttttggccattcaggcaccttctggtacacaactggaggtacccattccagaaatgggtcagaatggacaaaagaaataccagatcaatctaaagagtcattcaggacctatccatgtgctgcttataaataaagagtcgagttcatctaagcccgtggtttttcctgttcccccacctgatgacctcacacagccttcctcccagtccttgactccagtgactccacagaaatccagcatggcaactcaaaatctgcctgagcaacatgtctctgaaagaagccaggctctgcagcagacatcagctacagatatatcttcagcaggatctattagtggagatatcattgatgagttaatgtcttctgacgtgtttcctctcttaaggctttctcctaccccggcagatgactacaactttaatttagatgataacgaaggagtttgtgatctgtttgatgtccagatactaaattattagattccatggaaacttgggactgttatctacctctaactgtgtaacattttagacttcttaataacctaaatatttaaaataatgaatgtaacaccttttttagttcactgattctgaagtgttcttccctaatactttctttacttcacaaaacttcaaccataaaaacaaagggctctgattgctttaggggataagtgatttaatatccacaaacgtccccactcccaaaagtaactatattctggatttcaacttttcttctaattgtgaatccttctgttttttcttcttaaggaggaaagttaaaggacactacaggtcatcaaaaacaagttggccaaggactcattacttgtcttatatttttactgccactaaactgcctgtatttctgtatgtccttctatccaaacagacgttcactgccacttgtaaagtgaaggatgtaaacgaggatatataactgtttcagtgaacagattttgtgaagtgccttctgttttagcactttaagtttatcacattttgttgacttctgacattccactttcctaggttataggaaagatctgtttatgtagtttgtttttaaaatgtgccaatgcctgtacattaacaagatttttaaaaataaaattgtataaaacattc

SEQ ID NO: 329 - DNA, 1829 bp, Homo sapiens
  source 1..1829: mol_type = genomic DNA
agttaattctgtctgggaggagtgtgtgtgtttaagacagtgcctgggatgacttataatgtaatctttaggcaaaacgctttgtaattggtgcagctctgagaacacacgcatgcattccaggcggtgctgctggggctcggcggggccgtgtctggtctgcaaggcgcgcgggctcgtggggggttggctggggagcccacgctgcctggcgactcgggccaccgaatgtgagaccgagtccctttatgtcaccagcgcacacgctgatttgaaccctgcttcgacgtgtgtgtcatggcttaaaaatagctgctaatctgtcaacctgtcttgggcagaaacagcggcggcgacagcagcaggagcgtcatggccgtggcgctgtctgcgccggcgatccgcctttcggactgaggcccagcgcagcgcttgcaaagagcagcagctacctggcaactgaacccatcatcaccacagccactcctgcagctgccacggtttctgccacctctaagatgtgccctggtaactggctttgggcttctatgacttttatggcccgcttctcccggagtagctcaaggtctcctgttcgaactcgagggaccctggaggagatgccaaccgttcaacatcctttcctcaatgtcttcgagttggagcggctcctctacacaggcaagacagcctgtaaccatgccgacgaggtctggccaggcctctatctcggagaccaggacatggctaacaaccgccgggagcttcgccgcctgggcatcacgcacgtcctcaatgcctcacacagccggtggcgaggcacgcccgaggcctatgaggggctgggcatccgctacctgggtgttgaggcccacgactcgccagcctttgacatgagcatccacttccagacggctgccgacttcatccaccgggcgctgagccagccaggagggaagatcctggtgcattgtgctgtgggcgtgagccgatccgccaccctggtactggcctacctcatgctgtaccaccaccttaccctcgtggaggccatcaagaaagtcaaagaccaccgaggcatcatccccaaccggggcttcctgaggcagctcctggccctggaccgcaggctgcggcagggtctggaagcatgaggggagggggagagaggtcaggccaggcccgtgggtaggtccctggctcccagctggagataggaggcccaggtggcaggtagcaggaggcccagatcacccatcctcccctggggtcaggagaggccgagccccaggccactgtcactctttgtgggaggggacggggagtgaggttgggcagtgtggtggatgggcacccaggaagggttgaccagggaaggaggcagctaggctgtagatggaagatggtcctgggattcgaacaccgctgggatctggccagggtgctccctgggattcacagtcccttcccctctttgtgcccaagtgtttccctctctccctcaccaaaacaaaagggccatctctgccctgcacttgtgcagaaagtcagggatacggcaagcatgaatgcaatggtgtagagttgtgtgaaacccctagcatagagacagacagcgaagagatggtgtgaaaagcttgcagaaccagacagagaaccccacagactttccactccaagcacaggaggaggtagctagcgtgtgagggttggcactaggcccacggctgctgcttgggccaaaaacatacagaggtgcatggctggcagtcttgaaattgtcactcgcttactggatccaagcgtctcgaggataaataaagatcatg

SEQ ID NO: 330 - DNA, 4485 bp, Homo sapiens
  source 1..4485: mol_type = genomic DNA
gcgcaatacgcggcacgcgccaggccaaagactaggagcgaagcgtgcacgccttgtctttctccacctttcgtctttggtcacagcgccatctcatggttagctgaaactttgaaagaggattcattcttcagaggcaaggaatcggagtcctatgtctttctcgcgccttgaaggttacttagctaaagctaagatagcgagaaacagtacttttcaggtccttccatgatctacattcgtccttgttctcggaggacccagactctatggttaatgatgaagaggggcctctattcgttcagcgcttgcgcatgcgaggaggttccgcatgcgcggtggagtgagcgaagcgcacgctgaggaggatcggcggccggtgagggggaagcaagtctggtctctgtgattgaagaagtcggctctgggctccagtgcgggaatcacacacatacctcagaatgccgggtctaagttgtagattttatcaacacaaatttcctgaggtggaagatgtagtgatggtgaatgtcagatccattgctgaaatgggggcttatgtcagcttgctggaatacaacaacattgaaggcatgattcttcttagtgaattatccagaaggcgtatccgttctatcaacaaactcatccgaattggcaggaatgagtgtgtggttgtcattagggtggacaaagaaaaaggatatattgatttgtcaaaaagaagagtttctccagaggaagcaatcaaatgtgaagacaaattcacaaaatccaaaactgtttatagcattcttcgtcatgttgctgaggtgttagaatacaccaaggatgagcagctggaaagcctattccagaggactgcctgggtctttgatgacaagtacaagagacctggatatggtgcctatgatgcatttaagcatgcagtctcagacccatctattttggatagtttagatttgaatgaagatgaacgggaagtactcattaataatattaataggcgcttgaccccacaggctgtcaaaattcgagcagatattgaagtggcttgttatggttatgaaggcattgatgctgtaaaagaagccctaagagcaggtttgaattgttctacagaaaacatgcccattaagattaatctaatagctcctcctcggtatgtaatgactacgacaaccctggagagaacagaaggcctttctgtcctcagtcaagctatggctgttatcaaagagaagattgaggaaaagaggggtgtgttcaatgttcaaatggagcccaaagtggtcacagatacagatgagactgaacttgcgaggcagatggagaggcttgaaagagaaaatgccgaagtggatggagatgatgatgcagaagaaatggaagccaaagctgaagattaactttgtgggaaacagagtccaatttaaggaacacagagcagcgcttcctggctgtaaatcctagacttgaaagttttccagtattgaaaacttcaaagctgaatattttttatttctaagtatttaaatgttctaacagatcagaacatgaaatgccctcctaaatgtcagctgttgtcacacagtagctccaacactttgagcatttttaagggagtggcctcatttcactagagacaaatctttaagaatagttctaaaattgggcttgtgatttccatttctgatgtctccagattggcacccctttctagttcaatgcctcacgagatttgccaggggcatccaaggcaaacaatcccaatctttctatataaaatgtattcaagcaaacatcaaataaatttctgggatatttaactataggcttcttccttcttgtcaccagttaaaagcattttaatactaagaccctaattcttttatctttattttagtcttgatgtggaactgtaggagcaggtgaataaaggatctctataacagatcctttcaaaagaagagttttagagaaaataaatttaactttaaccacagtgaaagttgacccttagcgggacaaagccttaaaatgcattgaaagaattagatcggttctgtgccttttatctatttgagattgatgacaacctgtgtgagagaatttatcacaccacgtccttattggaataataagctacttgccttgagtttataattcagggtggtaaagtatgtttttaaattttaaaaagcagctgcattttttatttagttggaatatcacccaattttttatttttattgctattaaaatatccactagatgccacctagagctccagttctttataacaaaacagggatctgtttgaacacttactgttgtttttttttttttacatgtttccatcatttctgtctttaagaactaattcgtacataataagtttcataggtaacacattatttgaagttacagctacagtagtcaggtgtagaaaatcttgagttgctttggtctgcttgtcttcataaatttattctcttatgatacttgaggtaccagttgtatttaattttattcattatccctagatagctattaagatacttagattagacctaacccaccatagtcaatccaagactagactactcaatattaaagggtctggaaaatagaagagtgtgttgggcaggtagtttgtaccatttatgaaggtttgttcctttgttaaatttagcagcctgtactagcttttgaaatccagaagttttaacttccagtggctggtttctgagagagtgccatgattgctagccagcattccatattgggaatatgtagaggagaacctggatgtacttaagagtggcatataattttcacttctgtctgttgaggcatcaaaaaaacaagtttagaaagctggcaacatgaagaatgcattcaaaatataacaggtgcttctttgttgtacgcagaggaattttttcttttgattttgtttactgaaatttgttatacttcaaaagccataacttgaaaaatactggtggcgtcgatggtgagtgatttttatcccacgtgggccttttgctcagttccatggcaattttgtaaattgaccctagccagagaatagatcagtatttcactgataccacgaggaaaagaacaaacaaaacttaaaagtattcatacaccttgctaacctaaaagacagcagggacaagatacatatgaggacaaggtatacacccagttctgaataacttgaagaacaggcttggcaaagaagtaagtttatccaaatcttgaatttctgccaggcatggtagctcatgcctgtaaccctggcacttaaggggccaaggcaggaggatcacttgaggccagtgagctgtgatcactccagtgcactcgagcctgggtgacagggcaagaccctgtctcaaaaaaaaaaaaaaaaaccaaaaatcttgaatctcccatcaaagccttttcattaaaaatacaatttcatctactccctactgtacctttcactgatgtcaagtggctatcaattcatatagctgaaaattagtgatagtttgggtctcatttatgcataaattaattgaaaatcagtaatggccaggaagaaatatgaatattcaaaccacttttttctttttttttttttttttttggcaaatggtgttatattgcctgggcaggtctcgaaatcctgggctcaagctatcctcctgcctctgcctctgtaagagtgtgagccaccatgccccacccaaaccatttttcatatcagttatagcaaaacaagacaaaccagttcttaataatgttcaaagttggacccatagagacatgctaagcactacatcatgctaagaagaacagttattactcagctgccatacttcagccattctacttttacaccaagaacaaaatggctagagatttttttaaaaatacaaatgccagtaccttgccgagacttgttcactgatttgccccaaccccaaggtaatggtcatctactttgcaacctatggagatcctgatagctcccatacaaagtgaggtacactgttgccaatttggaggcaggaagccatcaaactaaacgtagtttaattcagatgaacacctatcgatattcaaaaggcaaaacaaaaaaactaattccagggacattagaccttggtgaaatgccaaatggaaaatggtgctttaaaaggtagtctcttaccatataaggaataagtaaaacattagcttgtgatttctcattattcaggtcaatgttttagacacgactaacaagggacagttcaaactattaaagagaacaaatttttacttaagcactttgaggtatccactccccttaaatgtaagttatgtattttatctgttgattaaggggaggtccaagcatttgtacttggcaggaatgctggcaatagcttgtgccagattactgtataaacttgaaagtaataaaaatgttctttaaaagta

SEQ ID NO: 331 - DNA, 856 bp, Homo sapiens
  source 1..856: mol_type = genomic DNA
ggcggcggccatggcgggacaggaggatccggtgcagcgggagattcaccaggactgggctaaccgggagtacattgagataatcaccagcagcatcaagaaaatcgcagactttctcaactcgttcgatatgtcttgtcgttcaagacttgcaacactaaacgagaaattgacagcccttgaacggagaatagagtacattgaagctcgggtgacaaaaggtgagacactcagaacagtgccgtgctgctgctgggaagttgctttacacaacacaggccacatgggaaaggccccagcagccttcagctccttcctttctccttaaagagcaacagggcttattcttgtttttcttttttcaaaagtgtggcctttgggctctgccatctggggtgtggtgtggtatgtgggaagaagttcagaggaaccgttggaaacgacgttaggcattttaccttttcagtaacattttatacatctacttgtcaatgtatttgagacattcacagccaaaagcctgggactctttgtgaaggtcctcctcacctctatctttctttctctctctctcaaactttccttaaagttctcattgcctttgcactgcttctgtgaacagtctttgtctcctccccacctttggtgggaagtgcggggcagtcctggtcaagacactcatgccctggcaatgtggctgccagagaatgttgttgctaacccaccagtttcttgttgatttggagaggtcaaggccaggcccccacttggcttgaagggacattttcagacttttctttctgtcacttggagtgtctatgcctctcatatttccctaataaactcctcaactttt

SEQ ID NO: 332 - DNA, 5005 bp, Homo sapiens
  source 1..5005: mol_type = genomic DNA
atggcggcggcggcggcggccgccaccacggccgcctgcagcagcggcagcgccggcaccgacgccgcgggcgccagcggattgcagcagccgccgccgcagccccagcctcagcccgcggccgccgcgccggcccagccgccgcccgaacccccccggaagccgcgcatggacccgcggcgccgccaggctgccctctccttcctcaccaacatctcgctggacggccggctgccgccgcaggacgcggagtggggcggtggcgaggagggcggcgcggccaagccgggcgccggcggcgcctgcggcgcgaggactcggttcagcttgctcgccgctgccgagcggggcggctgcatcgcgctcgccgcgccgggcacgccggctgcggggttagccgctgggtccggcccctgcctcccacagccctcgtcgctgccgcccttgattcctggcggccatgcgaccgtgtccggccccggggtggcgcgggggttcgcgagtcccctgggcgccggccgggcgtcgggggagcagtggcagccgccccggccggcgcctctcgccgcctgtgcccaactgcagctgctcgacgggtccggggccgccgggcaggaggagttggaggaggacgatgcctttatcagcgtgcaggtgccggcggccgcctttttgggctccgggacccccgggagtgggagcggcagtcggggacgcctcaactcgttcactcagggaatcctgcccatcgccttctccaggccgacttcgcagaactactgctccctggagcagccaggccagggcggcagcaccagcgccttcgagcagctgcagaggtcccgacggcgcctcatctcccagagatcttccttggagaccctggaagatattgaggagaacgcccctctccggagatgtcgaactctctcaggttcacccagaccaaagaattttaagaagattcattttatcaagaacatgcggcaacacgataccaggaatggcagaatagtccttatcagtggcagaagatccttctgtagtatattttcagtgctgccgtatcgcgacagtacccaagtcggggacttgaagttggacggaggaagacaatcaactggtgcagtgagtttgaaagagatcattggtctggaaggtgtggagctgggtgctgatgggaagactgtttcctatacccaatttctgttacccacaaatgcctttggagcccggagaaataccatagactccacctcctctttctcccagttccgtaacctgagccaccgcagcctctccataggccgggcaagcggcacccaggggagcctcgacacaggtagtgacctgggagactttatggactatgacccaaatctcttggatgacccccagtggccttgtggcaaacacaaacgcgttctgatcttcccttcctacatgacaacagtgattgactacgtgaagccctcggatctcaagaaggacatgaacgagaccttcaaggagaagtttcctcacattaagctgacactcagcaaaattaggagtctgaaacgagagatgcggaagcttgcgcaggaggactgtggccttgaggagcccacggtggccatggccttcgtctactttgaaaagctcgccctcaaggggaaactcaacaaacagaaccggaagctgtgtgctggggcatgtgtgctgttagcagccaaaattggaagtgacctcaaaaaacacgaagtcaagcatttaattgacaaactggaagagaagttccggctgaacaggcgagaactgattgcctttgaattcccggtgttagtggccttggaattcgccctccacttgcccgagcacgaagtcatgccccactacagacggctggtccagagttcctagcactggccccgaggacagccaagggccatttcttctcagcttggtggagcagcacttacttactactggaaatgaaaaaaagtagaactcagaataccagacttttcttcctctcgacatagtttggggagaagcagtactagaaactttccaaggagtcttgggtgtgtagccaagaggagccatgagctatggactcctcaagcacgggaagaggaggtgtgtgctgagaacagagaggccctgccctctgtccactagcgagaatccctagctgccccagcccagtctttctccccggcattcacaaactttgcaagcgtggtccagggccttctccagatctgttccaacttggagtgtgaagggcttgagcatacgggggaagagagtctgcagaagttgggggaaaacttttaaaagataccctcattgtgtcaaagagtgtgccaatctatttttgtatcagcattggaagtgcactttcccctggggcgtgtgggtgtgtgaatgtgcaagtgtctgagagatactgcatcagccctagacccccagagccagtcccgccctttacagagcagcccttagcctggggccatgggtcaggctgaccttcaacaattatttctagatgatttctggataagaattgctctctcggtaccagacagtttgacatcctccacccttagaaaatgactgacattgttttgttactgctcctacccaccaaggggataaagaaggcgagttctgagtgttggatgagtcagtcgcgtggaaggacgtggagcgtggcgctctgtaacttcctgccgtctgccaccccgccacgtgtatttaaccctcgcactttctccactgtggagatggctggggcggcgccccacagtgtgtattcctgtcctctatgttagagtgcatcagaagcacatttactgtgctatctatatcgctatataaaagtgttttataaaaacccagaataggagcacgacgcatgattggtgtttgaggcgtttgccagctgggacaaactgcgtttggagctgtggttaagctgactaaggaggcggtggctctttcttaacattcccacgtgcccagggctgttcatgcaagattttaatggtgacttgtcctggcttactgggacagtctgtatgaggcatgtcaccacactgtcgcctcatagctgcaagagagaggcaccagctgaagttcccctgactgaagagagcctgtggccatgtaaaaagagaattaaactcttgttgctttttgtatacctgtatgcgtttgtgtagacgtgtgtctcaccagtcacctttgccctgcattgctgatccccttgcgcacactgattctagtgaggtcacagattcggagcttcacacaccagcccagagaaagggcgatggaaccgaaccgagggtctgcagctttcgttagcagagctgtcagattcttgacagtcttggaggatggagaaattcaagcagcagctggtgagggccaaaacagaatacttggcttcttcagaatcttagattgcactgagtttagtcctaaatattttgctaacaaatttccttggccagaatcagttgtaagacagtgatttgggtggtggggggagggaggagggagaggatatgattaatgtggtctctttggctgatcgaaagctagatcaactggtacttagggcacttgctgtttataaagcaaaattgagaaaatattcaaggtgcctccatcgcctgaactacaaaatgcccttggccttcctcacatggggtctgtcaccttgcatctctgataagccatccaccttcctggtcagtgcctacagggggagagcctttctgagaagcaggtcctgtggtatctgagaatggtctagagagctccccactgcccatctgcccccgaatttcctgccaagctctggggagtggggtggggggagggacgtccgatggatgacaggccgccagcccagacgtggggagagaagcctgagtcctttcctgtgtgataaaatcaggctaatttacttggatttggggtgatttgtttggtttttagcatttatgaggtgagcccatgaagttagtggtccattactttttaaagatgcattttcattttaaactgtctcctggcctgtggatttgtggaatggacagttttgtgggttttaatttatttgtgaggagtcggggctgagaaggcattttatcaggaggtctccttttgcacgtccatgacatgagcttttcggaggcaaaggaagtggaggagggtgagagatgcaggtcactgccagaggcacctctgtgacacggaacattccagacacgtcgcagccttgggcttcggcgaggaggaagtctgagcctgtgaagcgagaaggccaggcagtagactggctctgaggttttgccctttgacctcctccacagagggcagcttcagccccttgtaagccctgccccctctcaggactgccctgaggcctctccagtcctccccacactcagagatctgtggggaagctccgcccagccacactccttgggataatactagccggttctgcctgattccttttcccccggagccagcctagggggcccgggactcctctagtgagccttgactgttaggtaagagacaggaagcagacaagccaagaggttgctgcagctgcccccaggaggaaacgggcagcagggagtgtggcccagcccccactgtacccctccaggggcccgagcccttgccagcccaatgacaccttgaagtcaccacttttcctttcttgcccgctaataaaacctatttaaacaggaaattcataccaaatgcaaatgggttttgttttccttggcattttgttgttccgatcacagatttccctgccagggtgtctgtggttatcagctgcaggctcagcttggggcggccgcttcacacaagccactctgtaccacgtgccctaccttagtgacgggagtaaggagcttccttcccctccatgtcattccttcctgttcccttcattccccaacagcaaataaaactgttgaatgctctg

SEQ ID NO: 333 - DNA, 4570 bp, Homo sapiens
  source 1..4570: mol_type = genomic DNA
gacggaaggagctagtgggggactcgaggcctgagggcaatgcggctggaggcggaggcaacggcggctggagctgccggactttaatttttggaagtgaataaaacttgttttagaagacgagatgactacagctgtagagagaaagtatattaatattaggaaaaggctggatcagctgggataccgccagactctgacagtggagtgtttacctttggtagaaaaacttttcagcgacttagttcatacaactgagagccttcggcaatcaaaattatctgctgtgaaagctgaaaaagaaagtgccaattttgattttgttttggaaccctataaacttgaaaatgcaagattgagtagagaaaataatgaattatacctagagttaatgaaactgagagaacattcagaccaacacgttaaagagttgaaaacttcattgaagaaatgtgcacgtgaaacagctgatctgaaatttctgaataaccaatatgctcataaactcaaactgttggagaaagagagcaaagctaagaatgaaagaattcaacaacttcaagaaaagaatttgcatgctgtagtacaaactccaggtggcaagaaaagaagtattgctttcaggcgccagcgtatgcaaattgatgaaccggttcctccctctgaagtcagttcatatccagttcctcaaccagatgacccttacattgcagacctccttcaagtggctgataacaggattcaagaacttcaacaggaagtccaccagctacaagaaaagttagcaatgatggaaagtggggtgagagactatagcaagcagattgagctaagagaacgagagatagaacgactgtcagttgctttggatggtggtcggtcccctgatgtcctttctctggagtctagaaataaaaccaatgaaaagcttattgctcatttaaatattcaggttgactttcttcagcaagctaataaagacctggagaagcgtatacgagagcttatggaaaccaaggaaacagtgacatctgaagtcgttaatttaagtaacaaaaatgaaaaactctgccaagaattaactgaaatagatcagttagcacagcagttggaaagacataaagaagaagtgcttgagactgctgataaagagcttggggaagcaaagaaagagattaaaagaaagctctctgaaatgcaggatcttgaagaaacaatggcaaaacttcagctggaattgaacttatgccagaaagaaaaggagagactgagtgatgaactccttgtaaaatcagacctagaaactgttgttcatcagcttgaacaagaaaagcaaagacttagcaaaaaagttgaaagttttgcagttacagaacgacaacttactctggaggttgagaggatgagactagaacatggaataaaacgtcgagacaggtcaccttctcgtttagatacatttctgaaaggtatagaagaagaacgagattattataagaaagagctagagagactccaacatataatacagcgaagatcttgctctacaagttatagcgcacgtgaaaaaagttcaatatttagaacaccagaaaagggtgattacaattcagaaattcatcagatcacaagagaaagagatgaacttcagcgtatgctagaaagatttgaaaaatatatggaagatatacagtccaatgttaaattattgacagcagaaagagataaactaagtgtcttatataatgaagctcaggaagaattatctgccctaagaaaggaatccacccaaaccacagcaccccataatattgttagtcttatggaaaaggaaaaagaacttgcgttatctgacttaagaagaattatggcagaaaaggaagctttaagagaaaaattagagcatattgaagaagtgagtctttttggaaaatcagaattagagaaaactattgaacatttgacatgtgttaatcatcagcttgaaagcgaaaaatatgaattaaagtctaaagtgttaataatgaaagaaacaatagagtcgttagagaacaaattaaaagtccaagctcaaaaatttagccatgtggctggtgactcatctcatcagaaaacagaggtgaactcacttaggatagtgaatgagcagctacagcggtcagttgatgactatcagcaccgactttccataaaaagaggtgaacttgaatcagcccaagcacaaattaaaatactggaggaaaagatagatgaactaaaccttaagatgacttcacaggatgaggaggctcatgtaatgaaaaagaccattggtgttattgataaagaaaaagactttctccaggagactgtagatgagaagacagaaaagattgcaaatttgcaagaaaacctagctaataaagaaaaagctgttgctcaaatgaagataatgatctcagagtgtgaatcatctgtgaaccagctgaaagaaacattggttaatcgagatcgtgagataaacagcctccggcgccagcttgatgcagctcacaaagaactcgatgaagtaggaagatctagagaaatcgcttttaaggaaaacagaagactgcaagatgacctggctacaatggcaagagaaaatcaagaaatctcattggaattggaagcagcagtgcaagaaaaagaagaaatgaagagcagagttcataaatacataacagaggtgtcacgatgggagagcttaatggctgccaaggaaaaagaaaatcaagatttgttagatagatttcagatgcttcataaccgtgctgaagactgggaggtcaaagcccatcaagctgagggagaaagcagctcagttcgactggaacttctttctattgacactgagaggagacatcttcgagaaagagtggagctattagaaaaagaaattcaagagcacataaatgcccatcatgcttatgaatctcagatctcatcaatggcaaaagccatgtctcgattagaagaagagctgagacatcaagaagatgagaaagcaacagtattaaatgacttgtcatctcttagagaactttgcattaaacttgattcaggcaaagatattatgacccagcaattgaattcgaaaaaccttgagtttgagagggttgtggtggaattagaaaatgtaaagtcagagtcagacctactgaaaaaacaactttcaaatgagagacatacagttaaaaacctcgaatcattgttggctacaaacagagataaagaatttcattctcacttaacctcccacgagaaggatacagaaatccagctacttaaggagaagttaaccctttctgaaagcaaattaactagtcaaagccgggaaaacaccatgcttcgagctaaagtggcacagttacaaacagattatgatgctctgaaaaggcagatctcaactgaaagatacgaacgagaacgagcaatccaagagatgcgtcgacatggtcttgctacaccaccccttagttccactctgaggtctccttcacattctcctgaacatagaaatgtgtaattatcagaaagaataatggctttcaatgagttcctatgtggatttttaaaagaacagaacagtaatgaaatatttgaagtacttgttgctgaaaatcatgaacatggacacaaattctacctctgtcaacttttatttaaatcagtgaatatgttaaaaagtttggtttaaaagaactatatctatatgtatattttcatatatatgacagaacaagaatatgtattaatagtgcctaatgtatctatatttttattattcatgaattaaattactaaaagtatgtttatactgtgaattaatataatgtattcacattattctttaataatctgtttattaataagccatgatatgtgtatgtaaatattcttacagtacttgtttttagttgtcatgcctatgtttagaccatatcttaatgtattcacaaagaattatcaactttgatgctatgctgtcatgcttaactttttcttcttaaaattattcatagatctactgtctgttgtcaaggggaatatattcaggtctagtcttcttataatagcagaggtcttggtaaaataactaccatatataacgtgttattgccatctagaagaactatgatgagaaagatacatttatatattatgtaaaatgttaactatcatcatatggactctatgtaacacaaattcaaaagcaaactaaaagctatatgcagagttttgtataaaacaatagaacagaaatttgggacatttttctaggaaataaaattcctcggtgtattaatctaaggtttcaaagtataaaagtatatggggtaggccgggtgcagtggctcacgcctgtaatcccagcactttgggaggccgaggcgagtggatttcctaaggtcaggagtttgagaccagcctgagcaatgtggtgaaaccccatctctactaaaaatacaaaaattatctgggcttggtggcgggcacctgtaatcccagccacttgggaggctgaggcaggagaattgcttgaacccgg

SEQ ID NO: 334 - DNA, 3857 bp, Homo sapiens
  source 1..3857: mol_type = genomic DNA
agtaacgccttctccaagtggatggcggggtggacacgcgtcccggcgccccgggctccctgggatatgtagttcgcgacaggacgagcggaaatactgccaggattttaccacctctcgcccatttatttacttctcggtcaccgctttcgggggacagataaacaccacagatgcccatcaaaggggcgcacgggtctggaggcgcagctcaggtttttgcgttggtcaccctgccctccgcacgtggagagggcaggcataaagcaccttgaaaggaaggtgctgtcaatgctatccgacgacctgtcgccgggcaccgcagcatcctcgctcgctccgatgggacgagggacgccggccccagggtaacaggaggcgcctcgccggccgcgcgctggatgctgtgatccaggtccggagccgggttccgccgcggccgcagcgacccgaccccacccgacaggccagaggaatcagtttagacttgaaattcagtttttcctgaaactgatcagaagttagtgacaccttgattggatccgtttttctgtcaggagctcattttgcagctctcaagcttttatagcatgctgtaaacaattgtcaaagttgtttatcaagaaacagatagagttgcaacttgtttctagtaatagaaacttttacactgcattcaatgcctaacgttgcagaaacagaaaggtcaaatgattctggaaatggtgagcacaaatctgagagaaagtcacctgaagagaatctacaaggtgctgtaaaatctttctgcacaagtgcctcaggagcacccttgggtcccaaaggagatggtcattatccatggagttgtccagtgactcatacacgggaaaaaatttatgccatctgttcggactatgcctttctcaaccaggcgacctcaatctataaaactccaaatccatcccgctctccttgcctccctgatagtacctctttatctgctggaaataattcatcaagatacattggtatcccgactagtacatcggaaattatctacaatgaagaaaatagcttggaaaacttatccaacagcctgggcaagctacctctcgcatgggaaattgataaatctgaatttgatggggtgaccacaaattcgaaacacaaatcaggcaatgcaaagaaacaagtttccaagagaaaaacttcagataaaaagggaagatatcagaaggaatgtcctcagcattctcctcttgaagatattaaacagcggaaagtattagacctcagacgatggtactgcataagccgaccacagtataagacttcttgtggcatctcttcattaatttcttgttggaatttcttatacagcacaatgggagctggaaaccttccacctattacccaagaagaagctttacatattctgggctttcaacctccatttgaagatattaggtttggtcctttcacggggaatacaacacttatgaggtggtttagacaaattaatgaccacttccatgtaaaaggatgctcttatgttctatataagcctcatgggaagaataaaacagcaggagaaactgcttcaggggccctgtcaaagttaacccgtggattgaaagatgaatcgctggcttatatctatcattgccaaaatcattatttttgtccaattggcttcgaagcaacccctgttaaagctaataaagcattcagcaggggacctctctcaccacaggaagttgaatattggatcttaattggagaatcaagtagaaaacatcctgccattcactgtaaaaaatgggcagatattgttactgatctaaacactcaaaatccagaatacctggatatccggcacttagagaggggactgcagtatagaaaaacaaagaaggttgggggaaatttgcattgcatcatagcattccagagacttaactggcaaagatttggcctttggaactttccatttggaaccattagacaagaatcacaacctccaacacatgcccagggaattgccaaatctgagagtgaagacaatatttccaagaagcagcatgggcgtctgggccggtctttcagtgctagtttccatcaggactcggcatggaaaaagatgtctagtatccatgagagaaggaacagtggttaccagggttacagtgattacgatgggaatgattgactatgcttgctactgaacagctggcattatatatgaaactgctatatacaggactgtataaagacagtagaagattttagtaagcctacattaaataggagcagatcttgtggtataaaaaataaccttgtagttctccagatactaagcttgtatatgattatggtgggtgatttcagatatataagcagataagcacagattattgtcctttcaagttaagagtatataatctggacagaaaatttcacaaaattcaataaaattacaactgttgtctaaataagtgaaacacaaattcacttaatagcatcaagatttgaaatacttaagcatgaagtgacttttataatgactcgatccctagacatttgttacagatagttttatgcctaagaccaagatgtaaagtaccatctgcccttaaaaaaaattggggctgtcaatttctagttttcactcatggttaacacgcatttaaaattatttcatgagtctagtagttctttgatttatagcaggatcttgcttgcctcatttgtttcctggttatgttcttaggattctgactaagaggcaaaagagaaaagactcaagaaactgatcctggagatcgagaccatcctggctaacatggtgaaaccccgtctctactaaacatacaaaaaattagccgggtgtagtggtgggcacctgtagtcctagctactcgagaggctgaggcaggagaatggcgtgaacccgggaggtggagcttgcagtgagcggagatcgcgccactgcactccagcctgggcgacagggcaagactctgtctcaaaaaaaaaaaaaaaaaaaaagacggatccttttttttggtgcaaatgggtgacttagtgcattgattcagatttttaaaatttcttgatgtggtttgtaataatcaaatattgacaagaaccttaggtctcgaaagacttttataagtctagatgacgtttgccttaggggtaaagtaaaagaacaattggcaccttaagtttctatacccaaggttatctgtgaaatgagatctcctgatatttgattgctttctcagtatggagtcatatgttgataacagtactgaagatgcataagaaatgcccaagtcactcagaggacaactacccatattccagactctgagctgtttcctttttaaaaatcatatagacaattagctgtttgaagtgagtattaaatatttcagaagtgtgaatttcatgtatttgagctcctctagttgctgttggtttttcttctgctgccaacctgtgactcacaaatgactaggatctcttgttctttaattttagggtcttgttccaggactcaaatcagtaacttggtgattacaaggtgctgaatgtgttggtaaccatatcgcaatacacctcaaggaaaaggttcagatttttatttttaaaatattttcatttttttcttgaattttatatccgtttgttcactcgtacatgcctagcctacagaaggggatatatattatgaaatggtcatttttctgaagagaatattttgcttgaaatgcaaaggactgaaagagatttgtaggttgttgattttgttacttcatactggaacttttaaaaagatttcatcaaataaagttttgttttctactttt

SEQ ID NO: 335 - DNA, 1209 bp, Homo sapiens
  source 1..1209: mol_type = genomic DNA
gagaggagtctgcagagctctgccgccaccagcacatccctcctgtcagagatcgagcagagcatggaggctgaggagctggagcaggagcgagagcagctgagactgcagctctgggaagcctactgccaggttcgctatctgtgctcacaccttcgaggcaatgacagtgctgactcagccgtctccacggactcctccatggacgagtcttcagaaacctcgtccgccaaggatgtgccagccggcagcttgcgcactgccctcaatgagctcaagagactgatacagagcattgtggatggcatggagcccacgggctcccggagacttgatgatgactccttagaagaacagataaggcagaccagtgaggactcgagagccctaagggagctcatggagggagagaggggtaaactgaggcaaagcctagaagagctgcagcgactccacagtcaggtgacactgctgagtgtggagatgactgccctaaaagaggagagagaccgactcagagtcacttctgaggacaaggagccaaaggagcagcttcagaaggccatcagggaccgcgacgaggccattgcaaagaagaatgctgtggagctggaacttgccaagtgcaggatggatatgatgtctctgaacagccagttgctggatgccattcagcagaaactgaacctctcgcagcagctggaagcttggcaggatgacatgcacagggtcattgaccggcagctgatggacacgcacctgaaagaacggagccagccggctgctgccctctgcaggggccacagcgctgggcggggggatgagcccagcatcgctgaaggcaaacgactcttctcattcttcaggaaaatttaagttgggaggagtcaggccaccaaagatgggtggactggaggcagctggaaaggcggtgcaggcaaggcctcccctgcagcttgcacctcagcagctgccctgcccctcatgctagggccccatgggtccgggagggcctgctccctttcgtcggtggggatggagacctagaggtgggggcctgccttggccactgaaggcttcccttggcccaccgcctggccaagcccacgcctgggcttctccaggaccacgtgcttgagcagggttaggccacctcccagaggggccccttggtgttgggctttgcagctcacacccaacagatcgcag

SEQ ID NO: 336 - DNA, 2976 bp, Homo sapiens
  source 1..2976: mol_type = genomic DNA
ggccgttccgacctccggtcaggagggggaggaacagagcacggccggcggctgcacgggcagggcctctctgggctgagaggaagaaaccagtgagacatcgagaggaagtcgctgtggcactcagtcctacggcctccgaggctgggtagtgagtgtgtcgctggccttagccagactccacaggccacgctggctgcgaatggagccgaggactcgcgcggaggcgagatgctaccagccggcgagatcggcgcctctcctgcagccccgtgctgctctgaaagtggtgacgaaaggaagaacctcgaggagaaaagtgacataaatgttacagttcttattggaagtaaacaagtcagtgaaggtacagataatggtgatctcccttcttatgtgtctgcattcatagaaaaggaagttggaaatgaccttaaatctttaaagaaacttgataaactcatagaacagaggacagtaagtaaaatgcagttagaagaacaggtacttacaatttcatcagaaattcctaaaagaattcgaagtgccttaaaaaatgcagaagaatcaaagcaatttcttaatcagtttctggagcaggaaactcatctcttcagcgccattaacagccatttgctgactgcgcaaccttggatggacgatcttggaaccatgattagccagattgaagagatcgaacgtcatcttgcttaccttaaatggatttcacaaattgaagaactaagtgataacattcagcaatatctgatgaccaataatgtaccggaggcagcctccactctagtgtctatggcagaacttgacattaaacttcaggaatcatcttgtactcatcttcttggtttcatgagagccacagttaaattctggcataaaattctcaaggacaagcttacaagtgattttgaggaaattttagcacagcttcattggccattcatcgcaccccctcaatcacaaactgttggcttaagtcgacctgccagtgccccggagatatacagttacctggagacactgttttgtcagcttttgaaactacaaacctcagatgaattacttactgagccaaagcaactcccagaaaaatactctcttcctgcctccccttctgtcatcctgcccatccaggttatgctgactcctcttcagaagaggttcaggtatcacttcagagggaaccggcagactaatgtgttaagcaagccagaatggtacttggctcaagtacttatgtggattggaaaccatactgaatttctggatgagaagattcagccaatattagacaaagtaggctctttggtaaacgcaaggcttgaattttctcggggccttatgatgctggttcttgagaagttagccactgatattccttgtctgctatatgatgacaatctcttctgtcatttggtggatgaagtactcttgtttgaaagggagctacacagtgttcatggctatcctggcacttttgctagttgtatgcatattctatcagaggaaacctgttttcagagatggttgacggtggagagaaaatttgctcttcaaaaaatggactcaatgctttcctcagaagctgcctgggtatcgcaatataaggatatcactgacgtggatgaaatgaaagttccagattgtgcagaaacttttatgactctactcttggttataactgacaggtataaaaatcttcccacagcttcccgaaagcttcagttcctggagttacagaaggacttagtagatgattttaggatacgattaacacaagtgatgaaagaagagactagagcttcccttggctttcgatactgtgcaattcttaatgctgtgaactacatctcaacagtactagcagattgggctgacaatgttttctttctacaacttcaacaggctgcactggaggtgtttgcagagaataatactctgagtaaattgcagctaggacagctagcctctatggagagctctgtctttgatgacatgattaacctcttagaacgtttaaagcatgatatgttgacccgtcaagtagaccacgtttttagagaagttaaagatgctgcaaaattgtataaaaaagaaagatggttgtccttgccatctcagtcagagcaggcagtgatgtccctgtccagttcggcttgcccgttgctgctgacgttacgagaccatttacttcagttggagcagcagctttgtttctccttatttaaaattttctggcaaatgcttgtagagaagctggatgtatacatctaccaagaaataattcttgctaatcacttcaatgaaggaggagcagcccagctgcagtttgatatgactcggaatcttttccctttgttttctcactattgcaagagaccagaaaattattttaaacatataaaagaagcctgtattgttttgaatttgaacgtcggttctgcactactgctgaaagatgtactgcagtcagcttcagggcagcttcctgccacagcagcattaaatgaagttggaatttacaaactggctcaacaagatgttgagattctacttaatttgaggacaaattggcctaatactggaaaataatgtctttcagaaaaaggtttctttggtttttgtttctaagaaagaggaagccaattggatttcaagttatatgatgaaattctgaattaatgaaactggaaaactttatagaattacttattatcttggatttatggtgttattaaaatgctgaccatatttccttcatcctcttgttcctaaggaaacaaaaacagaaaacgaaacaatgaaaactcaattctatttacaagtataaatgctgagtatgtctgttgaagacgagcagagatattaaattataaccaactttcaatttcctgtgctaattaagggaaattctgttgtggataatcaaacatagccaataaatttttttaaaactcc

SEQ ID NO: 337 - DNA, 4598 bp, Homo sapiens
  source 1..4598: mol_type = genomic DNA
cccaggccggctctggcctcctgacccagacagcgcagggcgcgagggatcgcgcggccgagcccgggtcgcgccgctcccagcatcggggccgctagccaagagttcgaggccttcccgatccggatgtgatgaaaaagagcaacagagggagaagtgtttcaggattgtaggagtggaagaggggaaagagaggcagagagggggaaggccccctcgcaggggagccggctggagtgagctggctggaaagagggggcggagtgcgcggagtcagagccgccaccgctgccgcagttgccgccactgcggcgtctgggctgagccggagggaggcgggaggacgcgcaggggcggccgccgccgtcgtcaggccaccggggcgaaaatgcggccgctgccggaggctcgctaactttccggggcggaagaggaggaggaggaggaggaaggggcttggagcgactacggggggatgcggagaagcagtcagttccctgcacccagcacctcacagcccttcctccgtgcgccctgccgggcggcgagctaggcggcagcggcgcggcgcgggctcggcggagcggcccatgtccggcgcgggcgaagccctcgctcccgggcccgtggggccgcagcgcgtggccgaggcgggcggcggccagctgggctccacagcccagggaaaatgtgataaagacaatactgagaaagatataactcaagctaccaatagccacttcacacatggagagatgcaagaccagtccatttggggaaatccttcggatggtgaactcattagaacccaacctcagcgcttgcctcagcttcagacttcagcccaggtgccaagtggtgaggaaataggcaagataaagaacggccacacaggtctgagcaatggaaatggaattcaccacggggccaaacacggatccgcagataatcgcaaactttcagcacctgtttctcaaaaaatgcatagaaaaattcagtccagcttgtctgtaaacagcgatatcagtaagaagagcaaagtaaatgctgtcttttcccaaaagacaggctcttcacctgaagattgttgtgtccactgtatcctggcttgcttgttctgcgaattcctgaccctttgcaacattgtcctgggacaagcgtcatgtggcatctgcacctcagaagcctgctgctgttgctgtggtgacgagatgggggatgattgtaactgcccttgtgatatggactgtggcatcatggatgcctgttgtgaatcatcagactgcttggaaatctgtatggaatgctgtggaatttgttttccttcataaatatttatcttttgtttgtgttaaaactggagagtgtttaaaaatttccttttggggggaagaaaagcacattgtaagattctcatgaaacaacatggaatttgcactgttaactcattattgtaagtaatctctgaaagcctttttactttaaccaaatctacatggtttaatatgtgaaattttaactactttaactagttttataaatttcttaatatgttacaataacttagggacattttgacaccccccttcccaaatgttaaatgccttctcctttttaccgatatttctgtttcttttaaccgttctcaggagcactttgctccaaatatattatttttcagtgtgtatttaaacgaggcagtttattttgatatgtatctattcatgattgaaaggaagcagtcttggccaggcacggtggcttacacctgtaaccctggcattttgggaggccaaggtgggcagattgcctgagctcaggagttcgagaccagccagggcaacatggtgaaaccccatctctactaaaatacaaaaagttagctgggcttggcggtgtgcgcctgtagtcccagctactcaggaggctgaggcaggagaattgcttgaacccgagaggcggaagttgcagtgagccgagattgtgccactgaactccaacctgcactccagcctgggcaacagagcgagactccatctctaaataaataaataaataaataaataaataaataaataaataaacaaaccagtctttattttaaaagaaactttaggaaacaaacccacataatagttgggaaccagtgttgatctctctcccttaccttctccacttgttcaacagactctgaatgccgactgtgtggactctcttcctcagactgtggggacagatacaattccactcctgtccacaggaacatgagatttagcagactaaggagatctgtaaagaatgaaccataccacaaggcatactgaagtgaggattataagagaaataaactcaaaatgctgttggaatatgcagagaattgctaccagaatattcagtaaggtttcagggagaatgtggcatttgaggactctcttagaatgagtgattcacctgctatttaaatgaattatttagatttttgacaaagatttaggtggacaccctaaactgtgtgtgcctttaaccagttaaaagaacagtgccttcagcatacttttttattagttgtaggaatacagctttttgaaaaagctataaagtttaaattaactaaaaatatgcattttcttacacataatttaaatgttatcatacttttttgatgaaaacataatgccttagtaaaatagctctatttaataaagaagattgagtactctgacacatttcatttaaattaggaaatttttaatattaaaatcccagtgttctgagttattgaaaggctttcttttattttgagagctttaggtctttttgggatgagaacattttagttgtttagtttgtttcttaagcagtgctattttttgtaaacacagataaatggaaaccattcttttcaatgcagaagaaatctagatatcccctactgtgaccaaatttctgtattacgattttatgttaaattaaactaatatggcaggttataatgatccttaagtgtaaagaaatcagtcaattacaagagtaattgtatagttattgagacctatagtgtgtggcttagatgaaagggagagtaaattttcataccatgctctctcctactcagtttgatctctctaaaattgtagtttggtttgatttaatataattcttagtagaaattttgaaagtatgctttgggattaataattatttttaatttttctggctgaatatcaaattgatagtaacaacagaagcataattttaggaaggctttcgcaaacctagccttttaagagaggtttttaacctgaagcatgagaatatatcacctgtggtttttcctttgagatgaaacgtagtttctagttatatcattacttaaagggcttaaaaagaaaaaacttagcaaacttttgaatctttcttttattgctatttacacatacatacacacatacaaaacctttaaattttgggatctgaatataattctggtaaacagctgtcttcatttttctcctctaaagaacttaattcatttgttacataaaatataaggaaatctttatactattttacagtaaccacaatctaaatatttacatatacccaaaattaacttatgctcatatattaggatgtgagaatatcatctgtttatggacacatgaaacctcctaatgacctggaattgttagaatatttgactttttatatgcaaagtttttcaaccaagtggtttgtctaatatttaaacatgtactggcacaatttgtgatgaaaatattagcacatttgcaataatgtttctccataacagagaatgttaatggataccagaattttatttttgtatttatgttcatagtacttttcctcttgtctactccagacagttattccataaagcatttgtataattaaaaggaaaacagaaaaaggaaaagtaggcaaatgtgaaaatagtttcaatatatcttatgatttcttaatgtaaaatgttttgttgaagtatatggctatcatgactaagtgctagaatttatagttacaggcggtgtccttttaaatgtggaaaggcttttaaaatattttaaaactggacctgtattatcctgaatacactattttgaaaatttttaaaaatgacttctttattttgctttaccgtatgtttatatctaattgacatattgactaatgtttgaaagaattcaaccataagttaaaatctgaaggttatctttatcatgtttcatccctgtctgaagatttcctagtcttcttatgtaaatcacatgactcatgtccgtaaatgaactatgaaagatatcgatcagtttatgatcattgacatgtgatttcaaaacacagtgttcttttaaaaatctataatatgtcaaaatacaagttttttttttttacatcgttttagtaagttaatttcatttatttactttggagctatatttccacttagaaaaactaaggtaattttacaatatatgctgagattaaaaaccaaggtaaaaatgatcaaacatatatgaaattgagtcttagatttaatgaatttcactcgaaaataaatgatcagaagaatt

SEQ ID NO: 338 - DNA, 572 bp, Homo sapiens
  source 1..572: mol_type = genomic DNA
acagcggtcacgtgacatggccccggggagccgaggtgagcgttccagcttccggagccggagggggcccggcgtacccagcccccagcccgacgtgaccatgctgtcccgcctcctaaaagaacaccaggccaagcagaatgaacgcaaggagctgcaggaaaagaggaggcgagaggctatcactgcagcgacctgcctgacagaagctttggtggatcacctcaatgtgggtgtggcccaggcctacatgaaccagagaaagctggaccatgaggtgaagaccctacaggtccaggctgcccaatttgccaagcagacaggccagtggatcggaatggtggagaacttcaaccaggcactcaaggaaattggggatgtggagaactgggctcggagcatcgagctggacatgcgcaccattgccactgcactggaatatgtctacaaagggcagctgcagtctgccccttcctagcccctgttccctcccccaaccctatccctcctacctcacccgcagggggaaggagggaggctgacaagccttgaataaaacacaagcctccgtt

SEQ ID NO: 339 - DNA, 2527 bp, Homo sapiens
  source 1..2527: mol_type = genomic DNA
ctccagcagcacccgagagggtcaggagaaaagcggaggaagctgggtaggccctgaggggcctcggtaagccatcatgaccacccggcaagccacgaaggatcccctcctccggggtgtatctcctacccctagcaagattccggtacgctctcagaaacgcacgcctttccccactgttacatcgtgcgccgtggaccaggagaaccaagatccaaggagatgggtgcagaaaccaccgctcaatattcaacgccccctcgttgattcagcaggccccaggccgaaagccaggcaccaggcagagacatcacaaagattggtggggatcagtcagcctcggaaccccttggaagagctcaggcctagccctaggggtcaaaatgtggggcctgggccccctgcccagacagaggctccagggaccatagagtttgtggctgaccctgcagccctggccaccatcctgtcaggtgagggtgtgaagagctgtcacctggggcgccagcctagtctggctaaaagagtactggttcgaggaagtcagggaggcaccacccagagggtccagggtgttcgggcctctgcatatttggcccccagaacccccacccaccgactggaccctgccagggcttcctgcttctctaggctggagggaccaggacctcgaggccggacattgtgcccccagaggctacaggctctgatttcaccttcaggaccttcctttcacccttccactcgccccagtttccaggagctaagaagggagacagctggcagcagccggacttcagtgagccaggcctcaggattgctcctggagaccccagtccagcctgctttctctcttcctaaaggagaacgcgaggttgtcactcactcagatgaaggaggtgtggcctctcttggtctggcccagcgagtaccattaagagaaaaccgagaaatgtcacataccagggacagccatgactcccacctgatgccctcccctgcccctgtggcccagcccttgcctggccatgtggtgccatgtccatcaccctttggacgggctcagcgtgtaccctccccaggccctccaactctgacctcatattcagtgttgcggcgtctcaccgttcaacctaaaacccggttcacacccatgccatcaacccccagagttcagcaggcccagtggctgcgtggtgtctcccctcagtcctgctctgaagatcctgccctgccctgggagcaggttgccgtccggttgtttgaccaggagagttgtataaggtcactggagggttctgggaaaccaccggtggccactccttctggaccccactctaacagaacccccagcctccaggaggtgaagattcaacgcatcggtatcctgcaacagctgttgagacaggaagtagaggggctggtagggggccagtgtgtccctcttaatggaggctcttctctggatatggttgaacttcagcccctgctgactgagatttctagaactctgaatgccacagagcataactctgggacttcccaccttcctggactgttaaaacactcagggctgccaaagccctgtcttccagaggagtgcggggaaccacagccctgccctccggcagagcctgggcccccagaggccttctgtaggagtgagcctgagataccagagccctccctccaggaacagcttgaagtaccagagccctaccctccagcagaacccaggcccctagagtcctgctgtaggagtgagcctgagataccggagtcctctcgccaggaacagcttgaggtacctgagccctgccctccagcagaacccaggcccctagagtcctactgtaggattgagcctgagataccggagtcctctcgccaggaacagcttgaggtacctgagccctgccctccagcagaacccgggccccttcagcccagcacccaggggcagtctggacccccagggccctgccctagggtagagctgggggcatcagagccctgcaccctggaacatagaagtctagagtccagtctaccaccctgctgcagtcagtgggctccagcaaccaccagcctgatcttctcttcccaacacccgctttgtgccagcccccctatctgctcactccagtctttgagacccccagcaggccaggcaggcctcagcaatctggcccctcgaaccctagccctgagggagcgcctcaaatcgtgtttaaccgccatccactgcttccacgaggctcgtctggacgatgagtgtgccttttacaccagccgagcccctccctcaggccccacccgggtctgcaccaaccctgtggctacattactcgaatggcaggatgccctgtgtttcattccagttggttctgctgccccccagggctctccatgatgagacaaccactcctgccctgccgtacttcttccttttagcccttatttattgtcggtctgcccatgggactgggagccgcccacttttgtcctcaataaagtttctaaagta

SEQ ID NO: 340 - DNA, 2092 bp, Homo sapiens
  source 1..2092: mol_type = genomic DNA
agagggactcccagctccagctcacccattctacacttgctcttttgctcccaaccaggaagccatcatgtcttgccgctcctaccgagtcagctctggtcaccgggtgggcaacttcagctcttgttcagcaatgacaccacagaacctgaatcgcttccgggccaactctgtctcctgttggagtgggcctggattccggggccttggcagctttggtagtcggagtgtcatcacctttggatcgtactcaccccggatagcagctgtaggctctcggcccatccactgtggagtccgctttggtgctggctgtgggatgggttttggtgatgggagaggtgttggtctggggcctagggctgacagctgtgttggtctgggctttggagctggcagtggcattggctatggctttggtggccctggctttggttacagagttggaggggttggagtcccagcagccccatctatcacagctgtgactgtgaacaagagcctactgacccccctcaacctggagattgaccccaatgcccagagggtgaagaaggatgagaaggagcaaatcaagaccctcaacaacaagtttgcctccttcattgacaaggttcggttcctagagcagcagaataagctcctagagaccaagtggagcttcctccaagagcagaaatgtatcaggagcaatctggagccactcttcgagagctacatcaccaacctgcggaggcagttggaggtgctggtcagtgatcaggcccggctccaggctgagaggaaccacctgcaggatgtcctagagggcttcaagaagaagtatgaagaggaagtggtatgtcgggccaatgctgagaatgagtttgtggctctgaagaaggatgtggatgcagctttcatgaacaagtctgatctcgaggccaacgtggataccctaactcaggaaattgactttctaaaaacgctttacatggaggaaatccagttgctgcagtcgcacatctcagagacgtcggtcattgtgaagatggacaacagccgtgacctgaaccttgatgggatcattgctgaggtcaaggcccagtatgaggaggtggccaggcgcagccgggctgatgctgaggcctggtaccagaccaagtatgaagagatgcaggtgacagctggccaacactgtgacaacctgcgcaacatacggaacgagatcaacgaactgacccgcctgatccagaggcttaaggcagagattgagcacgccaaggctcagcgtgccaagttggaggctgcagtggccgaggccgagcagcagggcgaggcgaccctcagtgatgccaaatgcaagctggcagatctggagtgtgccctgcagcaggccaagcaggacatggcgcggcagctgtgcgagtaccaggagctgatgaatgccaagctgggcctggacatcgagatcgccacctacaggcgcctgctggagggcgaggagagccggctctgtgaaggtgttggaccagtaaacatatccgtcagcagctcccggggcggcctggtgtgcgggcctgagcctttggttgccggctccaccctctcccgcggcggggtcaccttctcaggtagcagcagcgtctgtgccaccagtggggtcctggcttcctgtggccccagcctgggtggagcccgggtcgccccggccactggggacctgctgagcactggcacaaggagtggctccatgctcatcagcgaggcctgtgtccccagcgtcccctgccccctgcccacccaggggggcttcagcagctgcagcggcggccgcagctccagcgtccgctttgtgtccaccaccacctcctgccggaccaagtactgagagcccagccccagacagctgctgcccagagaagaaccagctccacggctcctgcttctgcccccagggttcgtgggctctgggcttgacggtctccagctcccctttctgccaggaagccaccccttagcactcccccgattattctgcctggccccatgtcctcttggaggatttttctgccatgtagatgctccattagcagttccagctaagctggct

SEQ ID NO: 341 - DNA, 2664 bp, Homo sapiens
  source 1..2664: mol_type = genomic DNA
gggaagctgagcctgacttgatcatcctgccccggttctttcctccagggccgcatttctctgcctctctctcctgccatgtcgtaccactctttccagccaggctccaggtgtggcagtcagagtttcagctcatactcggctgtcatgccccggatggtcacccactatgcagtgagcaaggggccatgccggcccgggggtggtaggggcctccgagctctgggctgccttggctcacggagcctgtgcaacgtgggctttgggaggccccgggtagcctccaggtgtggaggtaccctgcctggcttcgggtaccgactgggagccacctgtgggccttctgcctgcatcacccctgtcaccatcaatgagagcctgctggtcccactggcactggagatagacccgactgtgcagagggtaaagagggatgagaaggagcagatcaagtgcctcaacaaccgtttcgcatctttcatcaacaaggtccgtttcctggagcagaagaacaagctgctggagaccaagtggaacttcatgcagcagcagaggtgctgccagaccaacatcgagcccatcttcgagggctatatcagcgcccttcggcggcagctggactgtgtgtccggggaccgcgtgaggctagagtcagagctctgcagcctccaggctgcactggagggctacaagaaaaaatacgaagaggagctctccctgcgtccctgtgttgagaatgagtttgttgccttgaagaaggacgtggacacagccttcctgatgaaggctgacctggagaccaacgcagaggcactcgtgcaggagatcgacttcctgaaaagcctgtatgaggaggagatctgcctgctccagtctcagatctctgagacctcggtcattgtgaagatggacaacagccgggagctggacgtggacggcatcatcgctgagatcaaggcgcagtatgacgacatcgccagccgcagcaaagccgaagcagaggcctggtaccagtgccggtatgaggagctgagagtcacagctgggaaccactgtgacaacctccgcaaccgtaagaacgagatcctggaaatgaataaactgatccagcggctgcagcaagaaaccgagaatgtcaaagcccagcgctgcaaacttgagggtgccatagctgaggcagagcagcagggcgaggcggctctcaatgatgccaagtgcaagctggcagggctggaggaggctctgcagaaggccaagcaggacatggcctgcctgctcaaggaatatcaggaggtgatgaactccaagctgggcctggacatcgagatcgccacctacaggcgcctgctggagggtgaagagcacaggctgtgcgaaggcatcgggcccgtgaatatctcagtgagcagctccaaaggcgccttcctgtacgagccatgtggggtcagcacgcctgtcctcagcactggcgtcctcaggagcaatgggggctgcagcatcgtgggcactggtgaactctatgtcccctgcgagccccaggggctactgagctgtgggagcgggcggaaatccagcatgacgctaggagctgggggcagctcccccagccacaagcattagcatgatccgagacatccaggagacagagcccctgccccatggccctggatgtcacactcccaccagggctgaagacaaggatgttccaaaaccccacctccctttattgactccacattcccctccagtgttccctccttgagagctgagctgcccctaggacccctcctttgcctcatgagtcaccttccactcacctgtgtgcagaccctcagctaggcccagatggtggggacagacggcagagaaagagcatgcattgctcttaaccgcagaatggcaataacccccaaaaggtcaaatgggcacaccacagttctgctctgtggatcatcccatggaagtttcctcacaaagtcagctcctctcccaccacaggctcacactgcccttactttaggctctcatgcccctaagaaaagtgaatttcctttaacaccgcctgaaacatgcacactgcaaatatcaaaaggagacacccccaaatcccactctaaattccaaagccaagtgccacgatttcaggatcagtcaggacctgccaatgtcctctcagcacagagaatcaagaggtggcctttgggcagtagatttactttctcaggtatgttgaacccaaactgtgagaataaatctttctcctgagctcacattggcaggtgatgtcaggccaatgcctagaacaaagggcaaagggatatggaatgtttactggacagttggaaaaccaaaaacagataccattttctcaatggaatcagttccccctccacccatccccttctgtacatagccgccccttcctgttccccaaccctttagctccttttgctttgagtctgatatgacagtgatgtggggctgccccagctgacttggaggccctggctcaggagctcatagatggaggaggtgtgggctgactacctcccagaagcccctcatgccaagcctgtcccactggggctccagggcctctgccctgaacatctgggcttctgttcaaaataaacctactctgttcatggattatagcaatcagga

SEQ ID NO: 342 - DNA, 1916 bp, Homo sapiens
  source 1..1916: mol_type = genomic DNA
agagtagcggaagtggtccgttctcttcctctcccggcccaagcttctgggtatttctattgcgcgaggcattgtgggttgctgggcggcccggtctcggagaagaggggagagtggcgggccgctgaataagcttccaaaatgatgcccacaccagttatcctattgaaagaggggactgatagctcccaaggcatcccccagcttgtgagtaacatcagtgcctgccaggtgattgctgaggctgtaagaactaccctgggtccccgtggcatggacaagcttattgtagatggcagaggcaaagcaacaatttctaatgatggggccacaattctgaaacttcttgatgttgtccatcctgcagcaaagactttggtagacattgccaaatcccaagatgctgaggtgggtgatggcaccacctcagtgaccttgctggctgcagagtttctgaagcaggtgaaaccctatgtggaggaaggtttacacccccagatcatcattcgagctttccgcacagccacccagctggcagttaacaagatcaaagagattgctgtgaccgtgaagaaggcagataaagtggagcagaggaagctgctggaaaagtgtgccatgaccgctctgagctccaagctgatctcccagcagaaagctttctttgctaagatggtggtggatgcagtgatgatgctcgatgatttgctgcagcttaaaatgattggaatcaagaaggtacagggtggagccctcgaggattctcagctggtagctggtgttgcattcaagaagactttctcttacgctgggtttgaaatgcaacccaaaaagtaccacaatcccaagattgcccttttgaatgtcgagctcgagttgaaagctgagaaagacaatgctgagataagagtccacacagttgaggattatcaggcaattgttgatgctgagtggaacattctctatgacaagttagagaagatccatcattctggagccaaagttgtcttgtccaaactccccattggggatgtggccacccagtactttgctgacagggacatgttctgtgctggccgagtacctgaggaggatctgaagaggacaatgatggcctgtggaggctcaatccagaccagtgtgaatgctctgtcagcagatgtgctgggtcgatgccaggtgtttgaagagacccagattggaggcgagaggtacaatttttttactggctgccccaaggccaagacatgcaccttcattctccgtggcggcgccgagcagtttatggaggagacagagcggtccctgcatgatgccatcatgatcgtcaggagggccatcaagaatgattcagtggtggctggtggcggggccattgagatggaactctccaagtacctgcgggattactcaaggactattccaggaaaacagcagctgttgattggggcatatgccaaggccttggagattatcccacgccagctgtgtgacaatgctggctttgatgccacaaacattctcaacaagctgcgggctcggcatgcccaggggggtacatggtatggagtagacatcaacaacgaggacattgctgacaactttgaagctttcgtgtgggagccagctatggtgcggatcaatgcgctgacagcagcctctgaggctgcgtgcctgatcgtgtctgtagatgaaaccatcaagaacccccgctcgactgtggatgctcccacagcagcaggccggggccgtggtcgtggccgcccccactgagaggcaccccacccatcacatggctggctggctgctgggtgcacttaccctccttggcttggttacttcattttacaaggaaggggtagtaattggcccactctcttcttactggaggctatttaaataaaatgtaagacttc

SEQ ID NO: 343 - DNA, 4515 bp, Homo sapiens
  source 1..4515: mol_type = genomic DNA
gccgcccgccacctcggcggcctcgcaacccgtgggagcccgtggccatcgcagacctagaggacacgttgggcggcgcagtcgccgcggcaaggtcggcgggcggcgcggcgcgagggacggcgagcggggggcggcccggcccgggtcctcgcgggtcctcggcgggcccgggggagggccctctttgtggctgcagttggcaagatggcgccggtgggggtggagaagaagctgctgctaggtcccaacgggcccgcggtggcggccgccggcgacctgaccagtgaggaggaggaaggccagagcctatggtcctccattctgagcgaagtgtccacccgcgccaggtccaagctgccgtccggcaagaacatcctggtcttcggtgaagatggttctggtaaaacaaccctcatgactaaactacaaggagctgagcatggcaaaaaaggaagaggcctagaatatctctacctcagtgtccatgatgaggaccgagatgatcacacgcgctgcaacgtgtggattctggatggagacttgtaccacaaaggcctgctgaaatttgcagtttctgctgaatccttgccagagaccctcgtcatttttgttgcagacatgtctagaccttggactgtgatggaatctctgcagaaatgggctagtgttttacgtgagcacattgataaaatgaaaattccaccagaaaaaatgagggagctggaacggaagtttgtgaaagattttcaagactatatggaacctgaagaaggttgtcaaggttccccacagagaagaggccctctgacctcaggctccgatgaagaaaatgttgccctgcctctgggtgacaatgtgctgactcataacctggggatcccggtgttggtggtgtgcacaaagtgtgatgcggtgagtgtcctggagaaggagcacgattacagggatgagcatttggactttatccagtcacacctgcggaggttctgccttcagtatggagctgccttgatttacacatcagtgaaagaagagaaaaacctcgacttgttgtataagtatattgttcataaaacatacggtttccacttcaccacacctgccttagttgtggaaaaggatgccgtttttatacctgcaggctgggacaatgaaaagaaaatagctattttacatgaaaattttacaaccgtgaagccggaagatgcatatgaagactttattgtgaaacctcccgtgagaaagctggtccacgacaaagagttggcagcagaagatgagcaggtgttcctaatgaagcaacagtcactccttgccaagcaaccagccactcccacgagagcttctgaatctcctgcaagaggaccctctggctctccaaggacccagggtcggggagggccagccagtgtgcctagctcctccccaggcacgtcagtaaaaaagccggacccaaacatcaaaaataatgcagcaagtgaaggggtgttggccagcttcttcaacagtctgttgagtaaaaagacaggctctcctggaagtcctggtgctggtggggtgcagagcacagccaagaagtcaggacaaaagactgtgttgtcaaatgttcaggaagaactggatagaatgactcgaaagccagactctatggtaacaaactcttcaacagaaaatgaagcctgaacctccttaaaaagtgcatatgtcgaatgaccaaataactatgtatattgatctgctaagaccaggatttttctgatatggcacatgctatcagttttttggggcaggggagatgaactttaaaaaaaaaaaaaaaacttcattggcttgtccgagtgtgaaatgcacatttaggaaggttacatgtcagaccctttgttaaggataacccttggactctggggcatgtggctcttttgtgggaggcaagcacatctgggcttcttgtggaggggaaggtagagtgaaagaaagagggcccactttctaacagggtggagcaaatgagaccaagaaatcattggtaagatgatggttagtctgaccagtttcatgttagtaaattcacttgttcttgggaagcagattaagtagcagaaagtccaggaaagaaagaccagaaggagtaatgagacaagtgatggtggggaagctgaatgttgagggaggtggaggaaggaggagatgagcagtgtcagtaaatactgtgcattcagtagaagttgaagaatcattgttagaagcatttccaaacaaaacactaagcaaaatgggaattaggcttattttgaatgcatctttaacttacgaaagatgtactaattgtgggggtgcctgagtcaggcggagctgacccaggggtgggaacgatggcagctgcccaggacccatgtgcttggcccaggctatgtcctcgtgagaggtactggggtccacggatatgtgttgtggggcagacagtcactgtgggatgtcttcaaagtcagcagttacagaattagtttactttgaattttgttgtctaaatagctcctgctttattttttaaattaaattttttgtttttactatcacaggctggcctaactaatacaaaataggtgatgaacctctggttttaccataatgcaatgtgccacggaaagtttgggggaggtttttaatgtaattgcactctggttaattggctcgtaccaagccctgccttatgacttgtggaaagcttcaaggagttccactgatgcaaaagggtcttttcctagcttcctggtctgatcagtgctatgagatggacagataagtgtgaatgttttatacagaaaatggaaatgatacatttctcttgttaggtgttttcataaaatgtagcattttttttcttatggaaataagagtttcaggtgtctccccacctagggcaaattcatgcacattgtcatgttataccaccattctggaaatgatttctgtggatttgaaattgcacttttaattttatatatgacagcatttaaatgcaaacactaccatgaatttaatgtataaaatgttgtcaaaccaagggaaaaaaccacagttcaccatgtggagtttactttttttatatgaatgtttgttgtactgtgtctaagcataacttccctaatgtcattacttttacataccagatttgactgaccactaatgtagtactggggataacttaatatcctatgttgtgtcaagactctttgaagactttcttgaattgctttcgtaaaggtctgaacactgttaaggagaaagctgagtatcaacttgcctttctgatagaaatgtttcttgtgccagttttattgttgagatatactatttttttccttttttaattcagttttttaaaaaaacaaatgtattgtggcttccagttaccaggttgtctaggtaatgacagtaaactgactgtagaatgataattgtggtatagtgaccaatagatgccaaacagcttgtggcctcactaaaggtggggtcgcttagtccccgggagtaaaatgagtgacctcagaaacaagaattcctggaaaggcacatgccgaagaggaatatggtataattttaaattttaatgcaaaattttaatttgtctttattttttatcatttgaactgataagcactttttgtgtcaatataaaatatactaaaactgatgaaatgctaagacatgtcttgtgaaggaaggtttcttggagaccacttttatttactcatgagaagtggaagctcctagtatcagaagaagctgatacatagtgtcatgtgctcagtggttgccaaagtctaccaactttggggagctgcagggttctttttgggaggtgggaggaagggagatgagttttgttattttggggttttcaagcattggaaccaaaggccaaataataaacagcctttagtttttaaagtaaaattcattttatttgcagagtacacttgtatggtagactgttaaagacaattttatgactatttatgcacattataatggttacatctgctttttgtctttaaaataaaaaaaaaaatcagagaaaagcccacctttgaatacgtggctgaagataacagccaagaattggtctttcctaaaaatgcaacagataatgctgctagattgttattttgtttgcacttttttttgattggcattttaaaatcggtatttaaactgaagacattgtcatgttttattaatttaacaaagttgaaagtgactgctctgtacatcatgaccttaacaatgttaatgctgtaagtgaaagttcactgtcgtctgtatactaaatttattggtgtttctaacttaaaagtaagactgcagattatcccccaccagccttagtccaggggtgtggctctgtccgggtgcagtatgcagtcatgtggaaccttgctttctagtcctgggaaaaaaagatgtctctaattactggcttcaataaacacgaatccagactgcttacaa

SEQ ID NO: 344 - DNA, 880 bp, Homo sapiens
  source 1..880: mol_type = genomic DNA
acacaaaggggtggtcaccctgccctcaccttgacctgtaagttgcctaggacagtggcctggtcccaggggctgttgtggggagttgaagaacaccctggcctcctccatcatgtcggccaagagggcagaattgaagaaaacacatctgagcaagaactacaaggcagtttgcctggaattgaagccagagccgaccaaaacatttgattacaaagcagttaaacaagaagggcggtttaccaaagcaggagtgacacaggacctaaagaatgaactcagggaagtgagagaagagctcaaggagaaaatggaggagataaaacagataaaggatctaatggacaaggattttgataaacttcacgaatttgtggaaattatgaaggaaatgcagaaagatatggatgagaagatggacattttaataaatacacagaagaactataagcttccccttagaagagcaccaaaggagcagcaggaactcaggctgatgggaaagactcacagagaaccacagctcaggcccaagaaaatggatggagccagtggagtcaatggagcaccctgtgctcttcacaagaagacgatggcaccacaaaaaacaaaacagggctcactggatccccttcatcactgtgggacctgctgcgagaaatgtttgttgtgtgctctaaagaacaactacaatcgggctgctcccctaaaggaagctcgtcacctcctgacagccaattctattgacccttctgcagctcttgttcttctgattgagttcctgcttttgaccctggtaacaggtgcggcagccccaggccttgacgcatgtggtcatcagagaaacatgagggatgaaataaactcagagagaaggtaa

SEQ ID NO: 345 - DNA, 4730 bp, Homo sapiens
  source 1..4730: mol_type = genomic DNA
ttcagactgacagacttcaaggatgcagctgctactaccggaggtgtgtggcaccttacctcagcaaggccatgagaccgtgtggccatgatgtgggcccctcatggcctcagcaggaacacagcactatagtattggcctccgccagaaaaacagcttcaagcagagtggtccctcaggcacagtacctgccacgccacctgagaaaccctcggagggcagagtctggcctcaggcccatcagcaagtgaagccaatctggaagctggaaaagaagcaagtggagacactgtcagcagggttgggcccaggcctcttgggcgtcccaccccagccagcatatttcttttgccccagcactttatgtagctctgggaccacggctgtcattgcaggccacagcagttcctgttacctacactctctcccggacttgttcaacagcaccctgctataccgccgctccagctataggcaaaaaccgtaccagcaactggagtctttctgcttgcgttcgagcccgtcagaaaaaagccctttttctctccctcaaaagagcctccctgtcagtctcactgccaacaaggccacttcttccatggtcttctccatggcccagcccatggcctcctcatccacagaaccatacctctgcttggcagcggctggggaaaacccttcagggaagagcctggcctctgccatctcagggaagatcccatctccactctcttcctcctataagcccatgctgaataataattccttcatgtggccaaatagcacgccagtgcctttattgcagaccacacagggcctgaagccagtatcgccacccaagatccagcctgtctcctggcatcattcagggggtactggagactgtgcaccgcagcctgttgaccataaggtgcccaaaagcattggcactgtcccagctgatgccagtgcccatatcgccttgtctaccgctagctcccacgacacatccaccaccagtgttgcctcttcctggtataaccggaataacttagccatgagggcagagccactttcctgtgctctggatgacagctctgattcccaggatccaactaaggagattcggttcactgaggccgtgaggaaattgaccgcaagaggctttgagaagatgccgaggcaaggctgccagcttgaacagtctagtttcctgaaccccagcttccagtggaatgtcctcaacaggagcaggcggtggaaacctcctgcggtaaatcagcagtttcctcaggaggatgctggatcggtcaggcgggtcctccctggtgcctcagataccttggggttggacaatacagtcttctgtaccaagcgtatcagcattcacctccttgcctcacatgccagtgggctcaatcacaaccctgcctgtgaatctgtaattgactcctcagcatttggagaaggcaaagctccaggtcccccttttcctcaaactcttggcatagccaacgtggccacccgcctctcttccatccagctgggccagtctgagaaggagagacctgaggaggccagggagctggactcatctgatagggatattagttcagctactgacctccagccagatcaggctgagactgaagatacagaagaagaactagtagatggtttggaagactgttgtagccgtgatgagaatgaagaggaggagggagactcagagtgctcctcattaagtgctgtctcccccagcgaatcggtggccatgatctctagaagctgtatggaaattctgaccaaacccctttccaatcatgagaaagttgtccgaccagccctcatctacagtctctttcccaacgttccccctaccatctattttggcactcgggatgagagagtggagaaacttccctgggaacagaggaagttgctccgatggaagatgagcacagtgacccccaacattgtcaagcagaccattggacggtcccacttcaaaatcagcaaaagaaacgatgactggctgggctgctggggtcaccacatgaagtctcctagtttccgatccattcgagagcatcagaagctaaaccatttcccaggctcattccagattgggaggaaggaccggctatggcggaacctgtcacgtatgcagagccgctttggcaagaaggagttcagtttcttcccccagtcctttatcctgccccaggacgccaagctcctgcgcaaagcgtgggagagcagcagccgccaaaagtggattgtgaagccaccagcatcagctcgaggcattggcatccaggttattcacaagtggagtcagctccccaagcgaaggcccctcctggtacagaggtatctacacaaaccctacctcatcagcggcagcaagtttgacctgcggatctatgtttatgtcacttcctacgatcctctgcggatttacctcttttcagatggactggtccgctttgccagttgcaagtattcgccttccatgaagagccttggcaataagttcatgcacctgaccaactacagtgtcaataaaaagaatgccgagtaccaggccaatgcagatgaaatggcttgccagggccacaaatgggcactgaaggctttgtggaactacctgagccagaagggagtcaatagcgacgccatctgggagaagataaaggatgttgttgtcaaaactatcatctcgtcagagccctatgtgaccagcctgctcaagatgtatgtgcgacggccctatagctgccatgaactctttggttttgacatcatgctagacgaaaacctcaagccctgggtcctggaagtcaacatttccccaagcctccactccagctctccactggatatcagcatcaaaggccagatgattcgtgaccttctgaatctggcaggttttgtcctgcccaatgcagaggatatcatttccagccccagcagctgcagcagctccaccaccagcctgcccacctcccctggggacaaatgtcgaatggctccagagcatgtcactgcacagaagatgaagaaagcctattatctgacccagaaaattcctgatcaggacttctatgcatctgtgctggatgtcctgacaccagatgatgttcggattctggttgagatggaagatgagttttctcgccgtggtcagtttgaacgaatttttccttctcatatctcctctcgctatctccgcttttttgagcagccacgatatttcaacattctcaccacccaatgggaacagaaataccatggcaacaagcttaaaggagtagatctgctccggagttggtgctacaaagggttccacatgggagttgtctctgattctgctccagtgtggtctctcccgacatcacttctgactatctcaaaggatgacgtgatactcaatgccttcagcaaatcagagactagcaagctgggaaaacaaagctcctgtgaggttagcctactactctctgaagacgggaccacgcccaaatccaagaagactcaagctggcctttccccttatccccagaaacccagttcctcaaaggacagtgaggacaccagcaaagagcccagcctttctacccagacgttacctgtgatcaagtgctctgggcagacttcaagactttctgcttcctccactttccagtcaatcagtgactccctcctggctgtgagcccataactggcctctctccaaaagcctctgcccaggagcatgggcatcagctacctcacgggaaccagcctgctgttcagaccagtctgaccccctacccctttcaccctgtccctcctcagagtattttttgaagtggttgcattatagagatgggtatttgtagggccggagggatggtagtgatggggagaaggtgaggaagggtcaccctctgtcacctgtctgcctggctggcacctcatatctcagcagagaagccagtggtggccacgcagccttataaagcaggttttggtttctaccttaagtgagccatgtgtggtttgtctgggggccctggtgtggttgctgagttgtagctcaagaggagaaaacatacagaacatatttggaccggaaatcctttgttctgaatttgagggggtcttctgaggtccttacttccttaggtctttcctcacccctctcccaccgctgtcctgaggagaaacccttgaacttcctcagtagacaggcggagaggccacaacatgccgaacccatttcctgtcatcctagtcttgggtcttcaccgcctccttccaaatacccaccctgccagcagccctaggtcttcctgttctgaccccccatcactgctcgttcagccttctagatgtctctctcgtggacatctgttctttagctgttggctttctctgaggtgtgagagggtctatgaactttgtgaatttcccatggccccagtgaaggagcccagataatcccagtagctgttacctgtctccatgtatcaaaggacacagtccagggggagggtggaaggagatgtggtttctctatagtgcaacaaacatggtttctcaatgttctgctgtgcagcaagcagggtctggcggcttggtaggtgggtttcaggagcagtcactattgtaggatgggcttccaatcaaacctcagactaaactcttgtactgaactgattctacctccctcctctagactcagtaaacagtgactattcaataaa

SEQ ID NO: 346 - DNA, 7547 bp, Homo sapiens
  source 1..7547: mol_type = genomic DNA
agcagaggccgagagcggcgagccgcgagccaggcagtccggggcatccagactgcaggccgcgcccaggccgcgcccaggctgcgccgcccgcctgcctcccgcgctgccgcgtcgccagtgctagcgctcctctccagcatgctgcggcggggcagccaggcgctccggcgcttctccactggccgggtttatttcaaaaacaagctgaagttggcactaattggccagagcctctttggacaagaagtctatagccacctccgcaaagagggccaccgagtagtaggggtgttcacagttccagacaaggatggaaaagctgaccctctggctttggctgcagagaaagatgggacccctgtgttcaagcttcctaaatggagggtcaagggcaagaccatcaaagaagtggcagaagcctacagatccgtgggtgcagagctaaatgtgctccctttctgcactcagttcattcccatggatataattgatagtccaaagcacggctctatcatttatcacccatccatcctgcccaggcacagaggagcctctgctatcaattggactctaattatgggagataagaaagctgggttttctgttttctgggctgatgatggcttggatacaggacccatccttcttcagagatcatgtgatgttgaacccaatgatacagtggatgcactttataatcggtttctttttcctgaaggaatcaaggccatggtagaagctgtccaactcatagctgatggaaaagctcctcgtataccccagccagaagaaggggcaacatatgaaggtatccagaaaaaggaaaatgctgagatttcttgggaccagtctgccgaagttttacataactggattcgaggtcatgataaagtccctggagcttggacagagataaatggacagatggtcactttctatggctcgacattactgaatagctctgtgcctcctggagaaccactggaaattaaaggtgccaagaagcctggtctcgttaccaaaaatggacttgttctttttggtaacgatggaaaagcactgacggtgagaaatctgcagtttgaagatggaaaaatgatccctgcctctcagtacttttcaacgggtgagacgtcagtggtagaactgacagctgaagaggtgaaagtggcagagaccatcaaggtcatctgggctggaattttaagcaatgtccccattattgaagactcaacagacttctttaaatctggagcaagctcaatggatgttgccaggctggttgaagagatcagacagaaatgtggtgggcttcagttgcagaatgaagatgtctatatggccaccaagtttgaaggctttatccaaaaggtcgtgaggaaactgagaggagaagatcaagaggtggagctggttgtagattatatttcaaaggaggtcaatgaaatcatggtaaaaatgccataccagtgtttcataaatggacagttcacagatgcagacgatggaaagacttacgacactatcaacccaacagatggatctacaatatgcaaagtatcctacgcttctttggcggatgttgataaagcagtagcagcagcaaaagatgcttttgaaaacggtgaatggggaagaatgaatgcaagagaaagaggaagattgatgtatagacttgcagacctactggaagagaaccaagaagagctggcaactattgaagcccttgattcaggggctgtctataccttggccctgaagacacacattggaatgtctgtgcaaacattcagatattttgctggctggtgcgacaaaattcagggttctactattccaatcaaccaggcccgtccaaatcgcaatctgaccttcaccaagaaagagccactcggtgtctgtgccattattattccctggaactacccgctgatgatgctggcatggaagagtgctgcgtgtttggcagcaggcaataccttagtgctcaagccagcacaggtcacgcccttgactgctttgaagtttgcagaactgtctgtgaaagcaggctttccaaagggggtcatcaacatcattccaggctcaggtggcatagcaggacaacgtctgtctgaacatcctgacatccgcaaacttggtttcactggatccactcctattggcaaacagatcatgaagagctgtgctgttagcaacttgaagaaagtttcccttgagcttggtggcaagtctccacttataatatttaatgactgtgaacttgacaaggctgtgcgaatgggcatgggagcagtatttttcaacaaaggagagaactgtattgctgctgggcggttgttcgtggaagaatccatccacgacgaatttgtgacaagagtggtagaagaaattaaaaagatgaaaattggtgatccacttgacagatccactgatcatgggccccaaaatcataaggctcatctggaaaagctgctgcaatactgtgaaactggagtgaaagaaggggccactttggtgtacgggggaagacaagtccaaaggccaggctttttcatggagccgaccgtgttcacagatgtggaagactacatgtacctcgccaaagaggaatcctttgggcctattatggtcatttctaaattccaaaatggggacatcgatggagtgttgcagcgagcaaatagtacagagtatggtttggcctcaggggtttttacaagagacataaacaaagctatgtatgtgagtgaaaaactggaagcaggaactgtttttattaacacatacaacaagacagatgtggcggccccatttggcggagttaaacaatctggctttggaaaagacttaggtgaggaagctctaaatgaatatctcaaaaccaagacggtgacactggaatattagagcaacaccatcatcaggaaagccttgacagacagccctttacaactctggacacacttaagaagattgggtgtgttgaggcaggaggtgtcagccacaaaccaaaaaatacacagatggaccatgaagagggccaggccatgttaaagcatttacacatgtgcctgagtattttctaatacaccttccagtgatttggagttgttgcattttgactatgttgtatatcatacgtatttctaaaataccaagctgtttctcccctacctagacaaatctattcatggttcccatcttgaagatgtcagtaccatgcagttataatacacaaggtgcatttattggaaactttgtataatatgtacaggtttttaacctctgaactatacatagggggttattaaaaagattttctataagtcttctaaggaacagtataacctgtaaggaatgtgaaggtagttcttttttagtatttggaaataagatacatctttgtgcctttgatattccattttttaacccactgtgatgggtgatcaacctagaaacattatcttgagtacctactaggtaccaggtactatattatgttctgaggagtatagagaatttaatgatatgatggctggcccccacatagtttaaattttagtaaatagcttttgaagcaaattttacatatgatatagtagaaggctgatcctggtcgtatcataccatcttcctatctatgtaactttgggaaactctcgcaactcctctgagcctctgcttccctatgtgtaaaacagggatagtaaatgccttcctcaggacccttaataggagaattcattgcagtaatgtaagtaaagcacctcacattaatgctttgctcatggtaagtactcaaatttaactctgatttcctccgtcaccattcttaaaagatattgagatagtttaattaactagatgaattcatttcccacaacccttttcaatcatcaattcctagatatttttctcatccattgttctgacacaatgcctgatacagcagcactgaaaaatgccacacaatgaaaaatggcaatagtacaaggaaaaggggtgcttttctttgggcagctcgctcgtccttcatgggacatcttactttccatttttctacctattggttctgctgttcactggctgtgtgatcttgggcaagatagtaatctaatatctcagagcctaggttgagtatctataaaatgaaaatcaaatctctatctcagtaggtgttgcaaggattcagtgagataatatacataatgcacttaacaaggcgtttggaccatagcattgaagaaatggaaactattaacagcccatttcccattggcagacagaagtagtcaggtgagtaaattttcaccatctatgtgtgactagaaggcggcaaatttctgaatcacatgagtctccaaaagatagccagaaagttaaattctattaatcctcctttaaaaataaaatttcagtaaacattcctttttctttggctttgaagaagccttagggaatatttgtcattttggagacttggcagaataacatgaggggattgtagggaatcaataaaaactaaacaacaaaatcagagtcagagaacattttcaaaaggaagaataggaggtttgatcccagcatgataaacagagcgaatttggcctggaagcacttttgattatactatagctcatttaccatcccagagtttggcacagctgaaattttaagttggaatgaatattcactgggcccaaaatgacagttcatatttgaataaaagtgacaaaagcctttttataagtaatcacttttaagtgaaatgttttaactgatttcatgtgatttagaatatgatttaatcaaattattttaatgatagatggaatggcagacaaaaacatgcctgtccttctagactgattttactttaccctctaatattcatctcagtagcagtgttttaaatattctctgggctgcaaaactctttgggaatctgataaaagctatgaacactccctgtgtcccgcttctacccccaaaattcatgtgcacacacacaattctgcaagtatcttcaaagggttcacagacctcccaaaggccatgcttgggccccagattaagaactcctttctccatagcaagttttaaacatttcttaccagcttacatttttagatctggctgatcagaatcaaaggctctgtgtaatacataaagttaccaagtgaactggaattggaacatcaccctccccagcctgctaggtgatttacttaacacatagagtaataaaatcatcgctgttgctttagatcacggattattttgctaataatgctaaggatgaagctgtgatcttattatcacctgaatcgggaggtgtggacactttaagcagttccactttccttctaattccccatccccatgcctttgctaaagctgtcccttttgctctaacacccttcctggaccttcctaccctagctgggctaagtgtttctcctcagcgttcccacttgtttcaaacatagcacttaccacttgtactaaaattacttgccttcttaattagatatgaacaaccctccccaactccagtatgggccttctgtcaataataatacgatatgacagctaccatttattaagggcctcctgtatgaaagaccttaggctaagcatgttttaaatgttatttaatcttcacaatctctgaaaaaaatgaagaaatcaacgtgcttttcttactacctctacccctaagccattattacttttttttttttttgagacagagttttgctcttgttgcccaggctgcagtgcagtggtgcaatcttggctcactgcaacctctgcctcttgggttcaagcgattgtcatgccttagccttccaagtagctgggattacaggtgtgtgccactacacctggctaagtagagatggggtttcgccatgttggccaggctggtcttgaactcctgacctcaagtgatccacctgcctccgcctcccaaagtgctgggattacaggcatgaaccactgcacctggcctgttacctctttcctacaattttgctcaagtctcccaactggtcttctggattcctctcttctgcggtcctgttcaaagcttaagtcagacagtgtcacttcactcgtctgtttaaaacctttcaatggcccccatttcacgtagaccaaagtccaacgtatttacctggcctactgatcttgctcctagctacctctgacctcatctcctgtcaatttccctctcattctgttccaccatcctgactgccttgacttcctcaacagaacaagcctgctcctgcctcagggcctctgtccttattcttcctcttcccaggggtgtgctggtaaaatatttaacaaatagttctccgggacgggggagaaaaccctcatttgtagcatttgcaggtatctatgtgtaaatactctcatcaaggctatttttgagccactaatttgccttcactgaatacagagtttgggaagagatgcatgccatcagaacaaatgcaagccagcaccagcacaccactgcctcttcctgcaactcttgtccatacacaacctcatggctggctggctcacttcctgcaggtctctcctcaaatatcatctgatgagagacacattccctgactatgctttctaaaataggccatatgcccccacattcataccccatctgctgtcattctttattctttttataagtgcattattttcatagcacttatcactacctgttgtatattaatcaatgatcttttcccattagaatgtaagtttcatgaacaggtacttgttttaatactgtatctccagtcctaatgtgtaacaggagcccaataaatgtttgctttcaaatggagaggttaagtaacctgctcaaatcacacagctattaagtggcagaacaggttttcaagcaatgcatctggtggttttaactaagtcgagatagtttttattcctaatgcctaaatcagggcctaggtagtgagctgtgggcacatattaagtattggttaaactaaaaataataagcaaaatggacattatctataaaagcttttgtggaaatggctagagctagggtaaggaaacaaatttggttccccatacctgccctccaagaaaataaagctgtcaaggaaaatctgggctaagagtaggatatgagggatgatggataaggcatgagacatgagaaataagggggattaaattattattactattatacaaatgatgcctgagtagatttttaaaatgattaaatacccaatgatgtaaaaaacatttataaaataggaaagtaagactgactcaaccataatttgttgagtcaacccaaaaatctatttggttattttcaaacagaaatagcctacagatgatatctgagattgttccaaactttttctatgaatatgtatactttttttacataattaacataatactgtatattaatttgttacctgctttttcaattaacaatatatcataagcatctatgccaataaacacaattctgcata

SEQ ID NO: 347 - DNA, 2293 bp, Homo sapiens
  source 1..2293: mol_type = genomic DNA
cctgggcatgcgcgagcgcgtcccgggcccggcgagtcgagggttcaggtggtgcgccgtggcgccgcctgcgaccggcagctcgttcgccgcactttggaggcttcggctgcccctccgacccacgtagggcccggacccgggcctccttgtgaacagcgtgccggcttcgccccacgggttcaccggctggctgggcttcaagcgccgaggccgccgcagtgaccccgcccccgggccgaggatgtgaggcgggccgggcgtccccacaccgggcccgggcgccgggagtgggcgtctgggcagcgccaggcgatggccctgctgctggtgctcctcgcctcttggggcctggggcagtgagggggccggcgggcgtgggccgagtggccgcgggcgccatggagggggtgctgtacaagtggaccaactatctgagcggttggcagcctcgatggttccttctctgtgggggaatattgtcctattatgattctcctgaagatgcctggaaaggttgcaaagggagcatacaaatggcagtctgtgaaattcaagttcattctgtagataatacacgcatggacctgataatccctggggaacagtatttctacctgaaggccagaagtgtggctgaaagacagcggtggctggtggccctgggatcagccaaggcttgcctgactgacagtaggacccagaaggagaaagagtttgctgaaaacactgaaaacttgaaaaccaaaatgtcagaactaagactctactgtgacctccttgttcagcaagtagataaaacaaaagaagtgaccacaactggtgtgtccaattctgaggagggaattgatgtgggaactttgctgaaatcaacctgtaatacttttctgaagaccttggaagaatgcatgcagatcgcaaatgcagccttcacctctgagctgctctaccgcactccaccaggatcacctcagctggccatgctcaagtccagcaagatgaaacatcctattataccaattcataattcattggaaaggcaaatggagttgagcacttgtgaaaatggatctttaaatatggaaataaatggtgaggaagaaatcctaatgaaaaataagaattccttatatttgaaatctgcagagatagactgcagcatatcaagtgaggaaaatacagatgataatataacagtccaaggtgaaataaggaaggaagatggaatggaaaacctgaaaaatcatgacaataacttgactcagtctggatcagactcaagttgctctccggaatgcctctgggaggaaggcaaagaagttatcccaactttctttagtaccatgaacacaagctttagtgacattgaacttctggaagacagtggcattcccacagaagcattcttggcatcatgttatgctgtggttccagtattagacaaacttggccctacagtgtttgctcctgttaagatggatcttgttggaaatattaagaaagtaaatcagaagtatataaccaacaaagaagagtttaccactctccagaagatagtgctgcacgaagtggaggcggatgtagcccaggttaggaactcagcgactgaagccctcttgtggctgaagagaggtctcaaatttttgaagggatttttgacagaagtgaaaaatggggagaaggatatccagacagccctaagaaatccaacagaaaacacttgacaccaaaacataccctgatgaagatcctgaacttcaagaatgaagaaagaattcctcaccattcaggcagaaaaagcaagtcaccaagggacctcaaacttcctttccacaagattctgtgacgggaaacaatgggggagtatttccgaagttctgagtaggaaaaaagaatgactcaaatgtattattgccaaccaagtcgtcaaatctaatgtcaagttctcttaagcaggtaagaactcagaacataatacctgagtgccttcttaaggaaaccatttgataggaaagatgaaccaaataactcaatgatggatgagctggtagaaaaaaagctggtggtgaaccaaggtcaaactggaaattatagtcacagtatagatatagattataaatattacaaaccctaagatagctaataaattgggaatgggagaagggaggatataagagcactaatgccctcttattttcatagcagagacttgatactgtctcaacttttttcaaaaacacaatttcttaaattttttggtaatcttttaaataaacagatttctaaaaagaaa

SEQ ID NO: 348 - DNA, 1795 bp, Homo sapiens
  source 1..1795: mol_type = genomic DNA
acgtaaccgttcaagcatccctccttcccaggacacactcaaagcgtcagagcggtccgctcttctcaagtcctattggctcaagtccatgcgtctcatggcactgccgggtgagaggcggaaaaaggccttcccaggcgcgagaagatgacgtcacagtagcccggccgggcgccgaggttgccttagggctctctgcccagtaacaggcatcgaacggtgcagactgaagacgccctccgtcagcgacgccgtcgcaatggccatttgtcaattcttccttcaaggccggtgccgctttggagatcggtgctggaacgaacatcccggtgctaggggtgcaggaggaggacggcagcaaccgcagcagcagccttcaggtaataatagacgtggatggaatacaactagccagagatattccaatgtcatccagccatccagtttctccaaatccacaccatgggggggcagcagagatcaagaaaagccatatttcagttcttttgattctggagcttcaactaacaggaaggaaggctttggattgtctgagaacccatttgcttcacttagtcctgatgagcagaaagatgaaaagaaacttctggaaggaattgtaaaagatatggaggtttgggaatcatcagggcagtggatgttttctgtttattcaccagtgaaaaagaaacctaatatttcaggttttacagacatttcaccagaggaattgaggcttgaataccataacttcttaaccagcaataacttacagagttatctaaattctgtccaacgtttaataaatcaatggaggaacagggtaaatgaactgaaaagtctaaatatatcaactaaagtagctttgctctctgatgtaaaggatggagtaaatcaagcagcacctgcatttggatttggcagcagtcaagcagcaacatttatgtcgccaggctttccagtcaataacagcagcagtgataatgctcagaactttagttttaaaacaaactctggatttgctgctgcctcttctggaagccctgctggttttgggagttccccagcatttggagctgcagcctctaccagttcaggtatctctacttctgctccagcttttggatttgggaagcctgaagtcacatcggctgcatcattttcattcaaaagccctgcagcttccagttttggatcacctggattttcaggacttccagcttccttggcaacaggtcctgtcagagctccagtggccccagcctttggaggtggcagttctgtggctggttttggtagtccgggctcacattctcacactgctttttctaagccatccagtgacacttttggaaatagcagcatatccacttctctgtcagcctcaagcagcatcattgcaacagataatgtgttattcacacccagagataaactaacagtagaagaactggaacaatttcaatccaagaaatttactctgggaaaaattccattaaagcctccacctctggaacttctaaatgtttaaaagggcaattttaaatacaaaaaagaatgatgtttaaaattgctttgagtgattcatacagagatgtatatatgcatacatgtatatattcataaggaatataagcttccatcaatagtgattttaaatttgatttttttcttaactctaaatatttaagtaaaaagtaacaaaaactctgcaagcaagggaatttttttgtactgtaattttgaatggaactgaaaaattatgcacgaataaagtacttttctcatgccatac

SEQ ID NO: 349 - DNA, 4779 bp, Homo sapiens
  source 1..4779: mol_type = genomic DNA
ggtgagagagggcgtgcgtctctgtggttataaagttgggggtggagtggccgggagatgatggctgatgaagaggaagaagtcaagccgatcttgcagaaattgcaggaactcgtggatcagctctactcatttcgagactgctatttcgagacacatagtgttgaggatgctgggaggaagcaacaggatgtgcagaaggagatggagaaaaccctacagcagatggaagaagtagtgggttctgtccagggcaaggcacaagttctaatgctaactgggaaagcactaaatgtgactcctgactatagccctaaggctgaggagcttctgtcaaaggctgtgaagctggagcccgagctggtggaagcctggaaccagctgggtgaggtgtactggaaaaaaggggatgttgcagctgcccacacctgcttctcaggagccctcacccattgcaggaacaaagtctccttgcaaaacctgtcaatggtgcttcgtcagctgcggactgacactgaagatgaacattctcaccatgtcatggacagtgtccgacaggctaagttggctgttcagatggatgtccatgatggccgctcctggtatattcttgggaattcatatctttccctttacttctctactggccagaaccctaagatctcccagcaagccctcagtgcctatgcccaagcagagaaagttgacagaaaagcttctagcaatcctgaccttcatctgaacagggcgacgttgcataaatatgaagagagttatggggaggccctggagggcttctctcgggctgcagccctggaccctgcctggccagagccccggcaacgagagcaacaacttctggaattcctggatagattaaccagcctccttgagagtaagggaaaggtgaagaccaaaaagctgcagagcatgctgggaagcttgcgcccagcccatctaggcccttgcagtgatgggcactatcagtcagcctctgggcagaaagtgaccctggagctcaagccactgagtacgcttcagcctggggtgaacagcggtgccgtcatcctgggaaaggtggtatttagcctcaccacagaggagaaagtcccctttacatttggcctggtagattcagatggaccttgctatgcagtgatggtgtacaatatagtgcagagctggggagtgctcattggagactctgtagccattcctgagcccaacctgcggcttcaccgaattcagcacaaaggaaaggactattccttttccagtgttcgagtggagacgcccctcctgctagtggtgaatgggaagcctcagggatccagcagccaggctgttgccacagtggcatcgcgaccacagtgtgaatgacctttgacttgcatgctcaacagggagtggaggagaggagacaaggctctggacagccggtccagccacatccagtgattcagcagggatgggaggaatgttttaaatgaagactttctctttccctgcctgtattacacttcgtatctcttctctctcctctgtcctcatcatgttccagctctctacagggccacatactcttctggcatatctctcctgtctcttccactgctctctatgttttaagcaaagagcatggaattggtagaagtcttgggatcttgccatgggacagagtccccaaggttcctgttgttgcctccttcctaagcctcatatgtatatatcagttcagtatttattgctaaaggagggggcttaattttgtaatggcttttatttttagcaatttttatttttatttttgaactttaggtccttcctcttctttggggctggaacagaattaaatttgtttggaaaaaaaaaaaaacaccacgtagtttggcctgctttattctccctaggcctgtattctttgttttaggatcacttcaatttattggagtaatacccccatttttttctttatacaaagcagtttatttctctcccagttaaaagaattccgacaatagacagccccaggcaggaatggcaactccacaaagttgctagagaccagctttcttccattttcccattctgtcattccctaggggtggtcttcactatggtccaagatgacagagcaatactgttctaatagtgttactaggctgaaggaccagagagagttagataaatcctcagtttctttagagtctagtgacatgttttataacagtttatcttaatatccttgtggtaaaatggagaaatgtgagtgaggattaataaccaattgaattggcctggcacggtggctcagcctgtaatcccaccactttgggagtccaaggcgggtggatcacgaggtcaggagttcaagatcagcctggccaagatggtgaaactccgtctctactaaaaatacaaaaattagctgggcgtggtggcaggcacctgtaatcacagctactggggaggctgaggcagagaattgcttgaacctgggaagtggaggttgcagtgagccgatatcatgccactgcactccagcatgggcgacagagcgagactccgtctcaaacagcaacaacaactgaatggctgtaatacattaatgtatacagatgaattgagaagtcttctagtgaaatggctcagatctttgttcttggtccagtcctgttcagtttttgatcagtgccttgaatatcattgatgactcattaaatttataaagagtgcagaggcctcctcagagaatggatggtagaaatgcattgatgagagaagttttatctatctatctgtctatctatctatctatctatctgtctctatctaagaagtcataaaggctgagtctaataagataaaattttcagtccattcttttggtccaaaaaggcttacattctcaggtatagcttcaacatcatatatgaatattactaagaatcttagtagataagctaaagtcagtatgagtaaccagtctgatatagtttgcaagaacactcttcatggactgcaccaaaaaaacctatggtagcaagagacagtttttattagaagtactgtctgttataccacatatggagtcttaaattagttttgggtgtcattttgaggcctagagtcatagaagagtgattaggagcttgtggggtataaaaataacttgagaattggctgaaagcaactagggaagatgggggtagtagtatgtgtaaacatttgaggcagtagagatgtgggacccaaatactgttccccttttactcaaattctgagatgagttgacatgttctgtgtagggctagagagtagaaaaatggccagtaggtggtagccacagagaagcagtgcgtacaaacaagtaagtatgcaaaatttgtacatacggtttcaggaataactagaatacccataaaatatccacctgccttaaaaactagaacatcattgataacttggaagcccttgcatacctctccatgatctcatttgtcttcacagctatataaatctcattgtatgattataccataatttattcatcctgttgttaaaggatatttgggtttccagtttttctttttttactaccaaagcactacattattaatattcttgtatatgtcctgatatgtaagtgcaaaagtttcttttacagcaatggctcttgaagagtggttcccagaccagcagcatcagcatcccttggaacttctttgaaatgcaaattctcaagccccctacccagacttactgaattcaaaactatgtgggaggagcccagcaatctgtgtttcgcaaaccctccaggtgactctgatgcacagtaaaatttgagaaccactgtttaagagtattgacatagaatggaattgctggatcatagagtatatacatgttcaacttttttgagaagcactaaacatttccaaagtgcttatattagtttatgtctctactatcaatagatgagtcaccccaatgctccccatcctcttctgtgcttggtattatcttttaggtattgcaaatacaggagatttgagtattatttccttgtggccttaatttgcatttctgattattaatgagcttgagcatcttttcatatatttagaagccactaatattttctctcggtaaaatgcctattcgagtctttgcacactgctgtattggatgtcaaattgatttatatattccctgtactaatcgtttgtctacatacagttttatcctgtttttttttttattctattgggtcttttgctgaacagaagttcttaatttcaatgtcattgaatttatccatcttttatgataatgctttttgtgttttaagaggttcttagctctcctaaagtcataaggacattttccctctactgctttatgaagttattttgtccttttcttacagtatgactttattttatgttatgtacggatataatttttttcataatgagtaaatagcccagcaccttttattaaagaatcaatcctttccctactgatctttaaagcccagtctgtctttttctttttttgaaattgtctagctttttaatttttaccaaccagatgattataaaatatcacatagtaggcataaattacatttctttgtccattcctgtttctttttctatgaaatctctgttttcttttgtccaatttttattgggttgtcttcttattgattccttacatgttctggatactaatccattataaattatgtttttcaaatatatttatccaaatcgc

SEQ ID NO: 350 - DNA, 3682 bp, Homo sapiens
  source 1..3682: mol_type = genomic DNA
caggcgggacgggctctcccttgggtgcttagccccgcccccgtcccactctgccctgttgctgtcgcgccgctgctggttgctgtccctggacccctaccatggaggagaccatcaaagatccccccacatcagctgtcttgctggatcactgtcatttctctcaggtcatctttaacagtgtggagaagttctacatccctggaggggacgtcacatgtcattataccttcacccagcatttcatccctcgtcgaaaggattggattggcatctttagagtggggtggaagacaacccgtgagtattacaccttcatgtgggttactttgcccattgacctaaacaacaaatcagctaaacagcaggaagtccaattcaaagcttactacctgcccaaggatgatgagtattaccagttctgctatgtggatgaggatggtgtggtccggggagcaagtattcctttccaattccgtccagaaaatgaggaagacatcctggttgttaccactcagggagaggtggaagagattgagcagcacaacaaggagctttgcaaagaaaaccaggagctgaaggacagctgtatcagcctccagaagcagaactcagacatgcaggctgagctccaaaagaagcaggaggagctagaaaccctacagagcatcaataagaagttggaactgaaagtgaaagaacagaaggactattgggagacagagctgcttcaactgaaagaacaaaaccagaagatgtcctcagaaaatgagaagatgggaatcagagtggatcagcttcaggcccagctgtcaactcaagagaaagaaatggagaagcttgttcagggagatcaagataagacagagcagttagagcagctgaaaaaggaaaatgaccacctctttctcagtttaactgaacagaggaaggaccagaagaagctcgagcagacagtggagcaaatgaagcagaatgaaactactgcaatgaagaaacaacaggaattaatggatgaaaactttgacctgtcaaaaagactgagtgagaacgaaattatatgtaatgctctgcagagacagaaagagagattggaaggagaaaatgatcttttgaagagggagaacagcagattgctcagttacatgggtctggattttaattctttgccgtatcaagtacctacttcagatgaaggaggcgcaagacaaaatccaggacttgcctatggaaacccatattctggtatccaagaaagttcttcccccagcccgctctccatcaagaaatgccctatctgcaaagcagatgatatttgtgatcacaccttggagcaacagcagatgcagcccctttgtttcaattgtccaatttgtgacaagatcttcccagctacagagaagcagatctttgaagaccacgtgttctgccactctctctgagtatcccaacctcttggatgtatacagagattttatagaatagaacctatagcttctaccatgagttatatgagtcaagatcctgcctaacctgaaattattagggatttactcagccctgctgccgctaacagtggagttatgtcactgatctgaaggtcactgttaagggcttctgctgccatccttgtgggttgctacctttaagtcgcataactctagctgtatcatcctctcacctgtcattcttctgagggtctcagtacaagggccctgggatggagccaacctgggtattcacaacaggcctgacttgatactaagtgattagttttccaagttgtcccactgccattcaaagtcagcccttgagtgtatttgttctcagtcctaaccctggggccagagattggtccgaggttgagaattccttcctcctcatccttggtgttgctttctccaaatgattgttttagactagccaaaaatgccgtggcaaagagctcagaaatccaatttggataccaaaggtttctcatgttaatttctcagcccccaaagaagcatcttactcctgaaccttagacaggaagtattgtttcagtcacagaaagcttttctgggtacctctggttagcactttctactctctgatatttcctatgtacatagcttttattgttgtaaatcctttcttaatggttaaataggattgttagcaactatgggtttgcagttttctgagtaggtgagttttgaatatgggtaaatcagaataatgagacaacttgttaatctctttaatactaaaaataaattactcttctatttcagggacttaggtaatttaaaataaaccttcaatttatggtcttctgttttgaagctcatgggaaaattgtgatcaaaagggctatgggaagggcagaccccgccaatgatttctcttcacctgtcttaagattaaataaaaaagagtgtcctggcagttatcttgaggtggggaaggaggtgatgaaacattagtttgtgaaatccaaggccctggcttgctttctttctttttttttttttttttttgaaacagtctctctctgtcacccaggctggcgtgcaatggcgcagttgactcactacagcctctgcctcccaggttcaagcgattctcatgccttagcctcccaagtagctgggattacaggtgtgtgccgcaatgcccagctaatttttgtgtttttagtagagacagggtttcactatgttggccaggctggtctcgaactcctggcctcacgtgatctgtccacttcagccgtccaaagtgctgggattacaagcgtgagccactgtgctgggcccgaggccctgacttcttgctgtaactttccatgcattttttttaaaaggagcagtgtggattttcgcaccctttgtgaactaagttcaatgcgctctatccaaatttgcctaattgaactataagaaagtaataattccattttctatcccctcagggactgaacaaatggaaataactcccaggcagtatcaggtggtcactacagagacttccacaaaaacttttgaatgatgtgaaacacgatgtcatgaataagggttgagccaactatagctctgtgttcctactgggctttccctaatgtggttgggagttatgccctagactaactgtattgtcctagtcacagctccttgctttgatttcatccttgataaaatgaagatgaaacttacactacttctccaagccttttgctgtcttaagaataagacctgagattaacactaaccctagaatagaaatgtaatagggagatggtaataaaggagtttttctggcacataccctccctacagaatttctgttgctccccagatccagtgaagaattgcagtttcatttattttgtaccagtcagctcttaattaagtacatgaatggagaggaacagtggtgcacataatccaaatcagtgaataccattttctggtgaattacccacccctttgcccctgctaccccgagggttaccatgattgtcaacagcagcaggagcccttccacagggcttggtaaaaaaaccagttgaggtgttaatgaccctttttgctgggtgtaaaacaaagcatctttaaccactgttcattatccccagctgctcttaccaaggctttgaagggggaaattatgctctaggcagccactagtagtaaacaat

SEQ ID NO: 351 - DNA, 2528 bp, Homo sapiens
  source 1..2528: mol_type = genomic DNA
ctcttccttccgccggctgcgcactcacagtgatccctgcgcgcgtctcctgctcgggtcagtgcgccgcgctgcgctgggcgccatggcgctccccggagcccgggctcgcggctgggcggcagcagccagagcggcccagaggcgccgccgcgtggagaacgcaggagggtccccgagtcctgagcctgcgggccggcgcgcggcgctttacgtacactggccttactgcgagaagcgctgcagttactgcaacttcaacaagtacatccctcgccgcctggaggaggctgccatgcagaagtgtctggtgaccgaagctcagacgctgctgcggctcagcggggtgcaacgggtggagtctgtgttctttggtggggggacccccagtctagccagtccccacacggtggctgctgtcctggaggctgtggcacaggcagcccacctgcctgcagacttggaagtcacattggaggctaatcctacttcagctccgggctccagactggcagagttcggggcagcaggggttaacaggttgtctataggcctccagtccctagatgacactgagctccggctgttgggacggacgcactcggcctgcgatgctctgcggacgctggcagaggcccggcgcctctttcccgggcgcgtgtctgtagacttgatgctggggctgccggcacagcaggtggggccgtggcttgggcagctgcaggaactgctgcaccactgtgatgaccacctctccctctaccagctgtccctggagcggggcaccgcactcttcgcccaggtgcagcggggtgcccttccagcccctgacccggagctcgcagctgagatgtaccagaggggccgggctgtccttcgggaggctggcttccaccagtatgaggtctccaactttgcccggaatggggcgctcagtacccacaattggacttactggcagtgtggtcagtaccttggcgttgggcctggggcccatggacgatttatgccccagggggctggaggccacacccgggaggctcggatccagacactggagcctgacaactggatgaaggaggtgatgctgtttggccatggcacccggaagcgtgtccccctgggcaggctggagctgctggaggaagttttggccctggggctacgcaccgatgtggggatcactcaccagcactggcagcagtttgagccccagctgaccctgtgggatgtgtttggagcgaacaaggaggtgcaggagctgctggagcggggcctactgcagctggatcacaggggtcttcggtgttcctgggagggtctggctgtgctggactctctcttgctgaccctcctgcctcagctccaagaagcctggcagcagagaaccccctcccctgtgccaggaggatgacaaaaatgttcctgtgttccagggtaatgccaggtgggttttgagagctgggtcggtactgcagacatctcttctccgttgtcgggtgccgtctctgctccttgtggttattgctcagccctggcatccccaggggaatggcagcagtgaggtagatgggaggacatttctggtcagggaactggcatcccattcagcatctcaggactcacaggccaacatgtgttccatggctgggaattgcctaccacccacatcagcttctgtttacctttttggcatcaaataatgaacagtgtttggaaatctttctacaggcaattacctccccaagagaagccttccttattttggagtaaggtcctaagatagctggatgaatcaggaaaaccatgtcccctctaggtattattaatataagcaggaagggatctactataggaatgaagtatttataaaccactgaaagggatagagaagtgaacattggagaaagccagtagcaactgtgagaaatcagcaacttgcaggaggcacagaaaactcctgctgatggtctcagcttccagcagcacaaaagcagatgatgtactggaaaatgctcagaagatgctacaaaacctcatgcctactgtctgccactgctggagaaggaatcatggtttctagaagtgcctctcattagtggactttaaagcaaatcctggctggcaggaaattctgaggaatatagctcttaggcttccagcctctaccatgcaggagagaacacagaaggactgatgtatgttggtggatccatgtatgtgtccagcacagcggcctgctggactctgagaactgggaaagatcagagcaagccttgcctcttatcttcgggaaaccagaatatgtttggggtggtaggagccacacagactcttctgagccccctcactcacttccttccccctgtgcctttcctttgagagtgaaggtgggtggagttgaccagagaaaggggagagaattcgggaaagacccaaagtgtttgtaattcttctttgtccttttacctacagaaatggtcacatggttctatttaaatagcctaataaacacatctggagcctgt

SEQ ID NO: 352 - DNA, 2152 bp, Homo sapiens
  source 1..2152: mol_type = genomic DNA
tttctcagtggaagttcccacttcaacataagggagagctctggacagtttgagcagcattgttagagcctgtggaaaacactttacaactgtgtaactgtcttcatctttacagaggaatagtctacaaaggaagacttgtaacctggagaagagacctgtcatttactccatcctttatagtgatgctacaggacgaagaggaatggataaaaacattggcgagcaactcaataaagcgtatgaagccttccggcaggcatgcatggatagagattctgcagtaaaagaattacagcaaaagactgagaactatgagcagagaatacgtgaacaacaggaacagctgtcacttcaacagactattattgacaagctaaaatctcagttacttcttgtgaattccactcaagataacaattatggctgtgttcctctgcttgaagacagtgaaacaagaaagaataatttgactcttgatcagccacaagataaagtgatttcaggaatagcaagagaaaaactaccaaaggtaagaagacaagaggtttcttctcctagaaaagaaacttcagcaaggagtcttggcagtcctttgctccatgaaaggggtaatatagagaagactttctgggatctgaaagaagaatttcataaaatatgcatgctagcaaaagcacagaaagaccacttaagcaaacttaatataccagacactgcaactgaaacacagtgctctgtgcctatacagtgtacggataaaacagataaacaagaagcgctgtttaagcctcaggctaaagatgatataaatagaggtgcaccatccatcacatctgtcacaccaagaggactgtgcagagatgaggaagacacctcttttgaatcactttctaaattcaatgtcaagtttccacctatggacaatgactcaactttcttacatagcactccagagagacccggcatccttagtcctgccacgtctgaggcagtgtgccaagagaaatttaatatggagttcagagacaacccagggaactttgttaaaacagaagaaactttatttgaaattcagggaattgaccccatagcttcagctatacaaaaccttaaaacaactgacaaaacaaagccctcaaatctcgtaaacacttgtatcaggacaactctggatagagctgcgtgtttgccacctggagaccataatgcattatatgtaaatagcttcccacttctggacccatctgatgcaccttttccctcactcgattccccgggaaaagcaatccgaggaccacagcagcccatttggaagccctttcctaatcaagacagtgactcggtggtactaagtggcacagactcagaactgcatatacctcgagtatgtgaattctgtcaagcagttttcccaccatccattacatccaggggggatttccttcggcatcttaattcacacttcaatggagagacttaagacacatttgaaaacagacatatcaagttctatgtgatgattttgggtttttaatactataaatacttgattgtaaactaaattcaagatcatttataggaaaatctagtttcacagctatttgaatttttttctggatttactatataactcttattttttaaaagatcattctgttctttcaaggagaaataagcctaaaagaagaaaaacaaaaaaaattctgtataaaactgtaatcctttgtattcatgtttacagtgctattactataattcaaaattatgtatgtgacttagagttatataatcataatttatgtttatttcaaatatctaagtttattgcttggatttctagtgagagctgttgaatttggtgatgtcaaatgtttctagggtttttttagtttgtttttattgaaaaatttaattatttatgctataggtgatattctctttgaataaacctataatagaaaatagcagacaacataaacatctttgtaaatatcaaacctaatacatttcttgtccagtgataaaacaactggtagaattatttaaacactttagatttttaaataatatacatggctttaatttttactgtgtgtatagctacatgatgaaattaattaaatattaagaggtacttatgttgtgatca

SEQ ID NO: 353 - DNA, 3057 bp, Homo sapiens
  source 1..3057: mol_type = genomic DNA
gagcgggcgagcggcgacggcggcggcggcgggcacagattaattaaaagaagaatgaactataatccttgaagataactgggcaattttttaagtcggaggctgttcttactggtgtgaggatttacacacgtcttcagtttttcagcacagaccagcagaccatcatttttagaggaaatactccctctgccctcctttttggtttccttggtggtaaagattaaatttggttgcatcattttgacttgtgtttgagtctagattttatggcacaaggaatggcataaacttttcatgtgttttggttaaaacaaaccagaccattgcattgaccctggacatctttaattgagaaattggtaactttattttaatatgtatatctgaagaattcaagaaaacaaaggcatcctcagaggtgtgcctcttttctttattattagaggcaaaacgaacaattttataggatttgtagtgaaattataccagattataaggagaaccaaaactaagtcgcaaaatttattaatttaaggggctctcgctttgaaagtttgagagtaagttacgataggcatttgtatccattcattactttcctcttttcaaataagcaactaaatagaaatgctaatctcagacttaattatttaacagaagagtgtaccatggaaaacctccagacaaatttctccttggttcagggctcaactaaaaaactgaatgggatgggagatgatggcagccccccagcgaaaaaaatgataacggacattcatgcaaatggaaaaacgataaacaaggtgccaacagttaagaaggaacacttggatgactatggagaagcaccagtggaaactgatggagagcatgttaagcgaacctgtacttctgttcctgaaactttgcatttaaatcccagtttgaaacacacattggcacaattccatttaagtagtcagagctcgctgggtggaccagcagcattttctgctcggcattcccaagaaagcatgtcgcctactgtatttctgcctcttccatcacctcaggttcttcctggcccattgctcatcccttcagatagctccacagaactcactcagactgtgttggaaggggaatctatttcttgttttcaagttggaggagaaaagagactctgtttgccccaagtcttaaattctgttctccgagaatttacactccagcaaataaatacagtgtgtgatgaactgtacatatattgttcaaggtgtacttcagaccagcttcatatcttaaaggtactgggcatacttccattcaatgccccatcctgtgggctgattacattaactgatgcacaaagattatgtaatgctttattgcggccacgaacttttcctcaaaatggtagcgtacttcctgctaaaagctcattggcccagttaaaggaaactggcagtgcctttgaagtggagcatgaatgcctaggcaaatgtcagggtttatttgcaccccagttttatgttcagcctgatgctccgtgtattcaatgtctggagtgttgtggaatgtttgcaccccagacgtttgtgatgcattctcacagatcacctgacaaaagaacttgccactggggctttgaatcagctaaatggcattgctatcttcatgtgaaccaaaaatacttaggaacacctgaagaaaagaaactgaagataattttagaagaaatgaaggagaagtttagcatgagaagtggaaagagaaatcaatccaagacagatgcaccatcaggaatggaattacagtcatggtatcctgttataaagcaggaaggtgaccatgtttctcagacacattcatttttacaccccagctactacttatacatgtgtgataaagtggttgccccaaatgtgtcacttacttctgctgtatcccagtctaaagagctcacaaagacagaggcaagtaagtccatatcaagacagtcagagaaggctcacagtagtggtaaacttcaaaaaacagtgtcttatccagatgtctcacttgaggaacaggagaaaatggatttaaaaacaagtagagaattatgtagccgtttagatgcatcaatctcaaataattctacaagtaaaaggaaatctgagtctgccacttgcaacttagtcagagacataaacaaagtgggaattggccttgttgctgccgcttcatctccgcttcttgtgaaagatgtcatttgtgaggatgataagggaaaaatcatggaagaagtaatgagaacttatttaaaacaacaggaaaaactaaacttgattttgcaaaagaagcaacaacttcagatggaagtaaaaatgttgagtagttcaaaatctatgaaggaactcactgaagaacagcagaatttacagaaagagcttgaatctttgcagaatgaacatgctcaaagaatggaagaattttatgttgaacagaaagacttagagaaaaaattggagcagataatgaagcaaaaatgtacctgtgactcaaatttagaaaaagacaaagaggctgaatatgcaggacagttggcagaactgaggcagagattggaccatgctgaggccgataggcaagaactccaagatgaactcagacaggaacgggaagcaagacagaagttagagatgatgataaaagagctaaagctgcaaattctgaaatcatcaaagactgctaaagaatagaaactgttaaagagattcatctgtgtattactgacaaggttttttttgtttgttgcttgctttggtaattgaattctgaagaatttatctgcatgacgataactaggcattctatccatttgtagatcagagaaagtgaagagattatatattagtacttaaatttttacattttccaaatgaatgaaaatgtatgtttctttgtacttttttaaaaaaatcagcttagtaacaatactatatggtttcaactagtaggtaatctgcttatatttctaatgcaaacttaacaattgtgtactttttaaaagctgcaatatgtgttggaaaa

SEQ ID NO: 354 - DNA, 2849 bp, Homo sapiens
  source 1..2849: mol_type = genomic DNA
agctcccgcccgcccgcggccgcccgggagctcgtccagccccgcgctgcgctcgcccgcccgctgcccgccggagcaccgcggcctccgcccgcgtccatctgcccgccgcccgcgcctgttccgcagcccgcgtccgcgccggccccacagctctgcgtccgggtattactcagcacagaaattcaggagacacagacaagttcttccacgatgtcgtacagacgagaactagagaaataccgtgacctggatgaagatgaaatccttggagccctaacagaggaagagctgaggaccctggaaaatgagctggatgagctggaccctgataatgcactgctgcctgcaggcctgaggcagaaggatcagaccaccaaggcgcccacgggcccctttaaaagagaggagctcttggatcacttggaaaagcaagcaaaggagtttaaggaccgagaagatctggtcccctacacaggggaaaaacgaggaaaggtctgggttcctaagcagaagccactggatcctgtgctggaaagtgtgacgctggaaccggagctggaggaagccttggcaaatgcttcagatgcagaactctgtgacattgcagcgatcctgggcatgcacacgctcatgagtaaccagcagtactaccaggccctgagcagcagctccatcatgaacaaggaggggctcaacagcgtgattaaacccacacaatacaagcctgtgcccgacgaagaaccaaattcaacagacgtagaggaaacgctggaacggataaagaacaacgacccaaaacttgaagaagttaacctcaataatatccggaatatccccatccccaccctcaaggcatatgcagaagccctgaaagaaaactcatatgtgaagaagttcagcatcgtggggacacggagtaatgaccccgtggcgtatgcccttgctgagatgctcaaggagaacaaggtgttgaagacactgaatgtggaatccaacttcatttctggagctgggattctgcgcctggtagaagccctcccatacaacacttctctggtggaaatgaaaattgacaaccagagccagcccctgggcaacaaagtggaaatggagattgtgagcatgttggaaaaaaacgcaacacttctcaaattcggctaccactttacccagcaaggaccccggcttcgggcatccaacgcaatgatgaacaacaatgaccttgtgaggaagaggaggcttgcggacctgactgggcccatcattcccaagtgccggagtggtgtctagtgtgtggcggtggagtccatgcctttgaactggatgtgttctattgatgacctgtgctctgcaggggaaaccagaaggcaaaatgctggcagcatgaaacccttttgtggttcagttctttatgcactaaggttttaggttgactagtggttgtagttgaaaattttataaaataccgttaatgtgaagtttttctttagtcacagaagttgaatctggttattatttaaaaactagaagcccccaaaccagcagatcttactgaagatgatgttccagcagcagcgacttagccccaggagcccagtttcaatggccttgctgtgtggtgtttcaagtgcatttaaaatgtgtgacacagaaacggcacactcttccacatgcttttgaagtattataaaacactttattacaaatttgtcttagctattagcaaataaaactgattatcattctttattaaccctccttggaattttgaaaacctcgattaaagttgccaaattgattactggatccagaacacaattttcccctcagaacagatagacagactgaagccactgaactctgccaggagtcaacatgagattccttttgctggatatgcagaaatgataggaaaaaaaccaatggtgaaatttcaagtttcaaaaaccaacctttcattaccaatcccaggcaacaaacatgtccctgagtgttctttaagaacatttgggatttatgtacaatttaatactggagttagaactttttccttattgaatgccaaccttatgatggatgtgaaaatctacggccaaatacttttgaaaacacctttctatattgcacagtgggcaaatggcttatgtgaggtaagacactagagggataaatttccagatcaacatggctatggtatttagtaatggcccagcttagagacttcagctactgatctcatcacttattagacaaattgctgctgaccttacgcctgtatattaagcctccgcaggatgccggacaatggtgaagaaactccagatatcaaggaattgggaaatcctggccaaaccaccccaagatgattacactgaaatgtagtattagtactgctgccagatctctttttaacatcatgtgcgtctcttgggatccagcaaaagtgttaagccacaatgcccttgtgccttttaatataccacagtgccagttaaactaatatttttgtttgttgcttttgggagttattttcattagtgatttcagcaaatctcatgataaaggacaaggtcaagaactccagagcactgagcagagaggctggtgatgaaaaggtgaaggcctgcgcactgaactgtaaggcagtgggcagtacagggtaactggaggcggggccagggcctcagcgctatggaagagtgtccactgaggctgcacatggcccaggagtggcaccatgttgcagggacaaccatccccatttggcttctccttaaaacacaattgcagctgcattctgcatcgctgaaaactgcaatataatattaaatctgttggtctatgca

SEQ ID NO: 355 - DNA, 2179 bp, Homo sapiens
  source 1..2179: mol_type = genomic DNA
tgtgcagagcaggacatggaagaacgcgggtcacccgacggggatctcgcgcggagcctggagcaagggccagaggggccggaaacgcccatccaggtggtgctcagggtacgtcccatgagcgcggccgagctgcgtcgagggcagcagagcgtgctgcactgctcagggacccggactctgcaggggggtccagaagtggcgttccgcttcggtgcggtgctagacgcggcgcgcacgcaggaggacgtgttccgggcgtgcggcgtgcggcgcctgggggagctggcgctgcgcggtttctcctgcactgttttcacctttggccagacgggctctgggaagacctacaccctgactggaccccctccccagggggagggggtgcctgtaccccccagcctggctggcatcatgcagaggaccttcgcctggctgttggaccgcgtgcagcacctgggtgcccctgtcacccttcgcgcctcttatctggagatctacaatgagcaggttcgggacttgctgagcctggggtctccccggcccctccctgttcgctggaacaagactcggggcttctatgtggagcagctgcgggtggtggaatttgggagtctggaggccctgatggaacttttgcaaacgggtctcagccgtcgaaggaactcagcccacaccctgaaccaggcctccagccgaagccatgccctgctcaccctttacatcagccgtcaaactgcccagcagatgccttctgtggaccctggggagccccctgttggtgggaagctgtgctttgtggacctggcaggcagtgagaaggtagcagccacgggatcccgtggggagctgatgcttgaggctaacagcatcaaccgaagcctgctggccctgggtcactgcatctccctgctgctggacccacagcggaagcagagccacatccctttccgggacagcaagctcaccaagttgctggcagactcactgggagggcgcggggtcaccctcatggtggcctgcgtgtccccctcagcccagtgccttcctgagactctcagcaccctgcgatatgcaagccgagctcagcgggtcaccacccgaccacaggcccccaagtctcctgtggcaaagcagccccagcgtttggagacagagatgctgcagctccaggaggagaaccgtcgcctgcagttccagctggaccaaatggactgcaaggcctcagggctcagtggagcccgggtggcctgggcccagcggaacctgtacgggatgctacaggagttcatgctagagaatgagaggctcaggaaagaaaagagccagctgcagaatagccgagacctggcccagaatgagcagcgcatcctggcccagcaggtccatgcactagagaggcgtctcctctctgcctgctaccatcaccagcagggtcctggcctgaccccaccgtgtccctgcttgatggccccagctcccccttgccatgcactgccacccctctactcctgcccctgctgccacatctgcccactgtgtcgagtgcccctggcccactgggcctgcctgccaggggagcaccacctgccccaggtgttggaccctgaggcctcaggtggcaggcccccatctgcccggcccccaccctgggcacccccatgcagccctggctctgccaagtgcccaagagagaggagtcacagtgactggactcagacccgagtcctggcagagatgttgacggaggaggaggtggtaccttctgcacctcccctgcctgtgaggcccccgaagacatcaccagggctcagaggtggggccggggttccaaacctggcccagagactggaggccctcagagaccagattggcagctccctgcgacgtggccgcagccagccaccctgcagtgagggcgcacggagcccaggccaagtcctccctccccattgaaggccaagtgggaacccaggagactgctgtgtgacctcagactgggctccacactcttgggcttcagtctgcccatctgctgaatggagacagcagctgctactccacctgcagctgggctaggggcggggactgggggtgctatttaggggaacaaggggattcaggagaaaccaggcagcaggggatgaaatacatgaataaagagaggcatcagctccaa

SEQ ID NO: 356 - DNA, 1325 bp, Homo sapiens
  source 1..1325: mol_type = genomic DNA
gcccccgagcaggagccggtgcgagcggagcagagccgaggtcgggccgcgagcggagccggctgagcgggcgccgagctcccgccatggcccggaacacgctgtcctcgcgcttccgccgggtggacatcgacgaatttgacgagaacaaatttgtggacgagcaggaggaggcggcggcggcggcggcggagccaggcccggacccgagcgaggtggacgggctcctgcggcaaggggacatgcttcgggcattccatgcagccttgcggaactctcccgtcaacaccaagaatcaagctgtgaaggagcgagcccagggcgtggtgctgaaagtgctcacaaacttcaagagcagtgagattgagcaggctgtgcagtcactggacagaaacggcgttgacttgttaatgaagtacatttataaaggctttgagaagcccacagaaaatagcagcgcagtgttactccagtggcacgaaaaggccttagcagtaggaggactaggctccattataagagttcttacagcaagaaagactgtttaaaaaaaataaaaagactcatgttaccttgagaagaattctggatgcccaggctggtgaagaagggattgacaatggaccatcttcctaggaactcccaagtaaactatttcaggacatgtatctgctgaaatgtattttattttcaaggtggaggggaaaatcgtctgtttcctaaatcctgtttaggatctgatagtctatgcctttgtctccgagtactgcagaactgacattttgacggtctaccagcgtggcggctggtgttggtcagatgcacctgtgtgcactgggggagggatggtttgggcaggtgcagatccaagggctgtggtaaacgggagagcttgtgtttttgaagtggaaaaaaacccaagagtttgtacagacatcctgtcttcccagagaaggtggacactcttgggctcattgtaaagtgcctgctgcatcaataaagctcttggcttattagtctatacattgcggtgtgtttcgtgtatgtaaaaaaaaatggtaatgaatgggatggtaatgaatgagagttcagttgttgttccggaaacccgatgtggaaggagtagacctgtgtccctgttgagccacccctgggagcgagcatggcaatccacaggccctctgccacaggacgccagcctcggcctcagagctgccggctgctgcagagaggtgtttgctgaataaactatttattgtttcttattcctttgatttgtatgtaattaattttggagcttatttaattaatttaataaagtgcca

SEQ ID NO: 357 - DNA, 4576 bp, Homo sapiens
  source 1..4576: mol_type = genomic DNA
gacagagcgcaatggcggcaaccgcgtctgcaggggtgccggcgaccgtgtcagaaaagcaagagttttaccagcttctgaagaacctgatcaatccaagctgtatggtgcggaggcaagcagaggaaatctatgaaaatatcccaggtctgtgtaagactaccttcctcttagatgccgtcagaaatagaagagcaggttatgaggtgagacaaatggctgccgcactgctacgacggcttttgtcctctgggtttgaggaggtttatccaaatctgcctgctgatgttcagagagatgtcaagattgaactgattctggctgttaagttagaaacacatgctagcatgaggaaaaaactttgtgatatttttgcagtgctggccaggaatttgatagatgaggatggcactaaccactggccggaaggtctgaagtttcttattgattcaatctactccaaaaatgtggttctatgggaagttgcacttcacgttttctggcactttcctgggatttttgggacccaagagcggcatgatttggatatcatcaaacggttgttggaccagtgtattcaagatcaagaacatccagcaatcaggacattatccgctagagctgcagctgcatttgtacttgctaatgagaataatattgctcttttcaaagactttgcagacttgcttcctggaatcttacaggctgtgaatgactcatgctaccaggatgatgattcagtgctagaatcccttgttgagattgcagataccgtacctaagtacttgggtccttatttagaagatactctacagttgagtttgaagttatgtggagactctaggcttagtaatctgcagcgccagctggccctcgaagttatagtgaccttgtctgaaactgccactccgatgttgaaaaaacatacaaatattattgcacaggcagttcctcatatattagcaatgatggttgatctacaagatgatgaggactgggtaaatgctgatgaaatggaagaagatgattttgacagcaatgcagttgctgcggagagtgcactagacagactggcttgtgggcttggtggaaaagttgttttaccaatgaccaaggagcatatcatgcagatgcttcagagccctgactggaagtatcgacatgctggattaatggccttatctgccattggagaaggatgccatcaacaaatggaatcaattctagatgaaacagttaactccgttttgctttttcttcaggatcctcatccaagggtgagggctgcagcctgtactacacttggacagatggctacagattttgcacctaatttccaaaagaaatttcatgaaacagtgattgcagctctgttacgtaccatggaaaatcaaggtaatcagcgtgtgcaatcacatgcagcttctgctcttattatttttattgaagactgccctaaatcattgctagttctatatgtggatagtatggtgaaaaatctacattccgtcttggtgattaaacttcaagagttgattcggaatggaactaagttggctttggaacaacttgtgacaaccattgcatcagttgcagatacaatagaagaaaaatttgtcccatattatgatatattcatgccctcactaaagcacattgttgagcttgctgttcagaaggaactcaagcttctgagaggaaaaactatcgagtgcattagccatattggtcttgctgttgggaaggaaaaatttatgcaagatgcatcaaatgtgatgcagctgttgttgaagacacaatcagacttaaataatatggaagatgatgaccctcagacctcttacatggtttcagcatgggctagaatgtgtaaaattcttggaaaagattttcaacagtaccttccactggttatcgagcctcttattaagactgcttcagctaaacctgatgttgctctcttagacacacaggatgtggaaaatatgagtgacgatgatggctggcaatttgtaaatcttggagaccagcagagttttggaattaaaacttcaggacttgaagcaaaagcaactgcttgccaaatgttggtttactatgctaaggagttaagggaagggtttgtggaatatacagaacaagttgtgaagctgatggttcctttactgaaattttatttccatgacaatgttcgagtggcagcagcagagtccatgccttttctcctggaatgtgcaagaattcgtggcccagagtatcttgcacagatgtggcaattcatatgtgaccccttaatcaaggctattggtactgaaccagatacagatgtgctctcagaaataatgaattcttttgcaaagtccattgaagttatgggagatggttgccttaatgatgaacacttggaagaactgggaggaatactgaaagcaaaacttgaagggcactttaaaaaccaagaattgagacaggtgaaaagacaggaagaaaactatgatcaacaggttgagatgtctctgcaagatgaggatgaatgtgatgtttatattctgaccaaagtatcagatattttgcactcattatttagtacttataaggaaaagattttaccatggtttgaacaactacttccattaattgtaaatctaatttgttcaagtaggccatggccagacagacagtggggattgtgcatatttgatgacatcatagagcactgcagtccaacttcatttaaatatgtagaatattttcggtggccaatgctactaaatatgcgagataacaaccctgaagtcaggcaagctgctgcttatggcctgggtgtcatggcacagtttggtggagatgattatcgttctttatgttcagaagctgttccacttctggtaaaagttattaagtgtgcaaattccaaaaccaaaaaaaatgtcattgctacagagaactgtatctcagcaatagggaagattttgaagtttaagcctaactgtgtaaatgtagatgaagttcttccacactggttatcatggcttccactgcatgaagataaagaggaagctattcagactttgagttttctctgtgacctaattgaaagtaaccacccagttgtaattggtccaaataattccaatcttcccaaaataatcagtataattgcagaaggaaaaattaatgagactattaactatgaggatccttgtgccaaacgcctagctaatgtcgtgcgtcaggtacagacttctgaagatttatggttggaatgtgtatcacaacttgatgatgaacagcaggaagccttacaggagttgctaaattttgcttgaagcactttaatataacttgaatattatctattataaaagtaactacaaataagtgttgtgaatagattttattataaatcagagaactgttttctccctgctaagcagtttatagttcttctccatgtttctccagaattaatcagtgttagtcctctgtttatctcgcatgttttatcttccaaacacagaccttggtgataacctgtgcttcaaactgtcttaaacaatgtttgtcacctttcccctagttgatgtaaagtatataaattgttgctatttgtttgaactattattgatgctagccaagcagtatacttgatgtgaagatgtcatgctatcacaatatgctaagagctcacaaaaataagatagaatttccaggacaaacatctttggaattgtgagtgaaggatatagtggcaggcttgtccctctttaattaatactcttggtatttgtggtgatgggaggatgctgttactaggagagttttgagatactgcagtggatgtgggatgtatatgaacttcttcataatgtactcctgggaactgggtaggacatatccatattgtagttcccaaggtgtctggttgagagttagagaacttttaaatttctttagccagacaggtctctatttttttaagttatccaggactccaagaaccatagttactgaaaagggagtcctgatacatctaatattggtagcatgtaacagtgtttgacaaagagtaagtaagcagtattcttgggagtcagtgttatgtgtttcagcagagtattattttgtatatgtatgccattttctccctgcaaagcagctcaacaagagaaaaagctctagttatagggcttaaattgatttctatttcaaataatttcctaagagattctagagtagaactgaagagtattctattggaaaagtgaaaggaaagaaatgtaattttctttgaacatgaaaaagaaaacaactttgagagtagtcatttagcagtagatgtgcattattatgagaaaacagttctataagtccagggttaattatattaattggaatgtcagtctttaatgtcgagcttattgtagggtagaaaagagctttctactcagctaacgattactcattgatccaaaacttaaatacatctataatttcctggggctattgtgagtactgtgtatgtatttagcaaatatttaagacctagtaagtgctcaataaattgtagctgtta

SEQ ID NO: 358 - DNA, 2688 bp, Homo sapiens
  source 1..2688: mol_type = genomic DNA
agacgacctgccccgccccctgcgccaccgactgactcagtgacctcggggtcgttaggcctccacgtcctcgctggagctgcggacctcagtcgtccatccacacctcccccctgccgcccccgcccatctcactctcccaaccctgggcaccagggcaggtcgacagcccgaggcactcctctactgcgtttccaggcccaggagacccactccagcgccgcggttccttgcgacccggcagccgttcagcagacctcccattctttcctgcatcatcgggcattgtggaggcaccctacggtgattcctctcagagcctgtttgtaggtgaccgtgacagagacaaaaccatggaagtgactgggtttggagtgaccagaccgggcaaggtcccccaggccaggatgtcaggcctggtgttggggcagcgggatgagcctgcaggccaccggctcagccaagaggagatcctggggagcacacggctggtcagccaagggctagaggccctacgcagtgaacaccaggccgtgctgcaaagcctgtcccagaccattgagtgtctgcagcagggaggccatgaggaagggctggtgcatgagaaggcccggcagcttcgccgttctatggaaaacattgagctcgggctgagtgaggcccaggtgatgctggctctagccagccacctgagcacagtggagtcggagaaacagaagctgcgggctcaggtgcggcggctatgccaggagaaccagtggctgcgggatgagctggctggcacccagcagcggctacagcgcagtgaacaggctgtggctcagctggaggaggaaaagaagcacctggagttcctggggcagctgcggcagtatgatgaggatggacatacctcggaggagaaagaaggcgatgccaccaaggattccctggatgacctctttcctaatgaggaggaagaggaccccagcaatggcttgtcccgtggtcaaggtgctacagcagctcagcagggtggatatgagatcccagcaaggttgcggacgttgcacaacctggtgatccagtacgcagcccaaggtcgctatgaggtggccgtgccactctgtaagcaggcactagaggacctggagcgcacatcaggccgtggccaccctgatgtcgccaccatgctcaacatccttgctttggtgtatcgtgaccagaataagtataaggaagctgcccacctgctgaatgatgcccttagcatccgggagagcaccttgggacctgaccatcctgctgtggctgccacactcaacaatttggctgtgctctatggcaaaaggggcaagtacaaggaggcagagcctctgtgccagcgggcactggagattcgagaaaaggtcctgggcacgaatcatccagatgtggcaaaacagctgaacaacctggccctcttgtgccaaaaccagggcaagtatgaggccgtggaacgctactaccagcgagcactggccatctacgaggggcagctggggccggacaaccctaatgtagcccggaccaagaacaacctggcttcctgttacctgaaacagggcaaatatgctgaggctgagacactatacaaagagatcctgacccgtgcccatgtacaggagtttgggtctgtggatgatgaccacaagcccatctggatgcatgcagaggagcgggaggaaatgagcaaaagccggcaccatgagggtgggacaccctatgctgagtatggaggctggtacaaggcctgcaaagtgagcagccccacagtgaacactactctgagaaacctgggagctctgtataggcgccagggaaagctggaggctgctgagaccctggaggaatgtgccctgcggtcccggagacagggcactgaccctatcagccagacgaaggtggcagagctgcttggggagagtgatggtagaaggacctcccaggagggccctggagacagtgtgaaattcgagggaggtgaagatgcttctgtggctgtggagtggtccggggatggcagtgggaccctgcagaggagtggctctcttggcaagatccgggatgtgctccgcagaagcagtgaactcttggtgaggaagctccaggggactgagcctcggccctccagcagcaacatgaagcgagcagcctccttgaactatctgaaccaacctagtgcagcacccctccaggtctcccggggcctcagtgccagcaccatggacctctcttcaagcagctgacattcaacccggcccccaggtctgctgggtccccccacccccacagccctcacagcattccccattgctcctggctcttccccacccctaggtgggacagtgaaggggagcagtttaaccagaagattgctgctgcccttagggtctcagctccctcctcaggaatccctcttaggaaggaccctcaggacaccctctctgcaccctgtggtcctctagagtagctagctctgaggccccaaggtgggtacaaagcaggtatggccctcagagatgcagcctgctgctggcttttcagtcagagggttgggggctggccagccaagctgccttgccctggccgctcttactccctccctctgctgtctcacttcaggtccatgtatttcacttttcttaaataaaagaatcaggtaacctt

SEQ ID NO: 359 - DNA, 6932 bp, Homo sapiens
  source 1..6932: mol_type = genomic DNA
cagccgcagccgcagcgggcacagagcaggtagatggccccctcagggcaggcccggcggacacccctccctctggctggcggatgcagtgcctagcggccgcccttaaggacgaaaccaacatgagtgggggaggggagcaggccgacatcctgccggccaactacgtggtcaaggatcgctggaaggtgctgaaaaagatcgggggcgggggctttggtgagatctacgaggccatggacctgctgaccagggagaatgtggccctcaaggtggagtcagcccagcagcccaagcaggtcctcaagatggaggtggccgtgctcaagaagttgcaagggaaggaccatgtgtgcaggttcattggctgtggcaggaacgagaagtttaactatgtagtgatgcagctccagggccggaacctggccgacctgcgccgtagccagccgcgaggcaccttcacgctgagcaccacattgcggctgggcaagcagatcttggagtccatcgaggccatccactctgtgggcttcctgcaccgtgacatcaagccttcaaactttgccatgggcaggctgccctccacctacaggaagtgctatatgctggacttcgggctggcccggcagtacaccaacaccacgggggatgtgcggccccctcggaatgtggccgggtttcgaggaacggttcgctatgcctcagtcaatgcccacaagaaccgggagatgggccgccacgacgacctgtggtccctcttctacatgctggtggagtttgcagtgggccagctgccctggaggaagatcaaggacaaggaacaggtagggatgatcaaggagaagtatgagcaccggatgctgctgaagcacatgccgtcagagttccacctcttcctggaccacattgccagcctcgactacttcaccaagcccgactaccagttgatcatgtcagtgtttgagaacagcatgaaggagaggggcattgccgagaatgaggcctttgactgggagaaggcaggcaccgatgccctcctgtccacgagcacctctaccccgccccagcagaacacccggcagacggcagccatgtttggggtggtcaatgtgacgccagtgcctggggacctgctccgggagaacaccgaggatgtgctacagggagagcacctgagtgaccaggagaatgcacccccaattctgcccgggaggccctctgaggggctgggccccagtccccaccttgtcccccaccccgggggtcctgaggctgaagtctgggaggagacagatgtcaaccggaacaaactccggatcaacatcggcaaaagcccctgtgtggaggaggaacagagccgaggcatgggggtccccagctccccagtgcgtgcccccccagactcccccacaaccccagtccgttctctgcgctaccggagggtgaacagccctgagtcagaaaggctgtccacggcggacgggcgagtggagctacctgagaggaggtcacggatggatctgcctggctcgccctcgcgccaggcctgctcctctcagccagcccagatgctgtcagtggacacaggccacgctgaccgacaggccagtggccgcatggacgtgtcagcctctgtggagcaggaggccctgagcaacgccttccgctcggtgccgctggctgaggaggaggatttcgacagcaaagagtgggtcatcatcgacaaggagacggagctcaaggacttccctccaggggctgagcccagcacatcgggcaccacggatgaggagcccgaggagctgcggccactgcccgaggagggcgaagagcggcggcggctgggggcagagcccaccgtccggccccggggacgcagcatgcaggcgctggcggaggaggacctgcagcatttgccgccccagcccctgccaccccagctgagccagggcgatggccgttccgagacgtcacagccccccacgcctggcagcccttcccactcacccctgcactcgggaccccgccctcgacggagagagtcggaccccacaggcccacagagacaggtgttctccgtggcgcccccatttgaggtgaatggcctcccacgagctgtgcctctgagtctgccctaccaggacttcaaaagagacctctccgattaccgagaacgggcgcggttgctcaacagggtccggagggtgggcttctcgcacatgctgctcaccaccccccaggtcccactggctcctgttcagcctcaggctaatgggaaggaggaagaggaggaggaggaggaagatgaggaagaggaagaagaggatgaggaagaagaagaggaggaagaggaagaggaggaggaagaagaggaggaggaggaagaggaggaggaggctgcagcggcagttgccttgggggaggtgctggggcctcgtagtggctccagcagtgaggggagtgagaggagcactgaccggagccaggagggtgccccgtccacgctgctggcagacgatcagaaggagtccaggggccgggcctccatggccgatggggacctggagcctgaggagggctccaaaacgctggtgcttgtctctcctggcgacatgaagaagtcgcccgtcactgccgaactggcccccgaccccgacctgggcaccctggctgccctcactcctcagcatgagcggccccagcccacgggcagccagctggacgtatctgagccaggcaccctgtcctctgtcctcaagtctgagcccaagcccccggggcctggggcagggctgggggccgggacagtgaccacaggggtcgggggcgtggcagtcacctcctcacccttcaccaaagttgagaggacctttgtgcacattgcggagaaaacccacctcaacgtcatgtcttccggtggacaagccttgcggtctgaggagttcagcgctgggggcgagctgggtctggagctggcctctgatgggggcgctgtggaggagggggcccgagcgcccctggagaacggcctcgccctgtcagggctgaatggggctgagatagagggctctgccctgtctggggccccccgggaaaccccctcagagatggccacaaactcactgcccaatggcccggcccttgcagacgggccagccccggtgtccccgctggagccaagccctgagaaagtggccaccatctcccccagacgccatgctatgccaggctctcgccccaggagccgtatccctgtcctgctctctgaggaggacacgggctcggagccctcaggctcactgtcggccaaagagcggtggagcaagcgggctcggccgcagcaggacctggcgcggctggtgatggagaagaggcagggccgcctgctgttgcggctggcctcaggggcctcgtcctcctccagtgaggagcagcgccgtgcctctgagaccctctcaggcacgggctctgaggaggacacgcccgcctctgagccggcagcggccttgcccaggaagagcgggagggcagccgccaccaggagccggattccccgccccattggcctccgcatgcccatgcctgttgcagcccagcagcccgccagcagatcccatggcgcggccccagcattggacacagccatcaccagcaggctccagctgcagacgcccccagggtcggccactgctgctgacctccgccccaaacaacctcctggccgcggcctgggcccagggcgagcccaagccggagccaggcccccagcgccgcgcagcccgcgcctccccgcgtccacatccgccgcgcgcaatgccagcgcgtccccccggagccagtccctgtcccgcagagagagcccctccccctcgcaccaggcccggcccggggtccccccgccccggggcgtcccgccggcccgggcccagcctgatggcaccccctcccccgggggctccaagaaaggacccagagggaaactccaggctcagcgcgcaacaaccaaaggccgggcaggaggcgcggagggccgggctggggccagataatgacgcccgctgctctccgcggtcccccaccctcaccccggccccccacccgcagccggccacactggagcagctcccagcacagccttacgcgcccgacgcgcgccacccgcggccccagctttccgcctgcacccgcgaggacgcgcgcgagcacacgcggcgccccgccaggccttagggcccgtgggggacgcggccccgcgccgcggggagggtctgcctccccttcctcgccctgtgtcctctcatcctcccgccgcccgtcaggccggccagcctcacatcagtctctccgccccggggaaggctcagccacttttcatcgaggactccacttctggggacgcctggttcgttcgcccaccaggcctaggctacgctccatgctcccccagcaatctctgcctacacctcctgcggcgccttgccctcctccgacccctttccagccaaagtccccccaccccttcagagaagcagcctcaaattccagaagtggaggctccagcctccccgcgagggtccagccccacagtcttctgggagccattgtggccagggacggcctctggactgccaggctgggttggggacccagggaacatcggtctactcaggtgtgagggggcaggtctgacctgccccaaagttggctccatcctggacaactcggtgagaggcagtgggcaagtgatcttggagatgggtgggcaggtgattctgtgggcaggggatgtgctcccctgcacctctggggtgcagaaacctcttgcctccagatttgggtggagcctctgtgggaaccataggaagtgtgtgggctgccttcctgggcaagtatttcccagtgggaagttggagggggctttaacaaagttttactccctcccctgttcccctgatctagtgctcaggacccttcaccatcaggaattccttcctgtcatctaacctcagtcctgcctactgcagttccagccaacctgctctttcctgagttcaaagcaggtggagactggctggttaccatctttgcactggcccttcggagattcggggactcagttctggtggggtcaccctccctgtcctcccgcctgtgggagggagggagggctggctcaggcatcgtctcccgcaatgggcagagagagcagagacaggtggaccaacagacagctggcccctggaggcagaaaggcccttctaacttccagattgtatgcttgagtgatgggtccccagcccaagcccactcttccctcagctcacccttcagcctgttccttcttgccctgaccccagcccgtgcagctgctctactccaggaatggatgtggggactcttcctgggttctggctcctgcatagctcaccccacctcatcatgagcctcaactgcctacatctggggcaagcagcacaccggctgcagatgggacagccagccctgcctatctggacaggcccctgcagcctctgtcccctggcctagcctctctgtccttccctgagtcacagagagcaagccaagacatccagggaaagaggaagaaaggccttagtgtgccccagcagtctggctgcgtccagccaccatcacccggaaggatgcccacaaggcagctgaccctgaaagcagcctccccctcatggagagtcagcagcttgggcagccacttccaggccagggtggtggcttctctgcagaccagctgaggggaggactcctgggtggacagcctttgacgtccaccccacgctgatgcagaagctcccagaacactcaggaaacttctccggacagagccctccttgtcaacttgaggccctcccaaggccctctactgccctctgggtccagcagagggagtggaggaagggccactgcctcccacctagagcttctccgaatgacaatcagctcgtgccaggtggggaccaggatatgactcctggtgcccaggccctgggcctgctccttgccaccaaccgaaccgtgaatgtagggcccccagcctcacctctgccccaggaccaacaacaccctggtttggagctgggaggaagaagggggcctgagagagccccaggtccattctacccccagcttcactcagcactggagctggcagagacgcaaaacccagtctgcccttgggattccaaacctccctagggctcccaactgacctcaggcctctgagtcactgaatgtcaccaggagaggtgggggagggaaagtgggccagtggggagggggtcacctaggggactgcctctgtgcctctccccaggaagcatccagggcagaggaagccacatctcccggtgcccccaaccccagctgcagcctcctccccctgagcattcattctctccaccaggcctccaggtcctgagcccttcctctgtaaaagtgtcacaccacctccctcagcacttccccatcacaacaacctatgtcactgactcagatgcagggtctgctcaccccaacacatgccttccctccccagccacaccgtgcacgaagggggcacaggagaggagaggggctgtgccccaggctccccatttcccagctcctcacagaggcctggtttgctcagtcttctgaactccagggaccagccctggtgggcatggggtggggagcagggagttgcccttcccctccctcgggaagccacctaagaatgtttacatgccaaacagaatgtaacacccctccccaagcccttcccagtcactgcatggcctctgcccatcctgcacctgtccaccccaccccaacaccctggaagccactgtcaatgattagatcgggtctcggaagggaagtagccatcacaccattaaaaagcctgtggacctttt

SEQ ID NO: 360 - DNA, 3732 bp, Homo sapiens
  source 1..3732: mol_type = genomic DNA
agtgacgcgagacgcggggtgtggctctgccggcccaggcgcgatgaggcggctgcccgctgggtggcgccgatttcccggggaggtcccttctgggcccccggcggaggtgggagagagtcaggcaggagccgaggccggggagccctcttcgtcagctggtgctcactgcgccgcgccagcgccagccgggactcacccgcagctccatgcttgtgcccggttcgactcgtccatactccaagaagaggcagcccatgaggctcccagtccccactgagtgccaccctgaaggatgtcccagctctcctccaccctgaagcgctacacagaatcggcccgctacacagatgcccactatgccaagtcgggctatggtgcctacaccccgtcctcctatggggccaatctggctgcctccttactggagaaggagaaacttggtttcaagccggtccccaccagcagcttcctcacccgtccccgtacctatggcccctcctccctcctggactatgaccggggccgccccctgctgagacccgacatcactgggggtggtaagcgggcagagagccagacccggggtactgagcggcctttaggcagtggcctcagcgggggcagcggattcccttatggagtgaccaacaactgcctcagctacctgcccatcaatgcctatgaccagggggtgaccctaacccagaagctggacagccaatcagacctggcccgggatttctccagcctccggacctcagatagctaccggatagaccccaggaacctgggccgcagccccatgctggcccggacgcgcaaggagctctgcaccctgcaggggctctaccagacagccagctgccctgaatacctggtcgactacctggagaactatggtcgcaagggcagtgcatctcaggtgccctcccaggcccctccctcacgagtccctgaaatcatcagcccaacctaccgacccattggccgctacacgctgtgggagacgggaaagggtcaggcccctgggcccagccgctccagctccccgggaagagacggcatgaattctaagagtgcccagggtctggctggtcttcgaaaccttgggaacacgtgcttcatgaactcaattctgcagtgcctgagcaacactcgggagttgagagattactgcctccagaggctctacatgcgggacctgcaccacggcagcaatgcacacacagccctcgtggaagagtttgcaaaactaattcagaccatatggacttcatcccccaatgatgtggtgagcccatctgagttcaagacccagatccagagatacgcaccgcgctttgttggctataatcagcaggatgctcaggagttccttcgctttcttctggatgggctccataacgaggtgaaccgagtgacactgagacctaagtccaaccctgagaacctcgatcatcttcctgatgacgagaaaggccgacagatgtggagaaaatatctagaacgggaagacagtaggatcggggatctctttgttgggcagctaaagagctcgctgacgtgtacagattgtggttactgttctacggtcttcgaccccttctgggacctctcactgcccattgctaagcgaggttatcctgaggtgacattaatggactgcatgaggctcttcaccaaagaggatgtgcttgatggagatgaaaagccaacatgctgtcgctgccgaggcagaaaacggtgtataaagaagttctccatccagaggttcccaaagatcttggtgctccatctgaagcggttctcagaatccaggatccgaaccagcaagctcacaacatttgtgaacttccccctaagagacctggacttaagagaatttgcctcagaaaacaccaaccatgctgtttacaacctgtacgctgtgtccaatcactccggaaccaccatgggtggccactatacagcctactgtcgcagtccagggacaggagaatggcacactttcaacgactccagcgtcactcccatgtcctccagccaagtgcgcaccagcgacgcctacctgctcttctacgaactggccagcccgccctcccgaatgtagcgccaggagccacgtcccttctcccttccccgtggtggccccgctccctaaattttttaaaaagacaaaaacaaaacaacaacaacaacacacaaacctgacaagagaaaaacaaacctgaagctgccgagcaggagtggatgcagcctgatcagggtctggagcaaggagccgggctttcctgagctgtggcccggcagggaagatcgcctggacgtggagccagcatcgccccgtgccctcggcgtttgcatttgtaaacttgtggtcttcctatgtgtcagaaacaactgtgtcttgggggggaagaccctcgctgcgccgcttcccgccgcagcgcccgcgcctccgaggggacagcgccctctggagctcgctgggagcatcaccgcctggacgcccgcgccgcggaggagccggcgcccatctccacccgcacggctcgccggtccagagccatgagccaagagccctcttcacgctgctaactccaggggacagacgaagggacatctttggaaaacgctggttttggtttttaaaaagcccaactttttttttttaatttccataactaaagtgttcagactggagtgctctccttcaggcctcttcatagctgggacgttgcactggtccttttattgcttttccaagtacaactttctaatgctagccctccgtggtgctaggtgggcgttggccaggccccaagcacagccacagtagacctgggatctaaaacaagtttctgttttgggggtttgggttttttttttttttttttaatgttttgaatggaatttagttgcctccaagaattgtgccttatagcatttggggaccagggggtaactgcccctcctgaaatatccctcagcctcttcccttttccccagtgctctgttcaaacccgcctgggaaagggatcctgcccttagccctggctcgttgtgcattgcagtgaggcaaagaagaaagcaggtagattccttccgacagggcatcaagttcttcccgcccacgtcctctagcccacccctggtctgctccccagctgtttgaaggatagcacaagcccctcgtccctagagcttctctcccttttatttattctcttaacatccctttccccctggccttcctgcccccgcccccttctcagagcctcctagacaataggccctttggaccgagtttctcagggatgcccaggccacccctcagctcttcttagcgctggtctccagtcctgccctgggagctggagcctgggtatttggggacatcttgcctcagttgtatggttctttcctgtgggctcaattttgccctacatagttggataaaactctgtgctgtcctggagagtaaagctgttcacccacacagctgggcccggcttgtgccccgtggagcctggcacattccaggctcctaggaggaggcatcagagaaagacaccctgagttttactggcctgacacccttctccagagaagacctgtgaacctgagcccaagggcaagtgtacacttgtttactgtgtaagcaagagtagaagaatgtctaatgtacagtggaaccttgtacagaataaataatagctttgagaaatc

SEQ ID NO: 361 - DNA, 1940 bp, Homo sapiens
  source 1..1940: mol_type = genomic DNA
cgcgcaaggggcgagtctgtccagccggcagcaccccaggccggatggacgcttgttcctggttctgtgccccgtgagcgctcaacgccctggtgtgttcactgaccatggtgcctgggctgcggcgccgggcggggcacggcgggacttttcgggacctttcctggggggagcctcgctttccccgcctccagcctccgcccggatggcaggcgggcggggccccagtccaggccttgagacccagaagggagcgaaggtttttgctgcgccaacgcagtgaccgaaggctccgctcacgcccggcctgatcctgcctgaagatggtgccactggtggctgtggtatcagggccccgtgcccagctctttgcctgcctgctcaggctgggcactcagcaggtcggcccccttcagctgcacaccggggccagccatgcggccaggaaccattatgaggtgctggtgctgggtgggggcagtggcggaatcaccatggctgcccgcatgaagaggaaagtgggtgcagagaatgtggccattgttgagcccagtgagagacatttctaccagccaatctggacactggtgggtgctggtgccaaacaattgtcctcatctggtcgtcccacggcaagtgtgattccatctggtgtagaatggatcaaagctagagtgactgagttgaacccagacaagaactgcattcacacagatgacgacgagaagatctcctaccgatatcttattattgctctcggaatccagctggactatgagaagattaaaggcctacctgaaggtttcgctcatcccaaaatagggtcgaattattcagttaagactgtagagaagacatggaaagctctgcaggacttcaaagagggcaatgccatcttcaccttcccaaatactccagtgaagtgtgctggagcccctcagaagatcatgtacttatcagaagcctacttcaggaagacagggaagcgatccaaggccaatatcattttcaacacttctcttggagccattttcggggttaagaagtatgcagatgccctgcaggagatcatccaggagcggaacctcactgttaactacaagaaaaacctcattgaagtccgagccgataaacaagaggctgtatttgagaacctggacaaaccaggagagacccaagtgatttcatatgaaatgcttcatgtcacacctccaatgagcccaccagatgtcctcaagaccagtcctgtggctgatgctgctggttgggtggatgtggataaagaaactctgcaacacaggaggtacccaaatgtgtttgggattggggactgcaccaaccttcctacgtcaaagaccgctgctgcagtagctgcccagtcaggaatacttgataggacaatttctgtaattatgaagaatcaaacaccaacaaagaagtatgatggctacacatcatgtccactggtgaccggctacaaccgtgtgattcttgctgagtttgactacaaagcagagccgctagaaaccttcccctttgatcaaagcaaagagcgcctttccatgtatctcatgaaagctgacctgatgcctttcctgtattggaatatgatgctaaggggttactggggaggaccagcgtttctgcgcaagttgtttcatctaggtatgagttaaggatggctcagcacttgctcatcttggatggcttctgggccaaaactgcagtcactgaatgaccaagagcagcacgaaggacttggaacctatccttgtaaagagttccttgatgggtaatggtgaccaaatgcctcccttttcagtacctttgaacagcaaccatgtgggctactcatgatgggcttgattctttgggaataataaaatgaaataatacttttattttctgaataaaagtttgtcactgattgtgttctatga

SEQ ID NO: 362 - DNA, 5634 bp, Homo sapiens
  source 1..5634: mol_type = genomic DNA
aagcaatcgaaagaagatggccgctcccacgattgtgggggaggtctccactggggaggggcagaggaaattcggtcgaaaaagagataaagctgaaggaaataaaattggcacggagtctgggaaagtagtttccctaaaggagtcttagaaatagggttggtctggaacctaaggggcggagccgacgcgtagagccgctttgcgcgtgcgcatcacctaggcggttagatttgaatacttcactgaggcgagccgggcgttgtgagcggactgctagaggcggctgtctgtttccgctctaaggaaactcagagcgtgtggaccccaaacaagtctgcgcaaaatttgtcgaggaggtttgccgcggcagaaaagttttcttcaaaaatggatggggtgtcttcagaggctaatgaagaaaatgacaatatagagagacctgttagaagacggcattcttcaatattgaaacccccaaggagtcctcttcaggacctcagaggtgggaatgaaagagttcaggaatccaatgctttgagaaataagaaaaactctcgtcgagtcagctttgcagatactataaaggtattccagacggagtctcatatgaaaatagtgagaaagtcagaaatggaagaaacagaaacaggagaaaatcttcttttgatacagaataagaaattagaagataattactgtgaaattactgggatgaacacattgctttctgctcccattcatacccagatgcaacagaaggagttttcaattatagaacatacccgtgaaaggaaacatgcaaatgaccagacagtcattttttcagatgaaaaccagatggacctgacatcaagtcacactgtaatgattaccaaaggccttttagataatcccataagtgaaaagtccaccaagatagataccacatcatttctagctaatttaaagcttcacaccgaggactcaagaatgaaaaaagaagtaaatttttccgtggatcaaaacacttcttcagaaaataaaatagatttcaatgacttcataaaaagattgaaaacaggaaaatgtagtgcttttcctgatgtgcctgataaagaaaattttgagatacctatttattccaaggaaccgaacagtgcctcttctacacatcaaatgcatgtatctcttaaggaagatgaaaataacagtaatattactaggctctttagagaaaaagatgatgggatgaatttcacccagtgtcatacagccaatattcagacattgattcccacatccagtgagaccaactcacgggaatctaaaggtaatgatattacaatttatggcaatgactttatggacttgacatttaaccacactttgcagatcttacctgcaacaggtaatttttctgaaatagaaaatcaaactcagaatgccatggatgtaacaacaggttatggaactaaagcttcaggaaataaaacagtttttaagagtaaacaaaatactgcttttcaagacctttccataaactctgcagacaaaatacatattaccagaagtcatattatgggggcagaaactcacatagtctcacagacttgtaatcaggatgccagaatattagccatgaccccagaatctatatattctaatccatctattcaaggttgtaagactgttttctattctagttgtaatgatgccatggaaatgaccaaatgtctctcaaatatgagagaggagaaaaatttgctaaagcatgacagtaattatgctaaaatgtattgcaatccagatgctatgtcttctctcacagagaaaactatttattccggagaggagaacatggacattaccaagagtcatacagttgcaatagataatcaaatttttaaacaagatcaatcaaatgtgcaaatagcagctgcaccaacacccgaaaaagaaatgatgctccaaaatcttatgaccacatcagaagatgggaaaatgaatgtaaattgtaactcagttcctcatgtatctaaggaaagaatacagcagagcctgtcaaatcctttgtctatttcattgactgatagaaagactgaactcttatcaggtgaaaatatggatttgactgaaagtcacacaagtaacttaggaagtcaggttcctcttgcagcttataatctagcaccggagagtaccagtgaatctcactctcagagcaaaagctcttcagatgaatgtgaagaaattaccaaaagtcgtaatgaaccatttcagcgatcagacataatagccaaaaacagcttaaccgacacctggaacaaagacaaagattgggttttgaagattttgccctaccttgataaagattctcctcagtcagctgattgtaatcaggagatagcaacaagccataatatagtctactgtggtggagttcttgataaacaaataactaatagaaatacagtatcatgggaacaatctttgttttctaccacaaagccattattttcatcaggacagttctctatgaaaaatcatgatactgctataagtagtcatacagtgaaatctgtactaggccagaattctaaactggctgagccactgaggaaaagtttaagcaatcccacacctgactattgccatgacaagatgattatatgttcagaggaagagcaaaatatggatctaacaaagagccacactgtcgtcattggatttggtccttctgaactacaagaacttggtaaaactaatttagaacacactactggccagctaacaacaatgaacagacagatagctgtaaaagttgaaaaatgtggtaaaagtcccatagaaaaaagtggagtgcttaaatctaactgtattatggatgtgttagaggacgaaagtgtacagaaacctaaatttccaaaggaaaagcaaaatgtcaaaatttggggaaggaaaagtgttggtggaccaaaaattgataagactattgtattttcagaagacgataagaatgatatggatatcactaagagttatacaatagaaataaaccatagacctttattagagaaacgtgattgtcatttggtgccattggcaggaacttctgaaactattttatatacatgtaggcaggatgacatggagatcactagaagtcacacaactgccttagaatgtaaaactgtctcaccagatgaaataactactaggcctatggacaaaactgtagtgtttgtagataatcatgttgaactagaaatgacagagtcccatactgttttcattgactaccaagaaaaggaaagaacagacagacctaactttgaactatcccaaaggaaaagcctaggaacaccaacagtgatatgtactcctactgaggagagtgttttctttccaggaaatggtgaaagtgaccgtctagtagcaaatgacagccagctaacccctctggaggaatggtctaataataggggccctgtagaggtagctgataacatggaattgtctaaatcagccacttgcaaaaacatcaaagatgtacaaagtcctggatttctgaatgaacctctatcaagcaaaagtcagagaagaaaaagccttaagctaaaaaatgacaagaccattgtattttcagagaatcataaaaatgatatggatattacccagagttgtatggtggaaatagataacgaaagtgccctggaggataaagaggacttccatttggcaggggcttctaaaactattttgtattcatgtgggcaggatgacatggagatcactaggagtcacacaactgccttagaatgtaaaactctcctgccaaatgaaatagctattaggcccatggacaaaaccgtattgttcacagataattacagtgatctggaagtcaccgattcccatactgttttcattgactgtcaagccacagagaaaatacttgaagaaaaccctaaatttggaataggaaaaggaaaaaacttgggtgtttcctttcctaaggataatagctgtgttcaagaaatcgctgaaaaacaagcactggctgtaggaaacaaaatagttcttcacaccgagcaaaagcaacaactctttgctgctactaatagaactactaatgaaatcatcaaatttcatagtgctgctatggatgaaaaggtcatagggaaagttgtagaccaggcctgtacattggaaaaagcgcaagttgaaagctgtcagttaaataatagagatagaagaaatgtggactttacaagtagtcatgcaactgctgtttgtggatccagtgataattattcctgtttaccaaatgttatttcctgtactgataatttggagggtagtgccatgctcttatgtgataaagatgaggaaaaagccaattattgcccagtgcaaaatgatcttgcttatgcaaatgattttgccagtgaatattacttggaatctgagggacagcctctctctgctccttgtcctttgttagagaaggaagaagttattcaaaccagtaccaaaggacagttagactgtgttataacactgcacaaagatcaagatctgattaaggatccacgaaatctattggctaatcaaactttagtatatagtcaagatctgggggagatgactaaacttaattcaaagcgagtatcttttaagcttccaaaggatcaaatgaaagtctatgttgatgacatttatgttattcctcagcctcatttctcaaccgaccaacctccattacctaaaaaaggacagagtagtatcaataaagaagaagtaatactgtctaaagctggaaataagagtttaaatattatagaaaattcctctgcacccatatgtgaaaacaagcccaaaatactcaatagtgaggaatggtttgctgcagcctgtaaaaaagaactgaaggaaaatattcaaacaactaactataatacagctctagatttccacagtaactcagacgtaactaagcaagtcattcaaactcatgtcaatgctggagaagcaccagatcctgtaattacatctaatgttccatgttttcatagtatcaaaccaaatctgaataatttgaatggaaaaactggagagtttttagcctttcaaactgttcatctaccaccccttccagagcaattacttgaattaggaaataaggcacacaatgatatgcatatagtgcaagctacagaaatacataatattaacataatctccagcaatgctaaagatagtagagatgaggaaaataaaaagtctcataatggagctgaaaccacctctctaccgccaaagacagtttttaaagataaagtaaggagatgttctttgggaatctttttgcctagattgcccaacaagagaaattgtagtgtcactggtattgatgacctggaacagattccagcagacacaactgatataaatcacttagaaactcagccggtctctagcaaagattcaggcattggatctgttgcaggtaaactgaacctaagtccttctcaatatataaatgaggaaaatcttcctgtatatcctgatgagatcaattcttcagactctattaacatagaaactgagccaaaaaagaacgtgggtacaagaagaagaagatattcataa

SEQ ID NO: 363 - DNA, 2788 bp, Homo sapiens
  source 1..2788: mol_type = genomic DNA
aatactcccgctctgtttttatgaggctgggaaaatagaacgaggaagtggtgacgcactgggctctcacgaatacaactagaagctgcaacgactgtgtggctctatcgattcgggagaggtccagaccggaaatggtcgtttccatggtaaccctgagcaggttgcctgggagatgacctctttcgggtctctttgaatctccgctgtagcgtcacctggaaggcagatctaacagagaacctggactgtctcctatcatgattcccgggaaatatcgctctgtttctggccgggctgcgaacaacgtgaactgcgggcttcatctggttattcaaacatcatcgcttcctgaaaaaaacaaagttgaattcaagctaaataaagacacatcgtcattccccggtagacttttacaacatgaccttgaaagaaactactcaagtaggcaaggtgatcatattaatttggtgagctcatcattgtcatcatttcctattcttcaacgttcttctgaagagaaaattctttactcagacaggttgagcctagaaagacaaaagctgaccgtatgtcctatcatcaatggggaagaccaccttcgtttgttgaactttcaacacaattttataactcggatacaaaatatttctaatctacagaagttaatatcgttggatttatatgataaccagattgaagaaattagtgggctttcgactctgagatgtcttcgtgtccttctgttggggaaaaacagaatcaagaaaatctcaaatctggagaatctaaaaagcttagatgtcttggatcttcatggaaatcagattaccaaaattgaaaatattaatcatttgtgtgagttgagagttttaaatcttgccaggaactttttaagtcatgttgataatcttaatgggctggattcactaactgaacttaacttgcgacacaatcaaatcactttcgtgagagatgtggataatttgccctgcctccaacatctctttctcagctttaacaatatatctagttttgacagtgtttcctgccttgctgactcttcttccctctcggacatcacctttgatggcaatcccatagctcaagagtcatggtacaaacacactgtccttcagaatatgatgcagctgcgccagctagatatgaagagaatcacggaagaagaaaggcgtatggcatctgttttagccaaaaaagaggaagagaagaagcgggaaagtcataaacaatctttgcttaaggagaagaaaaggttaacaattaacaacgtagctcgacagtgggacttgcaacaacaacgagtagccaatattgctacaaatgaagatagaaaagattctgactctcctcaggacccctgtcagattgatggaagcaccctctctgcattcccagaggaaacagggcctctagactcaggactcaacaatgctttacaaggtttatctgtcatagacacataccttgttgaagtggacggggatacactttccctatatggctcaggagcactggaatctctggataggaattggagtgttcaaacagcaggaatgatcacaacagtctccttcactttcatagaatttgatgaaatcgtccaagtgcttcctaaactgaagattaagtttcctaattctctgcaccttaaattcaaggaaacaaatcttgtaatgctgcagcaatttaacgcactagcccaactccgtcgtattgaccagttgacaattgatcctcaaggaaatccagttgtcaattttacactctggaaatactatgtactgtttaggctaagccatttcagtatgcagaaaataaatggaacagaggtgacacagaatgatatgataatggctgaaaggctctttggaatcctagcacatgtagcatcttctgagttaccccagtatcgtctgatttccattctgggtgatgccaggaaaaagcaatttcggtatctactagaatccaaaggaaaaaaacctggtattatcaacgaagaaaataatgacagcaaaagacttgtaggagaaaacacaaatcgtgctacattaaattatactacaagagacttttataatgaaaagctagaggaaataaaggaaaagaagaaattctgtaaaacatatatagaagaccttgtgaaggaagccacagaaatcaacatgaaaaatgaggctttgcagaagctttggccacagatgttcattgagcttgttagggatgcagtcatagaaattcgcaataaaaattcctatatgaagctctgcctacagcagataacagaccaaaaataaaaatggcctttagttacagttgattttggcagttttattttttgaaggttgaaaatatgcaggttatacatgttaaaacaacaacaacactatcctataaactagaaagactagtataaaagcattattgcccactgttctcatagctaaaagttaagaaggaaggaaggaaagcaggagaaaggaaggattaattgcctgtatgtgaggaccaaacaacctttgggaactaaacagttttcagagatggcgtggcactgcatccttggttcttgctttgattggtgccctgctatagcccaaagcacgtagtatttgctgatgattcagcatgagctgcatctacctacttttagctgataattttcagttatttccctttttattttatgtcatgatttcaaagccaaaaatatgttctttttatgagtgaagaataaacttactaacaaattagtcaaaataaa

SEQ ID NO: 364 - DNA, 775 bp, Homo sapiens
  source 1..775: mol_type = genomic DNA
cacggcggtcacgggcaaggtgccccgggattgacgccgcctgtggccagagccggagtaacgggactcccagctgcgcgtcgcagtcccgacgcgagaagggctggagtcggcgtccagcctagagcccccggtgggagccaggccgggacgcgtgcaccatgccctacctgctcatcagcacccagatccgcatggaggtgggccccactatggtgggcgatgaacagtcggatccagagctgatgcagcatctgggggcttcaaagagaagagccttgggaaacaacttttatgaatactacgtcgatgaccctccccgcatagtcctggacaagctggaacgcaggggcttccgtgtgctgagcatgacgggggtgggccagacgctggtgtggtgtctgcacaaggagtgaccttctcatgctgatttgcagacggggcacccctgtggaggggctgctgtgggccctgacctccaagctcctgcctcaccgtctgccttgctcctctcttcccaaatcatcaccgccatgggcccagccccaaagggcagtgaatggccttctctgaaaccctgcgtcaagcagtgggagagggcagtgcccggtgccctggtgctcccagctgccctcctgcttcgggcctgggccgagggccttgtgtaggccatgttcctcgggcagctgccccgggccggagctgggcactccagcggccctggcgcgtggctcctgcatagctagcccaagccaataaagggctgtgatgagtg

SEQ ID NO: 365 - DNA, 7976 bp, Homo sapiens
  source 1..7976: mol_type = genomic DNA
gttccaggcactccgcgtcgagcaccggagtcccgagccgtggctgccacgggcggtgggcgggcggaggagagcaccggaccaccagtgcaggctgccgagtcggggcggccgcccacggggaagctgcgaggcgcgggagcacctgggggaccgcttgcagcggggacgcgaggacccgggctgggctttcctcacccgggtaccttgttatcccataactttggtatcctgaaatctgaggattccaccaagataatatgataagaactttcagtgatttggggccatatcctacttagactaatgtggaatttccagatttcctgagagcttggtacagcagcacacactgcttgctaatcagcacaggcaataatgccatctctgcctcaagaaggagttattcagggaccctctcccctggatttgaatacagaattaccttatcaaagcacaatgaaaaggaaagtcagaaagaagaaaaagaagggaaccattacagcaaatgttgccgggacaaagtttgaaattgttcgtttagtaatagatgaaatgggatttatgaaaactccagatgaggatgaaacaagtaatcttatatggtgtgattctgctgttcagcaggagaaaatttcagagctgcaaaattatcagaggatcaaccattttccaggaatgggggagatctgtaggaaggatttcttagcaagaaatatgaccaaaatgatcaagtctcggcctctggattatacctttgttcctcgaacttggatctttcctgctgaatatactcaattccaaaattatgtgaaagaattgaagaaaaaacggaagcagaaaacttttatagtgaaaccagctaatggtgcaatgggtcatgggatttctttgataagaaatggtgacaaacttccatctcaggatcatttgattgttcaagaatacattgaaaagcctttcctaatggaaggttacaagtttgacttacgaatttatattctggttacatcgtgtgatccactaaaaatatttctctaccatgatgggcttgtgcgaatgggtacagagaagtacattccacctaatgagtccaatttgacccagttatacatgcatctgacaaactactccgtgaacaagcataatgagcattttgaacgggatgaaactgagaacaaaggcagcaaacgttccatcaaatggtttacagaattccttcaagcaaatcaacatgatgttgctaagttttggagtgatatttcagaattggtggtaaagaccctgattgtagcagaacctcatgtcctgcatgcctatcgaatgtgtagacctggtcaacctccaggaagcgaaagtgtctgctttgaagtcctgggatttgatattttgttggatagaaaactaaagccatggcttctggagattaaccgagccccaagctttggaactgatcagaaaatagactatgatgtaaaaaggggagtgctgctaaatgcgttgaagctactaaacataaggaccagtgacaaaagaagaaacttggccaaacaaaaagctgaggctcaaaggaggctctatggtcaaaattcaattaaaaggctcttaccaggctcctcagactgggaacagcagagacaccagttggagaggcggaaagaagagttgaaagagagactcgctcaagtacgaaagcagatctcacgagaagaacatgaaaatcgacatatggggaattatagacgaatttatcctcctgaagataaagcattacttgaaaagtatgaaaatttgttagctgttgcctttcagaccttcctttcaggaagagcagcttcattccagcgagagttgaataatcctttgaaaaggatgaaggaagaagatattttggatcttctggagcaatgtgaaattgatgatgaaaagttgatgggaaaaactaccaagactcgaggaccaaagcctctgtgttctatgcctgagagtactgagataatgaaaagaccaaagtactgcagcagtgacagcagttatgatagtagcagcagctcttcagaatctgacgaaaatgaaaaagaagagtaccaaaataagaaaagagaaaagcaagttacatataatcttaaaccctccaaccactacaaattaattcaacaacccagctccataagacgttcagtcagctgccctcggtccatctctgctcaatcaccttccagtggggacacccgcccattttctgctcaacaaatgatatctgtgtcacggccaacttctgcatctcggtcacattccttaaaccgtgcttcctcctacatgaggcatctgcctcacagtaatgatgcctgctctaccaactctcaagtgagtgagtctttgcggcaactgaaaacaaaagaacaagaagatgatctaacaagtcagaccttatttgttctcaaagacatgaagatccggtttccaggaaagtcagatgcagaatcagaacttctgatagaagatatcattgataactggaagtatcataaaaccaaagtggcttcatattggctcataaaattggactctgtaaaacaacgaaaagttttggacatagtgaaaacaagtattcgtacagttcttccacgcatctggaaggtgcctgatgttgaagaagtaaatttatatcggattttcaaccgggtttttaatcgcttactctggagtcgtggccaagggctgtggaactgtttctgtgattcaggatcctcttgggagagtatattcaataaaagcccggaggtggtgactcctttgcagctccagtgttgccagcgcctagtggagctttgtaaacagtgcctgctagtggtttacaaatatgcaactgacaaaagaggatcactttcaggcattggtcctgactggggtaattccaggtatttactaccagggagcacccaattcttcttgagaacaccaacctacaacttgaagtacaattcacctggaatgactcgctccaatgttttgtttacatccagatatggccatctgtgaaacagaagggaagatcgccattggttatacataacagcaattcatttttttcctctgaagttgaacatgcaaagaacatgaccattaagtgctgttttatgtatataagacatatatatgtgtgaaaatatatgcacatatgcaccctaataacatatatttattatattaaatgatatatgaaagaagaattagcagaaaatggaatataagacttaacctttctggaaacgtaataaaccatgttaaaattgtttacacaaatatgtgaatgtctagaatctgctaggtttataattaattccttcctactagaaatgttatttttgctgcagagtatataaaacaaattgatcttgaagatccaattacagtgttaaattattttctagataacatgccttttgacctgaaaaagggtttagtataataccttaaaaattctcatatatagtagccattttaaatgaaacaaaaagatttagaagcctggtgttgcttgatgataagattaagaagtttaaaacgggtttatcattactatagcacactgtaaagtgctagaaaagtcataacctgattctccaatctttttattcctctatgtggaaatttagctacttgtaataaggtacattttcagtaaggatctggtgagatcatattatgatctaacatgaaagacaggctgggcgcggtggctcacgcctgtaattccagcactttgggaggccgaggtgagtggatcaccgctggtcaggagtttgagactagcctggccaacatggtgaaaccccatctctactaaaaatacaaaaattagctgggcgtgatggtaagtgcttgtaatcccagctacttgggcggctgagacaggagaatcacttgaacctgggaggcggaggttgcagtgagccgagattgtgccattgcattctagcctgggtgacaagagtgaaactctgtctcaaaaaaaaaaaataataataaaataaaataaataaataaataaaaagaagataaaaataaataaataaaatggaagacaatccaatgggttaaaaataaaatgtaaactagctttcatttttacttttcataatcacataaaggaacagaaaatgatggtaacaaaatctttctatatggcttttatgtcttataccactcatttttatttggaaagtatatctttgatgggtttaacatgtggttaaatacaatttctcctgtttcgcagaagtagaagagttgacacatttcactcattttagtgttacaggataatgagacaaacttatttttataaatctctcaaggttgaaatcaacttatattgcaaattctaatacagtagtttctcattgcaccacagaaacagttaaaggattgtgaatagaagatttcaattatcacatattacaagtcatcagtgtacccttgagggtttttaaaaaatcaaaacagagaacgaagtgttcttgtccaaagttgttatgcataagtttcatagcagtttacttccttttcttgaatacagtttttaaaaccaagagtgagctttcagttttccataaaaatataagccgtactactttgacattgaaatcatcagtgcagccatcacttcttagaatttatttaaacttcttctcccaacagttttattttcttttagctgctaattattttcgaaattcatgaatgttttacctccttttactattctgaaagttatttcaagaagtggccccaaagcaggagaactgagaggggcaaattggcctggtttaattcacagcctgaagaattggcaacctaaagttataagttagatgtattttgcttttcaagccatcttctgagccttttttaggctgaaatgatttgtttatttcccaaattattgctagctacttgattttttatggctacctaacatccacatttggtagatacttttcctctctgcatgcatcccaaagaagaatttgctatttgtggaagaagagaataagggtatcagaatgaaggaaattacagtgactacactgtttatgactccattttgtgaattcttaaatatgctatggatttttttttagaaaaaataatgcaaaaattgggatattacagaatcaccataaagatgatcaacaagtaataagtcttttcatggagttcatttttcttttaaattcatgatttggccacaaaaatatatatataagtgtctgatatatgataacagcccagtttctcggccactcatttgcattatcttaaatcacaaataattacttaatttgctggagtgtgtgctttgcaacttttgtaccagagcaaaatttgtatttaaaacaaaaaataagaatgcccatcactaggagaaacactcctcacagaaaacacacacacacacacacacacaatttaaaaactgagtaaatttaaatgtatgaaagtaccccacaaattgatttcaacaaataaatttcatttctctagctacttatgtctggccttattttgagcgttacaattttattgccttcatttgcctatttagactgatgtagtttgatatgatgaagttgtgaataaaagccttgtgttcattatttatatatactacctggtatgctatggactgtgtctgctgtagtgctattccctaatgagcaactaagagaagacacaacaataaaccatggaagtgttgggaggccatggaaatgatttagaggtataaaatattcccaagtttttattataaatttttattcataggttaaaacatataagcataagtgattgtacaggtgtgactcccttttctaggagagaaaatagctttatttgaaaactccaaaagctacttaatcttaccagaggtttttaataggggaactgggtttacttacaatgaaagcatattttcattctgctatagaaaaacatatccctgctcattcagtaaatctaagattggaatgctttctagaactatgcaatatttgaataatttctagaaatgtctaagaaacaaccttttttattttaaatcatcacttacaaacgtagtctgagactgcaaactagttttcacttgactaatccatcattatagattagttaccatttgctctatataatctattgaagaaactattgttattcatattttgattaattttactagcaacaaatttttattttagtagcattgcatttaccttaaatatgtaaaaatgaagttgtaacaggatcaaatatggaaatggcaatggtaactctgcctagaacatagttgaatgtccttggttgtcggtaagatgcaaagatctatacaaattttatcataggtcaaaattatttctaaatatacaaacagtttcaactatttctttctccctaaaactaaaaccaaaccaaacccaaatgaagaaacctaaacttcttttcatctaatagttatacccaactagataatagtagcttctagacatcaataaaaagatttcattttaactgtctttttaatttgtaaaatatatgagtatggaattttgtatctaacttgaaatttcagatgttttaataatccaaatacgttcttctttagcatgtcaaagtactaatagttaaaaaatttctttagatttaagcatatacattacttgactttttcaaaagtatcaaaaaattgatagctgcagaaatgccattatttgattttctaaaaaacattgattcattcttaaatgtgtattctttaaaaaatagtaaatacctcaagagtgacagaaaactttccttttctgttctgtaatgctaatttaaactttgagtcttagtttacatggtcataggggttaaataaaatgtataactgtacaattaattgtgttcttgtgacctgatgattttttgaaaatttgcttttctctttaagaaatttaagttttcaagggccgtattagttatctaaatattttgggctaatgttgacttataaataaataaaaatttagaaatatattcatgatgacaattttgttacttacactgcctattctttatttcttttttagttcaaaggtgaaattttgacctttgtattaacaaagcctcaagaaaagagaaattctgccttttaaacattggttttccttgcattttatggtggtgtgattttgcctcagcaataataaaacataaaatatgttgttgcatcaagttcagtttgtctgctgagattatttttaagaaccaggttgaagcctctatgcctaaaaaagcgtttattgtctggatacatataaagcaagatatatggctacaaataagtcttgcaaccaaaattggtatattaaaatttactgcacactttgagattgctgccattttttggtgctttttggacctcgtcataaagggatgtatcgtatattagggaaaattactcaagttacacattctacattaactgcgctgtattatctacaggtacaatcaatggaccaatagttcctaaattagtaataaggcttaccttacaaaagtaatgaaataacactgatatttctctttcaaaggctaacagcaattcttggtcctgagctattcagttcatacaataactactgtacatgctacaacatctgaatattaatggttttgctgcagattctgggtatgaggattagcttgaaagcaatacatttgctaacatgaatcatgactcacattatccccgtgtgctttactacctgtatatgaatgcaaatgttgttacagaaaatatgcttgaaatgtcaatacagtgtgcaattagcgttgcattgtcatgctccagcatgtgatatctgtatggtgaagttatttcaattactctgatacattactataataaaaaagtttaacctaagaaa

SEQ ID NO: 366 - DNA, 1534 bp, Homo sapiens
  source 1..1534: mol_type = genomic DNA
tcgtcaggctcctgcgccccaggcatgaaccaaggtttctgaactactgggcgggagccaacgtctcttctttctcccgctctggcggaggctttgtcgctgcgggctgggccccagggtgtcccccatggcggggccgcgggtggaggtcgatggcagcatcatggaagggggcggccagatcctgagagtctctacggccttgagctgtctcctaggcctccccttgcgggtgcagaagatccgagccggccggagcacgccaggcctgagttctggaggctggaagtccaagatcaaggtcctgacaaggcctcaacatttatctggactggaaatgattcgagatttgtgtgatgggcaactggagggggcagaaattggctcaacagaaataacctttacaccagagaagatcaaaggtggaatccacacagcagataccaagacagcagggagtgtgtgcctcttgatgcaggtctcaatgccgtgtgttctctttgctgcttctccatcagaacttcatttgaaaggtggaactaatgctgaaatggcaccacagatcgattatacagtgatggtcttcaagccaattgttgaaaaatttggtttcatatttaattgtgacattaaaacaaggggatattacccaaaagggggtggtgaagtgattgttcgaatgtcaccagttaaacaattgaaccctataaatttaactgagcgtggctgtgtgactaagatatatggaagagctttcgttgctggtgttttgccatttaaagtagcaaaagatatggcagcggcagcagttagatgcatcagaaaggagatccgggatttgtatgttaacatccagcctgttcaagaacctaaagaccaagcatttggcaatggaaatggaataataattattgctgagacctccactggctgtttgtttgctggatcatcgcttggtaaacgaggtgtaaatgcagacaaagttggaattgaagctgccgaaatgctattagcaaatcttagacatggtggtactgtggatgagtatctgcaagaccagctgattgttttcatggcattagccaatggagtttccagaataaaaacaggaccagttacactccatacgcaaaccgcgatacattttgctgaacaaatagcaaaggctaaatttattgtgaagaaatcagaagatgaagaagacgccgctaaagatacttatattattgaatgccaaggaattgggatgacaaatccaaatctatagagtatttgcctcttaaatgatacctcattgatatattgcactatttcataaatactataaaataatgactaggaagtaacttattaaaggctatgacttaaatttgaagatgaagtacagtgttctaggtttgctgagaaggcttcattaaattaatctcactttgaatatctcctgagagatggacaatgaaatatcagttggtggatatgtgtgatagctgatttcaatattgaagtattgaaataaaatattctttacacctga

SEQ ID NO: 367 - DNA, 1399 bp, Homo sapiens
  source 1..1399: mol_type = genomic DNA
agaaggcctcactcccagactccttgcggagctcgccgcctgattctaggctggtcactactccgagcctgtgacgtttgcggcagccaggccgtcgacgatgcccagtgaaactctctgggaaattgcaaaagctgaagtggaaaaaaggggaattaatggaagtgaaggtgatggagctgaaattgcagaaaaatttgttttcttcattggcagtaaaaatgggggaaagactactattattctaaggtgtcttgacagagatgaaccaccaaaaccaaccttagctttggaatatacatatggaagaagagcaaaagggcacaacacaccaaaagatatcgctcacttttgggaactcggtggaggaacctctttattggacttaatcagcatacccatcacaggtgacaccttacggacgttttctcttgttctcgttctggatctttcaaaacctaatgatctctggcccaccatggaaaatctcttgcaagccacaaaaagccatgtagacaaagtgataatgaaactgggaaagacaaatgctaaagcagtttctgaaatgagacagaagatctggaataatatgccgaaggatcatcctgatcatgaattaattgacccatttccggtacctctggtcataattggaagtaaatatgatgtttttcaggattttgagtctgagaagagaaaggtaatatgcaagacacttcgatttgttgcacattattatggagcatcattaatgtttaccagtaaatcagaagctctattactaaaaatacgtggagttatcaaccagttggcatttggcattgacaaaagcaaatcaatatgtgtggatcagaataaaccgctgtttatcacagcaggattggattctttcggtcaaataggatctcctcctgttcctgaaaatgacattggaaagcttcatgcccactcacctatggagttgtggaaaaaagtgtatgaaaagctctttccaccaaagagtattaacacgctgaaagatatcaaggaccctgcgagagatcctcagtatgctgaaaatgaagtcgatgagatgagaattcagaaggatctggaactggaacagtacaaaagaagttcttccaagtcttggaaacaaatcgagcttgattcttgaacctatttcaattattgtatatttatttcttcttttccaaatacaaataagattatactgtgaattaactattgtggcaatatgtgaagaaagttaaactgtataatttgttaaaggacaagctggatttcttggactagtgcatctccctgtatatcttgaagctttttaaaaggaaaaattattgtagaaccacgtgtaattttttttaaaataaaagaatcttctactacctacctctaa

SEQ ID NO: 368 - DNA, 934 bp, Homo sapiens
  source 1..934: mol_type = genomic DNA
gggattccttaccccatcaccatgtgcacctcagaaactttccaagcgctggacaccttcgaagccagacatgatgacatcgtgctagcatcttatccaaagtgcggttcaaactggattctccacattgtcagtgaattaatatatgctgtttctaaaaaaaagtataaatatccagaattcccagttcttgaatgtggggattcagaaaaatatcagagaatgaaaggctttccatcaccaaggattttggcaactcacctccactatgacaaattacctgggtctatcttcgagaataaagccaagatattggtgatatttcgaaaccctaaagatacagcagtatcttttttgcatttccacaacgatgtccccgatattccaagctatggctcttgggatgaattcttcagacagttcatgaaaggacaagtttcttggggaaggtattttgattttgcaatcaattggaacaaacatcttgatggcgacaatgttaagttcatattatatgaagacctgaaagagaatctggctgctggaataaaacagattgctgagttcttgggattctttctaactggggagcaaattcaaactatctcagtccagagcaccttccaagccatgcgtgcgaagtctcaggacacacacggtgctgtcggcccattccttttccgcaaaggtgaagttggtgattggaaaaatttgttcagtgaaattcagaaccaggaaatggatgaaaaattcaaagagtgcttagcaggcacctccctcggagcaaagttgaagtatgaatcatattgccagggttgattccagtcaattcagcaggcctagatttattttccttaataataattaagtgtaaataattaaatgataattcaatcaaataatcaaataataattaaacaatattgaaatctaa

SEQ ID NO: 369 - DNA, 6306 bp, Homo sapiens
  source 1..6306: mol_type = genomic DNA
attgtttgaatttgaaaacggtaacatcgcagtgctgctcgcgggtctggctagtcaggcgaagtttgcagaatggaatctaattttaatcaagagggagtacctcgaccatcttatgtttttagtgctgacccaattgcaaggccttcagaaataaatttcgatggcattaagcttgatctgtctcatgaattttccttagttgctccaaatactgaggcaaacagtttcgaatctaaagattatctccaggtttgtcttcgaataagaccatttacacagtcagaaaaagaacttgagtctgagggctgtgtgcatattctggattcacagactgttgtgctgaaagagcctcaatgcatccttggtcggttaagtgaaaaaagctcagggcagatggcacagaaattcagtttttccaaggtttttggcccagcaactacacagaaggaattctttcagggttgcattatgcaaccagtaaaagacctcttgaaaggacagagtcgtctgatttttacttacgggctaaccaattcaggaaaaacatatacatttcaagggacagaagaaaatattggcattctgcctcgaactttgaatgtattatttgatagtcttcaagaaagactgtatacaaagatgaaccttaaaccacatagatccagagaatacttaaggttatcatcagaacaagagaaagaagaaattgctagcaaaagtgcattgcttcggcaaattaaagaggttactgtgcataatgatagtgatgatactctttatggaagtttaactaactctttgaatatctcagagtttgaagaatccataaaagattatgaacaagccaacttgaatatggctaatagtataaaattttctgtgtgggtttctttctttgaaatttacaatgaatatatttatgacttatttgttcctgtatcatctaaattccaaaagagaaagatgctgcgcctttcccaagacgtaaagggctattcttttataaaagatctacaatggattcaagtatctgattccaaagaagcctatagacttttaaaactaggaataaagcaccagagtgttgccttcacaaaattgaataatgcttccagtagaagtcacagcatattcactgttaaaatattacagattgaagattctgaaatgtctcgtgtaattcgagtcagtgaattatctttatgtgatcttgctggttcagaacgaactatgaagacacagaatgaaggtgaaaggttaagagagactgggaatatcaacacttctttattgactctgggaaagtgtattaacgtcttgaagaatagtgaaaagtcaaagtttcaacagcatgtgcctttccgggaaagtaaactgactcactattttcaaagtttttttaatggtaaagggaaaatttgtatgattgtcaatatcagccaatgttatttagcctatgatgaaacactcaatgtattgaagttctccgccattgcacaaaaagtttgtgtcccagacactttaaattcctctcaagagaaattatttggacctgtcaaatcttctcaagatgtatcactagacagtaattcaaacagtaaaatattaaatgtaaaaagagccaccatttcatgggaaaatagtctagaagatttgatggaagacgaggatttggttgaggagctagaaaacgctgaagaaactcaaaatgtggaaactaaacttcttgatgaagatctagataaaacattagaggaaaataaggctttcattagccacgaggagaaaagaaaactgttggacttaatagaagacttgaaaaaaaaactgataaatgaaaaaaaggaaaaattaaccttggaatttaaaattcgagaagaagttacacaggagtttactcagtattgggctcaacgggaagctgactttaaggagactctgcttcaagaacgagagatattagaagaaaatgctgaacgtcgtttggctatcttcaaggatttggttggtaaatgtgacactcgagaagaagcagcgaaagacatttgtgccacaaaagttgaaactgaagaagctactgcttgtttagaactaaagtttaatcaaattaaagctgaattagctaaaaccaaaggagaattaatcaaaaccaaagaagagttaaaaaagagagaaaatgaatcagattcattgattcaagagcttgagacatctaataagaaaataattacacagaatcaaagaattaaagaattgataaatataattgatcaaaaagaagatactatcaacgaatttcagaacctaaagtctcatatggaaaacacatttaaatgcaatgacaaggctgatacatcttctttaataataaacaataaattgatttgtaatgaaacagttgaagtacctaaggacagcaaatctaaaatctgttcagaaagaaaaagagtaaatgaaaatgaacttcagcaagatgaaccaccagcaaagaaagggtctatccatgttagttcagctatcactgaagaccaaaagaaaagtgaagaagtgcgaccgaacattgcagaaattgaagacatcagagttttacaagaaaataatgaaggactgagagcatttttactcactattgagaatgaacttaaaaatgaaaaggaagaaaaagcagaattaaataaacagattgttcattttcagcaggaactttctctttctgaaaaaaagaatttaactttaagtaaagaggtccaacaaattcagtcaaattatgatattgcaattgctgaattacatgtgcagaaaagtaaaaatcaagaacaggaggaaaagatcatgaaattgtcaaatgagatagaaactgctacaagaagcattacaaataatgtttcacaaataaaattaatgcacacgaaaatagacgaactacgtactcttgattcagtttctcagatttcaaacatagatttgctcaatctcagggatctgtcaaatggttctgaggaggataatttgccaaatacacagttagaccttttaggtaatgattatttggtaagtaagcaagttaaagaatatcgaattcaagaacccaatagggaaaattctttccactctagtattgaagctatttgggaagaatgtaaagagattgtgaaggcctcttccaaaaaaagtcatcagattgaggaactggaacaacaaattgaaaaattgcaggcagaagtaaaaggctataaggatgaaaacaatagactaaaggagaaggagcataaaaaccaagatgacctactaaaagaaaaagaaactcttatacagcagctgaaagaagaattgcaagaaaaaaatgttactcttgatgttcaaatacagcatgtagttgaaggaaagagagcgctttcagaacttacacaaggtgttacttgctataaggcaaaaataaaggaacttgaaacaattttagagactcagaaagttgaatgtagtcattcagccaagttagaacaagacattttggaaaaggaatctatcatcttaaagctagaaagaaatttgaaggaatttcaagaacatcttcaggattctgtcaaaaacaccaaagatttaaatgtaaaggaactcaagctgaaagaagaaatcacacagttaacaaataatttgcaagatatgaaacatttacttcaattaaaagaagaagaagaagaaaccaacaggcaagaaacagaaaaattgaaagaggaactctctgcaagctctgctcgtacccagaatctgaaagcagatcttcagaggaaggaagaagattatgctgacctgaaagagaaactgactgatgccaaaaagcagattaagcaagtacagaaagaggtatctgtaatgcgtgatgaggataaattactgaggattaaaattaatgaactggagaaaaagaaaaaccagtgttctcaggaattagatatgaaacagcgaaccattcagcaactcaaggagcagttaaataatcagaaagtggaagaagctatacaacagtatgagagagcatgcaaagatctaaatgttaaagagaaaataattgaagacatgcgaatgacactagaagaacaggaacaaactcaggtagaacaggatcaagtgcttgaggctaaattagaggaagttgaaaggctggccacagaattggaaaaatggaaggaaaaatgcaatgatttggaaaccaaaaacaatcaaaggtcaaataaagaacatgagaacaacacagatgtgcttggaaagctcactaatcttcaagatgagttacaggagtctgaacagaaatataatgctgatagaaagaaatggttagaagaaaaaatgatgcttatcactcaagcgaaagaagcagagaatatacgaaataaagagatgaaaaaatatgctgaggacagggagcgtttttttaagcaacagaatgaaatggaaatactgacagcccagctgacagagaaagatagtgaccttcaaaagtggcgagaagaacgagatcaactggttgcagctttagaaatacagctaaaagcactgatatccagtaatgtacagaaagataatgaaattgaacaactaaaaaggatcatatcagagacttctaaaatagaaacacaaatcatggatatcaagcccaaacgtattagttcagcagatcctgacaaacttcaaactgaacctctatcgacaagttttgaaatttccagaaataaaatagaggatggatctgtagtccttgactcttgtgaagtgtcaacagaaaatgatcaaagcactcgatttccaaaacctgagttagagattcaatttacacctttacagccaaacaaaatggcagtgaaacaccctggttgtaccacaccagtgacagttaagattcccaaggctcggaagaggaagagtaatgaaatggaggaggacttggtgaaatgtgaaaataagaagaatgctacacccagaactaatttgaaatttcctatttcagatgatagaaattcttctgtcaaaaaggaacaaaaggttgccatacgtccatcatctaagaaaacatattctttacggagtcaggcatccataattggtgtaaacctggccactaagaaaaaagaaggaacactacagaaatttggagacttcttacaacattctccctcaattcttcaatcaaaagcaaagaagataattgaaacaatgagctcttcaaagctctcaaatgtagaagcaagtaaagaaaatgtgtctcaaccaaaacgagccaaacggaaattatacacaagtgaaatttcatctcctattgatatatcaggccaagtgattttaatggaccagaaaatgaaggagagtgatcaccagattatcaaacgacgacttcgaacaaaaacagccaaataaatcacttatggaaatgtttaatataaattttatagtcatagtcattggaacttgcatcctgtattgtaaatataaatgtatatattatgcattaaatcactctgcatatagattgctgttttatacatagtataattttaattcaataaatgagtcaaaatttgtatatttttataaggcttttttataatagcttctttcaaactgtatttccctattatctcagacattggatcagtgaagatcctaggaaagaggctgttattctcatttattttgctatacaggatgtaataggtcaggtatttggtttacttatatttaacaatgtcttatgaattttttttactttatctgttatacaactgattttacatatctgtttggattatagctaggatttggagaataagtgtgtacagatcacaaaacatgtatatacattatttagaaaagatctcaagtctttaattagaatgtctcacttattttgtaaacattttgtgggtacatagtacatgtatatatttacggggtatgtgagatgttttgacacaggcatgcaatgtgaaatacgtgtatcatggagaatgaggtatccatcccctcaagcatttttcctttgaattacagataatccaattacattctttagatcatttaaaaatatacaagtaagttattattgattatagtcactctattgtgctatcagatagtagatcattctttttatcttatttgtttttgtacccattaaccatccccacctccccctgcaaccgtcagtacccttaccagccactggtaaccattcttctactctgtatgcccatgaggtcaattgattttatttttagatcccataaataaatgagaacatgcagtctt

SEQ ID NO: 370 - DNA, 3415 bp, Homo sapiens
  source 1..3415: mol_type = genomic DNA
aggctggcatagcggctgccgacccgccctcgttcctccaccccctgaacgggactgctgggcccgccccgccccgcctgcaggtgaagcggccgcagccgccgagtaggtgcgtggggatgatctcactcgcgcgctccgcgccaggaggaggaggagcgggagcggatccaacttccgggtagtggagccgcaagccaccggcatcttgctttttcttccccctcctcctgtgtgccccgcgccgctccctctttcccttttattcccggccccacccgccaaaatgaacagctcggacgaagagaagcagctgcagctcattaccagtctgaaggagcaagcaataggcgaatatgaagaccttagagcagagaaccagaaaacaaaggagaagtgtgacaaaattaggcaagaacgagatgaagccgttaaaaaactggaagaatttcagaaaatttctcacatggtcatagaggaagttaatttcatgcagaaccatcttgaaatagagaagacttgtcgagaaagtgctgaagctttggcaacaaagctaaataaagaaaataaaacgttgaaaagaatcagcatgttgtacatggccaagctgggaccagatgtaataactgaagagataaacattgatgatgaagattcgactacagacacagacggtgccgccgagacttgtgtctcagtacagtgtcagaagcaaattaaagaacttcgagatcaaattgtatctgttcaggaggaaaagaagattttagccattgagctggaaaatctcaagagcaaactcgtagaagtaattgaagaagtaaataaagttaaacaagaaaagactgttttaaattcagaagttcttgaacagagaaaagtcttagaaaaatgcaatagagtgtccatgttagctgtagaagagtatgaggagatgcaagtaaacctggagctggagaaggaccttcgaaagaaagcagagtcatttgcacaagagatgttcattgagcaaaacaagctaaagagacaaagccaccttctgctgcagagctccatccctgatcagcagcttttgaaagctttagacgaaaatgcaaaactcacccagcaacttgaagaagagagaattcagcatcaacaaaaggtcaaagaattagaagagcaactagaaaatgaaacactccacaaagaaatacacaacctcaaacagcaactggagcttctagaggaagataaaaaggaattggaattgaaatatcagaattctgaagagaaagccagaaatttaaagcactctgttgatgaactccagaaacgagtgaaccagtctgagaattcagtacctccaccacctcctcctccaccaccacttccccctccacctcccaatcctatccgatccctcatgtccatgatccggaaacgatcccaccccagtggcagtggtgctaagaaagaaaaggcaactcaaccagaaacaactgaagaagtcacagatctaaagaggcaagcagttgaagagatgatggatagaattaaaaagggagttcatcttagacccgttaatcagacagccagaccgaagacaaagccagaatcttcgaaaggctgcgaaagtgcagtggatgaactaaaaggaatactggcctcccagtagcattggatgcaggaaaaaatacattgacggtgaaaaacaagccgaaccagttgtagttttagatcctgtttctacacatgaaccccaaaccaaagaccaggttgctgaaaaagatccaactcaacacaaggaggatgaaggcgaaattcaaccagaaaacaaagaagacagcattgaaaacgtgagagagacagacagctccaactgctgatccataaaccagaagcctgacatgtttggaagtccttttcaataagcacatgattagtgttgttatattggcaagggctgtagacattctgctctggtcactgtattcagaatacaggttcttttctggtgtcacttttgtaagtagcaactataaacataagtaagctgtttagcaaaacacacattcctagtaggttttggttttttgatctttataaagatgaggtttttttcctagttactgtattaagtatgacttcttttagaaggttacaaaaaaattcagatgttgatacctttttaggaaatgtgcataccactcatcaaatggaatgctgaaagtttgaggtgcttgtatataatcggataaacaaaactgatcaacccaatgtgattttaaaagcccccaaagaagcttctgttttgggtctgatcctcttgatggagaaactgcagcagcatggaaattgttgggtactgtggcatacaagttattttctacagtagactgagataaactgaaaactcaggagctggcatcaaactcgtagtcccatagtcagtgttaattacacacattgttaactattggatgaaaaatacatgctattgattgtgtccaaagcctcccgaggacctccgtggggatgctctggtagcctgaatacagaactgaggtgaaagtccaaaccttgaattttacagtagtaagttggtaaaccatgtgctctgtgctatgagttaattatgttttcccaaatactaatgtggcacaagtaccatattttatcagagttcttatgtacagtatggtgaagataagtgacaagcacacatttttcttgcttcactgctgttctatattacacaggtttgttgttgttttttttaaaaaagaaattaagcagtagttagtctctaaaaatacaatgtttcaggctaccacagtgaataaatagaaatgtaatcagggattaaaaaaaaaacttatgcagcttttcaaagttgattgtttcaaaattggtgtttatttaaaataagtggtaatgtacttgaatgcactttttatgacaatgattcagtaatggtaattttactattaaagaaagtgaaaggtttagttttgttagcatggctcagcatgtagctgtcaggtgtttttcacctaagggcaaaagaaaatgatagtaataattgcagtagttgtattgtattgtatttttgcacgtgtggtaagcataggcttgaagaggtgggtaggcaggtacatgtacttcctaaatttggagataattatctttctgtaagttcgttatgcttgactgtttccatgttctcccaataatgattttatagttacttatcactttactcatggagaattaaaacgtaatgtttttcaactgtatctttctttaactggataatactgctatatgatatgcttactacagactgcattaattcacgaaacgaattctgttatgctgtaatttgaactctcctcaccacaacttattaaaaaggcaccaatagtttcccatt

SEQ ID NO: 371 - DNA, 1010 bp, Homo sapiens
  source 1..1010: mol_type = genomic DNA
cggcctggcgcttccggcaccggccgaggtgcgggtcgcctccagaggtgcgtggtcgtggcgcgagggatcctgaggctgctccagcagtgcgccgccgccgtctcctggggcggcttgggttagccgggaggtgggtcagaggctcgccccgtgccctgcgtccgggcgtctccttagggcgcgtcttcgggtccggccagcggtgctgaaaaagggagaaggttgggggtagggaggaaacaagatcccagttcaatagatttctccgcagatcctgtgccttcaaaccctacgagtccatactttaaaacaaaatgaagaaagtaaggcttaaggaactagagagtcgcctgcaacaagtggatggatttgaaaagcccaagctacttctggaacagtatcctaccaggccgcacattgcagcatgtatgctctatacaatccataacacttatgatgacattgaaaataaagtcgttgcagatctaggatgtggttgtggagtacttagcatcggaactgcaatgttaggagcagggttgtgtgttggatttgacatagatgaagacgcattggaaatatttaataggaatgcagaagagtttgagttaacaaatattgacatggttcaatgtgatgtgtgcttattatctaacagaatgtccaagtcattcgatacagtaattatgaatcctccctttgggaccaaaaataataaagggacagatatggcttttctaaagactgctttggaaatggcaagaacagcagtatattccttacacaaatcctcaactagagaacatgttcaaaagaaagctgcagaatggaaaatcaagatagatattatagcagaacttcgatatgacctgccagcatcatacaagtttcacaaaaagaaatcagtggacattgaagtggacctaattcggttttccttttaaaagccccgcaaacaaaagtcgtttaaaacctatttaaaatgaataaaaaattggtttactaaa

SEQ ID NO: 372 - DNA, 6926 bp, Homo sapiens
  source 1..6926: mol_type = genomic DNA
atttgagcatcagttgagggagaggacgcttcatttcctttttggttgggaatgtgccgtgaacatcctctgctggagcttggggcctggagcaaactggggctgcagatttagacgtagacgtttccgaggacgcgagactgcagagctttgtaggcagccaatcccagagaagcagacgggatggctagttcagcccgggagcacctgctttttgtgaggcgtcgaaatccccagatgcggtacacattgagcccagagaacctccagagccttgccgcccagagctccatgccagagaacatgaccctgcagcgggccaacagcgacaccgacctggtgacttctgagagccgctccagcttaactgccagcatgtacgagtacacgctggggcaagcccagaacctcattatcttctgggacattaaagaggaggtggaccccagtgattggattggactttatcatatagatgagaattctccagccaacttctgggattctaagaacaggggtgtgactggaacacaaaaagggcaaattgtatggagaattgagcctgggccctatttcatggaaccggagataaaaatctgttttaaatattaccacggcattagtggagccctgcgagccacgaccccctgcatcaccgtgaagaacccagctgtgatgatgggggcagaaggcatggagggaggtgcttcaggaaacctgcattctcgaaaacttgttagctttacattgtcagatcttagggcagttgggctaaagaaagggatgttcttcaatcctgacccttatcttaagatgtcaattcagccaggaaagaagagcagtttccccacctgtgcccaccacgggcaggagagacggtctactatcatcagtaacaccaccaatccaatttggcaccgagagaaatattccttttttgcacttcttactgatgtcttagaaattgaaattaaagacaaatttgccaagagccgtcccatcatcaagcgttttctggggaaactaaccattccagtccagaggctgctggagcgacaagccatcggtgatcaaatgctcagctacaaccttggcagaaggctcccagctgaccacgtgagtgggtacctccagtttaaagtggaggttacgtcttctgttcatgaagatgcctctccagaagctgttggcacaatacttggagtcaattctgtgaatggagacttaggtagcccttccgatgacgaggacatgccagggagccatcacgacagccaggtgtgctctaatgggccagtttctgaggacagtgctgccgatggaacccccaagcattcattcaggactagctccactctggaaatagacacagaggaattaacctctacgtcttcaaggacctcacctcccagaggacgtcaggattcactcaatgattacttagatgctatcgaacacaatggccactccaggccggggacagcgacctgctctgagaggtccatgggtgcctctccgaaactgaggagtagttttcccactgacacaagactcaatgccatgcttcatattgattcagatgaagaagatcacgagttccagcaagacctgggttacccatcttccttggaggaggagggaggcctgatcatgtttagcagggcatccagagctgatgatggaagcctgacatctcagacaaagctggaggacaaccctgttgagaatgaggaagcctccacacacgaagctgcttcctttgaggataagccagaaaatcttccagagcttgcagagagctccttacctgcaggcccagccccagaggaaggtgaaggcggcccagagcctcaacccagtgctgaccagggcagtgctgaactgtgtggctctcaagaggtagatcagcccacaagtggcgcagacacagggacttccgatgcatcaggaggaagccgaagagccgtcagtgagaccgagtctctcgatcagggctctgagccttcccaggtgtcctctgaaacagaacccagtgatcctgccaggacagagagtgtgagcgaagccagcaccaggcctgagggagagagtgacctggaatgcgctgacagctcctgcaatgagagtgtgaccacgcagctgtcctctgtggacacacggtgctcctctcttgagagcgcacggtttcctgaaaccccagccttttcttctcaggaggaggaagacggagcctgtgcagcagagcccaccagcagtggccctgccgaagggtcgcaggaatccgtgtgcactgctggttctttacctgtggtacaggtgcccagtggggaggatgaagggccaggggcagaatcggccactgtacctgaccaggaggagctgggggaggtctggcagcggagggggagcctggagggagctgcagctgctgccgagagcccaccgcaagaagaaggcagtgctggggaggcccaaggcacctgtgaaggggcaactgcccaggaggagggcgctactggaggttctcaagccaacggccaccagccactgcgatcactaccttcagtgcgccaggatgttagccggtaccagagggtggacgaggctctcccaccaaactgggaggcacgcattgacagccacggcaggatcttctacgtggatcacgtaaacagaaccacgacgtggcagcgaccgacagctcccccagccccgcaggtgctgcagagatctaactccatacagcaaatggagcagctgaaccggcgatatcagagtatccgcagaaccatgaccaatgagaggcctgaggaaaataccaatgctattgatggggcaggggaggaagctgactttcaccaagccagtgcagatttccgacgggagaacatcctgcctcactctacctccagatccaggatcacgttgctgttacagtctccccccgtgaagttcctcatcagcccagagttcttcaccgtgctgcattctaaccctagtgcctaccgcatgtttacaaacaacacgtgtttgaagcacatgatcaccaaagtccggagggacacccaccactttgaacgctaccagcataaccgcgaccttgtgggattcctcaacatgttcgcgaacaaacagctagagctgccgcggggatgggaaatgaaacatgatcaccagggcaaggcattctttgtggaccacaactcccgcaccaccactttcattgatccccggctcccacttcagagcagtagacccacaagtgcgctggttcatcggcaacacctgacaaggcaacgcagccacagtgcgggtgaggtaggagaagattctcgacatgcaggaccaccagttcttcccaggccatccagtacattcaatacagtcagtaggccacagtaccaggacatggttccagtggcttacaatgacaagattgttgcatttctacgtcaacccaatatctttgaaattctacaggagcgtcaacctgatcttaccaggaatcactcactcagggagaagatccaatttatccgaactgaagggactccaggattggtgcgcctttcaagcgatgcagaccttgttatgttgctgagcttatttgaagaagagataatgtcgtatgtgcctccacatgccttactccaccccagctactgtcagtccccacgtggctctcccgtgtcatctcctcagaactcgccaggtacccagcgtgccaatgcccgggctccagccccttacaagcgggatttcgaagccaaactgaggaacttttacaggaagttagagactaaaggatatggacaaggcccagggaagttaaagttaattatccgaagagatcacttactagaagatgcttttaatcagattatgggctactccagaaaagacctgcagagaaataagctatatgtcaccttcgttggggaggaagggctggattacagtgggccttctagagagtttttcttcctggtatccagagaactctttaacccatattatggcttatttgaatattcagccaatgacacatacacagtacaaataagtcctatgtctgcttttgtagacaatcaccatgaatggttccgattcagtggtaggatccttggtcttgcactaatacaccagtatttgttggatgccttcttcacacggcccttttataaggctcttctcagaattctatgtgacctgagtgacctagaataccttgatgaagagttccatcagagcctgcagtggatgaaagacaatgatatccatgacatcctagacctcacgttcactgtgaacgaagaagtatttgggcagataactgaacgagaattaaagccagggggtgccaatatcccagttacagagaagaacaagaaggagtacatcgagaggatggtgaagtggaggattgagaggggtgttgtacagcaaacagagagcttagtgcgtggcttctatgaggtggtggatgccaggctggtatctgtttttgatgcaagagaactggaattggtcatcgcaggcacagctgaaatagacctaagtgattggagaaacaacacagaatatagaggaggataccatgacaatcatattgtaattcggtggttctgggctgcagtggaaagattcaacaatgaacaacgactaaggttgttacagtttgttacaggcacatccagcattccctatgaaggatttgcttcactccgagggagtaacggcccaagaagattctgtgtggagaaatgggggaaaatcactgctcttcccagagcgcatacatgttttaaccgtctggatctgcctccctacccatccttttccatgctttatgaaaaactgttgacagcagttgaagaaaccagtacttttggacttgagtgacctggaagctgaatgcccatctctgtggacaggcaggttcagaagctgccttctagaagaatgattgaacattggaagtttcaagaggatgcttcctttaggataaagctatgtgctgttgttttccaggaacaagtgctctgtcacatttggggactggagatgagtcctcttggaaggatttgggtgagcttgatgcccagggaacaacccaaccgtctttcaatcaacagttcttgactgccaaactttttccatttgttatgttccaagacaaagatgaacccatacatgatcagctccacggtaatttttagggactcaggagaatcttgaaacttacccttgaacgtggttcaagccaaactggcagcatttggcccaatctccaaattagagcaagttaaataatataataaaagtaaatatatttcctgaaagtacattcatttaagccctaagttataacagaatattcatttcttgcttatgagtgcctgcatggtgtgcaccataggtttccgctttcatgggacatgagtgaaaatgaaaccaagtcaatatgaggtacctttacagatttgcaataagatggtctgtgacaatgtatatgcaagtggtatgtgtgtaattatggctaaagacaaaccattattcagtgaattactaatgacagattttatgctttataatgcatgaaaacaattttaaaataactagcaattaatcacagcatatcaggaaaaagtacacagtgagttctgtttattttttgtaggttcattatgtttatgttctttaagatgtatataagaacctacctatcatgctgtatgtatcactcattccattttcatgttccatgcatactcgggcatcatgctaatatgtatccttttaagcactctcaaggaaacaaaagggccttttatttttataaaggtaaaaaaaattccccaaatattttgcactgaatgtaccaaaggtgaagggacattacaatatgactaacagcaactccatcacttgagaagtataatagaaaatagcttctaaatcaaacttccttcacagtgccgtgtctaccactacaaggactgtgcatctaagtaataattttttaagattcactatatgtgatagtatgatatgcatttatttaaaatgcattagactctcttccatccatcaaatactttacaggatggcatttaatacagatatttcgtatttcccccactgctttttatttgtacagcatcattaaacactaagctcagttaaggagccatcagcaacactgaagagatcagtagtaagaattccattttccctcatcagtgaagacaccacaaattgaaactcagaactatatttctaagcctgcattttcactgatgcataattttcttattaatattaagagacagtttttctatggcatctccaaaactgcatgacatcactagtcttacttctgcttaattttatgagaaggtattcttcattttaattgcttttgggattactccacatctttgtttatttcttgactaatcagattttcaatagagtgaagttaaattgggggtcataaaagcattggattgacatatggtttgccagcctatgggtttacaggcattgcccaaacatttctttgagatctatatttataagcagccatggaattcctattatgggatgttggcaatcttacattttatagaggtcatatgcatagttttcataggtgttttgtaagaactgattgctctcctgtgagttaagctatgtttactactgggaccctcaagaggaataccacttatgttacactcctgcactaaaggcacgtactgcagtgtgaagaaatgttctgaaaaagggttatagaaatctggaaataagaaaggaagagctctctgtattctataattggaagagaaaaaaagaaaaacttttaactggaaatgttagtttgtacttattgatcatgaatacaagtatatatttaattttgc

SEQ ID NO: 373 - DNA, 2133 bp, Homo sapiens
  source 1..2133: mol_type = genomic DNA
cttccgagttaccgccgccgtcgccgccgctcctcctctcccggtcctgggtttccttggcgctgcggccgccgctccctctgcgacctgtatgaggaggaggaggaggaggatgtgaagatggcggagctgcagatgctgctggaagaggaaatcccggggggccgccgggccctcttcgacagctacacaaatctggaacgggtggccgattactgcgagaacaactacatacagtcagcagataagcagagagccctagaagaaaccaaagcctacaccacccaatccttagcaagtgttgcctatctgataaacaccttggccaacaatgtcctgcagatgctggatatccaggcatcccagctacgaaggatggaatcttcaatcaatcatatttcacaagcaaattagaggcgttgatcttgagtcgacttttgtgaccaaatttggaaacaattgcagtttgagattgaatgagacagttgatattcataaagagaaagttgcaagaagagaaattggtattttgactaccaataaaaacacttcaaggacacataagattattgctccagccaaccttgaacgaccagttcgttatattagaaaacctattgactatacaattctagatgatattggacatggagtaaaggtgagtacccagaacatgaagatgggtgggctgccgcgtacaacacctccaactcagaagccccctagtccccctatgtcagggaaagggacacttgggcggcactccccctatcgcacactggagccagtgcgtcctccagtggtaccaaatgattacgtacctagcccaacccgtaatatggctccctcgcagcagagccctgtgaggacagcttctgtgaatcaaagaaatcgaacttacagcagcagtgggagtagtggagggagccacccaagtagtcggagcagcagtcgagagaacagtggaagtggtagtgtgggggttcctattgctgttcctactccatctcctcccagtgtctttccaggtcatcctgtacagttctacagcatgaataggcctgcctctcgccatactcccccaacaatagggggctcgttgccctatagacgccctccttccattacttcacaaacaagccttcagaatcagatgaatggaggacctttttatagccagaatccagtttcagatacaccacctccaccgccacctgtggaagaaccagtctttgatgagtctcccccacctcctcctcctccagaagattacgaagaggaggaagctgctgtggttgagtatagtgatccttatgctgaagaggacccaccgtgggctccacgttcttacttggaaaaggttgtggcaatttatgactatacaaaagacaaggaagatgagctgtcctttcaggaaggagccattatttatgtcatcaagaagaatgacgatggttggtatgagggagttatgaatggagtgactgggctttttcctgggaattacgttgagtctatcatgcattattctgagtaaagctcagcagggctgtgcttgcctcacaggaatagtcaggtcttcccagattatctgaaggccctggggattccactccagtaaagtagaatgaaggatacaaatgataaaaattacacttttttttttggtttattccccagtattaaaaacaaagcaagctgagtctgaacaaatggatctttctgccatcatttgtacaatgctgagctgtctggattgaaataaaatgaccatttttatgtatgtcaaaggtataacagcataactgtgtagccaaaacaaaatcagattaagactgattcagaaaaatctgggatctttctcaggaatactgtatacccttgggatttctcctcctgcagaatctgtggcattggatgttcttcattgcctgtgctaaggggttaacctcatggcccagtgggtaccctagccccttcttttcttccacttgtatgaagaggagggaaccaacatttaaataccacacttaaccatttttacaattatttcagatggcttttttcctctgtgacactgtaaattctgcattctctcagcacttgagtgcaccaaacgagtgaatgctgaac

SEQ ID NO: 374 - DNA, 6484 bp, Homo sapiens
  source 1..6484: mol_type = genomic DNA
gcgcgtgcgcgcgcccggccggccgtcgccgcggtgaccgtcctcggagtccgtcggctcgcgccccgcccccgtcgccccctcccctgtcgcgcgctggggctgtttctcgctccttccgagttaccgccgccgtcgccgccgctcctcctctcccggtcctgggtttccttggcgctgcggccgccgctccctctgcgacctgtatgaggaggaggaggaggaggatgtgaagatggcggagctgcagatgctgctggaagaggaaatcccggggggccgccgggccctcttcgacagctacacaaatctggaacgggtggccgattactgcgagaacaactacatacagtcagcagataagcagagagccctagaagaaaccaaagcctacaccacccaatccttagcaagtgttgcctatctgataaacaccttggccaacaatgtcctgcagatgctggatatccaggcatcccagctacgaaggatggaatcttcaatcaatcatatttcacaaacagttgatattcataaagagaaagttgcaagaagagaaattggtattttgactaccaataaaaacacttcaaggacacataagattattgctccagccaaccttgaacgaccagttcgttatattagaaaacctattgactatacaattctagatgatattggacatggagtaaaggtgagtacccagaacatgaagatgggtgggctgccgcgtacaacacctccaactcagaagccccctagtccccctatgtcagggaaagggacacttgggcggcactccccctatcgcacactggagccagtgcgtcctccagtggtaccaaatgattacgtacctagcccaacccgtaatatggctccctcgcagcagagccctgtgaggacagcttctgtgaatcaaagaaatcgaacttacagcagcagtgggagtagtggagggagccacccaagtagtcggagcagcagtcgagagaacagtggaagtggtagtgtgggggttcctattgctgttcctactccatctcctcccagtgtctttccaggtcatcctgtacagttctacagcatgaataggcctgcctctcgccatactcccccaacaatagggggctcgttgccctatagacgccctccttccattacttcacaaacaagccttcagaatcagatgaatggaggacctttttatagccagaatccagtatctcttgctcctcctcctccctccatcctacaggtaactcctcagttacctttaatgggatttgtggccagagtccaagaaaatatttcagatacaccacctccaccgccacctgtggaagaaccagtctttgatgagtctcccccacctcctcctcctccagaagattacgaagaggaggaagctgctgtggttgagtatagtgatccttatgctgaagaggacccaccgtgggctccacgttcttacttggaaaaggttgtggcaatttatgactatacaaaagacaaggaagatgagctgtcctttcaggaaggagccattatttatgtcatcaagaagaatgacgatggttggtatgagggagttatgaatggagtgactgggctttttcctgggaattacgttgagtctatcatgcattattctgagtaaagctcagcagggctgtgcttgcctcacaggaatagtcaggtcttcccagattatctgaaggccctggggattccactccagtaaagtagaatgaaggatacaaatgataaaaattacacttttttttttggtttattccccagtattaaaaacaaagcaagctgagtctgaacaaatggatctttctgccatcatttgtacaatgctgagctgtctggattgaaataaaatgaccatttttatgtatgtcaaaggtataacagcataactgtgtagccaaaacaaaatcagattaagactgattcagaaaaatctgggatctttctcaggaatactgtatacccttgggatttctcctcctgcagaatctgtggcattggatgttcttcattgcctgtgctaaggggttaacctcatggcccagtgggtaccctagccccttcttttcttccacttgtatgaagaggagggaaccaacatttaaataccacacttaaccatttttacaattatttcagatggcttttttcctctgtgacactgtaaattctgcattctctcagcacttgagtgcaccaaacgagtgaatgctgaactcacttgcatcccttcatgtttctgtttgtggattataaggatgatgaaatgtgaaagtctcccaacactctgagggtggtgaacgattgccacccgtttgattttaatgtgctgctgcatgagactgcattgttgctaatggccagtgtacccagatgtgaagtgtggtaggctggttcatatgtggaggtgggtgtgtgaagctagacacgaaggtccctaaggttctgaagagacttgaactgtggaaatgctcttagcaggcatcccgaacccctgcttcggtgctgttttgaggagtaggatcttggagttcagaccaactatgactatcatttccttcactatctagaaaaacgctattctactttggaagagaatagtagttattttcaagtctcctgacagtcactgggagtacaaggtttgctaatgtgctctctggacgttattaatggccagtattagttgctgctgtattactgactcgcttagctgtagaaagggtaatactctcctgattttgtatgattggactcttaagtagctgctgttagtcagaattaaaacccatctcagactaagaatataatgaataagattaataggccaaaatatgtatctaatcacattgataaaaattaatataactgacacaataaaacacatttcccccatctgtacaataaatacagcttcaaattcagtggagtctgtagggcagataactttaatcatcactactgtagtcagtataagaaatgctgaaaaaaatccaggagggcttgtctctttgtgggtggtcactgtgatgttgggccagctcctgttcaggtccagagctgctaacgtgggttctactcagtcccagtgacttggccagaatagagctttgccaggtaactgccctgtgctaggtgaaaggggaaaagcagtagctggatatatttcaaatgaggttttgaacaagttcagaaagtggaacttgattgaaaagtgaacaagtgtagtagtgtgtgagaaaattcagatggtgtcggatgcagaagttaatattccacttaatgttatctgagcattaaaaatcatcagcatttaactgagaccccactatagagtttccttatcaagactttttggttttaaagttgtttttaatgcattgcaagttacaatagctattttgcttttagatttttcccagcactttgtatttattagctttcattaacttgcctccagtatacattccacttcgtgcttttcttaggtcatttctacatcccttattccttgttttcctgcagtgtaatggccctgaatgtcctctgagccttcagctccattatggacccaaactagactatacttggataagttaagctcttcttcgtgtactggtctataattagaaaaactgttttaaattagatgttcccattatttatttaaacagctttttgctgagaaagcttagtggattaatgaggcagagggtgttttgaaatccaataaatagttcccacaggctgggtgtggtggcttatgcctgtaatcccagcactttcggaggccgaggtgggtggatcatgaggtcaataaattgagaccatcctggccaacatggtgaaaccccatctctactaaaaacacaaaaattagctgggcgtggtggcgcacacctgtagtcccagctacttgggaggctgaggcaggagaatcactggaacctgggaggcagaggttgcagtgagccgagattgtgccactgcactccagcctggtgacagagcgagactccatcaaaaaaaaaaaaaaaaagttcccacagctcaccactacagaagcagggaagacaactatgcagaaaacagagttagtggcggtcagcaggaatgcagctggtcttttggacccctacgggatgggggcagtgcagaagacactggtgaagtcctttatactgaagacctgtggttgggagcaggggtagtccatgggtctgctgattttttttccctatttagtactaatgtgtgtgtgatctttgttttacaaacagtaccttttgggttttctgcatattttataatttttgtacagttttgaattctatagattgtcttggaaggatactgtgtgatgggtcaggcacacagtaattggagacttttaatgtatgtaatatttcatagattgcatgctattaatcatctgtgagggtagtattttttgttttattgtaagtttccctctttttttataaattaaaagatggttggtattaggaatttcaaatgaatgcagaaaatcttacatgctgtgtactattaatattataacagacgatccaagtccaaaatctgaccaataaagcaaccattttatcaagatagagggattctaatgggagaggggattcttccctcctgaagtttgtgtgtccagtccccttaaaaaaaatgaatagttgtcttttcttgtcatattaatactcgaaagtccatggtggtattaatgaaagtacactttattgttgcctttgaacttacggccaaggcaataaatcagaaacaaaaatagtgccaatgtgtcaaaatcgacatctgagagattcagcctcccatttggaataaatatgaatcttctaagctatcttgtttaatattttccatcatttagctacttcctatctccctcagaggcgcctgctgttcccattttagagttgacagtggcctgctaattttgctatgttcctaaaagttactgggtgtgagacattttcatcccctcctttttcctactgctggtgtttattatccagctagacaatattttatgcatatttaccgtgatgtctggaccgtacctgtgctccttggcagtttatgttgaagataactaaagatttttctctttgggaggcatcaaaatgatggtagtttgcttttatctttttatgttcattttcttttagtaggtgacctttctgcattaagaactgtttttatcttttactaccttttcttttctcctttgtggagacagcatgacatgtcctgaaggtcacctttgcctttgaaaaaggtttgatggaggaattcacaggtgactgacaagtctttgaaaagaatgggatctgctcacttctggtctttttggccgggaactcctgattggtgttaaggtggtaatttcccccatataagatttagaatcactgagtttgagctagatgaaatttttaaaatttctggttgtctcattagactgatgaggtgagttttcttcttcatatgaacagctagttaataacagcagagttctcactcagtgctcagtacttaattttccactgcaccacaactgtcttaactaaatgtgctgtatttttctttaaaagttaagagttctatttggtgttttcaggaatatacgtgaaaagacatgccatgttttggtaaataccatcagagttgtgtaaaggcgtgtactaagtgcaatcttaatttgtggaaataatcttcatttacccctcctaaaactacactcagtataaacactttcccataaggtgtgtgcagtaaaaatgttatattactccaacactggcaggagcacagcacagcagccttattggagagagccttataaaagtgattaaatggaggcattgagctcattacctttaagtttactttgtgctgacctttgttcctgttttgagaatctcatataattattaaaaaaaaaaaacaattaaaacgaaacggcggggcctagctgtgtataaatgatccttgctgaatatcttaaggttttttgtaagaaaaaagaaaaaccaacaaaaaaagcttattttcacattaaaatgaaacctcttttgcaacttaagaattctatggaaaagcagtttttatcatattttgtgtccatgcaccatttttcttaaaatggcttacaaaaaagaatgtaaacaatttgtgatctggccagttgtacttttagctcccagagggagagttggtggtattatgagttgagtaaaaaccatccaggggaacttgagggagcagtctgttgccagtaatgttccttgtgtgccattaaaccacctccagatgagtggaggaacatcactttttaattttttaattgtatttggaattgttgccgtgtactaagaacttgacctaaataaaatcccacaaagtatattca

SEQ ID NO: 375 - DNA, 2237 bp, Homo sapiens
  source 1..2237: mol_type = genomic DNA
atttatgcattaagtggttgcttagatttaaggtgagtacccagaacatgaagatgggtgggctgccgcgtacaacacctccaactcagaagccccctagtccccctatgtcagggaaagggacacttggcagcagtgggagtagtggagggagccacccaagtagtcggagcagcagtcgagagaacagtggaagtggtagtgtgggggttcctattgctgttcctactccatctcctcccagtgtctttccagcccctgctggctctgctggcactcctccccttcctgctacttctgcatctgcccctgctcctcttgttcctgctactgtcccttcctccactgccccagacgctgctgctgggggtgcccagacccttgctgatggcttcacttctccaactccccctgttgtttcttccactccccctacaggtcatcctgtacagttctacagcatgaataggcctgcctctcgccatactcccccaacaatagggggctcgttgccctatagacgccctccttccattacttcacaaacaagccttcagaatcagatgaatggaggacctttttatagccagaatccagtttcagatacaccacctccaccgccacctgtggaagaaccagtctttgatgagtctcccccacctcctcctcctccagaagattacgaagaggaggaagctgctgtggttgagtatagtgatccttatgctgaagaggacccaccgtgggctccacgttcttacttggaaaaggttgtggcaatttatgactatacaaaagacaaggaagatgagctgtcctttcaggaaggagccattatttatgtcatcaagaagaatgacgatggttggtatgagggagttatgaatggagtgactgggctttttcctgggaattacgttgagtctatcatgcattattctgagtaaagctcagcagggctgtgcttgcctcacaggaatagtcaggtcttcccagattatctgaaggccctggggattccactccagtaaagtagaatgaaggatacaaatgataaaaattacacttttttttttggtttattccccagtattaaaaacaaagcaagctgagtctgaacaaatggatctttctgccatcatttgtacaatgctgagctgtctggattgaaataaaatgaccatttttatgtatgtcaaaggtataacagcataactgtgtagccaaaacaaaatcagattaagactgattcagaaaaatctgggatctttctcaggaatactgtatacccttgggatttctcctcctgcagaatctgtggcattggatgttcttcattgcctgtgctaaggggttaacctcatggcccagtgggtaccctagccccttcttttcttccacttgtatgaagaggagggaaccaacatttaaataccacacttaaccatttttacaattatttcagatggcttttttcctctgtgacactgtaaattctgcattctctcagcacttgagtgcaccaaacgagtgaatgctgaactcacttgcatcccttcatgtttctgtttgtggattataaggatgatgaaatgtgaaagtctcccaacactctgagggtggtgaacgattgccacccgtttgattttaatgtgctgctgcatgagactgcattgttgctaatggccagtgtacccagatgtgaagtgtggtaggctggttcatatgtggaggtgggtgtgtgaagctagacacgaaggtccctaaggttctgaagagacttgaactgtggaaatgctcttagcaggcatcccgaacccctgcttcggtgctgttttgaggagtaggatcttggagttcagaccaactatgactatcatttccttcactatctagaaaaacgctattctactttggaagagaatagtagttattttcaagtctcctgacagtcactgggagtacaaggtttgctaatgtgctctctggacgttattaatggccagtattagttgctgctgtattactgactcgcttagctgtagaaagggtaatactctcctgattttgtatgattggactcttaagtagctgctgttagtcagaattaaaacccatctcagactaagaatataatgaataagattaataggccaaaatatgtatctaatcacattgataaaaattaatataactgacacaataaaacacatttcccccatctgtacaataaatac

SEQ ID NO: 376 - DNA, 2749 bp, Homo sapiens
  source 1..2749: mol_type = genomic DNA
aagcggcgctaagagaaggcgggacagaggaatgggaaatgacgtgaggagtgcggaggggcgcgaggtttcaagatggcggtagctgaggggttgaccgagagacccagttgaaggcctttacgaagtgaaagaggccgggagtcgccccctacccgcttctcgtagtcctgggagcacagcagaagtgtttttctttttttaatgaacaagtaaaccatacaaattgtcaacatgggacggagatctacatcatccaccaagagtggaaaatttatgaaccccacagaccaagcccgaaaggaagcccggaagagagaattaaagaagaacaaaaaacagcgcatgatggttcgagctgcagttttaaagatgaaggatccaaaacagataatccgagacatggagaaattggatgaaatggagtttaacccagtgcaacagccacaattaaatgagaaagtactgaaagacaagcgtaaaaagctgcgtgaaacctttgaacgtattctacgactctatgaaaaagagaatccagatatttacaaagaattgagaaagctagaagtagaatatgaacagaagagggctcaacttagccaatattttgatgctgtcaagaatgctcagcatgtggaagtggagagtattcctttgccagatatgccacatgctccttccaacattttgatccaggacattccacttcctggtgcccagccaccctctatcctaaagaaaacctcagcctatggacctccaactcgggcagtttctatccttcctcttcttggacatggtgttccacgtttgccccctggcagaaaacctcctggccctccccctggtccacctcctcctcaagtcgtgcagatgtatggccgtaaagtgggttttgccctagatcttccccctcgtaggcgagatgaagacatgttatatagtcctgaacttgcccagcgaggtcatgatgatgatgtttctagcaccagtgaagatgatggctatcctgaggacatggatcaagataagcatgatgacagtactgatgacagtgacaccgacaaatcagatggagaaagtgacggggatgaatttgtgcaccgtgataatggtgagagagacaacaatgaagaaaagaagtcaggtctgagtgtacggtttgcagatatgcctggaaaatcaaggaagaaaaagaagaacatgaaggaactgactcctcttcaagccatgatgcttcgtatggcaggtcaagaaatccctgaggagggacgggaagtagaggaattttcagaggacgatgatgaagatgattctgatgactctgaagcagaaaagcaatcacaaaagcagcataaagaggaatcccattctgatggcacatccactgcttcttcacagcagcaggctccgccgcagtctgttcctccttctcagatacaagcacctcccatgccaggaccaccacctcttggaccaccacctgctccaccattacggcctcctgggccacctacaggccttcctcctggtccacctccaggagctcctccattcctgagaccacctggaatgccaggactccgagggcccttaccccgacttttacctccaggaccaccaccaggccgaccccctggccctcccccaggtccacctccaggtctgcctcctggtccccctcctcgtggacccccaccaaggctacctccccctgcacctccaggtattcctccacctcgtcctggcatgatgcgcccacctttggtgcctccccttggacctgccccccctgggctgttcccaccagctcccttgccaaaccctggggttttaagtgccccacccaacttgattcagcgacccaaggcggatgatacaagtgcagccaccattgagaagaaagccacagcaaccatcagtgccaagccacagatcactaatcccaaggcagagattactcgatttgtgcccactgcactgagagtacgtcgggagaataaaggggctactgctgctccccaaagaaagtcagaggatgattctgctgtgcctcttgccaaagcagcacccaaatctggtccttctgttcctgtctcagtacaaactaaggatgatgtctatgaggctttcatgaaagagatggaagggctactgtgacagcttttgatgccagaaaaggcttctgttcacaacagtggcccatggagaaagaggctcttattaaacttagatgaaagagctgcttccattgtcagggtattttctaatttcagttcaaggaatatcctaaaatttagccttgttcagaatttactgcacataaaaaagggtatttcatccagaatagatcagttattgaagcagtgctgctaacatccattccctttcataccaccattttcaccctgtttcttcccctcctccagttctttggaaatttgtgatcgggggatcttagttgcttatttgttttgactcttgtgtgctgtgggcactggagtagagatttctggagaaaaaaaaacagtttatttcatcttgccttttgtgtttgagttatttttaatattttcctgtaaatattttgtaatattttacttgtaatgaaatggatcacaatgtcatttcctaatacaaggcaggatatgtgggaagaatatgtacaattatttgattaaaattatttcccactgacctaaactttcagtgatttgtgggaaaaataaataaatgttctacaccaaga

SEQ ID NO: 377 - DNA, 4807 bp, Homo sapiens
  source 1..4807: mol_type = genomic DNA
ggttattgttgctcctgtggccattctcttgtcatccccactttcacattttggcgtggtgtattaatagactgagtgggattaatgggtaaatatgactttatagtcagctctaatcctggattcaatatcagaatttagattttcagctttgtggatgttcgacattttaaaaacagttattgcaaagaggtgaaaattttgttctgaagtcttaaggaaacagagaaagtttttccgtccttaagtgtgggacttgttttgtgaccaacaatatgaaaggctctgaggtcagcttggagaagaaaaaaaagattaagatgccagtgaagagacttcgtgaggtagtttctcaaaatcatggagatcatttggttttgctgaaagatgagttgccctgtgttcctccggcattgtctgcaaataaacgtcttcctgttggaacggggactagtttgaatggaacatcacgtggttcatcagacttaacttctgctagaaattgttaccagcctctattagaaaatcccatggtgtcagaaagtgatttttctaaagacgttgcagtgcaagtgttgcctttggataaaatagaagagaacaacaagcaaaaagcaaatgacatcttcatttctcagtatacaatgggacagaaagatgctctaagaacagttttaaagcaaaaagctcaaagcatgcctgtttttaaggaagtaaaggtacatctgttagaagatgcaggcatagagaaggatgctgttactcaggagactagaatttcacccagtggaattgattcagctacaaccgtggctgcagcaactgctgctgccattgcaaccgcagctccgttgataaaggtgcagagtgatttggaagcaaaagtcaattctgttacagaattacttagtaaattacaggagactgataaacacctgcaacgtgttacagagcagcaaacaagcattcagaggaaacaagagaaattacattgtcatgatcacgaaaagcaaatgaatgtgtttatggagcagcacataaggcatcttgaaaagttacaacaacaacaaatagatattcagactcattttattagtgctgcactcaagactagtagttttcagcctgttagtatgccctcctccagagcagtggaaaagtattccgtaaaaccagaacaccctaatcttggtagctgtaatccatctttatataacacatttgcttccaaacaagcacctttaaaagaagttgaagatacgagttttgataaacagaaatctcctttggagacaccagcacctcgcagatttgctcctgtacctgtttcaagggatgatgaactatcaaagagggaaaatcttttggaagaaaaagaaaatatggaagtgtcgtgtcacagaggaaatgtaagactattggaacaaattttgaataataatgattctttgacaagaaaaagtgaatcatcaaacaccacctcactaactaggtcaaaaataggatggactcctgagaaaacaaacagatttccttcctgtgaagagctagaaacaactaaagtgactatgcagaagtctgatgatgttcttcatgaccttggccaaaaagagaaagaaacaaatagcatggtccagccaaaagaatctctgagtatgttgaagcttccagatcttccacagaattctgttaagcttcaaacaaccaatacaacaagatctgtattgaaagatgctgagaagattttgagaggagtacaaaacaataaaaaagtacttgaagaaaacctggaagctattattcgtgcaaaagatggagctgccatgtattcgcttatcaatgctttatctaccaacagagagatgtcagagaaaattaggatcagaaagacagtggatgaatggattaaaactatttctgcagaaattcaggggcttttgaaagcaaccacagtaatacaagatgaagattatatgttacaagtctatggaaagccagtttatcagggccatcgaagcactcttaaaaaaggaccatatctcagatttaattctccatctcctaagtccagaccacagagaccaaaagtaatagaacgagttaaaggcactaaggtaaagtcaataagaacacagactgacttctatgcaacaaaacctaagaagatggattctaaaatgaaacattctgttcctgtgttacctcatggcgatcagcaatatttgttcagcccaagtagagaaatgcctactttttcaggtacattggaaggtcatctgattcctatggcaattcttttaggacaaacccaaagtaatagtgataccatgccacctgctggagtgattgtcagcaagccacaccctgtaactgtgactacttctattcctccatcatctcgaaaagtagaaactggagtaaagaaacctaacatagccattgtagaaatgaagtcagaaaaaaaggatcctcctcagcttactgtgcaggtattacccagtgtagatattgacagcatttcaaatagtagtgctgatgtcctttcacctctgtctagccccaaagaagcatctcttcctcctgtgcaaacttggataaagactccagaaattatgaaggtagatgaagaagaggtgaagtttccaggaactaactttgatgaaataatcgatgtcatacaggaagaagaaaaatgtgatgaaattccagactctgaaccaattctggagtttaacagaagtgttaaagctgattctacaaaatataatggtcctccatttccgccagttgcttctacttttcagcccactgctgatattctggataaagtaattgagagaaaagaaacactggaaaatagcttaattcaatgggtagagcaagaaataatgtcaagaattatctctgggctctttccagtccagcaacagattgcacctagtatcagtgtttcagtcagtgagacaagtgaaccactgacttctgacattgtggaaggaacaagcagtggcgccctccagctttttgttgatgctggtgttcctgtgaactcaaatgtgattaaacattttgttaacgaagctcttgctgagaccattgctgtcatgctgggtgacagagaagcaaagaagcaaggtcctgttgctacaggtgtttctggggatgcttcaacaaatgaaacatatttgccggcaagagtgtgcaccccactgcctaccccacagcctacgcctccttgctcaccttcatcacctgctaaggagtgtgttttggtaaagactccagattcttctccctgtgattcggatcatgatatggcttttcctgtgaaagaaatatgtgctgaaaaaggagatgatatgcctgccatcatgcttgttaatactccaacagttacccctactactacacctcctccagcggcggcagtttttaccccaactttgtcagatatttccattgataaattgaaggtatcaagcccagagcttcccaagccatggggtgatggagacctgccactggaagaagagaaccctaactcacctcaagaagaacttcatccaagagctattgtaatgtctgtggctaaggatgaagaaccagagagtatggatttccctgctcagcctccacctccagagccagttccctttatgccatttcctgccggcaccaaggccccttccccctcacagatgccaggttctgattcatcaacactggagagcacattgagtgttactgtcactgaaactgaaactttagataaacccatctctgaaggagagattttatttagctgtggtcaaaaattggcccccaagattttagaagatataggactgtacctgacaaaccttaatgatagcttatccagcactctgcatgatgccgttgaaatggaggatgatcctcctagtgaagggcaagtgattaggatgtcccataaaaaatttcatgcagatgcaattctttcttttgctaaacaaaaccaggagtcagcagtttcccagcaagcagtctatcattcagaggacttggaaaacagtgtgggtgaacttagtgaaggacaaagaccccagctaacagcggcagcagagaacatcttaatgggacattctctctatatgcagccacctgtcactaatacacagtctttggatcaacaatgtgatcctaaaccattatctcggcaatttgacacagtttcaggtagtatttatgaagattcatgtgctagtcatggtccaatgagtttgggagaattggagttggagccaaattctaagctggttcttcccacaacacttctgacagcacaagaaaatgatgttaatttaccagtagccgctgaagatttttcccagtaccaactaaagcaaaatcaggatgttaagcaagttgaacacaaaccatcacaaagttacctacgtgttagaaataaatctgatattgcaccttcacagcaacaagtttcaccaggtgatatggatcggacacaaattgagcttaatccgtacctcacatgtgtattttcaggtgggaaagcagtgccactctccgcttcacagatgccccctgccaagatgtcagtgatgctgccgtcagtgaacctcgaggactgctctcagtctctgagtctcagcacaatgcaggaggacatggagtcttcgggggcagataccttctgaacgggaagagacagccagcacagtgtttatgccactggttttaaagtcattttaccttggcttaaaaccctctctcagactgtttggtttttgagcatattctgaaaaaaaaa

SEQ ID NO: 378 - DNA, 6828 bp, Homo sapiens
  source 1..6828: mol_type = genomic DNA
aatctcccaaggcctaaggaggcaagaggcctgcaaatcgcctcctgctcagcaaacgggttgctcagcaggcccggggtcctggtccaccccaggtccctggtttgcccacctccgatggcggccttcgctggcagggtgggcgcctctggggagccagctccgtcccggcgcctttagagccccatctcttccacgtccctggccttcctccccttccaggcggctgtccccgccggggtccagatggtgtcggagggccggcggttcgacggcgggcccggggttcagcctcccggcctccctccgtccctgactctcctttcttcggagagggcgcgggggccggggccaaagcgccgctcttggggttctcctggactcggagttgccccaggcgggcgcagctctgccccgcggggtgccagcctcgggcgggcaaggtccgtgagtcaccgcctgtaaccgaacaccaggcctccctgccccctcccccagctccggccgccaggctgcggcgacacctacaagaaaatgaaggggcgcccaggcccgcggcggccccggccgtatcgcgagcaggtcccggcggcccccggctcgcggcgctctttcttccccggccccggggctcggccagccgcaaccgccgccccggcgccagcaggaatccaggccgagcgaccggccccggagcccgaggcggcggagggcccgcggtagctgcgactggcgagcccgagagcgcccggggagggggcgcccggcttggaatttcccggtcccttccggcccagcgaggacaaagcactcctggccgccgccgccgccgccgccgtggcctacgccgcgccgcacaaagggcgagtcgcgacacgctcccatccccctcccagctcacggcggccccggccccgggtggctgcagggaggtgggggaagccctggctgcaccgcccctcgctccccctcccctggggccgcgcgagcgccgcccccgccccgtctgcgcgtcctcccggggaggggttggggggcgcggcgccccacataacactccccctcctgcgctgcgagccaccctctcccctccctcctgcaaacaccaccgcctcccctgccaccgccgccacctcgcccgacgctccacagctcgccgcggccggggggcggtgcgcggaccgtgcgcgccgcgggcgccagatgtgcagtccccgccgccgccagtgaccgagccgcagtccgagcggtatcgggccgcctccctgatgctgcgggggcgaccttgagcgtacagcggcttccctcggtggggaccccgacatcccagcgctgtgcccggtcttgccctctgtagcccggctcgccccgcgcttggacatggaaggggccgccgcgcctgtggcgggggaccgccccgacttggggctgggggcgccgggctctccccgagaggcggtggcgggggcgactgcagccctggagcccaggaagccgcacggggtgaagcggcatcaccacaagcacaacttgaagcaccgctacgagctgcaggagaccctgggcaaaggcacctacggcaaagtcaagcgggccaccgagaggttttctggccgagtggttgctataaaatccattcgtaaggacaaaattaaggatgaacaagacatggttcacatcagacgagagattgagatcatgtcatctctcaaccatcctcatatcatcagtatttatgaagtgtttgagaacaaagataagattgtgatcatcatggaatatgccagcaaaggggagctgtacgattacatcagtgagcggcgacgcctcagtgagagggagacccggcacttcttccggcagatcgtctctgctgtgcactattgtcacaagaacggtgtggtccaccgggacttgaagctggaaaatatactgctcgatgacaactgcaatattaagattgctgactttgggctttccaacctgtaccagaaggataagttcttacaaacgttttgtgggagtccactctatgcatctcctgagattgtcaatgggagaccttaccgagggccagaggtggacagctgggccctgggtgtgttgctttacactcttgtttatggaacaatgcccttcgatggtttcgatcacaaaaacctcattcggcaaatcagcagcggagagtaccgggagccaacacagccctcagatgctcgaggactcatacggtggatgctgatggtgaaccccgatcgccgggccactattgaggacattgccaaccactggtgggtgaactggggctataagagcagcgtgtgtgactgtgatgccctccatgactctgagtccccactcctggctcggatcattgactggcaccaccgttccacagggctgcaggctgacaccgaagccaaaatgaagggcctggccaaacccacgacctctgaggtcatgctagagcggcagcggtcgctgaagaaatccaagaaagagaatgactttgctcagtctggtcaggatgcagtgcctgaaagcccatccaagttgagttctaagaggcccaaggggatcctgaagaagcgaagcaacagcgagcatcgctctcacagcactggcttcattgaaggtgtagttggtcctgccttaccctctactttcaagatggagcaggacttgtgcaggactggcgtgctcctcccaagctcaccagaggcagaggtgccgggaaaactcagccccaagcagtcggccacgatgcccaagaaaggcatcttgaaaaagacccagcagagagaatcaggttactactcttccccagagcgcagtgagtcttcggagctgttggacagtaatgatgtgatgggcagcagcatcccctcccccagccccccggacccagccagggtaacctcccacagcctctcctgccggaggaagggcatcttgaaacacagcagcaaatactcagcgggcaccatggacccagccctggtcagccctgaaatgcccacactggaatccctgtcagagcctggtgtccctgccgagggcctctcccggagctacagccgcccttccagtgtcatcagcgatgacagcgtgctgtccagcgactcttttgacttgctggatttgcaggagaatcgccctgcccgccagcgcatccgcagctgcgtctctgcagaaaacttcctccagatccaggactttgaggggctccagaaccggccccggccccagtacctgaagcggtaccggaaccggctggcagacagcagcttctccctcctcacagacatggatgatgtgactcaggtctacaagcaagcgctggagatctgcagcaagctcaactagcattccagggcgcccaggggcgggcgggggtacgagggaggaaggggagcaagacttgggctcacaggctggttacctctttgctggctgtgacaacagactgaaaaaggattggcactgtctcacttggccaagtttgcagccttgagccaacacctaaaagggagaggtgggctcttctgccagttctgtcaattgtcagtcagaatttgggccctgtttggcatttgctttatggcacctcctagaggaccagctgtccaggggaggtggtattgaccggcactcagtgggtggagaggaagcatatgtggaaggagcatttccttagaagtcatccagatgcttctggaggaggggcaggagacacttgggctgtttgccttgggtgagcccaaagaacttgccccttttctccttgtattagcaagctaggtctggctgcgtggagctggcaagtagatttcagcaacttgagcttgagttgacgatcaattaatagtggctgccagttgtgctggcgtaagtggcccacatcatggggaaggagtgctgtgattgactagtaatggctaccacgggaaagggaaggggaagcagtagcactaatgctatgtagttgtcatctttgatctggctaggccctgggaatcgggtttagtcatcctgtgggatctatgttaactctttcatgccactggtgaggcatttgttaatttgctactcaactttgaggaaagacagggccttggtcagagagagaatgctctgaactctgctaaggacatagagtcagcccatggtgatttagctccttgctgttcacctcctctttcctgatgtctgccttgctctacagcacaacctcttgagggtggacagggagaaagatgatggtgtcagaggtcaaaactattatatatgacagggcacaagatggtctgtgatctttgcacagatgaatggaagttgatgcacaccaacaagaggcaacttgtcactttctttctcaatattaactggaatgctgcctcttgggttctcacctgcatggatgctttgagttggacgtgatactgtccatattctccagaggattacctggctgaaccattggctctgttcaccagtgacagatggtttccccatccactgagtgtagcatcctcagaggtaggcaagtttgcttctagggagttagcatgtagatgggatattgggatgaggaaaggaaaatcaggtagatggtgctttttttcccccaaatctaagtattctatgtcatggttttaaactttgccatgaactcctgggctttgggggaagagaaagttccattcatttaaatgaataaggtgttgaaagagtgcagggggttgggaggaagcatgtaagagagggaacatttccttagatgttacccagatggttctgggggagacagaaaagaggtgcggcaggactcttatcttaaaaagtaaacaaaacaaaacaaaacaaaacaaaaaactagatatgtaatttctaaacacccagatcacaatgacaagatgccactccaaccatgggacaccttcatgatactaggtttgtacttcctggtctctgggatgacttcagattctgctggccaaggcaaattgaactcagttcaagatggccaccactggtagacgtgtagatagaaaagaggactggtcttgggaacatctttggaaaaaccaacaaacaatagttctagggagatgagaaaaaaattcaccttacagtgctaagaaagtgcattagaatggaattgccctttccttaaggagacagtttgggctctccccttgccaccggctctggtgttttggcttatgcgttccttcaggttgagctgagcagtgtgttatgggaagctgctcaatttcctttcattcaattccacctccttcctgaactctaatagaggttaaaagggaaaaaaaaaattctgtagatagcaaattgtgtgtgtgggggggggtgggggtgtgggtgcatggaggacaacctgcaactctgagctccctacttcctgcctcatttcatgcagtcttttctgaacagcctatgctgctgccctgctggccccttgtgcacggcagctggccgtgtccgtagctgtcagtatgacttagatctagctcctacctactggttgatgtgttttttccttttgccaagtgattgagtctgtttagtagtttccatcattctagtctttaagtaaaaatgacactattgaggaaagtcagtctactcccttcttcctccccccaaacacgtgttctcttttgtcaggaaactcagccagtggactgtggcagagaaagtcctccactcagaggcagagactgagttaagtcataggtggccttaggcatctgcattgtttgcaggggttaagttttccttccagtgagggctggagggatgaattagctggtacctgaagccccgcttagctctgacactctgccaacatcctctgattctaggtgtggtgttgactgtcctttcaaggaaaaacttgcaatagagggaaaagccattaaagcagctccctgcttcatcattaagtcctgtcatccctaccagccaatcccagtcaaagaagttatgctttattcacttctgtggaattacaagtgagagacacttttaggacctgatggacaaagcaggagattcactgtcagctttcctggtcctctccttacttctgtgggccttgcaccgtcttagtttacacatctgccaaaggggtagaattacacttctttttacaggtaaatgtcaaggcacaatcagttttcaggaagtgcttcaagaccccaggtgaaatgaaaatgctaagtaccctctgaatggccatgcctgttaccaggtgctgcttcttcagatgatggggagcacttttcagggtgaaattcaggcgagttttgcccaggcctgctgtcttgagtacaaatgtgaatgatcgactgactgcttgttgccaaactggaaatgttctgtagggatttactggcatggtatcattcctagaagaaaaaaagagagaaacttgactgcacattaaaaaaaaaaaaaaatccacattgtgacttttatttaatttctattttttttggtaataaaaagttgacttttttatttgaatttgtcttttttatttattggtctgaaaggcatttcaaaggtattataataatatattggtgtaatttaattggtgcaacatgctttatggctcctgtcaaaattggttttcactcatttgattggtttgagcccagaacagcctacaggggaaaaacaagctggataaccacccaaagtgtttgtattttcgttggaaactgatttttgtttcattttggtttttgtttctgtttttatttttaaattaaataaattgcaatgaactgaaccaga

SEQ ID NO: 379 - DNA, 5245 bp, Homo sapiens
  source 1..5245: mol_type = genomic DNA
acgcgagctcgtggctcgggcgtatgggggctccaacgggagcggctgcgccgcccggccgggtcaacgtcgtgcgcatgcgccgacccggcgccattttggtggccgggcgcggaggtgattccacactgaggcgagcgcggcggccggggtggtagtggcagtgttcgtgtgctcaggtctgaatcgccgagggaggaggcggtggaggaagaggtggcggcggtggcggtggtcgtagcggtggcggaggaggcgggtacgaatcagctgcgggcggagacatggccaacatcgcggtgcagcgaatcaagcgggagttcaaggaggtgctgaagagcgaggagacgagcaaaaatcaaattaaagtagatcttgtagatgagaattttacagaattaagaggagaaatagcaggacctccagacacaccatatgaaggaggaagataccaactagagataaaaataccagaaacatacccatttaatccccctaaggtccggtttatcactaaaatatggcatcctaatattagttccgtcacaggggctatttgtttggatatcctgaaagatcaatgggcagctgcaatgactctccgcacggtattattgtcattgcaagcactattggcagctgcagagccagatgatccacaggatgctgtagtagcaaatcagtacaaacaaaatcccgaaatgttcaaacagacagctcgactttgggcacatgtgtatgctggagcaccagtttctagtccagaatacaccaaaaaaatagaaaacctatgtgctatgggctttgataggaatgcagtaatagtggccttgtcttcaaaatcatgggatgtagagactgcaacagaattgcttctgagtaactgaggcatagagagctgctgatatagtcaagcttgcctcttcttgaggagcaccaacatctgttatttttaggattctgcatagatttcttttaaactggcattcttgcctaatgatgttatctaggcaccattggagactgaaaaaaaaaaatccctgctctgtaaataaagctaattaaacgtctgtgtaaatttaaaaaggggaaatactttaattttttttcttaatagtgtaaaaattccctgagctaagctaaaaccatggaagaaacatgctactttagtgtttagcagtgtaccaagactagcaagagtttgcttcaggattttgttgaataattaagataatattttgagtgtgtcagggccattcaaattgttggtgttgcatcacagctaccttaactgtttttaacatggatcctctgtgcctgtgaatttacttgcatgcttgtacttgacttcttaggatgggtagctgaaaagaccaccattttaagcatttgagaattcttaaatatgaaatttattcagaattgaagatggtgacctattcagagcctttttgtccttgtcaacagactgggacagtgtctgattcccccttcaccccccccacccccgccttgccacacacagctaatattctaatggtaaatttctctgtatcaggtggggaaatgtgctgaaggacagtatgtatcccttgcttcatttttaggtcgtaggtttggaatgtcttgtcccagttcttcaaacactcttaaatttttcttaagtaatgtaaaaatggaactgccaattttatttctcttgcaaaaatagtaaatacttgatgttacattattcccaggtttaatgaaagaacccaacttagtttttcagtgaatttgacacctattttttagtgatgaaatttttctttgagaactggcaaggatgcagtcagctgtttgcagtttttagcctgattttggggtctatagagattgctttattggatacttcaagtcattcttgcttgcacttcccctattgacacatgaaagctgtgttggtgttttattgtacatacttcagatgcacataggaatagaagtgtgttataaatctagctttctttatgatgtttctgataatacgagaattgaaaactttaccttctcttgtacatagtcagactatttgtattaaatttacatttcattctaagttcaaaagtttgaaaattattagttttgcaagatcacacactaatgtaaccattttatgaaggttgaagtggatttatgcaggcagttctatatatagaaatacaattctttttaaatttttaggaccaatacaaaataacaaaaatgtaatggaatcagactgaattaaagtaaggctgtatattgaaagtcatattataaaaggtttgctttctttaagtgttatttatcttaaattataatcgttaaatgtttggaagataatttttgaatcataacgtcagcataacttcatttgacttctcaataatcttgatactagaagcaataaaagaaccattattaaatatattgtaatgttaaagatgtgaaggttcttccaaaaatttgtaaggctttcctaattaacagtaaactcttatagctgatattattacatactaaacacaagttgctgttttttccccatatgtttgcttacgcatgtctttatacaatcacctctttttattgctgtagtttattttctaaagatgccaaaggaaacaagatttttctttatttattttaaatacctgaaacctcgtactttatattttgaagtaaggtgggattgtgtgaaaatgtggatggtttttctccagtgttggttagaactactttttttaagtggagggcaacttggtagtattagtagaatttgggtttaaaaatatcagacacatctacccagtttattttttgcctgtattatcagggtatatttaattgtcctgtggttaaacaaaggtgagagagctcagaggtttctaaaggtcaagcattttacatatatacatacatacatgctcttggaggcagctatatcctgctttgatttttatgcacatgagccctatagggttatatactcatctaactacacttcagcatccccagtgcccaagaaattggaaagtacaatatttggtttgagacattcttcataaaagattctttattataaaaatttacctcatttacatttaatgtgatgatcttttttttcctttctggtatatttcccactgtactgtttggtttttgttattctcttgtctgtgggtagatttagttacccaaacatagaaactaaagcaattgcttttttcctctggtcttaaatatgtttggacaaaaagacactaaaaggtcaggcctaggggaaaagtaccctggtggaaattatttttgtaattcttaatatttttgagttggctccgtttgtcagttttaaaagcctcaaaaattatgttaaaaaaaaaatccagtgaaatcccatttagggcaggccgatttgttagaagtcactgatgctccagtaggcttttgttataatcaggcctgtttcctgagtatgtgcctcttttaaaagaagaaataattagctgtatagtatttcagtactgatgaatgaatgaatgaatgaatggcagttagtggacccaaataagtattcagtggtatataaatatttgaggaactaggtactgaattaggtgctctgagttggcaccccgaaatgtttggaatcacgactatgatttacttaaacacgtaacacattcaaggatatataaatggagtctaagtattttgcttttgaagagaataatctatgaaatggaagacttgattttttttttcattttttagaagtaatacacatttatgattgttggcacataaaactatgcaaaataattctttttaagtatctgtaagaaagaattggcagtttaaacggattttgcttatttatgcactacagaatgcagcatactgtattactgttgaggctgcttaataagtttaccaatgtgaaaagcagatcttgggtataagtgtatgcctgatttgagcttttaaaactgtgcagtaggtgtatggtaatgttttacaatcctatgtagcaaaataggaaattatgaatttttgttgttattgttttaaagatttaagatggattggggtagggaacagctggagccaggtataccttctagtatgtagagggaaacaatgtttagataggaaaaaggaagccgtctgtttacagttaactttatttcatggacttctacaaaatgttgtattaatcactttttctagttcaaggaatttcaattccagggtacaaaccattgatttaaaaattacgtttccattctttttagtatcagtttaaagtaaatgcttaccatcagccagttgctgtcactgggaagaaggcaacttgaagtatttactgataaaatagcctttattcccaagtgtgacttttcttcagtgtctacatattatgtcacacgttctatttgcactgctgcaatatagatcaaagatcttgtggcataggggtaggggagtgttagtatctcccttgtcccatttgttctgttactgcttcattggactgatacaccctcatgaacttgcaatcacctaaatggaagtcttgaatgtgtcaccttttgcttggttatttcaaccatgctgctatatataatcaggtgtggcacagtttgtcagtttgattataggtgtgagtggatagaaatcattacactgtgctgttaacgatccttgtctgcttgctgttacctactttttacaggcatcataataaaagctagactatttctttggggggaaagagacttatttaatgtaatttaaaaaacttttccaatagaaaatgaaatattattgaaaataatatctattttttagctttcagcaattgatggtgctttgttgtggtgtctgctggaagtctactgccattatagggaaccttgcttgttagcttctctagatctctattctaaacaatctgttagtgatgataaattctgtaggagggtctattctgagccgttaacttcctgtaaggggaaaatgggtgggttaccagaaataccattgaagcagggtgggctgtggggtggaaggttggggtatttgtcttgagaattaaaaactacgaaacacttttgtacacaactgattttttaaaaaataaacacatttttaaagatgttgaatttttccccccttattgggaattcttaaaaataaatgcatgcatgttttcccctgaaaa

SEQ ID NO: 380 - DNA, 9744 bp, Homo sapiens
  source 1..9744: mol_type = genomic DNA
ttccccggccggacggagagcggcagtgtctccccgccgggcgcgctcgccgtgtctcccccgcggccgcagctgcttgctagccttgcgcggcgcgggagagcgcagtggcgccggcgggaaagggctgcggacctgcggcgccgcgttgtgcgttcgacgacgcggcaccggcttcgacgccctctgcccgctccagaagcagtaagaagacatgttggataacaagaagaggtgtagagtttgcatatatcaactgtggccttaatgagcatgttgacagcatcgatgctagacagacagtctttttactgctggattgtgcaagatatttaaccctattttgtttgaattatgacttaaatgtcaaacatcttaactaagaaaagggaaacattttagttttggaagtcagaatgccaaggagaaggaaaaatcttgggggaaatccttttcggaagactgcaaaccctaaggaagttgtcgtatccagtgttgctagtcgtgaggagccaaccactactctaccttccatgggtgagacaaaagttgatcaggaagaactcttcaccagtatctcagagatattttctgatctggatcctgatgtagtgtatttgatgctttctgaatgtgatttcaaagttgaaaatgctatggattgtctattagaattatctgccactgataccaagatagaagaatcatcttcacaaagtttcgttgcttctgagaaccaagtaggtgcagcagaaagtaaaataatggaaaaacgtcctgaagaagagagtgaagattcaaaaatggattcatttttggacatgcagctaactgaagacctggattccttaatacagaatgcttttgagaaattgaactcttctcctgatgaccaagtatactcatttttgccttcacaagatgttaatagttttaatgactcaagtgagtttataaatcctgattcaagtaatatgactcccattttttctacacaaaatatgaatttgaacggtgaaaatttagagaattctggttctactttaagtttaaacccattaccttcacattcagttttgaacgagtccaagtgttttataaaggataacacattggctttggaaagtaactacccggaagattctcttctcagtagttctttaaatgtagcaagtgactccatcgcaggttgtagcagtctcaatcaaaaacagaaagaacttttagaatctgagtgcgttgaggctcaattctctgaagctcctgtagatttggatgccagtgaacctcaggcttgtttaaaccttccagggcttgatttaccaggtacaggtggggatcagaaatctactcgggtctctgatgtgtttctaccttccgaagggttcaacttcaagccacacaaacatcctgaactgccaactaaggggaaggatgtgagttactgcccggtacttgctcctctcccattgctgttgcctcctccgccacctccaccgatgtggaatccaatgattcctgcttttgacctcttccaaggaaaccatggctttgtagctcctgttgtaaccacagctgcacactggagatctgtcaactacacatttccaccctcagttatttctcacacttccccaacaaaagtatggagaaataaagatggaacaagtgcttatcaagtacaagaaaccccagtttctcaggttgtaagaaagaagacatcttacgttggactagttcttgttcttctcagaggtcttccgggatctggaaaatcttttttggcaaggactttgcaagaggataatccaagtggagtcattcttagtactgatgattatttttatataaatggacagtaccagtttgatgtaaagtacttaggagaagcacatgaatggaaccagaatcgtgcaaaagaagcatttgagaagaagatatctcctataattatagataatacaaacctacaggcatgggaaatgaaaccatatgttgctttgtctcagaaacacaaatataaagtcctttttcgggaaccagacacatggtggaagtttaaaccaaaggaacttgcaaggcgtaacattcatggggtaagcaaagaaaaaataacaagaatgttggaacattatcaacgttttgtttcagtgccaataattatgagttcttcggttccagagaaaattgaacgtattgagttgtgtgcatattcttgtgaggatagaagcactagcccaagagacgatgaagatattatctctgaaaaagaagaaaatattttatctttatctttgaagcatctagagttcactgaagagaagaatcttgatgtaaccaaagaaacaatgttacctgagaatgttgcatatctctctaatgcagatttaaacaaaagaagaaaagaaataagtgatatgaatcctagcattcaaagtgctttaattctggaaactccacacatgtatttttctgactctgaaagcaaactacaggcaacagacaaaagtgaaaacgagcaaatagaaatggtggctgtaaaagggtatagtaaaactgacacagatagttctatggagagagtatcacctagtacttgctgtagtgaaaataatcaagaagactgtgatcttgcaaatagtggaccacttcaaaatgaaaaatcctcacctggtgaaatagtggaagaaagagcaacagtaacgaaaaaagcctttgggaaacaaaaaagcaaatcgactttggaaaagttcccaagacatgagctatcaaattttgttggtgactggccagttgataagactattggtcagaggacaaaaaggaacagaaaaactgaaaaaacttcatccgtacaaagcgacaaaaagtataattaccctcagtcacacaaattagttaacagtgtatctgtgaatacagattgtgtccagcaacgaggatctccacatgaaagtgtagaggatggcagaaagtcacagtgtgatgatgcttcagagccactcaatagctataaatatgatgcttataaaaatattgacaaaaactcattcaacattatgggtgactggccttcatctgattctttagctcagagggaacacagatcaagaatgccaaagactggtttaagtgagcccaacctagaaattggaacaaatgacaaaatgaatgaaatatccttatctacagcacatgaggcctgttggggcacaagctctcaaaaactaaagacattgggtagctccaatctaggaagttctgaaatgctgctcagtgaaatgacctgtgagagtcagacttgtctaagtaaaaagagtcatgggcaacacacatcgttgcctcttacttttaccaatagtgcaccaactgtttctggagtagtagaaccacaaacgttagctgaatgtcaagagcaaatgcctaagagagaccctggaaaagaagtaggcatgtgcacccagactgaaccacaggattttgctcttttatggaaaatagaaaagaataaaattagcatttcagattctatcaaagtattaacaggaagattagatggatttaagccgaaagttttcaatattaacacaaaatcagacgttcaagaagcaattccatatagagtaatgtatgataaaagcacgtttgttgaagaaagtgagcttaccagtgcagatgaatctgaaaatcttaacattctttgtaaactgtttggatccttttcattagaagccctgaaagacttatatgagaggtgcaataaagatattatttgggccacaagccttttgttggattctgaaactaagttatgtgaggatacagagtttgagaatttccaaaaatcgtgtgatggatcacaaattgggcctttttctctggggttgaatttgaaagaaattattagccaaagaggaactttagagaattctaattctcctgtgccagagtttagccatgggattggtattagtaacgctgactcacagtctacttgtgatgcagaaagaggaaactcagagcaggcggaaatgagagctgtcactcctgaaaaccatgaatcgatgacaagtatatttcccagtgctgctgtgggtctaaagaataataatgacatacttcctaacagccaggaagaacttttatatagcagtaagcagtcctttccaggtattctaaaagctactactcctaaagatatgagtgaaacagaaaaaaacctagtagtcacagagactggagacaacatacattctccttcacatttctctgatatttttaactttgtatctagtacttcaaatcttgaattaaatgaagaaatttattttactgattctcttgaaataaagagaaatgaaaattttccaaaggattatgtgaaattttcagatgaagaagaatttatgaatgaagatgagaaggaaatgaaggaaattctaatggcaggaagtagtttatcagctggagttagtggggaagataaaaccgagatattgaatcccactccagcgatggccaaatctctgaccatagactgtctggaattggcattaccccctgaactggcttttcaacttaatgaattatttggtcctgttggtattgattcagggtctctaacagttgaagattgtgtggttcatatagatctgaatctggcgaaagtgattcatgagaaatggaaagaatctgtaatggagcgacaaagacaagaagaggtgtcttgtggcaagtttatgcaagatccttccttggttggacatactgggcttgataatcctgaacaaaaatcatctcagagaacaggcaaaaaattactgaagactttaacagcatctgaaatgctacctttattggatcattggaatactcaaactaaaaaagtatcactcagagaaataatgtcagaagaaattgccttacaggaaaaacataatttgaaaagggagacccttatgtttgaaaaagattgtgccactaaactaaaggagaagcagctctttaagatatttccagccattaaccaaaattttctggtggacattttcaaggaccacaactattcattagaacacacagtgcaatttcttaactgtgttcttgaaggggaccctgtaaaaacagttgtagcccaagagtttgttcaccaaaatgagaatgtcacatctcatactggccagaagtctaaagagaaaaagccaaagaaattaaaagagactgaagaaacaccaagtgaactgtctttccaggactttgagtacccagactatgatgactacagagcagaggctttccttcaccaacagaagaggatggagtgctacagcaaggccaaagaagcttatcggatagggaaaaaaaatgtcgccaccttttatgcccagcagggtactcttcatgagcagaagatgaaagaagccaatcaccttgctgccatagagatctttgagaaagtcaatgcttcgctgctgccacagaatgttttagacctccatgggctgcatgtggatgaagctctagaacatttgatgagagttttagagaagaagactgaagaatttaagcagaacggtgggaagccctatttgtctgtgattacggggagaggaaaccacagccagggaggagttgctcgcatcaaaccagctgtcattaagtacctcataagccatagcttcaggttctctgaaattaaaccagggtgcttgaaagtcatgctaaagtaaaataaacatccttgaattagaagtatgaaggtttgtaggttaaaattacttttatttgcagtaattcagtcaattctaccctaaagatgtgttttattataaataatattcaattatgaaacaaaaaaattatgatgtttttcaaaatgcaagtgaggtttgattttttactgaatcaaatgcaaatgttacctgttaaagatattacagagaaattttattgattacaaaatatgtaagaaaattatcagctacagttttaaagtttaaaatgctctgattgtttctcagaaaaggttacctttgtattaattgttgtatgacatttagtaatgtcctaaaagtcttttgtgagaggtatttaaagtgctttgagacctgattcatgccccccaaagggtggtattaaaagaggaaaaaggacatagtagtggtagtaaagaaaaaaaggagatctaacaaaaacacttgaatattttttattttcaaaactaaacacataaaatgcttttattttgccatatcctacaggaaggaagacatgcttttgccctttcttctgctttgtatatgaccttgatcttttaccttttgttctgttcttctgtgtgcattttatggaaagaaagttgggtctgagattatattgtaattttatactttctatagacagaaaggttttcagagaaaaagaaatggttaaatatcttccagatgttgctgccttatcgaaatgcttctagaactgtctgtataagtcgtatttcagacagtactaaatacttatattttatttttgaggcatgtaattttaaaactgcagtaggttaaaattctattaaacaaatatagaaaatattttgtttataattggcctggtgtggtggcccacgcctgtaatcccagcactttgggaggccgaggtaggtggatcgcctgaggtcagaagttcaagaccagcctggccaacatggtgaatccccgtctctattaaaaatacaaaaattagctgggtgtggtggcgtgtgcctgtaatcccagctacttgggaggctgaggcaggagaaccgcttaaacctgggaggtggaggttgcagtgacccgagatcgagatcacaccactgcactcagcctgggtgacagagcaagactccgtctccaaaaaaaaaaaagaaaaaaaagagaaaatattttggttataatcataagaagaatccttacaatttaaaatattttcacttttattttgaaaaagagccaactttctcaaaggaagctgtcattaacttctgttgtttggttagctaataaattctgttagtatgcaagttaaacctgtgtaaaggaggttataatgtggtaaggtataattttccaatatgagacaatggcttaaatttgcctttggagatggagaatattttcaacatacataattttaacaaatagttttgttgctttttgttaagcttaaaaaaaaatttggatcagaaattataggattgagctggtaccaaaagaatcctaaagtacagaatggttttccaaaagagcagacatttcaatgaaaataaaaccccaaaacattttttttatatatcatgattgcatgcttttaaaataaggaggcttatcattgaattttagttccataaaaatgaaaatacatgtttattatttagaaatggttagtgactggtattgaagtattattcacacttatgtttgtaataatttatttaaagaatgccaacagtttagcacacttttgtaatctctagaacagttctatacattaaaaataaacattaaaaataaagcagttcctttaaacaacttactatgaaactataattgttaatgaaataagatattcctatgtatacattagtatgatttaagggtatgaaaaacagtgctaaaatgtggagttaattggaatgtgtgcagctgcatactcactttctgtgtttttatatttccttacctagttttaaaaatcatcacttttcggcacttcagctagacttatttcaatattataattatgattaatgaaggagcagtcagaagtagaggtgtggtattccgtgggcagaagtcaaatgaaaaaagctatattgtttacttgtttactatatcaatgttaatattatgccttattttgataaatcaaatagtatatcttaatcattgttgataaatatacaggcaaagtttgagcatcatatgtatttttatgaagctgcttaattccaaattgcctcccaccccactatctagcatagtttaagcaacacataattttgaaagaaaagtttgtaatccctcctttcttttttttgcccatttctaaatcctgtatgcccgcagtaaagatagtttggggattttaaaagttttctctattacccatttctaaatcctgtatgtcaaagatagtttggagattataaaaattttcatgtattggtgtaggttgagtatccctaatgagaaaattcaaaatctgaaatgcttcaaaatctgaaatttttcgagcacagacatgatgctcaaaggaaatactcacagagcattttacatttgtaggttagcgatactcaacaagtaaatataatgcacatgttctaaaatatccccccaaaccccagcaatccaaaacacttctggtcctaagcattttgagtaggggatactcactcaacctgtatatttgtgctaatacatgactcattagaatgattctttgtaaacttaatattttaaaagtacagcacttctgtagtatggaaggtttcagtaataattatattcattcagtagtctcttaccattatctcccagatggaaaaagaggactaatgtggaaaccccagagggtgtccagttggaccagggagatattagacacttaacagtattttcagtctgtccatctctttattccaatgtgagaaatggaagtgtttttttttttacgtttattggctcttcatatttctctacattatttttaatgtgcagtttcttcaattggttagtatttccatactatttgcaactttatggcctttaaatataggacatattatatagcagaaattttgactttaaatcctcttgagtagtatattttgagaagaaaagctatactgctcttctggatggtttccatcctttatttaggtcttttctttttgaattcaagtgttttgtatgcttagaaagtagacatgtataatattgagatcggttatttctgagctggaaattggaaactttggaaactcaggaaattgctctgacaatgttttaactgctctcaatttaagaaaatgacgaaatgtataaaaaagacaaaaataacgtgtgctgttttttccaagtgctttttctaagtgcttttccattgtgcaatgaggtgaagtttggtaatttttcggtgtagtagttaaatattgctcaatttttatttacatgtaaagaaaacagatttaaatgtttatgtggccaaaaggtgtcatttaaaaggtaaaataagtttatgtagaatgtatgttcatggtgcttatttttaaaatgtaattcaagtttacagtattacttaatgcttctttacagaatttaatagagaaacaaggctagaacacatctacatcctgaagagccgtttataacttcatattatatgatgacaaagttcattattttccttaaagttgagcaattgacttttatggtccaatgatgaacttattattaataaatgattgagttaactgtgaggcttctcattaaaatacaatattgcagctatcagttggagaatatattataaaattttcagacagtatatcagaaaaatgtttttatttgtactgtatagaaaatgtaattttgctgttaactctgtactttttaaattgaaaatgttttataaatttgcttttaaattttcttatgaagccatttgcaaattacatacttaatttaataaaatactttagccaca

SEQ ID NO: 381 - DNA, 1839 bp, Homo sapiens
  source 1..1839: mol_type = genomic DNA
ctaatgaactcctgggtcacgtggtgcgcacgcgccaaaggcacacgataaaggaaaacgcgggcttatcgtggcctttaaaatccggcttggtgagcttgggtcgcctctgaaggagaaccattttccatctctttcatagttttttcccccagtcagcgtggtagcggtattctccgcggcagtgacagtaattgtttttgcctctttagccaagacttccgccctcgatcaagatggtggttggacggccttcctaacctttacggggcctggcggtgctgacgcctgagctggtaggggtggagcaggtaggaaacagcaaatgcagaagctgctgcgcggaagtcggccatggactggaaagaagttcttcgtcggcgcctagcgacgcccaacacctgtccaaacaaaaaaaaaagtgaacaagaattaaaagatgaagaaatggatttatttacaaaatattactccgaatggaaaggaggtagaaaaaacacaaatgaattctataagaccattccccggttttattataggctgcctgctgaagatgaagtcttactacagaaattaagagaggaatcaagagctgtctttctacaaagaaaaagcagagaactgttagataatgaagaattacagaacttatggtttttgctggacaaacaccagacaccacctatgattggagaggaagcgatgatcaattacgaaaactttttgaaggttggtgaaaaggctggagcaaagtgcaagcaatttttcacagcaaaagtctttgctaaactccttcatacagattcatatggaagaatttccatcatgcagttctttaattatgtcatgagaaaagtttggcttcatcaaacaagaataggactcagtttatatgatgtcgctgggcaggggtaccttcgggaatctgatttagaaaactacatattggaacttatccctacgttgccacaattagatggtctggaaaaatctttctactccttttatgtttgtacagcagttaggaagttcttcttctttttagatcctttaagaacaggaaagataaaaattcaagatattttagcatgcagcttcctagatgatttattggagctaagggatgaggaactgtccaaggagagtcaagaaacaaattggttttctgctccttctgccctaagagtttatggccagtacttgaatcttgataaagatcacaatggcatgctcagtaaagaagaactctcacgctatggaacagctaccatgaccaatgtcttcttagaccgtgttttccaggagtgtctcacttatgatggagaaatggactataagacctacttggactttgtccttgcattagaaaacagaaaggaacctgcagctctacaatatattttcaaactgcttgatattgagaacaaaggatacctgaatgtcttttcacttaattatttctttagggccatacaggaactaatgaaaatccatggacaagatcctgtttcatttcaagatgtcaaggatgaaatctttgacatggtaaaaccaaaggatcctttgaaaatctctcttcaggatttaatcaacagtaatcaaggagacacagtaaccaccattctaatcgatttgaatggcttctggacttacgagaacagagaggctcttgttgcaaatgacagtgaaaactctgcagaccttgatgatacatgatctctgaaagactagactgtcttatattatgagatacttgaatgctgcatgtaaagcctttaaagcaaaatcctcagaaatggtctaaataaaacacttgatatgcctagagaacacagcaaa

SEQ ID NO: 382 - DNA, 6003 bp, Homo sapiens
  source 1..6003: mol_type = genomic DNA
gacctcccacaactggagcagccgggaacagctctgaccacagtggttccggggagaagcctttccaggacccatgtgtaggcacaactgttttccctgatcaggatacttgcggcactcaacagaggaaagaaattcctaagggaacactgctcagaaagtactgcagcatgtcttcaaatgcctgaggatcaagttggaaaactagaagcaacagaaaacacaataagcgcaatggcggcggccgcggcggagcagcaacagttctacctgctcctgggaaacctgctcagccccgacaatgtggtccggaaacaggcagaggaaacctatgagaatatcccaggccagtcaaagatcacattcctcttacaagccatcagaaatacaacagctgctgaagaggctagacaaatggccgccgttctcctaagacgtctcttgtcctctgcatttgatgaagtctatccagcacttccctctgatgttcagactgccatcaagagtgagctactcatgattattcagatggaaacacaatctagcatgaggaaaaaagtttgtgatattgcggcagaactggccaggaatttaatagatgaggatggcaataaccagtggcccgaaggtttgaagttcctttttgattcagtcagctctcaaaatgtgggactgcgggaagctgcccttcacattttctggaactttcctggaatttttgggaaccagcaacaacactatttagatgtcatcaaacgaatgttagttcagtgtatgcaagatcaggaacacccgtcgatcaggacgttatctgctagagctacagctgcatttatacttgcaaatgagcataatgttgctctgttcaaacattttgcagacttgctaccgggattcctacaggcggtaaatgactcgtgctaccagaatgatgattctgtcctaaaatccctcgttgagattgcagatactgttccaaagtatttgcgtcctcacttggaagcaactctacagctaagtctaaagttgtgtggagacactagcctcaacaatatgcaacgccagcttgcccttgaagtgatcgtcaccctctctgagactgcagctgctatgttaagaaaacataccaatattgttgcacagactattcctcagatgttagcaatgatggttgatttggaagaagatgaggactgggcaaatgcagatgaactagaagatgatgattttgacagcaatgcagttgcaggcgagagtgctctagatcgaatggcttgcggacttggtggaaagctcgttctgccgatgatcaaggaacacattatgcaaatgcttcaaaatcctgactggaaataccggcatgcaggattgatggccttatctgccattggtgaagggtgccaccagcaaatggaaggaattctaaatgagatcgtaaattttgttttactttttctccaggatcctcatccaagagtaaggtatgcagcctgtaatgccgtgggacagatggctacagattttgcacctggtttccaaaagaaatttcatgagaaggtgattgcagctctgctgcagaccatggaagaccaaggcaatcaacgtgtgcaggcccatgcagctgctgccctcattaactttactgaagactgtcccaagtcactacttattccatacttggataatttggtgaaacatctgcattccattatggtactgaagcttcaagagctgattcagaaaggcaccaagttagttttggaacaagttgtgacatccattgcatcagttgccgatactgcagaagaaaaatttgtcccctactatgatttatttatgccatcactgaagcacatcgttgagaatgcggttcaaaaagaactgagacttctgagaggaaaaactattgaatgcattagcctcattggtctggctgttgggaaggaaaaattcatgcaggatgcatcagatgtgatgcagcttttgttaaagacccagacagacttcaatgatatggaagatgatgatcctcagatctcttacatgatctcagcatgggccagaatgtgcaaaatccttggaaaagaatttcagcaataccttccagtggttatggggcctttaatgaagacggcttcaattaagcccgaagtagcccttttagatacccaagacatggagaatatgagtgatgatgatggttgggaatttgtgaaccttggagatcagcaaagctttggtattaaaactgcaggactagaagaaaaatcaactgcttgccagatgttggtttgctatgctaaggagttaaaggaaggctttgtggagtacaccgaacaggttgtcaaactgatggtccctttactgaaattttatttccacgatggtgttcgagtggcagcagcggaatccatgcctcttctcctggagtgtgcaagagtccgtggtcctgagtatctcacacagatgtggcattttatgtgtgatgctctaattaaggccattggtacagaaccagattcagacgtcctctcagaaataatgcattcttttgcaaagtgcattgaagtaatgggagatggatgccttaataatgaacactttgaagaactgggaggtatattgaaagcaaagcttgaagaacattttaaaaatcaagaattacgacaagttaaaagacaagatgaagactatgatgaacaggtcgaagagtcactacaagatgaggatgataatgatgtttatattctgaccaaagtgtcagatattttacactcaatattcagtagctacaaagaaaaggtgttaccatggtttgaacagctgcttccattaattgtcaacctcatttgtccacatagaccatggccagacagacaatggggattatgcatctttgatgatgtcatagaacactgtagtccagcctcatttaaatacgcagaatatttcttaagaccaatgctccaatatgtatgtgacaacagcccagaagtcaggcaagcagctgcatatggcctgggagtcatggcacagtacggtggagataattatcgccctttttgtacagaagcacttcccctgctggtaagagttattcagtctgcggattctaagaccaaagaaaatgtcaatgctacagagaactgcatctcagcagtagggaaaatcatgaagttcaagcctgactgtgtaaacgttgaagaggtccttccacactggttgtcttggcttccactacatgaagataaagaagaagctgttcagactttcaattatctgtgtgacctgattgaaagtaatcatccaattgttcttggcccaaacaataccaatctgcccaaaatatttagtataattgcggaaggagaaatgcacgaggcaattaaacatgaagatccttgtgccaaacgtctggccaatgtcgttcgccaagtacagacttctggaggactgtggactgagtgcatagcacagctcagtcctgagcagcaggccgccattcaggagctcctgaactctgcgtgaagggccttaatgtcacccaccagaaaactaactccaaataaacgcttaccctttcctttaggtttctttgttttgtttttgagcaaaagagatcggtagtgttgtgtgtaggccattcttctggagagccacaagcaggaagagcagcgctgtgttgcagaatggagtttccatggatttctaccagaccactgaaggagttcctggaagccctgcggtagctagcactgaagactatttttctattggtataacccgcccacctgaaggggaaagggaaatcaaattaatttttctcgttagacataaggaaatttaaggaaaaacagctttaagaacagttactcagcgtagatgtgtgttcacacaaattgctctgcattcagtgttcattgtgaattgggagtgtgagtctttctgtagggtagaaagaagcctcctacccagcaaaccagtagacccaaaagttgaaaaaaactgatgacagacaacaagcatgaagatggcatatttgatgtcactttggttctttttcccagaaggcttatacagtgactcagtcgggaagctttccagcttccagcccttgaatgtgaagtgtcattggcatgtctggcagtagtctctcattcactcctcaataaacaacattgaatacaaaagaggcttgtgtaaaaactcagtactgtctggcttggattcatttcatgtttttaatataagaatgatctaatatttttttaaagtaatagctatcagtaatagctgagtgttttttcccctaatattttccttgtgcaattcagacttaagcatcgagtttttaccatcttccactttaagctaagttatgatacctattccattcacaattggtgttctttttaaggtttgcaaatttcagccaattttgtagctaagattgttctgatcagctcaaaaagatttggcttagtgttttcattgcaaattataattgctgtagagccacacacaacttttgaacttttaattataagtgttatggctaaagttatttactgaaaatttcagtaaaatgtgtgaatgtttctttatgtattaacctcatagcagtaaatgacttgctgttgtttaatttttctaaggcatcttaatagacttctgttgaaaacttcagtgttaacatttttatagtttgtactaaatttaaccgtgatataaaaatgaattttatgcatagatcagaattttaaattaaaggttttttctttaaatgatttgtattactttattaaaactaaatctgaaatggaatagaaaatagaatggattacatacagatggtttccttgttagcagatgcccttcaaatatattttacgtttgcagcacaacaccattgcccggaggcttccgaatctagcaaagcagcatattaaatgactccacctgcgcagtccttgtgttcagtggatgaatacctgtgggctcttgtaatgtgtggtaatatttggagctttatagcctgtattccttgggagaaaaaaatgggaattggagtaaaaagtgtgtcaagacaacccctttctgctttcttatgtagcatctgcaaagccgattcatgtactgatgccaatcagctagagcaatgtaggctttttttaatttaaattattactacactttattactacacttgcagaaaagaaacatgttaaaatcatggcacacctgcagaatttcagatgacagtgtggtcagaagatgttttttgggagaacctagtgtttgctgggcactatgctaagcactttgggagcaagaacctcctaccttccagtttaaacactagtggtattgtcagatgccgttagtatctgagatgtacttacagcagggttctaagagctctgaaagaagcgctctgttagatgcagactggcagcatcctccttgataaaagcagaaaagcaaagaggtaattggagttgaatcaagttaatagggaaggttggtagtaaatgctgttagtgtgacatgattctgaaacccagagctcagaactaactgtgagatgtaccatgaactaacaattctttgaaaggacctgcagaagcatttttaatacctcattctgtctatgcaagatgaaaatccatggagttttttcttggcttttgtaccaaatttaggggtcttgcatgtcagcaagtgatatatattgtttataaatgcaagctatttctggaggggaaaaatgtgtgtggctcttacgttttctgggaattttgtaacaagttacacgcacaagtgttagaaactttggcataactcaatttggagtattttttaaatgctgtatctttaaagaaaagtaaaattgtcttaaatctaattgacacttctgtaatgagaggcaaccttataactctggagttgtagtttgacagaaccatcagtaaagacataagcaaataaatggtcttggtgcac

SEQ ID NO: 383 - DNA, 2172 bp, Homo sapiens
  source 1..2172: mol_type = genomic DNA
actgcgcgcgtcgtgcgtaatgacgtcagcgccggcggagaatttcaaattcgaacggctttggcgggccgaggaaggacctggtgttttgatgaccgctgtcctgtctagcagatacttgcacggtttacagaaattcggtccctgggtcgtgtcaggaaactggaaaaaaggtcataagcatgaagcgcagttcagtttccagcggtggtgctggccgcctctccatgcaggagttaagatcccaggatgtaaataaacaaggcctctatacccctcaaaccaaagagaaaccaacctttggaaagttgagtataaacaaaccgacatctgaaagaaaagtctcgctatttggcaaaagaactagtggacatggatcccggaatagtcaacttggtatattttccagttctgagaaaatcaaggacccgagaccacttaatgacaaagcattcattcagcagtgtattcgacaactctgtgagtttcttacagaaaatggttatgcacataatgtgtccatgaaatctctacaagctccctctgttaaagacttcctgaagatcttcacatttctttatggcttcctgtgcccctcatacgaacttcctgacacaaagtttgaagaagaggttccaagaatctttaaagaccttgggtatccttttgcactatccaaaagctccatgtacacagtgggggctcctcatacatggcctcacattgtggcagccttagtttggctaatagactgcatcaagatacatactgccatgaaagaaagctcacctttatttgatgatgggcagccttggggagaagaaactgaagatggaattatgcataataagttgtttttggactacaccataaaatgctatgagagttttatgagtggtgccgacagctttgatgagatgaatgcagagctgcagtcaaaactgaaggatttatttaatgtggatgcttttaagctggaatcattagaagcaaaaaacagagcattgaatgaacagattgcaagattggaacaagaaagagaaaaagaaccgaatcgtctagagtcgttgagaaaactgaaggcttccttacaaggagatgttcaaaagtatcaggcatacatgagcaatttggagtctcattcagccattcttgaccagaaattaaatggtctcaatgaggaaattgctagagtagaactagaatgtgaaacaataaaacaggagaacactcgactacagaatatcattgacaaccagaagtactcagttgcagacattgagcgaataaatcatgaaagaaatgaattgcagcagactattaataaattaaccaaggacctggaagctgaacaacagaagttgtggaatgaggagttaaaatatgccagaggcaaagaagcgattgaaacacaattagcagagtatcacaaattggctagaaaattaaaacttattcctaaaggtgctgagaattccaaaggttatgactttgaaattaagtttaatcccgaggctggtgccaactgccttgtcaaatacagggctcaagtttatgtacctcttaaggaactcctgaatgaaactgaagaagaaattaataaagccctaaataaaaaaatgggtttggaggatactttagaacaattgaatgcaatgataacagaaagcaagagaagtgtgagaactctgaaagaagaagttcaaaagctggatgatctttaccaacaaaaaattaaggaagcagaggaagaggatgaaaaatgtgccagtgagcttgagtccttggagaaacacaagcacctgctagaaagtactgttaaccaggggctcagtgaagctatgaatgaattagatgctgttcagcgggaataccaactagttgtgcaaaccacgactgaagaaagacgaaaagtgggaaataacttgcaacgtctgttagagatggttgctacacatgttgggtctgtagagaaacatcttgaggagcagattgctaaagttgatagagaatatgaagaatgcatgtcagaagatctctcggaaaatattaaagagattagagataagtatgagaagaaagctactctaattaagtcttctgaagaatgaagataaaatgttgatcatgtatatatatccatagtgaataaaattgtctcagtaaagtgta

SEQ ID NO: 384 - DNA, 5559 bp, Homo sapiens
  source 1..5559: mol_type = genomic DNA
ggcattatgcaattatattactaaggctgctacctgcccatgcccctctcctcctcctggtttggaactaccctccccatctgctgctatatttatctgccttcttggccataaaaggctggttgtgtggcctgacattcgactgcctgaccacatgcattatttttgaactggcccccagggtcctgtctttagccctgcctcttaacattgtcttggattcaacctaggtggagtcttcattctctcatccagctcctcggcctcatcggaacatttccaccaccattactcctttggaaactggtggcccggttccttcaaggggcacaggatgtctttgcctttttatcagaggtgccaccagcactatgatctcagctaccgcaacaaggacgtgcgcagcaccgtgagtcactaccagcgggagaagaaacgctccgccgtctacacccagggctccacggcctacagcagccgctcctccgccgcgcaccgccgggagtccgaggccttccgtcgggcgtccgcctcctcctcccagcagcaggcctcgcagcacgccctgagctctgaagtcagtcggaaggcagcctcagcctacgattatggctcctcccatggacttacagattccagtctgctgttagatgattattcatccaagttgagccccaaaccaaagagagccaagcacagcctactgtctggagaagagaaagaaaatttgcccagtgactacatggtacccattttctcaggacgtcaaaagcatgtcagtggaattactgatacggaagaagaaagaattaaagaagctgctgcttatatagcccagaggaatcttcttgctagtgaggaaggaatcacaacatctaaacagtccacggcatccaagcagaccacggcatctaagcagtccacggcatccaagcagtccacagcatccaagcagtccacggcatccaggcagtccacggcatccaggcagtctgtggtttccaaacaggccacatccgctcttcaacaggaagaaacttctgaaaagaagtcaaggaaagttgtgattcgagaaaaggcagaacgcctgtccctgaggaaaacattagaagaaaccgagacatatcatgccaagctgaatgaagaccatcttctccatgctcctgagtttatcattaaacctcgctcccacacggtttgggagaaggagaatgtaaaattgcattgctccatagcaggctggccagaacctcgtgtcacgtggtataaaaaccaggtgccaataaatgtccatgcaaaccctggaaagtatattattgagagtcgatatgggatgcacactctggagattaatggatgtgattttgaagatacagctcagtaccgggcctcggcgatgaatgttaaaggagagctttcggcatatgcttcagttgtggtaaaaaggtataagggagagtttgatgagactcgcttccacgctggggcttccaccatgcccctcagctttggtgtgaccccatatggttatgcatcccggtttgagatccactttgatgacaaatttgatgtgtcttttgggagagagggagagacaatgagtctaggctgtcgtgttgtcatcactcctgaaattaaacatttccagccagagatccagtggtacagaaacggagtacctctttctccatcaaaatgggtgcaaacactttggagtggagagcgggcaacgctgacattttcccatctcaacaaagaagatgaaggcctctatacaatccgtgtacggatgggagaatattatgaacaatatagtgcttatgtctttgttcgagatgctgatgcagagattgaaggagccccagctgctcccttggatgtgaagtgcttggaggccaacaaagattatatcatcatctcctggaaacagccagctgtcgatggagggagtcctattctcggatattttattgataagtgtgaggtgggcacagatagctggtcgcagtgcaatgacacacctgtgaagtttgctcgttttcctgtcactggattgatcgaaggtcgttcctatatcttccgagttcgagctgtgaataaaatgggaataggtttcccatctcgagtttccgagcccgtggctgctctggatccggctgagaaagctagacttaaaagtcgcccctcagcaccctggactggacagatcattgttactgaagaggaaccttcagagggtattgtgcctggccccccgacagacctctctgtcactgaggccacccggagctatgtggtgctcagctggaagccccctggccagcgtggtcatgagggcattatgtactttgtggaaaagtgtgaggcaggaacagaaaactggcagcgagtgaacacggagctccctgtgaagtctccccgctttgctctgtttgacttggccgaggggaaatcctactgtttccgtgtccgctgttctaattctgcaggagttggtgagccctcagaggcaacggaggtgactgtggtaggggacaaacttgatatccccaaggctcctggcaaaatcatcccaagcagaaacacagacacctcagtggtagtttcgtgggaggagtccaaagatgccaaagagctggtcgggtactacatagaggcgagcgttgctggctctggcaagtgggagccctgtaacaacaaccccgtgaagggctcacgattcacttgtcatggattagtgactggtcagagttatattttccgggtcagagcagtcaatgcagctggacttagtgaatattcccaggattcagaagctattgaagtcaaagctgctattgcaccaccatctccaccctgtgatatcacctgtcttgaaagttttcgtgactcaatggttcttggatggaagcaaccagataagattggaggggcagaaattactggctattatgtgaactatcgcgaggtcattgatggggtaccaggaaaatggagagaagccaatgtcaaggctgtcagtgaggaggcatacaagattagcaacttgaaggaaaacatggtgtatcagttccaagtggcagccatgaacatggctgggctgggcgcgccctccgcagtaagcgaatgcttcaaatgtgaagagtggaccatcgccgtcccaggaccaccgcacagtctcaagtgtagtgaagtcaggaaagactcactggttctccagtggaagccgccagtccactccgggcggactccggtcactggttacttcgtggacttgaaggaggccaaggccaaagaagaccagtggcgagggctcaatgaggcggctattaaaaacgtatacctgaaggttcgaggcctcaaggagggcgtcagctacgtgttccgtgttcgagccataaaccaggcgggagttgggaagccatctgaccttgctggccctgttgtggcagagacccgtccaggaaccaaagaggttgttgtaaatgtggatgatgatggagtcatttcattgaacttcgagtgtgataagatgactccaaagtccgagttctcctggtccaaagattatgtatccactgaggactctccacgattggaagtcgaaagcaagggcaacaagacgaaaatgaccttcaaagaccttgggatggatgacttgggtatttactcttgcgatgtaacagacactgatggaatagcatcaagctacttaatagatgaggaagaattgaaacgtttacttgctctcagccatgaacacaagttcccaactgtcccagttaaatcagagttggcagttgaaattttggagaaaggccaggtccggttttggatgcaggctgagaaactgtctggcaatgccaaagtcaactacatatttaacgagaaggaaatttttgaaggcccgaaatataaaatgcatattgaccgaaacactggcatcatcgaaatgttcatggaaaagctacaggatgaggatgagggaacgtacactttccagcttcaagatggaaaagcaactaaccattctactgttgttctcgttggagatgttttcaaaaagctccagaaagaagctgaattccagcggcaagaatggatcaggaaacaaggtcctcactttgttgagtatttgagctgggaagtgactggtgaatgtaatgtactattgaaatgcaaggtggcaaatattaagaaggagactcatattgtgtggtacaaagatgagagggagatatcagtggatgaaaagcatgactttaaggatggtatatgtaccctgcttataacagagttttccaagaaagatgctgggatttatgaagttatcctgaaagatgaccgaggaaaagataagagcagactgaagcttgtggatgaagcctttaaggaactgatgatggaagtatgcaaaaaaatagctttgtctgctacagacctgaaaatccagagcacagccgagggcatccaactgtactcttttgtaacttactatgtggaggatttgaaagttaactggtcccacaatgggtccgccattaggtactcagacagagttaagaccggggtcactggagagcagatctggctacaaatcaacgagcccaccccgaatgacaaagggaagtatgtcatggagctctttgatggcaaaactggacatcagaagacagtggatctctctggacaagcatacgatgaggcctatgctgaattccagaggttgaaacaagctgccattgccgagaaaaatcgtgcccgggtgttgggaggtctcccagacgtggtcaccatccaggaggggaaggcccttaatctcacttgcaacgtgtggggagacccgcctccggaggtgtcgtggttgaagaacgagaaggccctggcctcagacgaccactgcaacctcaagttcgaggctgggaggaccgcgtacttcaccatcaacggcgtgagcaccgctgactcgggcaaatacgggctggttgtgaagaacaagtatggctcggagaccagcgacttcaccgtcagcgtgttcatcccagaggaggaggcgaggatggccgccttggagtccctgaaaggtggcaagaaggccaagtgaccggaggtgcgaggagagccagccggcctgtgtgacttgggtgtgaatggtttgggttaaggatgagacgtcttcatgctttctcctccctattattttctggcttgaggggaaaataatgtcaggtctttcactcatataaaaaagcaccaactaatgacactttaattgtttttctttatctacaaaattatgtgttaagaaaataccattcatagcatgaagattaggaaacagttttaaggagaagacttgaatgaagttggagggacattgaatgatggtcagagggcagacgaatgtgtcgtggggcgaattgggatttgctgcagctgtgaagccatggccgtgtctcgtgtgttgttacagaggtgatgtgcttttcgacgggcgcctcgtggcttggaacctcctctgtatgaataaacagttttcacgtctgtcctcttccccga

SEQ ID NO: 385 - DNA, 3241 bp, Homo sapiens
  source 1..3241: mol_type = genomic DNA
gatgctcaggccaccgttcccggcgcgcagtcgcagctgaccctcgctcccgcccccgcctggagtccgacgtggaagttgctggctgactgggcttgcgaggaaaccgcctcggagctgcagccgaaggccaaggaatcactgaagatcggcgagggaggacagggggttcatcatgggtggctttttctcaagtatattttccagtctgtttggaactcgggaaatgagaattttaattttgggattagatggagcaggaaaaaccacaattttgtacagattacaagtgggagaagttgttactactatacctaccattggatttaatgtagagacggtgacgtacaaaaaccttaaattccaagtctgggatttaggaggacagacaagtatcaggccatactggagatgttactattcaaacacagatgcagtcatttatgtagtagacagttgtgaccgagaccgaattggcatttccaaatcagagttagttgccatgttggaggaagaagagctgagaaaagccattttagtggtgtttgcaaataaacaggacatggaacaggccatgacttcctcagagatggcaaattcacttgggttacctgccttgaaggaccgaaaatggcagatattcaaaacgtcagcaaccaaaggcaccggccttgatgaggcaatggaatggttagttgaaacattaaaaagcagacagtaattcagtccattcttctcccctgaaatgaagactacatcacctctctccctttggaaacagtcaagtgtacttcacactactagatgttaaaactatatgattattggcatatactgactgactgcaatatttgtagtaaatagggaaaataagtatttagttggagggataatttgatcgaatcacctgaatgttctatgtaatgtaaaatattcttttcttgctttcttgtgttaaggtatatattctatttgtatggaattcttattcaaatacagttctattaaagagtatactcctattggatgaaaaaaacctatttttgaatagtagttgcagcttgtttgtataaatactaaaaaatatcttaacagatttttttccccttaaaatgaattatctttccaaagattagactcagtatgagagtaggtgaggaacatagtttgtgtaatataatctttatttgcttacctgaccactttttattaagctgttttgtttaaaagcttttggttataggcatgaatattgttttgatggttaacttcactgacttatctgtaagtgtcattttatagtactttacagttgtcaaaaaaaatcttacatatattgatctagttgatcggtagaggaagcttgtgaagtaggtaggacaggttatgatgtcttcactgtatggacgtgaacccagggttctaataggttggcttgcccaaggtcacctgctagcttgtaaggtaggaatagggctcaaagtaaaacttttggttcagaagcttgactcataaactatactatatattcccaaaaatgtcagtattgacaacacagtctaactcttaaataaaattatgctaattagttacattcaaaataatgtttataaatttatttgtctatactagtagaagtgatcagtgacatactataaataatcctaaatggttatatttgatagaattcataacacattaaagagaaaatttcacattaaaggaaggtttaaaaatctattttcagattataaaaggtgtctttactggttttcattccttttatctacatgtaattggacatgtaaacttgttaaaaatcaaaatcttactgattgtacagggagaaattaagcattctgttttaaaaattaggcttattgctagactgtaagtttaaaaacaattcatgttcaaaggagcttttcaaattacccagtccaccacagaatcagctaatgtgacagaagtaaatatagtgcgtcataattgctaaaaacagggtgaatttctttcacttaagttggaaaaccagcctctaaaaaattaggtgctggtaatgagagcttaataccatggttccctgcaggtctcagaaacattagtagttcctttcttggccctcactgtccttccagtgttggcctctggcctcttcccctcacatttatgttcattctccgggcttatattcattctctgctgctttctcccttcacccgtgggactctcacccttcttgctcattctccagcacccattcctactttagtctctttgaaatcttttttggagattttccttcagctacaaatgttccagtacaaccaatattactcctgaggggcaaagactttttcatatttatgtccctagtatctggtatggcgcctggcatatggcatttcagaatatgttcatagttgaaacagtaggatagatatttgtcatcttgacaagtagccctttgcaatttatacttgagttcactcctggtcaatggcacatggctggaaaatgcagaaagcaagttcacttacagcctgaggcttataaagcttgtacagctgcctcccggcagtccaggaaaactgcaaaaaatgggaagtaaggtcctggcaggcagacccggcatgtagccgctggccatcttgaatcctagggcatgaagttgccccaaagttcagcacttggttaagcctgatccctctggtttatcacaaagaataggatgggataaagaaagtggacacttaaataagctataaattatatggtccttgtctagcaggagacaactgcacaggtatactaccagcgtttggatattgatatatacatggcaaatctgaatattgttttatgagaggcctggcaatgggtaaaacaccaaacttgaaatcagaacataggtgcaaatggccactcctgtagtttcttttctgtaaaatgggatctggacgaatgataccaaacgtttctttctaacattgtattttataactctggcctatgattgtgttgtgtcttgcattaaaaaaaaaaatttgagagtggtagaattacttctgttatctgaaatacctgagatgcactttaaactgttgaaatgtaagctctgagggcagggaccgtatcttatttactgttagtatccgttgcatctagtgtggtgcacctggcacacagtaggcactcaataaatatgtattgattaaaaacaaagacgtcttcaatatgc

SEQ ID NO: 386 - DNA, 2937 bp, Homo sapiens
  source 1..2937: mol_type = genomic DNA
cgtcggcggccgcggccggggacggtgtgagagcggtaagatggcggcggcggcggtggtggagttccagagagcccagtctctactcagcaccgaccgggaggcctccatcgacatcctccactccatcgtgaagcgtgacattcaggaaaacgatgaagaggcagtgcaagtcaaagagcagagcatcctggaactgggatctctcctggcaaagactggacaagctgcagagcttggaggactcctgaagtatgtacgacccttcttgaattccatcagcaaggctaaagcagctcgcctggtccgatctcttcttgatctgtttcttgatatggaagcagctacagggcaggaggtcgagctgtgtttagagtgcatcgaatgggccaagtcagagaaaagaactttcttacgccaagctttggaggcaagactggtgtctttgtactttgataccaagaggtaccaggaagcattgcatttgggttctcagctgctgcgggagttgaaaaagatggacgacaaagctcttttggtggaagtacagcttttagaaagcaaaacataccatgccctgagcaacctgccgaaagcccgagctgccttaacttctgctcgaaccacagcaaatgccatctactgcccccctaaattgcaggccaccttggacatgcagtcgggtattatccatgcagcagaagagaaggactggaaaactgcgtactcatacttctatgaggcatttgagggttatgactccatcgacagccccaaggccatcacatctctgaagtacatgttgctgtgcaaaatcatgctcaacaccccagaagatgtccaggctttggtgagcgggaagcttgcacttcggtatgcagggaggcagacagaagcattaaaatgcgtggctcaggctagcaagaacagatcactggcagattttgaaaaggctctgacagattaccgggcagagctccgggatgacccaatcatcagcacacacttggccaagttgtatgataacttactagaacagaatctgatccgagtcattgagcctttttccagagtacagattgaacacatatctagtctcatcaaactctccaaggccgacgtggaaaggaaattatcacagatgattcttgacaagaaatttcatgggattttggaccagggggagggtgtcctgattattttcgatgaacccccagtagataaaacttacgaagctgctctggaaacaattcagaacatgagcaaagtagtggattccctctacaacaaagccaagaaactgacatagagttggatctgtagcggtcctttggagagtgtgtgtggcgggagagtgaaaccttgggggaaaatgctaggagattcttttttctttttgttctacttttcgctcggaaagtttttaaatcctcatttggtgcatctgtattccagccaataggtgtgccagttttcatgtaatctttactggcccaacttgggagtggggaaattgcttaaaaaaaaagaaaaagaaaaaaaaaaagattattctaaataaaaggaaaaaggcttacactacctaaagctgtgctctctgcctcctgggagagggccgcaaagccaggcaccccgccaaccactgggggtcctaatccacctgctgggcatcacctctcctcctcctcagaattgggtgtttgctgaccatcaaaagcaatgactttttattctgtttgtactgaaccaaaacaaacaactgtgtatagactgctgttttcttttttatttgaaatgaggcattttggtgttctttcccctaccatacggcctgtctgcccttccctccccacattggctccagcagagtagccgaaggtcctgccgccgccgccaccaccaccaccactgcagcaacaacagcagcagcagcagcagcgcctgcatagctccactctgacctgtgaaggaatggggatgaggccaggagctagtgtctaccacggccacacagggagcagtgtgggcccttagcccccaaggggcctgctatgcatgtggctttttttttttttttaaacacagtaaactagattagtcgtcagtgttttaattgcccctcttctcctctcctgcattcctctcctctcttctttcctctctgtcccttctctttcccctctcaaccaggagaccatcatgtctctctgccttcctcctctcccctccaggggagtcaggctgtctgtgaaagccatgagcttctctccctctcccactcctcctctcctactttcagatggatttattccttttttaaacaatgaacatcggaaatgagactgtggggtgtggtttctctctctcttttttttttaattttctttgttgggtttttgagcaacctcatgtccccttcccagggagctttttaatttacctcttagaactcaagtggatgggaagtagagcactatgtgtcagtatgctttgttttctgacacgattacacagcgaggctttaatgccatttgggtaggtgagcttctgcacttctgttgtgctgaactgtattttcttctctcatctcctctttgtctttttctcttttcctctccttcctgccttcttctgctggcctccttttctctttctttaccttccttggattatccttccaggttttcataataaatttatattttgtaaaaggattttgttgtaccaggttttgcatcctcactgaatctgactggcttttattttcctctccaaaatcaggtttttgttctcaacatctttccccatcatgtctagtcactgttttggttttggcaccatcagtatcaaatgtacaaacggttcttgctaaccaacaccaggtatatctgatgttcagatgagttccaataaaaataatttttttttttttcaaaa

SEQ ID NO: 387 - DNA, 3297 bp, Homo sapiens
  source 1..3297: mol_type = genomic DNA
agtcctgttacacctcccgcggccgcgcacagcggcaacccgggcgtgcgggggcgcgcgcggtcagggaggggcctgcggaggcgcgaggcccccggaagcgcctttcccggaaggcagggaggcagcgccggcctccggaggcggcctgggcgatggcggcggagttttgtccataacgtgggcaaccgcgcagctggaggatggcctcactcgggcctgccgcagctggggagcaggcgtcgggggctgaggcggagccgggccccgcggggccgccgccgccgccctcaccgtcctctctggggcccctgctccccctgcagcgggaacctctctacaactggcaggcgaccaaggcgtcgctgaaggagcgcttcgccttcctcttcaactcggagctgctgagcgatgtgcgcttcgtactgggcaagggtcgcggcgccgccgccgctgggggcccgcagcgcatccccgcccaccgcttcgtgctggcggccggcagcgccgtctttgacgccatgttcaacggcggcatggccaccacgtcggccgagatcgagctgccggacgtggagcccgcagccttcctggcgctgctgagatttctatattcagatgaagttcaaattggtccagaaacagttatgaccactctttatactgccaagaaatacgcagtcccagccttggaagcacactgtgtagaatttctcaccaaacatcttagggcagataatgcctttatgttacttactcaggctcgattatttgatgaacctcagcttgctagtctttgtctagatacaatagacaaaagcacaatggatgcaataagtgcagaagggtttactgatattgatatagatacactctgtgcagttttagagagagacacactcagtattcgagaaagtcgactttttggagctgttgtacgctgggcagaagcagaatgtcagagacaacaattacctgtgacttttgggaataaacaaaaagttctaggaaaagcactttccttaatccggttcccactgatgacaattgaggaatttgcagcaggtcctgctcaatctggaattttgtcagatcgtgaagtggtaaacctctttcttcattttactgtcaaccctaaaccccgagttgaatacattgaccgaccaagatgctgtctcaggggaaaggaatgctgcatcaatagattccagcaagtagaaagccgctggggttacagtgggacgagtgatcgaatcagattcacagttaatagaaggatctctatagttggatttggcttgtatggatctattcatggccctacagattatcaagtgaatatacagatcattgaatatgagaaaaagcaaaccctgggacagaatgataccggctttagttgtgatgggacagctaacacattcagggtcatgttcaaggaacccatagagatcctgcccaatgtgtgctacacagcatgtgcaacactcaaaggtccagattcccactatggcacaaaaggattgaagaaagtagtgcatgagacacctgctgcaagcaagactgtttttttcttttttagttcccctggcaataataatggcacttcaatagaagatggacaaattccagaaatcatattttatacataatttagcattataatacatcttggctaaataataccatacaatctagtgtcaaaaacataaatggccacaaaaaagtagtttgagtgttatgaatatttaaaattgtaagataagaaacagtttcttagagcagatagaaaaatgcttatttaaatctttgcatgatttaaaaacagattttccattttcttacaactttaagagaaaagaactgggtttaatggtttaaaaaaaagcacagctttttcaccttcatcttgtataatttcatagattggctgacttagggtctttcaatagtttgggaattgaaagattcttgttatatatagctagtttgggtttgtttttgttttaactattttgaaggttaggtgagatgggcaaataggcttaactattttgaaggttggatgaaaagagatgggtcagtattcctacagaattcttattaactcaaataactaaatttcagaaaattaagaagctgactttatatttggtggtttgaagtatcttgttgttagcatttgtaataatgctaaaaaaggcctaataaaatgcccaagaaaatattcagtgcatttatagagaaggatattttgtagtagtatagtaatgtgttatgtagtacagttttaaagctataaatggaattttgtgtaaattcacaaaaatgtgatataaacaggatctaagactggattccctgtcactaaactgcaccactatacctgtctctctgtgtgggggacactgctgatgattcccaagattgagatgatgacggtgatgacgactgggtgaacagccatcacttcaacattgtgataatccttcacagcaagaaaccgaataaaatactaacatttctaacaactgctctgacattgtaaagagatccaacagaatcactcctgctgaaaaatacgctttctgccacctacacatttctatttaggaagtaaaatttgcttcatggtcatgaccccattagtcagtgttacagctgtgttggggataggaagtatatctggcagattgatatttatacacttttttataaagcagattttaaaatatagtaacatccatttttttcccttgaaagtgattctcttataaaaaatgaaagtggagtttaaggtatatcaaatcgttgtggaaggtgattaaaaatcaaaattcttttaaatatcaacttaattttttctaagtaagatacaaaaaattttcatctaaagtaatatttcactttatattgtaaagaaggtaggtatattggtggctgaggtctcttgaaattgctaaagggaaatttttctatggtaatgctcttacggatataaacctcagttaaatggaattatctatgggatgtgtggttctggttaactaaaaattaaccagtaaacactctgtagtaaccattacagaaaatacttctgccttaaaaaatatgatatgccagagatgagttagtgtttcttgacgttggagaccttttaaatgcctcatctgttgtactgaacaattgaaactgcatgcagccataaaagggacaagaaacagaactgtttactaactttgggacatcccctggagtttttaaaaataaataaatatatatatatataaaaaaaac

SEQ ID NO: 388 - DNA, 4194 bp, Homo sapiens
  source 1..4194: mol_type = genomic DNA
cttccggacaggtcaggccaaggtctcagccacgtgactgtgttccggctcggtaaagatggcggcgcccagggcggtagcgtgaaacttggtggaagacgctgaccagtcgtgttggaatcaaaacagcggggaccctgcgccatgtcgcgactgatcgtgaagaatctcccgaatgggatgaaggaggagcgtttcaggcagctgtttgccgccttcggcacgctgacagactgcagcctgaagttcaccaaagatggcaagttccgcaagtttggttttattggcttcaagtccgaggaagaggcccagaaggcacagaagcatttcaacaagagcttcatcgacacatcccggatcacagtggagttctgcaagtcattcggggacccggccaaacccagagcctggagcaaacatgcccagaaaccaagccagcccaagcagcctccaaaagactctactactccagaaattaagaaagatgagaagaagaaaaaggtggcaggtcaactggagaagctgaaggaggatacagagttccaggagtttctgtcagttcatcagaggcgggcgcaggcagccacttgggcgaatgatggcctggatgctgagccctcgaaagggaagagcaagccggccagtgactacctgaacttcgactccgattctgggcaggagagtgaggaggagggagccggggaggacctggaagaagaggcaagcctcgaaccaaaggcagctgtgcagaaggagctgtcggacatggattacctgaaatccaagatggtgaaggctgggtcgtcctcttcctcggaggaagaggaaagtgaagatgaagccgtgcactgtgatgaagggagtgaggccgaggaagaggattcctccgccaccccagtcctgcaggaaagagacagcaagggtgcaggccaagagcaagggatgccagctgggaaaaagagaccaccggaggccagagccgagacagagaaaccagcaaaccagaaggaacccaccacctgccacaccgtgaagctgcggggagccccgttcaatgtcacagagaaaaatgttatggaattcctggcacccctgaaaccagtggccattcgaattgtgagaaacgctcatgggaataaaacaggatacatctttgtggatttcagcaatgaagaggaagtgaagcaagctctgaaatgcaaccgggagtacatgggtgggcgctacatcgaggtgttcagggaaaagaacgtccccaccaccaagggtgcaccaaagaataccaccaaatcctggcaaggccggatactcggggagaacgaagaggaggaggacctggccgaatccggaaggctctttgtacggaacctgccctacaccagcaccgaggaggatctggagaagctcttctccaaatatggtcccctgtctgagctccactaccccatcgacagcctgaccaagaaacccaagggttttgcattcatcaccttcatgttccctgagcacgctgtgaaggcctactcggaggtggacgggcaggtattccagggcaggatgctccacgtgttaccatctaccatcaagaaggaagccagcgaggatgccagtgccctgggatcgtcgtcctacaagaagaagaaggaggcccaggacaaagccaacagtgccagctctcacaactggaacacactattcatggggccgaatgccgtggccgatgccatcgcacagaagtacaacgccaccaagagtcaagtgtttgaccacgagaccaagggcagcgtggccgtgcgcgtggctctgggggaaacccagctcgtccaggaagtgcggcgttttctcatagacaacggggtcagcctggattccttcagccaggctgcagcagagcgaagcaagactgtgattctggtcaagaacctcccggcaggcaccctggcggcccagctgcaggagaccttcggccattttggcagcctgggccgcgtgctgctgccagagggcggaatcactgccatcgtggagttcctggagcccctggaggcccgcaaggccttcaggcatctggcctattccaagttccatcatgtccccctctatctggagtgggctccagttggcgtcttctccagcacagccccacagaagaaaaagctccaagacacaccttcagaacccatggaaaaggacccagcagagccagaaacagtgcctgatggcgaaaccccagaagatgaaaatccaacagaggaaggagcagacaactcttcagcaaagatggaagaggaggaggaggaagaggaagaagaagaagagagcctcccaggatgtactctgtttattaagaatctcaattttgacacaacagaagagaagctgaaggaagtgttttcaaaagtggggacagtgaagagctgctccatctccaagaagaagaacaaagcaggagtgctcctttccatggggtttggatttgtggaatacaggaagccggagcaagcccagaaagctctcaagcagctccagggtcacgtcgtggacggccacaagctggaagtgaggatctcggaacgagccactaagccagccgtgacattggctcggaagaaacaagttcccagaaagcagaccacctccaagatcctggtgcggaacatccccttccaggcccacagccgggagatccgagagctcttcagcacctttggggagttgaagacggtccgcctgccaaagaagatgactgggacaggcacacacagaggcttcggctttgtggacttcctcaccaagcaggatgcgaagagagccttcaacgccctgtgtcacagcacccacttgtacgggcggaggctggtgctggagtgggccgactccgaggtgaccctgcaggccctgcggcggaagacggccgctcactttcacgagcccccgaagaaaaagcggtctgtggtgttggacgagatcctggagcagctggaaggcagtgacagcgacagcgaggagcagacccttcagctgtgagctggcaccgagagggtgtgtggctccggggccctggggaccgggacagccgctccagcttctgcactcaccaccatgtgggctggggggcggggcggggagcggcaggcggccccaccctgcactggtccaaggtcggaggagacaggggatgaggaaggcctcaggccactgcccagcggcccaggcatcctgggtttcaccagtgacgcgttctagcagacactgactgcgcacctgctctgtagcagacacggaagagtccaagggagcagccacgttaggaagagagacttgggaacagctacacagggagctagaacccctgctccccctgtccccaccccaggagagtaaggggacgagggccagctctctggcatcaggctgcttggacatgaaaccccgtctccaagctcaagctgggagaccctggcccagtttccttatctccttgggcccagccttccccttgctagctagttcttacttcataaggttttagagagaaataaacgcagtaatgcatgaagagtgccgggcatggtgctgagccctgttcctgctctccctccagggctgctgagctagaattcccacctatgtctttccaagggactgttcacggcttgggacttggtctctgtcctgccccatcctcgtcacttgggaccacgagccctggttcagtcacccagggaagcctcccagcggctcatgaagcatcgagctccaagcccagatgccaagctccctggctgagctgaatgatgtcactcatggtggacgcgttctgctcacgggcccagagccctgtgaaatgcatcaaggtcctctccgctggccagcagcatccccaggcttctctcaggcgcccgtgttcacattttctccagcctgagacgcagcctcccgcctggaagggcctgtgccagcaccaggcagagggcaagacggagagggcagagcaagaactgcactgcatctcactgcagtctgaatctagacatcgccattccccgaggtgcgacctcagactaatgacatcctggctgagcctctgtttttctctctaggaaatgggggtgataattgtgcctacctcagatagacagtgccagaattaagtgagtcaagccaagtaaagcccagagaagattctcatca

SEQ ID NO: 389 - DNA, 6003 bp, Homo sapiens
  source 1..6003: mol_type = genomic DNA
agtgactcggaagactttaacagcaacagctgcctcctcttgccagcttgatcccacctgctaagtgaaggaacagcgtttaaagaggtggcaatcggcaagggtggatgcttccctttccgcgcaggcgcgttcagtcgcagcaccgcgactatcgtgatagacaagcgagatcgacgctggccctttaatagccctttcccggggtcctgccccgcgcgtgcgcactgtggttctgcgcttgtcatcatggcgacgcggggccatgtgcaggaccctaacgacaggcgcctccggcccatttacgattatcttgacaatggtaataataaaatggcaattcagcaagcagataaactgttgaagaaacataaggatcttcattgtgctaaggttttaaaggcaattggtttacagagaactggaaagcaagaggaagcctttactcttgcacaggaggtggcagcccttgaacccacagatgacaactcactgcaggcactgactatcctttaccgggagatgcaccgaccggagttagttacaaaactttatgaggcagctgtgaagaaagttcccaatagtgaggagtatcactctcacctcttcatggcctatgccagagtgggtgaatacaagaaaatgcaacaggctggcatggctctatataagattgtccccaaaaatccctactacttttggtctgtgatgagcttaattatgcaatctatatcggcacaggatgaaaacctctcaaaaacaatgtttctgccccttgctgagagaatggtcgaaaaaatggtgaaagaggacaagatagaagctgaggctgaagttgaactttattatatgatcctggaacgtttgggaaagtaccaggaggccttggatgtcatcagagggaaattaggagagaagttgacaagtgagattcagagtcgggaaaataaatgcatggctatgtacaagaagctgagcaggtggccagagtgcaatgccctttcccggcgcctcttactaaaaaactcagatgactggcagttctatctgacttatttcgattctgtctttcgactgattgaagaggcctggagtcctcctgctgaaggtgaacactctttagaaggagaagtacattattctgcagaaaaagctgtgaagtttatagaagatcggataacggaagaatctaaaagttctcgccatctccgaggaccacatctagctaaattggagctgattaggcgtttacgaagtcaaggttgtaacgatgagtacaaactgggtgatccagaagaattaatgttccagtattttaaaaagtttggcgataaaccttgttgttttacagaccttaaggtgtttgttgacctcttacctgctacacagtgtacaaaatttattaatcagttacttggagttgttcctttgtcgacaccaacagaggataagctggcactgcctgctgacatcagagctctgcagcaacatttgtgtgtggtgcagctgacgaggttacttggcttgtaccacaccatggataaaaatcagaaattgagtgtggtcagagaattgatgttaaggtaccagcatggactggaatttgggaaaacctgtttgaaaacagaattgcaattttctgactattactgtctccttgctgtccatgcgcttattgatgtatggagggaaacaggtgatgagaccactgtgtggcaggccctgactttgctggaagagggattaacccatagcccttccaatgctcagttcaaattgctgcttgttcgaatctactgtatgctgggtgcatttgaaccagtggtggatctttactccagcctcgatgctaagcatatccagcatgataccattggttatcttttgacccgatatgctgaatctctaggtcagtatgctgctgcgtcccaatcctgtaacttcgcactcaggttttttcactccaaccagaaagatacctcagaatatattattcaagcttacaaatatggtgcatttgagaagatcccagagtttatcgcttttaggaacaggctgaataattctcttcattttgcacaagtccgtactgaacggatgctgttagaccttctacttgaagcaaatatatcaaccagtttagcagaaagtataaagtcaatgaaccttaggccagaagaagatgacattccatgggaagatttgcgagacaacagagacttaaatgtttttttcagctgggatccaaaagacagggacgtttctgaagaacataagaaactttccttagaggaggagaccttgtggttaagaatccgatccttaacattgaggctgataagtggacttccaagtctcaaccaccctgtggagccaaagaactcggagaagactgccgagaatggggtatcctcccggattgatattcttcgtttgctccttcaacagctggaggcaaccctggagacaggaaagcgatttattgagaaggatattcagtatcctttccttggtcctgtacctaccagaatgggtggattctttaattctggctgttctcagtgccagataagctctttttatcttgtcaatgatatttatgagctggataccagtggtttagaggatacaatggagattcaggaacgaatagaaaatagttttaagtctttactagaccagttaaaagatgtcttcagtaaatgtaaaggtgacctcttagaagttaaagatggtaacttgaaaacacatcctactcttttagaaaatctagttttctttgttgagactatttctgttatcctttgggtatccagttactgtgagagtgtcctacgaccatacaaactaaatttacagaaaaagaaaaagaagaaaaaagaaaccagcatcatcatgccacctgtctttaccagtttccaagactatgttactgggcttcagactttaatttccaatgttgtggatcatattaaagggcttgaaacacatctaattgcacttaaacttgaagaacttattttagaagacacttctctctcaccggaagagagaaaattttcaaagactgtgcaagggaaggtgcagagcagttatctgcactcacttctggaaatgggggagctgctgaaaaaaagacttgagaccacaaagaaactaaaaatttaaggaagtatctatcatgggcactgatgactctgcaacagaatatgacaccatcttcccaggcaaaagcaacatctggttgaccatgattttaatccagaacttcctcataaaatgcatgaaggactttgatcgtgaatttttttaggtgttaaatatatacaactgattaaattattgtatataaaccagaagcgggaccctcatctgggtttgaccactttttatacatgttcatatgcatatggcagcaacaagagaaccctacttttcttcttcccatcaccagaaacatcttttcaggggagcggggggtctataaaaacagcaatagaaattaagcataaagcatcaacctcatagcaactgaatagcccttccattataaataacattgagagtttttggtctggtccttgagccacaagaagtggaggggagaccatgcctgggaacagacccccttttcacagcagtaagtttgttttgaggctttctcagctacttggctcccacagaacccaaggcaggtacacaaaggaccttagatgagatctggcatatgcacccgcaatagaagggcaccacttggatgaccacaggcacttagtttttggctagtttttgtctgatagttaagacatccccatcctagcttctgtgagagttaaaaatctcaggtaagaaggcaaggaaggctctgttaatttatagctgtttagaggggaaagcagtgcagaccacttattaagcccgctgaggactagctttctgtctttcatacatttgggaaagataggaatgactgtttcaaagaagagaggtgcacataatttatgcaggcaagtatgatacttatttcattggttttgtgagtcatatatatacatatatatatatacacatatatatatgacttgaaaattaagatttaatactttaatgttttaagtgtggggggtttgggaaggaaggaatgtaatattatggatttagccttaggctttaagttttaggctggcaaaagaaatgttattcagtgggtttgaggtttggactactttcttcaaacttagagaattataacaggatggtgtttactttgttcacctggatgtccccaagactctagcttcttctatcagtggttggtctgatagaagaggtaaaaattgctcttgaaaatgtcctacaatttatgcagtttctttgataatatttttctgtttaaatccctgcttctgtttttggtctgttacctaaatatagttcaagtttaattctgtaagagcaaagaaatgaatttgatgaggaaattaagcatccaatggaggattggtcttgaagaccttaaaggtgctttccaacctgcactgctccagtgaaatgtggtacttttttcttttaaaagcaaccaagagagctgggaatatctgtgtacgcaaagtaattgcattttgtcccttcattttgactttcttagattcataatttgatacagtgcttaaacttccaaggaaattttaaacaattactacattacctgttcaaaataaggcttgttggaaatcctagtccatcaactaatttcaaaaatttatttttgatatgagtagcaacagctggtcatataccctatcccaaaaggaagaactgtcttgaacaagatgaatggaaaattgtggttaattctgaatttcatgtaatgacaacatattctttcataaaactatggcctgtttaagatggaactttgtgtgtgtctgctggggagggtggggtacatgtgtatggcgtgtgttcttgaaatgatgtctctctgaatatccaaaaaagtactgtactgtagaaatgctctttgaaaaagtctatcgactgaccatgatcaatctagcatatgtatgttcagtgggctagccttggtcctcagggacagtgtgtgactctagtggtcttcctaaccagtctcttgcctaaagatatctgggacctctactggctttaatgacaaataatgttatgttgaggttatgcttcctttgttatttgctgattttcctactaaatgtagcatttcaattagatccagctttcacattttgagataattgtaaaaagaatgaaattatgcagaaatggccaatatctcttatcaatctgttcttttggaaaccctcatgtactataaattgtgtacagttaaaaaaatatatatatatatatattcttacatgagtaaaaagcaccctctcccagcaatcgtatgccattggtatttgaagagaattcccaaataacccattgctgctgctgctgtttttgatttgtatgggtttttttgttttgtttgtttttgtgtggtaaactgatatttaaaaaaggaaaggagaaaaatcacgactactgtttacagactgaaaaattattgctttttatactactgagatcctaagttaagactctccaaagcaaacatttggtttaaatcatttatctgatgtagataaaaggtagagaaacttgtagtgttctccacataatggaaaatgtacaaatgcctagttgtgttgcccatcaattttgtatattttcataattttaattgttgaaaattgcattatattttgcaatcactatgttcaatctggatttgtctttcattttaacttttaatataaaaaggggtttcaatgtatctacaggcttgttattgaaacttcctacttatttgatgtgatttattaatataggaagtatatattcttccttaagtaagtgaagcatagcaaatctactttaaactggatgggttaatttatataaacattttcattttaa

SEQ ID NO: 390 - DNA, 4238 bp, Homo sapiens
  source 1..4238: mol_type = genomic DNA
cgcgaagccccgccccctcttcctcgccctctctcgcgggtcggggttacatggcggcgactgcggcaaagcgagagcctcggagacgccgctgccgccagcacagccggagacctgagccgacactgggggcagtccgcgagccccgcactctctcgatgagtcggagaagtcccgttgtatcagagtaagatggacggtagctttgattgtgattgtggtgagctggagccacctgatcactaacaaaagacatcttctgttaaccaacagccgccagggcttcctgttgaaataaatatatagcaacaaaggaaaaaaagaagcaaaacggaaatagtgcttaccagcaccttagaatgatgctgctcaggaccagtccaacactgaatgtatctgcactgtgaggagaatgttcatagaagcctgttgtgtgcatatttattcacatttttgttaaatgttaaatcgtttagcacggtaatctgagtgcacagtatgtcatttcattccgtttgagtttcttgttttcgttaaatgtctgcagagttgctgcccctttcttgaactatgagtactgcaatctttttaattctcaatatgaatagagctttttgagctttaaatctaaggggaactcgacaggcctgtttggcatatgcaatgaacatcaagaaaccatcttgctgtggaagcataattatttttcttctccctttttgaaagatctttccttttgatgccagttttcttccttgtttacacaagttcaatttgaaaggaaaaggcaatagtaagggtttcaaaatggcagagaaatttgaaagtctcatgaacattcatggttttgatctgggttctaggtatatggacttaaaaccattgggttgtggaggcaatggcttggttttttctgctgtagacaatgactgtgacaaaagagtagccatcaagaaaattgtccttactgatccccagagtgtcaaacatgctctacgtgaaatcaaaattattagaagacttgaccatgataacattgtgaaagtgtttgagattcttggtcccagtggaagccaattaacagacgatgtgggctctcttacggaactgaacagtgtttacattgttcaggagtacatggagacagacttggctaatgtgctggagcagggccctttactggaagagcatgccaggcttttcatgtatcagctgctacgggggctcaagtatattcactctgcaaatgtactgcacagagatctcaaaccagctaatcttttcattaatacggaagacttggtgctgaagataggtgactttggtcttgcacggatcatggatcctcattattcccataagggtcatctttctgaaggattggttactaaatggtacagatctccacgtcttttactttctcctaataattatactaaagccattgacatgtgggctgcaggctgcatctttgctgaaatgctgactggtaaaaccctttttgcaggtgcacatgaacttgaacagatgcagctgattttagaatctattcctgttgtacatgaggaagatcgtcaggagcttctcagcgtaattccagtttacattagaaatgacatgactgagccacacaaacctttaactcagctgcttccaggaattagtcgagaagcactggatttcctggaacaaattttgacatttagccccatggatcggttaacagcagaagaagcactctcccatccttacatgagcatatattcttttccaatggatgagccaatttcaagccatccttttcatattgaagatgaagttgatgatattttgcttatggatgaaactcacagtcacatttataactgggaaaggtatcatgattgtcagttttcagagcatgattggcctgtacataacaactttgatattgatgaagttcagcttgatccaagagctctgtccgatgtcactgatgaagaagaagtacaagttgatccccgaaaatatttggatggagatcgggaaaagtatctggaggatcctgcttttgataccaattactctactgagccttgttggcaatactcagatcatcatgaaaacaaatattgtgatctggagtgtagccatacttgtaactacaaaacgaggtcatcatcatatttagataacttagtttggagagagagtgaagttaaccattactatgaacccaagcttattatagatctttccaattggaaagaacaaagcaaagaaaaatctgataagaaaggcaaatcaaaatgtgaaaggaatggattggttaaagcccagatagcgctagaggaagcatcacagcaactggctggaaaagaaagggaaaagaatcagggatttgattttgattcctttattgcaggaactattcagcttagttcccagcatgagcctactgatgttgttgataaattaaatgacttgaatagctcagtgtcccaactagaattgaaaagtttgatatcaaagtcagtaagccaagaaaaacaggaaaaaggaatggcaaatctggctcaattagaagccttgtaccagtcttcttgggacagccagtttgtgagtggtggggaggactgttttttcataaatcagttttgtgaggtaaggaaggatgaacaagttgagaaggaaaacacttacactagttacttggacaagttctttagcaggaaagaagatactgaaatgctagaaactgagccagtagaggatgggaagcttggggagagaggacatgaggaaggatttctgaacaacagtggggagttcctctttaacaagcagctcgagtccataggcatcccacagtttcacagtccagttgggtcaccacttaagtcaatacaggccacattaacaccttctgctatgaaatcttcccctcaaattcctcatcaaacatacagcagcattctgaaacatctgaactaaaacactcagcagacatttatctttgtattcttcatgaaatgtgttttgtctttttttattactagtgtttaagtcattttttacttgaatcagatggtgtcatttagtaaggattttatgagttcttgttttttaaaatccagactttctttttctacatgtgagatagttttcattttaactggcatgtcatttgcacacaaaaataaagactagagcaaaataatgcaacgcaggaggagaaaagaaatgcactaagacaagaacattctctcatagaacattgatctgttttacaggaaacaaaccttgccttgaaatttacacagtgagactgtacataattgcatgaaaatagctatttttttcctaagacatttttcattcatgaatattttcaagtttttcatactgtacacatttcttaaaacacatgataccagcagcaactgaaaatgaatgccgaatttggtacacatgtgttatctacctcaaggtaacaagagtatgtggcaaaacatataccacccatagtgcttcacaaaatgcacttctatttagccagcgtttattgtagtaaactattcttaataaaactcactcactgtttataaatgttctggtatgcattctttatagtgaagtgttaatacatcacatcttatttattttagcaaatcagtatattttctgtatttaattataaaaaattaacttagtttttaaaatttatttgcaaatatactttactttttccatttggcactatggtttgttgcctacctagctgcatctataatgtcagcttatcctaaggctgtccacgtacttaatttacttaagtgttcattttaagtaacgtgctcactgtgtataggaatttgtattttggaggtgcttgatctatctacaaagaaaaattaattaggaattactttattataaaatgctcctagaagtcttaattgtgtttattttttaaaaaaacaaatgttagacttgtgtgcatggaagtaattaaggtacatcattattgtagtttgaaagttgtacatgataagacattttgtttttactgtatgtttttactgaatgatctattccccatcccaaggcaagcatgaataaaattaggttaaacgtagcatgtggcatcgcagtctcttagaatttgtttcatctattttattttattgaatactgtctgtatctttggttatcctgtttgaagaaaaaggacaaataaaacatggccagcaaataca

SEQ ID NO: 391 - DNA, 2841 bp, Homo sapiens
  source 1..2841: mol_type = genomic DNA
attccgagaacgccctctccggcctgtctccccctcgcgccggcggccgtggtgcagcccaaggcggaagcggctgcctgacggaaccggctcgcgagcgcagctatggctgctggcgtaccctgtgcgttagtcaccagctgctcctccgtcttctcaggagaccagctggtccaacatatccttggaacagaagatcttattgtggaagtgacttccaatgatgctgtgagattttatccctggaccattgataataaatactattcagcagacatcaatctatgtgtggtgccaaacaaatttcttgttactgcagagattgcagaatctgtccaagcatttgtggtttactttgacagcacacaaaaatcgggccttgatagtgtctcctcatggcttccactggcaaaagcatggttacctgaggtgatgatcttggtctgcgatagagtgtctgaagatggtataaaccgacaaaaagctcaagaatggtgcatcaaacatggctttgaattggtagaacttagtccagaggagttgcctgaggaggatgatgacttcccagaatctacaggagtaaagcgaattgtccaagccctgaatgccaatgtgtggtccaatgtagtgatgaagaatgataggaaccaaggctttagccttctcaactcattgactggaacaaaccatagcattgggtcagcagatccctgtcacccagagcaaccccatttgccagcagcagatagtactgaatccctctctgatcatcggggtggtgcatctaacacaacagatgcccaggttgatagcattgtggatcccatgttagatctggatattcaagaattagccagtcttaccactggaggaggagatgtggagaattttgaaagactcttttcaaagttaaaggaaatgaaagacaaggctgcgacgcttcctcatgagcaaagaaaagtgcatgcagaaaaggtggccaaagcattctggatggcaatcgggggagacagagatgaaattgaaggcctttcatctgatgaagagcactgaattattcatactagggtttgaccaacaaagatgctagctgtctctgagatacctctctactcagcccagtcatattttgccaaaattgcccttatcatgttggctgcctgacttgtttatagggtccccttaattttagtttttagtaggaggttaaggagaaatcttttttttcctcagtatattgtaagagagtgaggaatacagtgatagtaatgagtgaggatttcttaaatatactttttttttgttctaggaatgagggtaggataaatctcagaggtctgtgtgatttactcaagttgaagacaacctccaggccattcctggtcaaccttttaagtagcatttccagcattcacacttgatactgcacatcaggagttgtgtcacctttcctgggtgatttgggttttctccattcaaggagcttgtagctctgagctatgatgcttttattgggaggaaaggaggcagctgcagaattgatgtgagctatgtggggccgaagtctcagcccgcagctaagtctctacctaagaaaatgcctctgggcattcttttgaagtatagtgtctgagctcatgctagaaagaatcaaaaagccagtgtggatttttagactgtaataaatgaggcaaaggatttctattccagtgggaagaaaacctctctactgagttgtgggggatatgttgtatgttagagagaaccttaaggagtccttgtatgggccatggagacagtatgtgataacataccgtgattttcatgaagaaattcttctgtcttagagttctcccctgctgcttgagatgccagagctgtgttgttgcacacctgcaaaacaaggcacatttccccctttctctttaaagccaaagagagatcactgccaaagtgggagcactaaggggtgggtggggaagtgaaatgttaggcgatgaattcctgagcaccttgtttttcttccaaggttcgtagctcctctctgcccttccaagcctgtaacctcggaggactatcttttgttctttatcctttgtcttgtttgagtgggtcagccccagaggaactgataagcaaatggcaagtttttaaaggaagagtggaaagtactgcaaataaaaatccttatttgtttttgtagactttgtaatgcatatcattagccctcactgtgatcattactgctgtggctctgaactggcacatagtacagtggatggaaggtgcccgcacaccagctgagaactggttctggcctaggtgggctctagaaccatttacacagcatgaaagaaacaggttgggttaggagcagaaagaaataaggctcacacccctccagacactaccttataagcactgcagaacctgaaacagatggcagaaggaatggaatgctacaggggccagcaggagtgaccacagggaggggacagctcagtgactggagcattcaggaagaggctttccagggaacactggacattgcttagtgaccttttgttcctttttttttttttttcttttactgttctgaaagactttgagtctgtggttcaccaccagcccatcagtgtttctttgaggtgattgcattagggaagttggctctgggattgcaaaaaaaaaaaaaaggtggaacatgttttccttaaaagatggaaggttttagaaaatatactaggccatctggttagaaaaaacagaccagactagaaaaagctgtgaatttgattttgtagattaaacaaagccagatgattaaaatgtgatttattt

SEQ ID NO: 392 - DNA, 4515 bp, Homo sapiens
  source 1..4515: mol_type = genomic DNA
agttccggcgggtgacggtgcggacgggtcaggagcgtagaggcggcggcaaaatggcggcgcctgaggagcgggatctaacccaggagcagacagagaagctgctgcagtttcaggatctcactggcatcgaatctatggatcagtgtcgccataccttggaacagcataactggaacatagaggctgctgtacaggacagattgaatgagcaagagggcgtacctagtgttttcaacccacctccatcacgacccctgcaggttaatacagctgaccacaggatctacagctatgttgtctcaagacctcaaccaagggggctgcttggatggggttattacttgataatgcttccattccggtttacctattacacgatacttgatatatttaggtttgctcttcgttttatacggcctgaccctcgcagccgggtcactgaccccgttggggacattgtttcatttatgcactcttttgaagagaaatatgggagggcacaccctgtcttctaccagggaacgtacagccaggcacttaacgatgccaaaagggagcttcgctttcttttggtttatcttcatggagatgatcaccaggactctgatgagttttgtcgcaacacactctgtgcacctgaagttatttcactaataaacactaggatgctcttctgggcatgctctacaaacaaacctgagggatacagggtctcacaggctttacgagagaacacctatccattcctggccatgattatgctgaaggatcgaaggatgactgtggtgggacggctagaaggcctcattcaacctgatgacctcattaaccaactgacatttatcatggatgctaaccagacttacctggtgtcagaacgcctagaaagggaagaaagaaaccagacccaagtgctgagacaacagcaggatgaggcctacctggcctctctcagagctgaccaggagaaagaaagaaagaaacgggaggagcgggagcgtaagcggcggaaggaggaggaggtgcaacagcaaaagttggcagaggagagacggcggcagaatttacaggaggaaaaggaaaggaagttggaatgcctgccccctgaaccttcccctgatgaccctgaaagtgtcaagatcatcttcaaattacctaatgattctcgagtagagagacgattccacttttcacagtctctaacagtaatccacgacttcttattctccttgaaggaaagcccagaaaagtttcagattgaagccaattttcccaggcgagtgctgccctgcatcccttcagaggagtggcccaatccccctacgctacaggaggccggactcagccacacagaagttctttttgttcaggacctaactgacgaatgacatttttttcttcctgtcccctcctaccccagtccctaaaagaaatggggaaaaaagaaaacaacagcaagtcagaaaaaaaaaacaagagagagaaattcatattattattattattataatacaatattttttttaaaagactgctgcatccttaggaaggatcagaaaccatgctgcccgtaagagtcacaacctgtgtgtgcgcgcaaggttagcaacaaacgtacccgcttggcaagcccacccttcctgtggcctctgtgcacgcaccttccagtgaacagagactcttcaccttcgacccatccattgtcccagctgggaaggggacattcccactagttctcattcattcttgcttttatgaaaaataaaagtgaaaaacctccatcaaccagctacttgcagcatctcctgaggacttgcttctcctgcctctggggaagagagggaagagaaagcacagagcagagaagcagagatgttccttgaactgcccacaagttttcaataacttttatttctgttttgtaatgaccaaaggaatgaggctgacataggtatatatatatatttttttcctttatttgataaagagccaattctttaaacccatgagtttatgccctgggctccttagcccacaatagtgtaataaaagtgccccgggctggtttgtgcttatttctgccattgtccctctcacgttcccagagaggtcattctttttggtccaactcttgctgtcctttcttaccacctgtgcaccccacttggagcagtgggaggaaatctgggtttgtggccccacaaaggctgtatatgtaaagatacacctatgtatgtggtggaactcacctttacacacaactgcagcttttccttggagtctgtaccaggtggtggttatggggtctgaaccaaaggatagcagctcttcattcctcttctgacatgtgcatgctgctccccccagccctgggctttcctgaattgccaagcctggtgcctttccaaaggactagcagggcctgtggtggagccagcagaaccacaggagagtgccctgcctgtctcagtggaagtgtattattgttttaaggatagaaccagaggccttgaagggagccaagacagaactcccagcctgtgtaatctattggaaggcacattttcatttctgatgcagccaccttctggaggcagcttttatcctttctctctattgctatgttgaagtaatagggttttttttaacctctggatgtctcgtctgtggttgagtttatggtaatgggtacatgggtcaggccatgtattaacagatgccagtgcgctctgacaagtattccaaagtgttctgtagctagactggtgcaggctcgttgtaccactgcaaccgactgacgttactgtagttcctagaatgctgtgagggcggggggttcagatcaacataaagcctaacttgctggagttgtagtctcaaggctttctctcttgcttaactaaaacctaaggaccactgtttttggtagcaattatatggttactatccactgcagtcctcagttgttggggtaaatcccacatggcagagtaaggcaccccacagaaattaacttggagagcctgagaaattcccagtggccttggcatagctgtctagaacaccatctctaggaaaatttaattctgtccctggccagctattgttcttccacttcgttttctgctgtcccaaggccagatgagtggaatcaccatctgactgctgtcaataaaatgtatctggcgtgaacagcaggataacccatgttctccacataaggataaccttacgtgaaaccttcctgctgacaaccatgcagaggaatttttccacttaagtcagagccttcctccccatctggaattcacagctgttccctggcagcacacaggagggtattaaggacctttgtgaggctaggtacactgtccacacctctttggggaagttacgattttttttttccatcataattcagtctcttcttattctacagtgtgcactttatgcctctcgccttttgataatagttgttcagtgaaggaagtcagctgccagaatattaagaagggtctccctttatgtcagtacaactgttagggcggccttcccatttactttaggtttcaagaggattcaccggaagcacatgccccggtctagtcccatttgaaacagttctgctttactgagaccctaggccggtctccttgctgaccctagcgctgctgcctaggtgccatttcctttcctcctcagtcaaatacaggctgcacattttgtcacttaatgccagtacaatctgtgttactcctaaggacttttgggattttgatgagacctgcgagggagaagacactgagaagccagtgatctgcaagcatttgctcttgtttccacatcacctctgggatatttcagctgttgtttccaaatggcaaatcatcaactaaaagcacttgtttcaagttttgttctgcactcccacgactgaagttgtagattgagctgaataaccatgggaagtgaccaagcaaagacactcgattggagtcagttgaatatttgtaccctcagtggagcccttctggtcttttcttccacttctgcagaatttcctctagcaaatacttctttctccttgcttgcctccaccatgatatttgaataagagatggccagaggataacacttgtctcttaaaaactaagctaaaaagaacctagaaccttcaattgagcagttgtgaaaattgctaatggtgccaaggccaagcaaagagtttcagaaaatgactgagaaggagcgataacccccagaatgcaaaatcaggggcatcattatccggtgcttgaacaaggagctccgctctacaactggtttttttaggacttgtgaggaacacagcaacggaaatccatccacaaaggatgcagtgccccaacttgtactgcgcctgaatagtcatgtgataatttactgaagaaatctagtgtactttaaatttttttcataaaagtttacattgtattgtaggttaacattaaatgttttatagcaaaaacttca

SEQ ID NO: 393 - DNA, 3893 bp, Homo sapiens
  source 1..3893: mol_type = genomic DNA
tgtgggaagcgcccgcgctttcggcgggttccgttaaaatggcgccctggtggccggcggcgcccgcgccttagcctgtcaggagcagggagcttgcggggcgcaggaagggcgcgggccgcggtccctgcgcgtgcggcggcagtggcggctctgcccggaccaccgtgcacggctccgggcgaggatggcgaccccggaccagaagtcgccgaacgttctgctgcagaacctgtgctgcaggatcctgggcaggagcgaagctgatgtagcccagcagttccagtatgctgtgcgggtgattggcagcaacttcgccccaactgttgaaagagatgaatttttagtagctgaaaaaatcaagaaagagcttattcgacaacgaagagaagcagatgctgcattattttcagaactccacagaaaacttcattcacagggagttttgaaaaataaatggtcaatactctacctcttgctgagcctcagtgaggacccacgcaggcagccaagcaaggtttctagctatgctacgttatttgctcaggccttaccaagagatgcccactcaaccccttactactatgccaggcctcagacccttcccctgagctaccaagatcggagtgcccagtcagcccagagctccggcagcgtgggcagcagtggcatcagcagcattggcctgtgtgccctcagtggccccgcgcctgcgccacaatctctcctcccaggacagtctaatcaagctccaggagtaggagattgccttcgacagcagttggggtcacgactcgcatggactttaactgcaaatcagccttcttcacaagccactacctcaaaaggtgtccccagtgctgtgtctcgcaacatgacaaggtccaggagagaaggggatacgggtggtactatggaaattacagaagcagctctggtaagggacattttgtacgtctttcagggcatagatggcaaaaacatcaaaatgaacaacactgaaaattgttacaaagtagaaggaaaggcaaatctaagtaggtctttgagagacacagcagtcaggctttctgagttgggatggttgcataataaaatcagaagatacacggaccagaggagcctggaccgctcattcggactcgtcgggcagagcttttgtgctgccttgcaccaggaactcagagaatactatcgattgctctctgttttacattctcagctacaactagaggatgaccagggtgtgaatttgggacttgagagtagtttaacacttcggcgcctcctggtttggacctatgatcccaaaatacgactgaagacccttgcggccctagtggaccactgccaaggaaggaaaggaggtgagctggcctcagctgtccacgcctacacaaaaacaggagacccgtacatgcggtctctggtgcagcacatcctcagcctcgtgtctcatcctgttttgagcttcctgtaccgctggatatatgatggggagcttgaggacacttaccacgaattttttgtagcatcagatccaacagttaaaacagatcgactgtggcacgacaagtatactttgaggaaatcgatgattccttcgtttatgacgatggatcagtctaggaaggtccttttgataggaaaatcaataaatttcttgcaccaagtttgtcatgatcagactcccactacaaagatgatagctgtgaccaagtctgcagagtcaccccaggacgctgcagacctattcacagacttggaaaatgcatttcaggggaagattgatgctgcttattttgagaccagcaaatacctgttggatgttctcaataaaaagtacagcttgctggaccacatgcaggcaatgaggcggtacctgcttcttggtcaaggagactttataaggcacttaatggacttgctaaaaccagaacttgtccgtccagctacgactttgtatcagcataacttgactggaattctagaaaccgctgtcagagccaccaacgcacagtttgacagtcctgagatcctgcgaaggctggacgtgcggctgctggaggtctctccaggtgacactggatgggatgtcttcagcctcgattatcatgttgacggaccaattgcaactgtgtttactcgagaatgtatgagccactacctaagagtatttaacttcctctggagggcgaagcggatggaatacatcctcactgacatacggaagggacacatgtgcaatgcaaagctcctgagaaacatgccagagttctccggggtgctgcaccagtgtcacattttggcctctgagatggtccatttcattcatcagatgcagtattacatcacatttgaggtgcttgaatgttcttgggatgagctttggaacaaagtccagcaggcccaggatttggatcacatcattgctgcacacgaggtgttcttagacaccatcatctcccgctgcctgctggacagtgactccagggcacttttaaatcaacttagagctgtgtttgatcaaattattgaacttcagaatgctcaagatgcaatatacagagctgctctggaagaattgcagagacgattacagtttgaagagaaaaagaaacagcgtgaaattgagggccagtggggagtgacggcagcagaggaagaggaggaaaataagaggattggagaatttaaagaatctataccaaaaatgtgctcacagttgcgaatattgacccatttctaccagggtatcgtgcagcagtttttggtgttactgacgaccagctctgacgagagtcttcggtttcttagcttcaggctggacttcaacgagcattacaaagccagggagcccaggctccgtgtgtctctgggtaccagggggcggcgcagctcccacacgtgaagctcgcggtcctcccagggagctgcgggtgatgttcgttgcactgctagacacgaaattcccattgacgtcctgcaggaactgcatgctgcaggtgtcctgcccttccgcccacgagtgcgccatgtttcagcggagcggcgtgtgggagaagccacgtcgtgtttcacatgtcggagtcgaatgcatttgtaaatccctaagtcaagtaggctggctgcactgttcacatttgtctctaaaagtcttcatcgctaaaagataccataatttgctgaggcttcttaagctttctatgttataatttatatttgtcactttaaaaaatccatttcttttagaaaaaattagggtgataggatattcattagttaagatggtaacgtcattgctatttttttaacatcctctttagaggtaatttttgttaacataaccaaaaattaaattgaaacaaaatgtcccaactaagaaaatatatagagcattttatttttttttagtgttgtaaaatattaacctctgtgagatcctttgtatcttaatgcattacctttacacatatttattcttattttctctcctttcagagtttacatttttatatttaatttactatttcagatttttaaaatagtatagaaaaaagtaggagtgatagagaacaaaaatactcttatacagtgcaacccaaataccgcgaatgcatcagctaaagcagcgtgtaaataggagtgacgagaaagttaatggagtattttattttcaaagttcctgataagcattggaaagaaatcgacatggataatgaagatttcctttttccttgcctattttttcattgtaaatatttatatactactgaccaagatgttggggtgggggggattgttttttgtaaaaatgtcattatcaggtcacataaatctgcctttatgttgcataagtgaaaatttagaaaattaaaagcaattatctttca

SEQ ID NO: 394 - DNA, 2995 bp, Homo sapiens
  source 1..2995: mol_type = genomic DNA
cctgggaccaacttcgcgaagcgggaagcccggcgggggggtggggggagctaaagacctgcggcctcagcccctccaaagaacagggagatgacggggaaagcaggggaagcgctgagcaagcccaaatccgagacagtggccaagagtacctcggggggcgccccggccaggtgcactgggttcggcatccaggagatcctgggcttgaacaaggagcccccgagctcccacccgcgggcagcgctcgacggcctggcccccgggcacttgctggcggcgcgctcagtgctcagccccgcgggggtgggcggcatggggcttctggggcccggggggctccctggcttctacacgcagcccaccttcctggaagtgctgtccgacccgcagagcgtccacttgcagccattgggcagagcatcggggccgctggacaccagccagacggccagctcggattctgaagatgtttcctccagcgatcgaaaaatgtccaaatctgctttaaaccagaccaagaaacggaagaagcggcgacacaggacaatctttacctcctaccagctagaggagctggagaaggcattcaacgaagcccactacccagacgtctatgcccgggagatgctggccatgaaaacggagctgccggaagacaggatacaggtctggttccagaaccgtcgagccaagtggaggaagcgggagaagtgctggggccggagcagtgtcatggcggagtatgggctctacggggccatggtgcggcactccatccccctgcccgagtccatcctcaagtcagccaaggatggcatcatggactcctgtgccccgtggctactggggatgcacaaaaagtcgctggaggcagcagccgagtcggggaggaagcccgagggggaacgccaggccctgcccaagctcgacaagatggagcaggacgagcggggccccgacgctcaggcggccatctcccaggaggaactgagggagaacagcattgcggtgctccgggccaaagctcaggagcacagcaccaaagtgctggggactgtgtctgggccggacagcctggcccggagtaccgagaagccagaggaggaggaggccatggatgaagacaggccggcggagaggctcagtccaccgcagctggaggacatggcttaggtcaaggcgcgctcagatgccggagccccaagactctgctctcctcgggccctgtggtgctgggagatgctctctgaggcaaggcccagacctggcctctgccatcctccctgttccccacaggtcctccatcacccctggtggctgcaggcaccgctgggttctgactctggaccatgctgagacatccctcatctagtcttgacctctccagcatcccagcctcagaagccttcttgctgcccacaacgtcccctcaagccccttctctcaatccctttgcaacgctcactggttttggccaccccttgctctctgttctcttgctttaaagagtcctccttcccagctctacattctgctctgcccatgcctaaagcccattgctgcaaatgcattgtgaattgcctgccatggctgtgacacagacggaggactggaactgcaactccagcgtcctcagcaccccactcctcagtaaaagtcttctcccaactcagcctgttccttcctgcagacctggctgggcctgggcttccacagtgtgaagacactgtgcaggcccaggcaggcccagcctctgccccacccatcagtggagtccagatggcaggctacagttgggaagtctcagcctgggcccctcagccacccttggtctcatgccccgccatggtcaccctcaggaacccaccctctccacacccagcctgtcccactggctcctcccagcacaggcacctatgtggcatgtggtgatgtacgctgcgtgccatgagtccatgtcctatgcctcacaaatgctgtggttcactgcactgttcaggagtccaaaccttctaccctgggtcctcgggcccctgagcctgtgtcctgaagaatctcgactctcgtgatatgctgcttgtgaccttgacttgccatgaaggcacctgcccccacagctccttgcaaactatgagttcacatgtgccctgccttgaacaacccaatctggctggtaaatgacatctacgaagccacaggcctggcctcaactgagaagccaagcctggagtaggcctggggctatgcatacgcattaagggcctgctggagaaaccttcactccagacagacagggggctaaggggctagggctgagcacctctcagagcaagcctttgacctgttcagaaggatgggaaaaaggctggaaggaaagcaaggcagaaggccaggagtaagcccaagctaagctgcaggcacacacgccttcatgccagtgcatgccaggaagcacgttcactagactaaaacacggtaaccatgatggaataaggagctggggcttctttctgctggctgatgggtggacctgtgtatggtgacctctccggcctggccttttccattcgcatgaacaatgggagcacatagccctgttgacctgcccgatccagattcccaggccaggctcccgaccccatccacctatccaccaccccacccacctttgcagggaatacctcgttagagaatggcctgagacagtgcgttgcaactttttaattccatatcaaaagttgatttcttcttcattccatttatggaacttccctccccctagtccggttcttcttgtctttgtccctgttggtttgaagtgttagactatagcccctggtgtgtaaataatgtacatagagtgagaagaaagaaacttgatattgaggtgtttgaaatatggaactgtaataacttctaggtattcgaaacctgtgatttctgtgccattttctgtaaagatacaagtaagaataaaattgacttaaaaata

SEQ ID NO: 395 - DNA, 3264 bp, Homo sapiens
  source 1..3264: mol_type = genomic DNA
aaaccagcagccacccctaatgcagccggccccctcctaagggatcatgggccttgaagtcctttgctggccacaccctcgttttctgtcataggagtgagaactacgcctcccaggatgccgcggtgaggccgccgtcacggacgccctcttccccgccctccttgcgcgcagccttctgggatgtatagtcctagatccgagcacgcagcggcaaaagggcgcagaagaaccacaaaccccagaagccctcgcgcccactcttctccctcccctccagaagtcggagtgctgtttttgttgttggtgaaaggtgaggggaacagctgatccgtctgttgggaggacagatatctcaaggccaggatggaagaatcaccactaagccgggcaccatcccgtggtggagtcaactttctcaatgtagcccggacctacatccccaacaccaaggtggaatgtcactacacccttcccccaggcaccatgcccagtgccagtgactggattggcatcttcaaggtggaggctgcctgtgttcgggattaccacacatttgtgtggtcttccgtgcctgaaagtacaactgatggttcccccattcacaccagtgtccagttccaagccagctacctgcccaaaccaggagctcagctctaccagttccgatatgtgaaccgccagggccaggtgtgtgggcagagcccccctttccagttccgagagccaaggcccatggatgaactggtgaccctggaggaggctgatgggggctctgacatcctgctggttgtccccaaggcaactgtgttacagaaccagctcgatgagagccagcaagaacggaatgacctgatgcagctgaagctacagctggagggacaggtgacagagctgaggagccgagtgcaggagctcgagagggctctggcaactgccaggcaggagcacacggagctgatggaacagtacaaggggatttcccggtcccatggggagatcacagaagagagggacatcctgagccggcaacagggagaccatgtggcacgcatcctggagctagaggatgacatccagaccatcagtgagaaagtgctgacgaaggaagtggagctggacaggcttagagacacagtgaaggccctgactcgggaacaagagaagctccttgggcaactgaaagaagtacaagcagacaaggagcaaagtgaggctgagctccaagtggcacaacaggagaaccatcacttaaatttggacctgaaggaggcgaagagctggcaagaggagcagagtgctcaggctcagcgactgaaagacaaggtggcccagatgaaggacaccctaggccaggcccagcagcgggtggccgagctggagcccttgaaggagcagcttcgaggggcccaggagcttgcagcctcaagccagcagaaagccacccttcttggggaggagttggccagtgcagcagcagccagggaccgcaccatagccgaactacaccgcagccgcctggaagtggctgaagttaacggcaggctggctgagctcggtttgcacttgaaggaagaaaaatgccaatggagcaaggagcgggcagggctgctgcagagtgtggaggcagagaaggacaagatcctgaagctgagtgcagagatacttcgattggagaaggcagttcaggaggagaggacccaaaaccaagtgttcaagactgagctggcccgggagaaggattctagcctggtacagttgtcagaaagtaagcgggagctgacagagctgcggtcagccctgcgtgtgctccagaaggaaaaggagcagttacaggaggagaaacaggaattgctagagtacatgagaaagctagaggcccgcctggagaaggtggcagatgagaagtggaatgaggatgccaccacagaggatgaggaggccgctgtggggctgagctgcccggcagctctgacagactcagaggacgagtccccagaagacatgaggctcccaccctatggcctttgtgagcgtggagacccaggctcctctcctgctgggcctcgagaggcttctccccttgttgtcatcagccagccggctcccatttctcctcacctctctgggccagctgaggacagtagctctgactcggctgaagatgagaagtcagtcctgatggcagctgtgcagagtgggggtgaggaggccaacttactgcttcctgaactgggcagtgccttctatgacatggccagtggctttacagtgggtaccctgtcagaaaccagcactgggggccctgccacccccacatggaaggagtgtcctatctgtaaggagcgctttcctgctgagagtgacaaggatgccctggaggaccacatggatggacacttctttttcagcacccaggaccccttcacctttgagtgatcttactccctcgtacatgcacaaatacacactcatgcacacacacactcacacacatgcatacacttaggtttcatgcccattttctatcacactgggctccatgatattctgttccctaagaactgcttctgtgtgccctgttttcatcccaagatttctcacttcatcctctcctacctggctcttttgtcccagggaggggtcctgttcggaagcagtggctgaatttatcccctgaaagtggttttggaggaaccgggatggaggaggccttcccctgtgggaatagaatcgtccactcctagccctggttgcttctgatacacagccactgcacacacacactcacactcacactcccttgtctgatgccccaaagccaattcctggggcaccctaccctctcttatttggagtttccgttggtttacctgagttttctctggggtctgcacagaggcagcagcatggacatcatggcctctcaggtcccttttggttctcagtttcattggttcctctttctgttcccccattgacttctgtgccccaccctagccttttccataaccttaggtattcagtttggaggggttttttgtatttttgaggattcctgtattctgtatcctctcctcgcatctcctcacatggaaagaaataatgtatttgtgccttctgtgaggaatggggggaacaagtggtcccaggtatccccatttccaaggcccccctccctctccaggtccccccacagcaataaaagcttccccctgatatccatccctttgtagtttgaacaaatatatttatatgatatgt

SEQ ID NO: 396 - DNA, 2939 bp, Homo sapiens
  source 1..2939: mol_type = genomic DNA
gtttgtccgccactgtttgaaaacagttggcgccgccgccgccggggcctcatttccaggtcagcccccggcctgacgcggcgttgcgtcccccgggagctgcgctaggcgaacggctgcggcgctttgtgctccagtcgctcctaacgctccctggcccggccggggccgcgcagttagggcatctgaggcggggagaagcggcggggagacgccggctgccagcatgtcgctgcctccggagaaagcctccgagctgaagcagctcatccaccagcagctgagcaagatggatgtccatggtagaataagagaaatccttgctgagactatacgggaagaattggcacctgatcaacagcatttatcaacagaagatttgatcaaagcccttagacgtcgaggaatcattgacgatgtgatgaaagaacttaattttgttactgacagtgttgagcaagaactcccttcctctccaaaacaacctatttgttttgatagacaatcgacattaaaaaaaactaatattgatccaacacggaggtatctttaccttcaggttttgggtggaaaagctttcttggaacatctgcaagaacctgagcctttacctggacaagtttgttcaacgtttactttatgtttacattatcgaaaccaacgttttcgttctaaacctgttccatgtgcctgtgaaccagattttcatgatggctttttacttgaagtacacagagaaagcttgggtgatggaactagaatggctgattcaacaacaatgttatcaataagtgatccaattcatatggtgctaatcaaaacagacatatttggtgagacgactttagtagcatcatattttctggaatggcgatcggttttgggctcagaaaatggagtgaccagtctgactgtggaacttatgggtgtaggcacagaatcaaaagtttctgtgggaattttaaatataaaacttgaaatgtatccaccactcaatcaaacgttatctcaagaagtagtgaacacacagcttgctttggaacgtcagaaaactgcagagaaagagcgattatttcttgtatatgctaagcagtggtggagagaatatttgcaaattcgaccctcacacaactcacgactggttaagatttttgcacaggatgaaaatgggataaatagaccagtctgttcctatgttaaaccacttcgagctggacggcttcttgatactccaaggcaagcagcaagatttgttaatgtccttggttatgaacgagcccctgttattggaggaggaggtaaacaggagcagtggtgcactctgctggcctttctctgtagaaacaagggtgactgtgaagatcacgctaaccttctgtgcagccttcttcttggatatggattagaagcctttgtttgtgttgggaccaaggcaaaaggagtacctcatgcatgggttatgacttgtggaactgatggggccatcactttttgggagagtttaacaggacacaggtacatccataaacctaccaatcctgatgaacctccagttgctgaacagcccaaaccactgtacccatatcgaacaattggttgtgttttcaaccatcagatgttcctgggaaattgtcaaccctctgatgcagtagaaacctgtgtatttgatttgaacgatgaatccaaatggaaacccatgagtgaggaagcaattaaatctgtgtgtgctcctggagctacaacatcccttcctccctttccacctctgtgtgcatccacaattgacgcgtcagtaacaagtaatgaaattgaaatgcagctgaggctcctggtgtcagaacacaggaaggatcttggcctcactactgtttgggaagaccagctctcctaccttttatcaccagctttggcttcttatgaatttgagcgtacaacaagtatatcagcaggcaatgaagaatttcaagatgccataagaagggctgtacctgatggtcacacatttaaagggttcccaatacattttgtgtatagaaatgcaagacgtgcatttgccacatgtcttcgatctcctttctgtgaagaaataatctgttgccgtggagaccaagtgcgactggcagttcgtgtccgagtatttacttaccctgaatctgcatgtgctgtttggatcatgtttgcttgtaaatatcgctcggtattatagggccaatatttatataagatttatacctgtgtttaattggaattttacacattgtacattacttagctatttagaggtttgttattttaaaatcacaatctggcttgaatggcatacttcaattttgtatatacttgactggtaatgtttaaaaaaaatcatgcattcctttaaaaattaaggctgaaaaacttgtataaatctccctggaatttagtataaattaagtgtatattctattttaataaatgctactttgtttacagttatcagtagtttaaatattaatataaaatgcattcagttttctttacacaaacaggtaatcaaagagatgtttgtctaagggtttgagccctagacaaatcagtatgatcattacttttcacaggttaatggaattattttatacagattaggagaaattaacctcatgacagatttatttattgcattggtgaaaataaatgttaatgaattaccacttttgtggtttattcgtggtccttgggatatttgagactgtccagaaatttatggttggaccttgaagcaagagtaggaaaaaactaataccagaaaagcataaatattaataacctcatatgaaagtacatgaatcatttagaaatatttatcactgtgatttgttgtaaaaatgaattgggtattttagaaaaactttattatacctctttgttatgatactgataaattgtgatcttgcagtcga

SEQ ID NO: 397 - DNA, 2136 bp, Homo sapiens
  source 1..2136: mol_type = genomic DNA
ctggggagggggaggagcctcgaggccggtttggaatttttggcgcgagcagctccgcgcgcgttcacgggccgttccccctcacgggagtcctccgcccgggcgtccggaacagtcgacggcagactccggcccgctgagccacccgaggggtcccgtggcctccgcggacccggaatctgggccctcgcggacccgcgccccgcccagtcgccccagggcttccccacacccacggagtgaagtcagccgcggccctgcctgggaggaacttaccgtctaccgggaaaggtggccagcagatgtgtcgggcctggtgagagggtgaggcgagacggcccgatcgcccagggccccggaagctgcggaggtcacccccgcctggccttagctcagggacaccctggattcacgtgggagcccctgctcctgcctcccccgtcccaccactgaggctgttgggccaggccagtcatgctagaacggcctcctgcactggccatgcccatgcccacggagggcaccccgccacctctgagtggcacccccatcccagtcccagcctacttccgccacgcagaacctggattctccctcaagaggcccagggggctcagccggagcctcccacctccgccccctgccaagggcagcattcccatcagccgcctcttccctcctcggaccccaggctggcaccagctgcagccccggcgggtgtcattccggggcgaggcctcagagactctgcagagccctgggtatgacccaagccggccagagtccttcttccagcagagcttccagaggctcagccgcctgggccatggctcctacggagaggtcttcaaggtgcgctccaaggaggacggccggctctatgcggtaaagcgttccatgtcaccattccggggccccaaggaccgggcccgcaagttggccgaggtgggcagccacgagaaggtggggcagcacccatgctgcgtgcggctggagcaggcctgggaggagggcggcatcctgtacctgcagacggagctgtgcgggcccagcctgcagcaacactgtgaggcctggggtgccagcctgcctgaggcccaggtctggggctacctgcgggacacgctgcttgccctggcccatctgcacagccagggcctggtgcaccttgatgtcaagcctgccaacatcttcctggggccccggggccgctgcaagctgggtgacttcggactgctggtggagctgggtacagcaggagctggtgaggtccaggagggagacccccgctacatggcccccgagctgctgcagggctcctatgggacagcagcggatgtgttcagtctgggcctcaccatcctggaagtggcatgcaacatggagctgccccacggtggggagggctggcagcagctgcgccagggctacctgccccctgagttcactgccggtctgtcttccgagctgcgttctgtccttgtcatgatgctggagccagaccccaagctgcgggccacggccgaggccctgctggcactgcctgtgttgaggcagccgcgggcctggggtgtgctgtggtgcatggcagcggaggccctgagccgagggtgggccctgtggcaggccctgcttgccctgctctgctggctctggcatgggctggctcaccctgccagctggctacagcccctgggcccgccagccaccccgcctggctcaccaccctgcagtttgctcctggacagcagcctctccagcaactgggatgacgacagcctagggccttcactctcccctgaggctgtcctggcccggactgtggggagcacctccaccccccggagcaggtgcacacccagggatgccctggacctaagtgacatcaactcagagcctcctcggggctccttcccctcctttgagcctcggaacctcctcagcctgtttgaggacaccctagacccaacctgagccccagactctgcctctgcacttttaaccttttatcctgtgtctctcccgtcgcccttgaaagctggggcccctcgggaactcccatggtcttctctgcctggccgtgtctaataaaaagtatttgaaccttgggagcacccaagcttgctcatgtggcaa

SEQ ID NO: 398 - DNA, 582 bp, Homo sapiens
  source 1..582: mol_type = genomic DNA
gctgcgccggcgcgtcgaggggagaggcagcagccgcgatggacgtgttcctcatgatccggcgccacaagaccaccatcttcacggacgccaaggagtccagcacggtgttcgaactgaagcgcatcgtcgagggcatcctcaagcggcctcctgacgagcagcggctgtacaaggatgaccaactcttggatgatggcaagacactgggcgagtgtggcttcaccagtcaaacagcacggccacaggccccagccacagtggggctggccttccgggcagatgacacctttgaggccctgtgcatcgagccgttttccagcccgccagagctgcccgatgtgatgaagccccaggactcgggaagcagtgccaatgaacaagccgtgcacctgcatgtccactcccagacgatggccaagagcagaaacacaagctggagccagtgtcctggtttgacagcatgttcaacgagggaaccccaagacggacccacacaggtccacccacgctgggggctgtaatcacggagggaagtggctgcccccttaacacacctttaataaacagtctacagaccca

SEQ ID NO: 399 - DNA, 3327 bp, Homo sapiens
  source 1..3327: mol_type = genomic DNA
ctctcgcgagaggagcaagaggaagatggccgtgccctgtttttcggtgtaaggcagcgacggcggctgcgacggcgagactgagatcctggtgtcgtgggcacctgagttctagcttcccccagcgagcgcgcgtcccttcgtgcctaggcgagagccggctcttccccgggagatgcgtttgtcccaggctcgggggctcagtgggagttcatgctgcgctggaggctcttggccaccgctctaatcgccttgtgccgccgcagcgccagctccgtcgccagcggtgagcctcccgattcccccccttgcccctggcggcggcgatgaccggggagaagatccgctcactgcggagggaccacaagcccagcaaagaagaaggggacctgctggagcccggggatgaggaagcggcggctgccctcggcggtacctttaccagaagcaggattggcaagggcggcaaagcttgtcataagatcttcagtaaccatcaccaccggctacagctgaaggcagctccggcctcctccaatccccccggcgccccggctctgccgctgcacaattcctccgtgactgccaactcccagtccccggcccttctggccggcaccaaccccgttgctgtcgtcgcggatggaggcagttgccccgcacactacccggtgcacgagtgcgtcttcaagggggatgtgaggagactctcctctctcatccgcacgcacaatatcgggcagaaagataatcacggaaatactcctttacaccttgctgtgatgttaggaaataaagttacagctcttttgaggaagcttaagcagcaatccagggaaagtgttgaagaaaaacgacctcgattattaaaagccctgaaagagctaggtgacttttatctagaacttcactgggattttcaaagctgggtgcctttactttcccgaattctgccttccgatgcatgtaaaatatacaaacaaggtatcaatatcaggcttgacacaactctcatagactttactgacatgaagtgccaacgaggggatctaagcttcattttcaatggggatgcggcgccctctgaatcttttgtagtattagacaatgaacaaaaagtttatcagcgaatacatcatgaggaatcagagatggaaacagaagaagaggtggatattttaatgagcagtgatatttactctgcaactttatcaacaaaatcaatttctttcacgcgtgcccagacaggatggctttttcgggaagataaaacagaaagagtaggaaactttttggcagacttttacctggtgaatggacttgttttagaatcaaggaaaagaagagaacatctcagtgaagaggatattcttcgaaataaggccatcatggagagtttgagtaaaggtggaaacataatggaacagaattttgagccgattcgaagacagtctcttacacctcctcctcagaacactattacatgggaagaatatatatctgctgaaaatggaaaagctcctcatctgggtagagaattggtgtgcaaagagagtaagaaaacgtttaaagctacgatagccatgagccaggaatttcccttagggatagagttattattgaatgttttagaagtagtagctcccttcaagcactttaacaagcttagagaatttgttcagatgaagcttcctccaggctttcctgtaaaattagatatacctgtgtttcccacaatcacagccactgtgacttttcaggagtttcgatacgatgaatttgatggctccatctttactatacctgatgactacaaggaagacccaagccgttttcctgatctttaactgacgtggaaaaggatgccgtctaaccaaggaaagaaaatacagagaccctagaagtggatccaaatagaagggacaaatgctttcagtgaagaaaagggaattacacattgaatcgacacatcagtaatacgatacagtgaaatgggcctctaataagaatttcagcgagttttctgatgtgccattttttgtctttttaaaaatatacatattataaatgtaatagtttgacacattaatgaccctaagacctgcgtatgtgaagcagctatgagtgctgtgatttgtttttaaaaatttttacacttcttgttgaaatatatatgcatataaatatatctatatctatatctatatctaaaacactcctggaccattaacgtaaattaaatgtcttaagagatatggagcccttttaaacttgtcatctttatgcaaggtgacatttataaatattccttcgagctttgttttcataaaatgtaaactatgtaacattatgtatagttcagtaatttgaatgtttgttcaatataatgaactagaaggaatgcaattttctgtagatgaatgaaccaaatggtaaccattaaacaattgcatttatatgttgcaatacatttcagaaggagcgttcactctgcagggaataaggtacctcctttagcaccttagtgcaattcattgtggtgctatttgtttttacctgaatgtttgttactaatcttcctttcatagaacctctattttttttttttctaaacttgagtttgagtccttgttatggtcatcataaggtaatggttagcatgtttaaagatattcctcttccaaatctcagcactttaaaaaaaaatccaaatttttaaacttgcttcctaataagtacacatcggtctgattattttgtttgtttttagtagaatatggatgcattggtgtcagttttaaaaaacaatacacatattttggacaaccctacatatttaatcctttcaaaataagataaaaacattttatatgctaacagaatatatttgttacaagttaaagtccagaagtatacacaagattgattactcctattattttttttaaatcacaggaaaatattgatttcattgtctccaaagtgataaaatcatgtattactcatttttgcacttaaaatttttcttatttattccaaggtggtttgaaggtccaagtatgaaaataaattagggggattaatgtataacagttataaagtatcatgttgtattaaagagcttacttagattgatgtttttaaaatgtatcctgatgaatgtctcaagaatgcatctgtcaagttttttagactgaccagtagcttaaacttttttcaggattttaggtaatttgaaaggagtttagagacccttattgaaaatatgatttaaaaatccaaagcataaaccgtaagaaaaattttaaataaacatctttaaagctg

SEQ ID NO: 400 - DNA, 3001 bp, Homo sapiens
  source 1..3001: mol_type = genomic DNA
gagccatgtaaccctgcggcgggctccgggctgctccgtccttccccagctcccgggctagcgcggcagcggggccacgatgaagaagcagttcaatcgcatgcgccagctggccaaccagacggtgggcagggctgaaaagacagaagttttgagtgaagaccttcttcaggtggagaagcgtctggagctggtgaaacaggtgtcccacagcacgcacaagaagctcaccgcatgtctgcagggccagcaaggggcagaggctgacaagcgctccaaaaagttgcctttgacaacactggctcagtgtctgatggaggggtcagctatcctgggagatgacacacttcttgggaagatgctgaaactctgtggagagacggaggacaagctggctcaggagctgatacattttgagttgcaagtagagagagacgtgattgagcccctgtttttgctggcggaggtggaaatcccaaatattcaaaagcagaggaaacacttagccaagttggtgctggacatggattcctcacgaaccaggtggcagcagacttccaagtcttcaggtttgtccagcagcttacagcctgcgggtgccaaggctgatgccctcagggaagaaatggaagaggctgccaacagagtggagatttgcagggaccagctctcagctgatatgtacagttttgtggccaaagaaattgactatgcaaactactttcaaacgctaatagaagtgcaagctgaataccacaggaagtccctgacactattgcaggctgtattgcctcagatcaaagcacaacaggaggcctgggtagagaagccttccttcgggaagccgctggaggagcacctcaccatcagcggccgggagatcgccttccccatcgaggcgtgtgtgaccatgctgcttgagtgtgggatgcaggaggagggactcttccgagtagccccctctgcctccaaactgaagaagctgaaagcggccctggactgctgcgtggtggatgtgcaggagtactcggcagacccccacgcaattgcaggagctttgaaatcttacctccgagagttgccagaacctcttatgacctttgaactctatgatgagtggatccaggcttccaatgtccaggagcaagacaagaagcttcaggctctatggaatgcttgtgaaaagttgcccaaggccaatcacaacaacatccgatacttgataaaatttttatccaagctgtcagaatatcaagatgtaaacaagatgactcccagtaatatggcaattgttttaggacccaacctcctatggccacaagcagaagggaacattacagagatgatgaccacagtgtcgctgcaaattgttgggatcattgaacctatcatccagcatgcagactggttcttccctggggagatagagttcaacattactggcaattatgggagtccagtacacgtgaaccataatgccaactacagctcaatgccctccccagacatggaccctgctgaccggcgccagcccgagcaggcccgccggcccctcagcgtcgccacggataatatgatgctggagttttacaaaaaggatggccttaggaaaatccaaagcatgggtgtgagggtcatggacacaaactgggtggctcgaagaggctcctcggccggtcggaaagtgtcctgcgccccgccctccatgcagcctcccgccccgcccgccgagctggctgcgcccctgccttcgccgctgccggagcagcccctggacagccccgcggcccccgcgctctctccatccggcctgggcctccagcctgggcccgagcgcaccagcacaacaaaaagcaaggaactttctccaggctctgcacagaaaggaagtccaggctccagccagggcacagcctgtgcagggactcaaccaggggctcaacctggagctcagccgggcgccagccccagccccagccagccgcctgcagaccagagtcctcacaccctccggaaagtttcaaagaagctggcaccgattccacccaaggtcccctttggccagccgggggctatggcagaccagtccgctggccagccgtccccagtcagcctgtcccccaccccgcccagcaccccgtcaccctatggactgagctaccctcaggggtactccttggcctcgggccagctctccccagctgcagctcctcccctggcctctccttctgtctttacaagcactttgagcaaatcgcggcccactcctaagccgcgacagagacctactctgccgcctcctcagcctcccacagtaaacctctcggcctctagtccacagtccacggaggcccccatgctagatggcatgtcccctggggaaagcatgtctacagctgtgtgacatgagtggcgcagttttggatacgtgtgagggggattttcaggatcttgtccactttgatattccctcgatccacatagagctcgggtcgacgctccgcctgagtcccctggagcacatgcggcgacactcagtaactgacaagagggactcggaggaggagtctgagagcaccgccctctgacatgacaccgcccatcctgcctcgcgtgtacatacatcacgggccctaggaacgccgccaggagcagcgtccatgagcttgccaagtgttctctgctggctctttcctgccactgccaacacgaggttggaatttggcagaaaattgtgatctccagtccgtgtggtgatgctggtggtgcaggttttgtttgttcctttcgggtggtgacttcggccttttgtttgacctttgccttttgactttgtgcctcttttgatccactttcagcctccatgccagaaaacacccacctctccatccaaggctggtcaggaacgtcctttgcagggtcggggtggtgcgggagaggctcactttgcctggttagacccaagggctgctaccttttccttggacggctcatgtcaggt

SEQ ID NO: 401 - DNA, 4854 bp, Homo sapiens
  source 1..4854: mol_type = genomic DNA
gaagtgagggtgtgagaggcctctctggaagttgtcccgggtgttcgccgctggagcccgggtcgagaggacgaggtgccgctgcctggagaatcctccgctgccgtcggctcccggagcccagccctttcctaacccaacccaacctagcccagtcccagccgccagcgcctgtccctgtcacggaccccagcgttaccatgcatcctgccgtcttcctatccttacccgacctcagatgctcccttctgctcctggtaacttgggtttttactcctgtaacaactgaaataacaagtcttgatacagagaatatagatgaaattttaaacaatgctgatgttgctttagtaaatttttatgctgactggtgtcgtttcagtcagatgttgcatccaatttttgaggaagcttccgatgtcattaaggaagaatttccaaatgaaaatcaagtagtgtttgccagagttgattgtgatcagcactctgacatagcccagagatacaggataagcaaatacccaaccctcaaattgtttcgtaatgggatgatgatgaagagagaatacaggggtcagcgatcagtgaaagcattggcagattacatcaggcaacaaaaaagtgaccccattcaagaaattcgggacttagcagaaatcaccactcttgatcgcagcaaaagaaatatcattggatattttgagcaaaaggactcggacaactatagagtttttgaacgagtagcgaatattttgcatgatgactgtgcctttctttctgcatttggggatgtttcaaaaccggaaagatatagtggcgacaacataatctacaaaccaccagggcattctgctccggatatggtgtacttgggagctatgacaaattttgatgtgacttacaattggattcaagataaatgtgttcctcttgtccgagaaataacatttgaaaatggagaggaattgacagaagaaggactgccttttctcatactctttcacatgaaagaagatacagaaagtttagaaatattccagaatgaagtagctcggcaattaataagtgaaaaaggtacaataaactttttacatgccgattgtgacaaatttagacatcctcttctgcacatacagaaaactccagcagattgtcctgtaatcgctattgacagctttaggcatatgtatgtgtttggagacttcaaagatgtattaattcctggaaaactcaagcaattcgtatttgacttacattctggaaaactgcacagagaattccatcatggacctgacccaactgatacagccccaggagagcaagcccaagatgtagcaagcagtccacctgagagctccttccagaaactagcacccagtgaatataggtatactctattgagggatcgagatgagctttaaaaacttgaaaaacagtttgtaagcctttcaacagcagcatcaacctacgtggtggaaatagtaaacctatattttcataattctatgtgtatttttattttgaataaacagaaagaaattttgggtttttaatttttttctccccgactcaaaatgcattgtcatttaatatagtagcctcttaaaaaaaaaaaacctgctaggatttaaaaataaaaatcagaggcctatctccactttaaatctgtcctgtaaaagttttataaatcaaatgaaaggtgacattgccagaaacttaccattaacttgcactactagggtagggaggacttagggatgtttcctgtgtcgtatgtgcttttctttctttcatatgatcaattctgttggtattttcagtatctcatttctcaaagctaaagagatatacattctggatacttgggaggggaataaattaaagttttcacactgtgtactgtgttttactgattggttggatattgcttatgaaaattccatagtggtatttttttggattcttaatgtgtaacttaaacatactttgaagtggaggagagtcataagacagaacatttggcaggaattgtccttatgaaacaagaaaaagaaaatgaaaagtattattaagcttctgtgtttgtctaaaaatgtggcatatggatggcatttaaaactttgaatgaattatacctaaatctgggacagggaggtgacagtggaacaggctaccaatcagaactagatgacttttaaggctcctcctattatgagacttcaatttccaaagagaagaactagcagagaaattgtatttcagtaattttaagctccttctgtcttgtagagtcttgttatagttgtataaatcaaaaacacagaataaggaacatatttaactttttttcattataaaatggttagaggaccctaccccctctagattccctgatttccccaggcctgcagcatacagtaagatgggtccctgtgccaggcctcaatactgccagggaataaaaccagagggagaggaccctcagtgtcatatcaggaagcccagtgccagaggacagacaggttcaaaactggcttttcctctgggcctgggttggtgctataggccaagggtcattttatacttgggtataaatcaatcccagtttgggaaaagattatttttaagcttaaaaggctgacatgtgccattatatgtagtatgtaatatatgtaacatcttccaattcttttaaaataaaattaatatttataatggatatttaatgattgttatttttaaaaaccagcttataattcctcgttatgcatgatttatccaaagtttccatagttttattcaaaataataaatgttaataaggtgataaggggtatatttaatgtattgtatcaaattgtgaataagaaagtaggatggagctttctagaggttgggccttagttctgttatcctcattgcttttaaccaataagttaaatgaagttagagttatggtcttcaggttagattatggaccagatctgtgagggtcagcatggaaattcacattcaacaaggtagcacacaggaccaagagcagcacatgcaatcaactggaataatatagtaatcctgtaactgggtttgaaaaaataatcaacaaaagatacaattcaagggttaggttgcagagagctggcttgagagtagttattatgaaaaaggcctcaaggagtacgtgttcagtatgctctaagatgataaagtggctgttaaaaagggagttgatttgaggaagtattacttagcattcatgcatattgggcttaggctctagccctgccactatcattgtcttctctggactgtgaagtcactgaggacaaggaaactaaatttaatgtctgtatcactagtgcctagaatttctggacacttagtagtcaccatcaggcgtttatttaatgaatgagaagcaaagtgaccttggttacttttttaccctgaggggctcagcactcattaggacttggtgcctaattttataaaaagtcactaagctcaagtgcttggatgaaaggacagcgtggataaaaaggtttttaaaacatggatgttaaggctgttttgcttggagaagacttgggactgggacagtctttagatattatttgaaatgctggcactgtctatctggatcccagggcttgaactaggatttgaggaagtcacagggaagcagatttcagtctgacatttattcagtgcaagttttttggtgctgtagtatatgatgaaagatgtaaagctgaataaagcattatttctgccctagagttgttcacagcctagtcaggcatatggatatgtaaacaatgactgtaacgtgttatagatgtaaagacaaaataaaggttaaagagggcataaaggagcactcaattgcagagatttgaggacattatttttattttgagctttaaaaagatgaataggtgttctcaggaggtagggatctggctgagagggaataatctgagcaaaggtatgaaacagcctaatgcattagagaaaaaagttcttttagtaaggcatttggggttggggaagctagaaaaagaaatgggagctggtcacacagggccttgtgtgccagactaaggggtttgtagtatatattgtaggcagaagagatccatcaacagattgcaagcaaggaagtatgttcactttaaagtttgagaaagaatagtgtggaagcacgtctcaaatttagacttgttccccctctgaaccgtgaatcagaccatttcaggtagaagtcttccccggtttatctgatctactcggggcctcaggcttctcagctgggaagagaggatgcaagaccagactgaagaacacggttgagtccccagaaccaaaagggggcctttctgcttcttagccagctacctcttcgagtttttcaaattgtgagggggaccataaaaggatggaaacttttagatgacattctacaaattatttttttctttaaattaaaagaacctagccaataagatagagaatgggcatctaaggcatctcagagctctctgatgaagccaggttgtcaaagatcatttgcaaaagaagggaaaactggcatgacaaaagctacagagaggagagtgaaatatagaagtgtttgaaatgttcaagctcacaataagcttaaatttatagaaaatgctaaggttgtcaagaaggcttttttttttttcttttttaaacctgagggcaaaaaggaatggataaagtagtgtaatggattgacaatcaggaagaacagaataactcagttttttttctcctacaaggagatatggctggaccaaaataaaatgacatgaaactgcaaaaatgaaaa

SEQ ID NO: 402 - DNA, 6822 bp, Homo sapiens
  source 1..6822: mol_type = genomic DNA
gcagcagccgccagttccatgcactggcggagcagctctaggcggcggcttctactttcagtttcgtgcagagcgcggaggagccgcgagcgctgagggagtctgcactatggaaacaacctgtcaatccagctcaaggcacacatagcccagacacccatgagaccctctccgtggggaccctagagcacctatcatgaacgaggagaccaaggctggctcctcatggaccccgttggcctccagctcggcaacaagaacctgtggagctgtcttgtgaggctgctcaccaaagacccagaatggctgaacgccaagatgaagttcttcctccccaacacggacctggattccaggaacgagaccttggaccctgaacagagagtcatcctgcaactcaacaagctgcatgtccagggttcggacacctggcagtctttcattcattgtgtgtgcatgcagctggaggtgcctctggacctggaggtgctgctgctgagtacttttggctatgatgatgggttcaccagccagctgggagctgaggggaaaagccaacctgaatctcagctccaccatggcctgaagcgcccacatcagagctgtgggtcctcaccccgccggaagcagtgcaagaagcagcagctagagttggccaagaagtacctgcagctcctgcggacctctgcccagcagcgctacaggagccaaatccctgggtcagggcagccccacgccttccaccaggtctatgtccctccaatcctgcgccgggccacagcatccttagacactccggagggggccattatgggggacgtcaaggtggaagatggtgctgacgtgagcatctcggacctcttcaacaccagggttaacaagggcccgagggtgaccgtgcttttggggaaggctggcatgggcaagaccacgctggcccaccggctctgccagaagtgggcagagggccatctgaactgtttccaggccctgttcctttttgaattccgccagctcaacttgatcacgaggttcctgacaccgtccgagctcctttttgatctgtacctgagccctgaatcggaccacgacactgtcttccagtacctggagaagaacgctgaccaagtcctgctgatctttgatgggctagatgaggccctccagcctatgggtcctgatggcccaggcccagtcctcacccttttctcccatctctgcaatgggaccctcctgcctggctgccgggtgatggctacctcccgtccagggaagctgcctgcctgcctgcctgcagaggcagccatggtccacatgttgggctttgatgggccacgggtggaagaatatgtgaatcacttcttcagcgcccagccatcgcgggagggggccctggtggagttacagacaaatggacgtctccgaagcctgtgtgcggtgcccgcactgtgccaagtcgcctgtctctgcctccaccatctgcttcctgaccacgccccaggccagtctgtggccctcctgcccaacatgactcagctctatatgcagatggtgctcgccctcagcccccctgggcacttgcccacctcgtccctactggacctgggggaggtggccctgaggggcctggagacagggaaggttatcttctatgcaaaagatattgctccacccttgatagcttttggggccactcacagcctgctgacttccttctgcgtctgcacaggccctgggcaccagcagacaggctatgctttcacccacctcagcctgcaggagtttcttgctgccctgcacctgatggccagccccaaggtgaacaaagacacacttacccagtatgttaccctccattcccgctgggtacagcggaccaaagctagactgggcctctcagaccacctccccaccttcctggcgggcctggcatcctgcacctgccgccccttccttagccacctggcgcagggcaatgaggactgtgtgggtgccaagcaggctgctgtagtgcaggtgttgaagaagttggccacccgcaagctcacagggccaaaggttgtagagctgtgtcactgtgtggatgagacacaggagcctgagctggccagtctcaccgcacaaagcctcccctatcaactgcccttccacaatttcccactgacctgcaccgacctggccaccctgaccaacatcctagagcacagggaggcccccatccacctggattttgatggctgtcccctggagccccactgccctgaggctctggtaggctgtgggcagatagagaatctcagctttaagagcaggaagtgtggggatgcctttgcagaagccctctccaggagcttgccgacaatggggaggctgcagatgctggggttagcaggaagtaaaatcactgcccgaggcatcagccacctggtgaaagctttgcctctctgtccacagctgaaagaagtcagttttcgggacaaccagctcagtgaccaggtggtgctgaacattgtggaggttctccctcacctaccacggctccggaagcttgacctgagcagcaacagcatctgcgtgtcaaccctactctgcttggcaagggtggcagtcacgtgtcctaccgtcaggatgcttcaggccagggaggcggacctcatcttccttctttccccgcccacagagacaactgcagagctacaaagagctccagacctgcaggaaagtgacggccagaggaaaggggctcagagcagaagcttgacgctcaggctgcagaagtgtcagctccaggtccacgatgcggaggccctcatagccctgctccaggaaggccctcacctggaggaagtggacctctcagggaaccagctggaagatgaaggctgtcggctgatggcagaggctgcatcccagctgcacatcgccaggaagctggacctcagtaacaacgggctttctgtggccggggtgcattgtgtgctgagggccgtgagtgcgtgctggaccctggcagagctgcacatcagcctgcagcacaaaactgtgatcttcatgtttgcccaggagccagaggagcagaaggggccccaggagagggctgcatttcttgacagcctcatgctccagatgccctctgagctgcctctgagctcccgaaggatgaggctgacacattgtggcctccaagaaaagcacctagagcagctctgcaaggctctgggaggaagctgccacctcggtcacctccacctcgacttctcaggcaatgctctgggggatgaaggtgcagcccggctggctcagctgctcccagggctgggagctctgcagtccttgaacctcagtgagaacggtttgtccctggatgccgtgttgggtttggttcggtgcttctccactctgcagtggctcttccgcttggacatcagctttgaaagccaacacatcctcctgagaggggacaagacaagcagggatatgtgggccactggatctttgccagacttcccagctgcagccaagttcttagggttccgtcagcgctgcatccccaggagcctctgcctcagtgagtgtcctctggagcccccaagcctcacccgcctctgtgccactctgaaggactgcccgggacccctggaactgcaattgtcctgtgagttcctgagtgaccagagcctggagactctactggactgcttacctcaactccctcagctgagcctgctgcagctgagccagacgggactgtccccgaaaagccccttcctgctggccaacaccttaagcctgtgtccacgggttaaaaaggtggatctcaggtccctgcaccatgcaactttgcacttcagatccaacgaggaggaggaaggcgtgtgctgtggcaggttcacaggctgcagcctcagccaggagcacgtagagtcactctgctggttgctgagcaagtgtaaagacctcagccaggtggatctctcagcaaacctgctgggcgacagcggactcagatgccttctggaatgtctgccgcaggtgcccatctccggtttgcttgatctgagtcacaacagcatttctcaggaaagtgccctgtacctgctggagacactgccctcctgcccacgtgtccgggaggcctcagtgaacctgggctctgagcagagcttccggattcacttctccagagaggaccaggctgggaagacactcaggctaagtgagtgcagcttccggccagagcacgtgtccaggctggccaccggcttgagcaagtccctgcagctgacggagctcacgctgacccagtgctgcctgggccagaagcagctggccatcctcctgagcttggtggggcgacccgcagggctgttcagcctcagggtgcaggagccgtgggcggacagagccagggttctctccctgttagaagtctgcgcccaggcctcaggcagtgtcactgaaatcagcatctccgagacccagcagcagctctgtgtccagctggaatttcctcgccaggaagagaatccagaagctgtggcactcaggttggctcactgtgaccttggagcccaccacagccttcttgtcgggcagctgatggagacatgtgccaggctgcagcagctcagcttgtctcaggttaacctctgtgaggacgatgatgccagttccctgctgctgcagagcctcctgctgtccctctctgagctgaagacatttcggctgacctccagctgtgtgagcaccgagggcctcgcccacctggcatctggtctgggccactgccaccacttggaggagctggacttgtctaacaatcaatttgatgaggagggcaccaaggcgctgatgagggcccttgaggggaaatggatgctaaagaggctggacctcagtcaccttctgctgaacagctccaccttggccttgcttactcacagactaagccagatgacctgcctgcagagcctcagactgaacaggaacagtatcggtgatgtcggttgctgccacctttctgaggctctcagggctgccaccagcctagaggagctggacttgagccacaaccagattggagacgctggtgtccagcacttagctaccatcctgcctgggctgccagagctcaggaagatagacctctcagggaatagcatcagctcagccgggggagtgcagttggcagagtctctcgttctttgcaggcgcctggaggagttgatgcttggctgcaatgccctgggggatcccacagccctggggctggctcaggagctgccccagcacctgagggtcctacacctaccattcagccatctgggcccaggtggggccctgagcctggcccaggccctggatggatccccccatttggaagagatcagcttggcggaaaacaacctggctggaggggtcctgcgtttctgtatggagctcccgctgctcagacagatagacctggtttcctgtaagattgacaaccagactgccaagctcctcacctccagcttcacgagctgccctgccctggaagtaatcttgctgtcctggaatctcctcggggatgaggcagctgccgagctggcccaggtgctgccgcagatgggccggctgaagagagtggacctggagaagaatcagatcacagctttgggggcctggctcctggctgaaggactggcccaggggtctagcatccaagtcatccgcctctggaataaccccattccctgcgacatggcccagcacctgaagagccaggagcccaggctggactttgccttctttgacaaccagccccaggccccttggggtacttgatggccccctcaagacctttggaatccagccaagtgatgcacccaaatgatccacctttcgcccactgggataattgactcaggaaagaagagcctcggcagggcgctctgcactccacccaggaggaaggatacgtgtgtcctgctgcagtcctcagggagaacttttttgggaaccaggagctgggtctggacaaaggagtaccctgcattacgtgggatatgtgtgatcaattggggacatgcgacacacaatgagggtgtcatgacaatgcatgacacgtacggttatatgtggcagtgtgaccccttgacatgtggcgttacatgaaagtcagtgtggcacgtgttctgtggcatgggtgctggcatcccaagtagcaggatacatgattgttggtctatatatgacacatgacaaatgtccatgtcacaggactcatggctggccagatgacctcaggctggcccaagatctaatttattaatttttaaagcaaatacatatttatagattgtgtgtatggagcagctaagtcaggaaaagtcttccgcccgagctgggaggggagagtgtccatgcactgaccagtccaggggctcaagggccagggctctggaacaagccagggactcagccattaagtcccctcctgcctcaatcctcagcctacccatctataaacttgatgactcctcccttacttacatactagcttccaaggacaggtggaggtagggccagcctggcgggagtggagaagcccagtctgtcctatgtaagggacaaagccaggtctaatggtactgggtagggggcactgccaagacaataagctaggctactgggtccagctactactttggtgggattcaggtgagtctccatgcacttcacatgttacccagtgttcttgttacttccaaggagaaccaagaatggctctgtcacactcgaagccaggcttgatcaataaacacaatggtattccacgtc

SEQ ID NO: 403 - DNA, 1260 bp, Homo sapiens
  source 1..1260: mol_type = genomic DNA
agctctctgctcgccgccgccgctgtcgccgccacctcctctgatctacgaaagtcatgttacccaacaccggttgaagcagttggaggaaaggccttgccatgtattgttgatgtgagagatgaacagcagatcagtgctgcagtggagaaagccatcaagaaatttggaggaattgatattctggtaaataatgccagtgccattagtttgaccaatacattggacacacctaccaagagattggatctgatgatgaacgtgaacaccagaggcacctaccttgcatctaaagcatgtattccttatttgaaaaagagcaaagttgctcatatcctcaatatcagtccaccactgaacctaaatccagtttggttcaaacagcactgtgcttataccattgctaagtatggtatgtctatgtatgtgcttggaatggcagaagaatttaaaggtgaaattgcagtcaatgcattatggcctaaaacagccatacacactgctgctatggatatgctgggaggacctggtatcgaaagccagtgtagaaaagttgatatcattgcagatgcagcatattccattttccaaaagccaaaaagttttactggcaactttgtcattgatgaaaatatcttaaaagaagaaggaatagaaaattttgacgtttatgcaattaaaccaggtcatcctttgcaaccagatttcttcttagatgaatacccagaagcagttagcaagaaagtggaatcaactggtgctgttccagaattcaaagaagagaaactgcagctgcaaccaaaaccacgttctggagctgtggaagaaacatttagaattgttaaggactctctcagtgatgatgttgttaaagccactcaagcaatctatctgtttgaactctccggtgaagatggtggcacgtggtttcttgatctgaaaagcaagggtgggaatgtcggatatggagagccttctgatcaggcagatgtggtgatgagtatgactactgatgactttgtaaaaatgttttcagggaaactaaaaccaacaatggcattcatgtcagggaaattgaagattaaaggtaacatggccctagcaatcaaattggagaagctaatgaatcagatgaatgccagactgtgaaggaaaatataaaaaaaaagtcgactgctatgctcaaaaagtaaaaaaagctcaacagttaaaatctaatgtttgttttctttcctgttatattataaggatatgcacgtt

SEQ ID NO: 404 - DNA, 4935 bp, Homo sapiens
  source 1..4935: mol_type = genomic DNA
cttttctctcgaagggcacccgaagattgtcacgagtccttagactccaactactgcggcagcttccaaatttcctgaaaaccctaagctgggccagcccggcagcccacgcacttccggcctcggacccgccccaaacacccaagcgccccagcgcctcatctctaggtccggaaataaacgaacatctccgattatggttataccagggtcgagggtttccgaatatattcgattcaaagcttcggcaagacgaagaaaaccgagcctgaaagcagggcgagaaaaggggcgctgcagggcggatggaaagaattgattggtaacgatgtggagacggaaacatccgaggacatccggaggaacccggggagttctgagtggtaatcgaggggtagagtatggcagtgggcggggtcatctcggtacgttcgaagggcgttggcggaaattaccgaagatgcccgaagccgtcgggacggacccgagtacctcacgcaagatggcggagctggaggaggtgactctggacgggaagcctcttcaggcgctgcgggtgaccgacctgaaggccgcactggagcagcgaggcctagccaagagcgggcagaagagtgccctggtcaagcggctcaaaggggctctaatgctagaaaatttacagaaacactcaacaccccatgctgcattccagccaaattcccagattggtgaggaaatgagccagaacagtttcataaaacagtatctggaaaagcagcaggagctacttaggcagcgtctggaacgtgaagctcgagaagctgcagaacttgaagaagcttcagctgagtcggaggacgagatgatccatcctgagggagtggcttccctgctgcctcctgactttcagagcagcctggagagaccagagctggagctcagcagacattcgcccagaaaaagctcctcaatttctgaagagaaaggtgactctgatgatgagaaaccaaggaaaggagaaagacgatcatctagggtcagacaggcaagagcagctaaactgtctgagggcagccaacctgctgaggaggaagaggatcaagaaacaccttccagaaacctaagggtcagagcagatcgaaatttgaaaacagaggaggaagaagaggaggaggaggaggaggaagaagatgatgaagaagaggaaggtgatgatgagggacaaaaatctagggaggcaccaatcctgaaagagtttaaggaagaaggggaagagatacctagagtaaaaccagaggagatgatggatgagagacccaaaacaagatcccaggaacaggaggtgttagagagaggagggagatttacaagatcccaggaagaggctagaaaaagtcatctggccagacagcagcaggagaaggaaatgaaaacaacatctccccttgaggaggaagaaagagaaataaaatcttcacaaggcttaaaggaaaaatcgaagtctccttcccctcctcgactgactgaagatcgaaagaaggcctcacttgtagcgctgccagagcaaactgccagcgaggaggagactcctccacctttactaacaaaggaagcatcttctccaccacctcatccacagctccatagcgaagaagaaatagagcccatggaaggcccagcccccgctgtcctcattcagttatctcctcctaatacagatgctgacaccagggagctattagtatctcagcatactgtccagttggtaggaggcctgtctcctttgtcaagtccttcagacaccaaagcagaatctccagcagagaaagtgccagaggagagtgtcctgcctctggttcagaaaagcacactggctgactactcagcccagaaggatcttgaacctgagtcagacagatctgctcagcccctccctctaaaaattgaggaattagcactggccaaaggaatcactgaagaatgtctgaaacagccatctttggaacagaaggaaggcagaagagcttctcatacccttctcccaagccacagattgaaacagtcagctgattcatcctctagccggtcctcctcatcttcctcctccagttctagatcaagatctcgctctcctgacagttcaggttctcggtctcattcaccgctcagatccaagcagagagatgtagcccaggcacgtactcatgccaaccctcgtggtagacccaagatgggctccagatcaacatcagagtccagatcaaggtcacgttcacgttctcgttcagcatcaagcaacagcagaaaatctctgagccctggagtctccagggacagcagcaccagctatactgaaaccaaagatccctcttctggtcaggaggttgcaactccaccagtgccacaactgcaggtctgtgagccaaaggagaggacttccacctcctcatcctctgtccaagcaaggcgtctgagtcagcctgaatcagctgaaaagcatgtgacccagaggttacagcctgagcgggggagcccaaagaagtgtgaagctgaagaggcagagccaccagctgccacacagccccaaacctcagagactcagacctctcatctgccagaatcagaaagaattcatcacactgttgaggagaaggaggaagtgaccatggacacaagtgaaaacagacctgaaaatgatgttccagaacctcccatgcctattgcagaccaagtcagcaatgatgaccgcccggagggcagtgttgaagatgaggagaagaaagagagctcgctgcccaaatcattcaagaggaagatctccgttgtctcagctaccaagggggtgccagctggaaacagtgacacagaggggggccagcctggtcggaaacgacgctggggagccagcacagccaccacacagaagaaaccttccatcagtatcaccactgaatcactaaagagcctcatccccgacatcaaacccctggcggggcaggaggctgttgtggatcttcatgctgatgactctcgcatctctgaggatgagacagagcgtaatggcgatgatgggacccatgacaaggggctgaaaatatgccggacagtcactcaggtagtacctgcagagggccaggagaatgggcagagggaagaagaggaagaagagaaggaacctgaagcagaacctcctgtacctccccaggtgtcagtagaggtggccttgcccccacctgcagagcatgaagtaaagaaagtgactttaggagataccttaactcgacgttccattagccagcagaagtccggagtttccattaccattgatgacccagtccgaactgcccaggtgccctccccaccccggggcaagattagcaacattgtccatatctccaatttggtccgtcctttcactttaggccagctaaaggagttgttggggcgcacaggaaccttggtggaagaggccttctggattgacaagatcaaatctcattgctttgtaacgtactcaacagtagaggaagctgttgccacccgcacagctctgcacggggtcaaatggccccagtccaatcccaaattcctttgtgctgactatgccgagcaagatgagctggattatcaccgaggcctcttggtggaccgtccctctgaaactaagacagaggagcagggaataccacggcccctgcaccccccacccccacccccggtccagccaccacagcacccccgggcagagcagcgggagcaggaacgggcagtgcgggaacagtgggcagaacgggaacgggaaatggagcggcgggagcggactcgatcagagcgtgaatgggatcgggacaaagttcgagaagggccccgttcccgatcaaggtcccgtgaccgccgccgcaaggaacgtgcgaagtctaaagaaaagaagagtgagaagaaagagaaagcccaggaggaaccacctgccaagctgctggatgaccttttccgaaagaccaaggcagctccctgcatctattggctcccactgactgacagccagatcgttcagaaagaggcagagcgggccgaacgggccaaggagcgggagaagcggcgaaaggagcaagaagaagaagagcaaaaggagcgggagaaggaagccgagcgggaacggaaccgacagctggagcgagagaaacgtcgggagcacagtcgggagagggacagggagagagagagagaaagggagcgggacaggggggaccgagatcgggatagggaaagggaccgagaacgaggcagggaaagggatcgcagggacaccaagcgccacagcagaagccggagtcggagcacacctgtgcgggaccggggtgggcgccgctagctgggaaaacactagagctgcaggtaccagccactcggccccagggggttatggccacagagggataggcacagtctccaccaccctggagccaagggtctttcacatcacctatccctacatacataccaaatggaaaagtggccatccttttccccccaaacacacccccttaacctatctcttgggacttagcccgaccctccctctcatttcccattaagtctgagaggcaagagctaggttaggcaaggaggtggttggccagagatggggaacagccaggtgccccagtcctctgatttttcctccatcctgcttaccacctccctgggtacttacagccttctcttgggaacagccggggccaggactgggtcacctatgagctgaatcagcatctcctcctgagtcccagggcccctgcagttcccagtctcttctgtcctgcagcccttgcctctttcccacaggttccactttatatccaccttttccttttgttcaatttttatttttattttttttattattaaatgatgtggtctatggaaaaaaaaataaaaatctgacttagtttt

SEQ ID NO: 405 - DNA, 1233 bp, Homo sapiens
  source 1..1233: mol_type = genomic DNA
actctcgcgagatccctactggctataaaggcagcgccccggagagctcttgcgcgtcttgttcttgcctggtgtcggtggttagtttctgcgacttgtgttgggactggtgagtgtgggcagtgcggcccctgcggagtgaggcgcggcgcgcccttcttgcctgttgcctcttcctcctcctgtccggggcccgcccgcgctcgggtgggggtgctgtgatgcgtgaggcagccgggggaggcccggagtccgagactgcttgagcgctgcgcacacccctctcgtgggccccccacgtaggtgcgggaacctggttgaaccccaagctgataggaagatgtcttcaggaaatgctaaaattgggcaccctgcccccaacttcaaagccacagctgttatgccagatggtcagtttaaagatatcagcctgtctgactacaaaggaaaatatgttgtgttcttcttttaccctcttgacttcacctttgtgtgccccacggagatcattgctttcagtgatagggcagaagaatttaagaaactcaactgccaagtgattggtgcttctgtggattctcacttctgtcatctagcatgggtcaatacacctaagaaacaaggaggactgggacccatgaacattcctttggtatcagacccgaagcgcaccattgctcaggattatggggtcttaaaggctgatgaaggcatctcgttcaggggcctttttatcattgatgataagggtattcttcggcagatcactgtaaatgacctccctgttggccgctctgtggatgagactttgagactagttcaggccttccagttcactgacaaacatggggaagtgtgcccagctggctggaaacctggcagtgataccatcaagcctgatgtccaaaagagcaaagaatatttctccaagcagaagtgagcgctgggctgttttagtgccaggctgcggtgggcagccatgagaacaaaacctcttctgtattttttttttccattagtaaaacacaagacttcagattcagccgaattgtggtgtcttacaaggcaggcctttcctacagggggtggagagaccagcctttcttcctttggtaggaatggcctgagttggcgttgtgggcaggctactggtttgtatgatgtattagtagagcaacccattaatcttttgtagtttgtattaaacttgaactgagaccttgatgagtcttt

SEQ ID NO: 406 - DNA, 1538 bp, Homo sapiens
  source 1..1538: mol_type = genomic DNA
ctgccagagaggaagagaaaagaaaggaagaaacattagaaagaaaaaggaaggaaaacggtataaagagagatcaattacccacccttaaatagctagattggggggggaggggggtggaaaagaaagctgtggaggtgtgccccagcacggctgctttgaaaggtttatcatctatccgtttggtttatggagaaaaagaaaatggtaactcagggtaaccaggagccgacaacaactcctgacgcaatggttcagccttttactaccatcccatttccaccacctccgcagaatggaattcccacagagtatggggtgccacacactcaagactatgccggccagaccggtgagcataacctgacactctacggaagtacgcaagcccacggggagcagagcagcaactcacccagcacacaaaatggatctcttacgacagaaggtggagcacagacagacggccagcagtcacagacacaaagtagtgaaaattcagagagtaaatctaccccgaaacggctgcatgtctctaatattcctttccgcttccgggaccctgacctccggcagatgtttgggggattcgggttcgtaactttcgagaatagtgctgatgcagacagggccagggagaaattacacggcaccgtggtagagggccgtaaaatcgaggtgaataatgctacagcacgtgtaatgaccaataagaagatggtcacaccatatgcaaatggttggaaattaagcccagtagttggagctgtatatggtccggagttatatgcagcatccagctttcaagcagatgtgtccctaggcaatgatgcagcagtgcccctatcaggaagagggggtatcaacacttacattcctttaatcattcctggcttcccttaccctactgcagccaccacggcagccgctttcagaggagcccatttgaggggcagagggcggacagtatatggtgcagtccgagcggtacctccaacagccatccccgcctatccaggtgtggtttaccaggacggattttacggtgctgacctctatggtggatatgcagcctacagatatgcacagcctgctactgcaaccgcagccaccgctgctgcagccgctgcagccgcttacagtgacggttatggcagggtgtacacagccgacccctaccatgcccttgcccctgccgctagctatggagttggcgctgtggcgagtttataccgaggtggctacagccgatttgccccctactgaagtgacgtgagacccctgcaaatgggacagccccccagttcatgaggcctggctattgcaatatttactagtagaggaactctatagcaagatgaagaggaaaaacaaacaaacaaacaaaaaaaaacacaaaaaaagaaagaatacttttttatacctcactatgttctttgaatatgtatttttcctttaaatttctgcctttaattcttttgttccaaagattgtgcatttttttctttttttttttaaactgtggtaaaaaaaaaaaa

SEQ ID NO: 407 - DNA, 1771 bp, Homo sapiens
  source 1..1771: mol_type = genomic DNA
gaggcagccatgtcttatcccgctgatgattatgagtctgaggcggcttatgacccctacgcttatcccagcgactatgatatgcacacaggagatccaaagcaggaccttgcttatgaacgtcagtatgaacagcaaacctatcaggtgatccctgaggtgatcaaaaacttcatccagtatttccacaaaactgtctcagatttgattgaccagaaagtgtatgagctacaggccagtcgtgtctccagtgatgtcattgaccagaaggtgtatgagatccaggacatctatgagaacagctggaccaagctgactgaaagattcttcaagaatacaccttggcccgaggctgaagccattgctccacaggttggcaatgatgctgtcttcctgattttatacaaaatactacaggcacatggtcctgctccccttgaactacccaaccagtggctctgggatattatcgatgagttcatctaccagtttcagtcattcagtcagtaccgctgtaagactgccaagaagtcagaggaggagattgactttcttcgttccaatcccaaaatctggaatgttcatagtgtcctcaatgtccttcattccctggtagacaaatccaacatcaaccgacagttggaggtatacacaagcggaggtgaccctgagagtgtggctggggagtatgggcggcactccctctacaaaatgcttggttacttcagcctggtcgggcttctccgcctgcactccctgttaggagattactaccaggccatcaaggtgctggagaacatcgaactgaacaagaagagtatgtattcccgtgtgccagagtgccaggtcaccacatactattatgttgggtttgcatatttgatgatgcgtcgttaccaggatgccatccgggtcttcgccaacatcctcctctacatccagaggaccaagagcatgttccagaggaccacgtacaagtatgagatgattaacaagcagaatgagcagatgcatgcgctgctggccattgccctcacgatgtaccccatgcgtattgatgagagcattcacctccagctgcgggagaaatatggggacaagatgttgcgcatgcagaaaggtgacccacaagtctatgaagaacttttcagttactcctgccccaagttcctgtcgcctgtagtgcccaactatgataatgtgcaccccaactaccacaaagagcccttcctgcagcagctgaaggtgttttctgatgaagtacagcagcaggcccagctttcaaccatccgcagcttcctgaagctctacaccaccatgcctgtggccaagctggctggcttcctggacctcacagagcaggagttccggatccagcttcttgtcttcaaacacaagatgaagaacctcgtgtggaccagcggtatctcagccctggatggtgaatttcagtcagcctcagaggttgacttctacattgataaggacatgatccacatcgcggacaccaaggtcgccaggcgttatggggatttcttcatccgtcagatccacaaatttgaggagcttaatcgaaccctgaagaagatgggacagagaccttgatgatattcacacacattcaggaacctgttttgatgtattataggcaggaagtgtttttgctaccgtgaaacctttacctagatcagccatcagcctgtcaactcagttaacaagttaaggaccgaagtgtttcaagtggatctcagtaaaggatctttggagccag

SEQ ID NO: 408 - DNA, 6293 bp, Homo sapiens
  source 1..6293: mol_type = genomic DNA
tggggttttgatgtgttgcccaggctggtcttgaactcctgagcttaagtgatgtgtccgcctgggcctcccaaagtgctggaattacagacatgagtggcaataaaaggggtagcagagcttcctgccctcaccgtggtgccgagtgcctgctgccttgggccgccttgaacctccagggtttccagctcctcctccttcaccccagtgccactgccatgatggatgtgagtgaacttggggagtctgcccgctacctccgccagggctaccaggagatgacgaaggtgcacactatcccatgggacgggaagaagcgagtctgggtgcctgatgaacaggacgcctacgtggaggccgaggtcaagtcggaggctaccgggggcagagtcaccgtggagaccaaagaccagaaggtgctgatggtgcgtgaagccgagctgcagcccatgaacccgcctcgcttcgacttactggaggacatggccatgatgacgcacctgaacgaggcctctgtgctgcacaacctgcgccagcgctatgcccgctggatgatctatacctactcaggcctcttctgtgtcaccatcaacccctacaaatggctcccagtctatacggcctccgtagtggctgcttacaagggaaagcgccgctcagattccccgccccatatatatgcggtggcggacaacgcctacaacgacatgctgcgcaaccgagacaaccagtccatgctgatcaccggagagtcgggggccggtaagacggttaacaccaagcgggtcattcagtactttgccatcgtcgctgccctgggagacgggccgggcaagaaggcccaatttctggcaacaaagacggggggcacccttgaggatcaaatcatcgaggccaaccctgccatggaggcctttggcaacgccaagaccctgaggaatgataactcctcccgctttggcaagttcatccgcattcactttggtccctctgggaagctggcatccgcggatattgacagctatctcctggagaagtcgcgggtgatcttccagttgcctggtgagcgcagctaccatgtctactaccagatcctctcagggaggaagccagagctgcaggacatgctgcttctgtctatgaacccctatgactaccacttctgcagccagggcgtcatcaccgtggacaacatgaatgatggggaggagctcatcgccaccgaccatgccatggacatcctaggcttcagcgtggatgagaaatgtgcctgctataagatcgtgggcgccctcctgcactttggcaacatgaagttcaagcagaagcagcgggaggagcaggcggaggccgatggcactgagagtgctgacaaggctgcctacctgatgggggtcagcagtggggacctcctcaaaggccttttgcacccccgggtgcgtgtagggaacgagtacgtgaccaagggccagagtgtggagcaggtggtgtttgctgtgggggctctggccaaggccacctatgaccggctgttcaggtggctggtgtctcggatcaaccagaccctggacacaaagctgccccggcagttcttcatcggggttctggacatcgctgggtttgagatctttgagttcaacagcttcgaacagctgtgcatcaacttcaccaatgagaaattgcagcagttcttcaaccagcacatgtttgtgctggagcaggaggagtacaagcgggagggcatcgactgggtcttcatcgacttcggccttgacctgcagccttgcatcgacctcatcgagaagccactgggcatcctgtccatcctggaggaggaatgcatgttccccaaggcctcagacgccagcttccgggccaagctctacgacaaccacgcggggaagtcacccaatttccagcagcctcggcctgacaagaagcgcaagtaccaggcccacttcgaggtggtccactacgcaggcgtggtgccttacagcattgtgggctggctggagaaaaacaaggatcccctgaatgagaccgtggtccccatcttccagaagtcacagaataggctcctggcgactctctatgagaattatgcgggctcctgctccactgagccccccaagtctggggtgaaagagaagcgtaagaaggcagcatcgttccagacggtgtcccagctgcacaaggagaacctcaacaagctgatgaccaacctgcgggccacacagccccacttcgtccgctgcattgtccccaacgagaacaaaaccccaggggtcatggatgccttcttggtgctacaccagctgcgctgcaatggggtcctggaggggatccggatctgccgccaagggttccccaacaggttgctctacaccgacttccggcagcggtaccgtatcctgaaccccagtgccatcccggatgacaccttcatggacagcaggaaggccacagagaaactgctgggctcgctggacttggatcacacccagtaccagtttggccacaccaaggtgttcttcaaggctgggcttctaggcgtcctggaagagctccgtgaccagcgcctggccaaggtgctgacgctgctgcaggcgcggagccgtggccgcctcatgcgccttgagtaccagcgcctgctgggaggcagggatgcgctgttcaccatccagtggaacatccgtgccttcaatgccgtcaagaactggtcatggatgaagctctttttcaagatgaagccgctgctgcgctcggcgcaggctgaggaggagctggcggccctgcgggcagagctgcgggggttgcgaggggcgctggctgcggccgaggccaagcgccaggaactggaggagacgcacgtcagcatcacccaggagaagaatgacctggccctgcagctgcaggctgagcaggacaacctggcagatgccgaggagcgctgccacttgctgatcaagtccaaggtgcagctggaggggaaggtgaaggagctgagtgagcggctggaggatgaggaggaggtgaacgctgacctggccgcccgccggcgcaagctggaggacgagtgcacggagctcaagaaggacattgatgacctgaagctgacactggccaaagctgagaaggagaagcaagccactgagaacaaggtgaagaacctgacggaagagatggctgcgctggacgagtcagtggcccggctgaccaaggagaagaaggcgttgcaggaggcccaccaacaggccctgggtgacctgcaggccgaggaggaccgtgtgagcgcgctgaccaaggccaagctccggctggagcaacaggtggaggacctggaatgctccctggagcaggagaagaagctgcgcatggacacggagcgggccaagcgcaagctggagggtgacctgaagctgacgcaggagtcggtggctgatgctgctcaagacaagcagcagctggaggagaagctcaagaagaaggactccgagctgagccagctgagcctgcgggtggaagacgagcagctcttgggggcccagatgcagaagaagatcaaggagctgcaggctcgggcggaggagctggaagaggagctggaggcagagcgggcagcccgggcccgcgtggagaagcagcgtgcagaggcggcgcgggagctggaggagctgagcgagcggctggaggaggcaggcggcgcatccgcggggcagcgcgagggctgccgcaagcgggaggcggagctggggaggctgcggcgggagctggaggaggcggcgctgcggcacgaggccacagtggcggcactgcggcgcaagcaggcggagggcgcggcggagctgggggagcaggtggacagcctgcagcgggtgcggcagaagctggagaaggagaagagtgagctgcgcatggaggtggacgacctggctgccaacgtggagactctgacccgcgccaaggccagtgcagagaagctgtgccggacctatgaggatcagctaagcgaggccaagatcaaggtggaggagctgcagcggcagctggcggacgcaagcacgcagcgtgggcgactacagacggaaagcggggagctgagtcgcctgctagaggagaaggagtgtctgatcagtcagctgagccgtggaaaggccctggccgcccaaagcctggaagagttgcggcgccagctagaggaggaaagcaaggccaagagtgccctggcccacgccgtgcaggctctgcggcacgactgtgacctcctgcgggagcaacacgaggaggaggctgaggcccaggctgagctgcagcggctgctgtccaaggccaatgccgaggtggcccagtggaggagcaagtacgaagcagatgccatccagaggaccgaggagctggaggaggccaaaaaaaagctggcactgcggctgcaggaggcagaggagggcgtggaggctgccaacgccaagtgctcatcgttggagaaggccaagctgcggctacagacagagtcagaggatgtaaccctggagctggagcgggcgacctcagcagctgctgcgctggacaagaagcagcggcacttggaacgggcactggaggaacggcggcggcaggaggaggagatgcagcgggagctggaggcggcacagagggagtcccgtggcctgggcaccgagctcttccggctgcggcacggccacgaggaggcacttgaagccctggagacgctcaagcgggagaacaagaacctgcaggaggagatcagcgacctcacagaccaggtgagtctcagtgggaagagcatccaggaactggagaaaaccaagaaggcgctggaaggcgagaagagtgagatccaggctgcactggaggaggcagagggggccctggagctggaggagaccaagacgctgcggatccagctggagctctcccaggtcaaagcagaagtggaccggaagctggcagagaaagacgaggagtgcgctaacctgaggcgcaaccaccagcgagctgtggagtccctgcaggcctccctggatgcagagacacgggcccgcaatgaggcgctgcggctcaagaagaagatggagggtgacctcaacgacctggagctgcagctgggccatgccacccgtcaggccacagaggcccaggctgccacgcggctgatgcaggcacagctcaaggaggagcaggcagggcgggacgaggagcagcggctggcagctgagctccacgagcaggcgcaggctctggagcgccgggcctcgctgctggctgcggagctggaggagctgcgggctgccctggagcagggcgagcgcagccggcgactggcagagcaggagcttttggaggccaccgagcgcctcaaccttctgcattcgcagaacacaggcctcctaaaccagaagaagaagctggaggcggacttggcccagctgagcggggaggtggaggaggctgcacaggagaggcgggaggctgaggagaaggccaaaaaggccatcactgatgcggccatgatggccgaggagctgaagaaggagcaggacacaagtgcacacctggaacggatgaagaagacgctggagcagacggtgcgcgagctccaggcccgccttgaggaggcagaacaggccgccctccgtggcgggaagaagcaggtgcagaagctggaggccaaggtacgggagctggaggctgagcttgatgcagagcagaagaagcacgccgaggcccttaagggcgtgcgcaagcatgagcgccgtgtcaaggagctcgcataccaggccgaggaggacaggaagaacctggctcgcatgcaggacctggtggacaagctgcagagcaaggtcaagagctacaagcgccagtttgaggaggcggagcagcaggccaacaccaacctggccaagtatcgcaaggcccagcacgagctggatgatgcggaggagcgggcagacatggcggaaacccaggccaacaagctgcgggcacggacccgggacgccctgggccccaagcacaaggagtgacggcctgaccccctgggctctaaagaggaatgtctgctgttgcacatctggctgaggccacctgccccgatcctgccatctctgcatcgccccctgctgccttcagccttccctgggccctgaataaacaccacagccagtttccttctcattcttttctttggggttcaggaggaaaaacacagtcctagggacaaaagccaggtccacagcagtcatttttaaaataaagttatttaatagtctcca

SEQ ID NO: 409 - DNA, 4576 bp, Homo sapiens
  source 1..4576: mol_type = genomic DNA
agaaggccacgcgagcccgggagggacgcggcggcgggggctgcaggaaaggcgcgagcagaggcggcggcgggtgtactgtaggtggtcggtccggcagcagcccggcccccggacgcaggacgtggccccaggcagccctcgcagctcagtgctctagccggggcaagcccgcgtctccgcctgctggacgggcccaggcgagatgtagggctctgggcgcggaggccgccggtggggcggctgatcgcggaggatcgcggagggcgcgccgaggatggagagagcgatggagcaactcaaccgcctgacgcgctcgctgcgccgcgcgcgcaccgtggagttgcccgaggataatgaaactgctgtttatacattaatgccaatggttatggctgatcaacacaggtctgtttctgaactactatcaaattcaaaatttgatgtcaattatgcattcggacgtgtgaaaagaagcttgcttcacattgcagcaaattgtggatcggtggaatgcttggttttgctgttaaagaaaggagcaaatcctaactatcaagatatttcaggctgtacaccccttcatttggcagcaagaaatgggcagaagaaatgtatgagtaaattattagaatatagcgctgatgtcaacatttgtaataatgaaggccttacagcaatacattggctggctgtgaatgggcggacagaactactccatgaccttgtgcagcatgtcagtgatgttgatgttgaggatgccatggggcagacagcactgcatgttgcctgccagaacggtcacaagacgacagtgcagtgcttgctagacagtggtgctgatattaacaggccaaatgtatcaggagcaactccattgtactttgcttgcagtcatggtcagagagatacagcacagatcctactattacgaggagccaaatatctgccagataaaaatggagtaactcctctggatttatgtgtacagggtggatatggagagacttgtgaagtattaattcaatatcacccgaggctttttcagactattattcaaatgacacagaatgaagacctccgagaaaacatgttacggcaagttctggagcatttgtctcagcaaagtgaaagccagtacctaaagattctaacaagccttgctgaagttgctacaacaaatggtcataaactgcttagcctctctagcaattatgatgctcaaatgaagagccttttaaggattgtgagaatgttttgtcacgtctttcgaattggtccatcctcccccagtaatggaattgatatgggctacaatgggaataaaactccaagaagccaggtgttcaagcctctggaattgctttggcactcgttagatgaatggctagttttaatagccacagaattgatgaaaaacaaaagagactcaacagagatcacttctattttactgaaacaaaaaggccaagatcaagatgctgcttccattcctccatttgaacctccaggacctgggagctatgaaaatctgtccactggcacaagggaatctaaaccagatgctcttgcagggagacaggaagccagtgcagattgtcaggatgttatttctatgacagctaaccggctaagtgctgtcattcaagctttttacatgtgctgttcttgtcagatgcctccgggaatgacttcacctcgtttcattgaatttgtctgcaaacatgatgaagttttaaaatgctttgttaatagaaatcccaaaattatatttgaccactttcactttctccttgaatgtcctgagttgatgtcaagattcatgcatatcataaaagcacagccttttaaagatcgctgtgaatggttctatgaacatttgcattcaggacagccagattcagatatggtgcacaggccagtgaatgaaaatgatatcctgctggttcacagagattctatttttaggagtagctgtgaagttgtgtcaaaagcaaattgtgcaaagctaaagcaagggattgctgtacggttccatggagaagaaggcatgggtcaaggtgttgtgcgtgagtggtttgatattctgtccaatgagatagtcaatcctgattatgcattgtttacccagtcagctgatggaacaacttttcagcctaatagcaactcttatgtaaatcctgatcacttgaactattttcggtttgctgggcagatcttgggattagcgttgaaccacaggcagctggtcaatatttacttcacacgatccttctacaagcacattcttggtattcctgtaaattaccaagatgtggcatccattgatccagaatatgcgaaaaatttgcaatggattttagataatgatataagtgatctgggtctagaactaactttttctgttgagactgatgtgtttggagcaatggaagaggtgcctttgaaacctgggggtgggagtattcttgtgacacaaaataataaagcggagtacgtccagcttgttactgaacttcgaatgacaagagccattcagcctcagatcaatgcttttttacagggctttcatatgttcattccaccctccctcatacagctttttgatgaatatgaattggagctactgctttctggcatgccagaaattgatgtgagtgattggataaaaaatacagaatacacaagtggctatgaaagagaagatccagttattcagtggttctgggaagttgtagaagacattactcaagaggagagagttcttctcttacagtttgttacgggcagttccagggtcccacatggtgggtttgctaatatcatgggtggaagtggattgcaaaactttacaatcgctgctgtgccatatactccaaatcttttaccaacttcaagcacatgcatcaacatgctcaagttacctgaatacccaagtaaagaaatactcaaggacagacttcttgtggcactacattgtggcagctatggttacacaatggcataatgaagtctggaaaactcctctgactactgatgcacaattcagaatggcagaagtaatttgggaaaatgtcaacaaaaaagcagcctaaatgcaacccataggcagggctgatgcttccaatttataaaggatcatcaggttttctgtttctctcttttcccttttatgttttctctgtttgtgatacaattagaaaatataaaatcacagtagattttattttttaaaatgctaactgaaagtaatagagactgtcctttttcataattaattttatccaagattgtattaaggcaaaatctgattctacattccacctctgctatgtaactgtcttgttaaaagggtgttttctcctaatttctgatatattatatgaggtcatccagctggtgtgttcttttgcatgtaaactgccatttatattttagaaaactattgtatagaatggatttagattgtctataaagccacaaatacgtattttgccacagtgtattctatattgcaatgatttttttagcattttaatattttaatatatattgtaaaatttagactgatgatactaacagttgatgaaatgacatataatttatatatgaaagcttacgctatattgtatgaattatttgcatctttcagtggccagttttccatatgtatatattatggtctcaatgtttttcttacgcctcattttaatttataatgaaggtaaaattaaaatgtattttaccacgtttcttttcattacttttatctgtgagctctgacacatctgaaaaagtaatctgatgtgcaaattataatttaaatatgttaatttttttgcttcttaaatttgcttttcatcattaaaatgtcaagttcaagtgatatgtgcctaatatcacttggatgttggtgggtttttgaatttttgggtggttaatcagttttattttgaaaagacgtacttgaatagttacagcatatgtttgaacaggaagtaggaacatgcatacacgaagaaatgctaacggaaggatttgttatgtttaggatcttcccttggaaactaaaaatagaatattaatgacattactgtttgtagaatgacatatgcagattttctcataagcagtcattgtgtttgccagtaatgtttgagagacatgtaagttgaaagttttgctaaattataaagctcctttaattcgttggttttgattctcttattctcttgtcttttctaaatgttaacaaaatatatcttaacagattacatgaaatttaggaattatttaaaagttaccattagctctaaaattaagattcggatgctttatttatagtaactgaagctaataatgttttatgttttgattttttgaaatttaattgtagaagtcactgccttctgagttttcaaatagataaccacctttaatattacactgcttataatactaatgtttacagatatgtttctgtttataaccatataatacattggctttgtcatattagttttttttgcaagtagttatgtaaaagagatagataataaaatattaaataactgag

SEQ ID NO: 410 - DNA, 4267 bp, Homo sapiens
  source 1..4267: mol_type = genomic DNA
caacttccgggtcaaaggtgcctgagccggcgggtcccctgtgtccgccgcggctgtcgtcccccgctcccgccacttccggggtcgcagtcccgggcatggagccgcgaccgtgaggcgccgctggacccgggacgacctgcccagtccggccgccgccccacgtcccggtctgtgtcccacgcctgcagctggaatggaggctctctggaccctttagaaggcacccctgccctcctgaggtcagctgagcggttaatgcggaaggttaagaaactgcgcctggacaaggagaacaccggaagttggagaagcttctcgctgaattccgagggggctgagaggatggccaccaccgggaccccaacggccgaccgaggcgacgcagccgccacagatgacccggccgcccgcttccaggtgcagaagcactcgtgggacgggctccggagcatcatccacggcagccgcaagtactcgggcctcattgtcaacaaggcgccccacgacttccagtttgtgcagaagacggatgagtctgggccccactcccaccgcctctactacctgggaatgccatatggcagccgagagaactccctcctctactctgagattcccaagaaggtccggaaagaggctctgctgctcctgtcctggaagcagatgctggatcatttccaggccacgccccaccatggggtctactctcgggaggaggagctgctgagggagcggaaacgcctgggggtcttcggcatcacctcctacgacttccacagcgagagtggcctcttcctcttccaggccagcaacagcctcttccactgccgcgacggcggcaagaacggcttcatggtgtcccctatgaaaccgctggaaatcaagacccagtgctcagggccccggatggaccccaaaatctgccctgccgaccctgccttcttctccttcatcaataacagcgacctgtgggtggccaacatcgagacaggcgaggagcggcggctgaccttctgccaccaaggtttatccaatgtcctggatgaccccaagtctgcgggtgtggccaccttcgtcatacaggaagagttcgaccgcttcactgggtactggtggtgccccacagcctcctgggaaggttcagagggcctcaagacgctgcgaatcctgtatgaggaagtcgatgagtccgaggtggaggtcattcacgtcccctctcctgcgctagaagaaaggaagacggactcgtatcggtaccccaggacaggcagcaagaatcccaagattgccttgaaactggctgagttccagactgacagccagggcaagatcgtctcgacccaggagaaggagctggtgcagcccttcagctcgctgttcccgaaggtggagtacatcgccagggccgggtggacccgggatggcaaatacgcctgggccatgttcctggaccggccccagcagtggctccagctcgtcctcctccccccggccctgttcatcccgagcacagagaatgaggagcagcggctagcctctgccagagctgtccccaggaatgtccagccgtatgtggtgtacgaggaggtcaccaacgtctggatcaatgttcatgacatcttctatcccttcccccaatcagagggagaggacgagctctgctttctccgcgccaatgaatgcaagaccggcttctgccatttgtacaaagtcaccgccgttttaaaatcccagggctacgattggagtgagcccttcagccccggggaagatgaatttaagtgccccattaaggaagagattgctctgaccagcggtgaatgggaggttttggcgaggcacggctccaagatctgggtcaatgaggagaccaagctggtgtacttccagggcaccaaggacacgccgctggagcaccacctctacgtggtcagctatgaggcggccggcgagatcgtacgcctcaccacgcccggcttctcccatagctgctccatgagccagaacttcgacatgttcgtcagccactacagcagcgtgagcacgccgccctgcgtgcacgtctacaagctgagcggccccgacgacgaccccctgcacaagcagccccgcttctgggctagcatgatggaggcagccagctgccccccggattatgttcctccagagatcttccatttccacacgcgctcggatgtgcggctctacggcatgatctacaagccccacgccttgcagccagggaagaagcaccccaccgtcctctttgtatatggaggcccccaggtgcagctggtgaataactccttcaaaggcatcaagtacttgcggctcaacacactggcctccctgggctacgccgtggttgtgattgacggcaggggctcctgtcagcgagggcttcggttcgaaggggccctgaaaaaccaaatgggccaggtggagatcgaggaccaggtggagggcctgcagttcgtggccgagaagtatggcttcatcgacctgagccgagttgccatccatggctggtcctacgggggcttcctctcgctcatggggctaatccacaagccccaggtgttcaaggtggccatcgcgggtgccccggtcaccgtctggatggcctacgacacagggtacactgagcgctacatggacgtccctgagaacaaccagcacggctatgaggcgggttccgtggccctgcacgtggagaagctgcccaatgagcccaaccgcttgcttatcctccacggcttcctggacgaaaacgtgcactttttccacacaaacttcctcgtctcccaactgatccgagcagggaaaccttaccagctccagatctaccccaacgagagacacagtattcgctgccccgagtcgggcgagcactatgaagtcacgttgctgcactttctacaggaatacctctgagcctgcccaccgggagccgccacatcacagcacaagtggctgcagcctccgcggggaaccaggcgggagggactgagtggcccgcgggccccagtgaggcactttgtcccgcccagcgctggccagccccgaggagccgctgccttcaccgccccgacgccttttatccttttttaaacgctcttgggttttatgtccgctgcttcttggttgccgagacagagagatggtggtctcgggccagcccctcctctccccgccttctgggaggaggaggtcacacgctgatgggcactggagaggccagaagagactcagaggagcgggctgccttccgcctggggctccctgtgacctctcagtcccctggcccggccagccaccgtccccagcacccaagcatgcaattgcctgtcccccccggccagcctccccaacttgatgtttgtgttttgtttggggggatatttttcataattatttaaaagacaggccgggcgcggtggctcacgtctgtaatcccagcactttgggaggctgaggcgggcggatcacctgaggttgggagttcaagaccagcctggccaacatggggaaaccccgtctctactaaaaatacaaaaaattagccgggtgtggtggcgcgtgcctataatcccagctactcgggaggctgaggcaggagaatcgcttgaacccgggaggtggaggttgcggtgagccaagatcgcaccattgcactccagcctgggcaacaagagcgaaactctgtctcaaaataaataaaaaataaaagacagaaagcaaggggtgcctaaatctagacttggggtccacaccgggcagcggggttgcaacccagcacctggtaggctccatttcttcccaagcccgagcagagggtcatgcgggccccacaggagaagcggccagggcccgcggggggcaccacctgtggacagccctcctgtccccaagctttcaggcaggcactgaaacgcaccgaacttccacgctctgctggtcagtggcggctgtcccctccccagcccagccgcccagccacatgtgtctgcctgacccgtacacaccaggggttccggggttgggagctgaaccatccccacctcagggttatatttccctctccccttccctccccgccaagagctctgccaggggcgggcaaaaaaaaaagtaaaaagaaaagaaaaaaaaaaaaaagaaacaaaccacctctacatattatggaaagaaaatatttttgtcgattcttattcttttataattatgcgtggaagaagtagacacattaaacgattccagttgg

SEQ ID NO: 411 - DNA, 3054 bp, Homo sapiens
  source 1..3054: mol_type = genomic DNA
tggtgaccaagatggcggcggagctggtggaggccaaaaacatggtgatgagttttcgagtctccgaccttcagatgctcctgggtttcgtgggccggagtaagagtggactgaagcacgagctcgtcaccagggccctccagctggtgcagtttgactgtagccctgagctgttcaagaagatcaaggagctgtacgagacccgctacgccaagaagaactcggagcctgccccacagccgcaccggcccctggaccccctgaccatgcactccacctacgaccgggccggcgctgtgcccaggactccgctggcaggccccaatattgactaccccgtgctctacggaaagtacttaaacggactgggacggttgcccgccaagaccctcaagccagaagtccgcctggtgaagctgccgttctttaatatgctggatgagctgctgaagcccaccgaattagtcccacagaacaacgagaagcttcaggagagcccgtgcatcttcgcattgacgccaagacaggtggagttgatccggaactccagggaactgcagcccggagttaaagccgtgcaggtcgtcctgagaatctgttactcagacaccagctgccctcaggaggaccagtacccgcccaacatcgctgtgaaggtcaaccacagctactgctccgtcccgggctactacccctccaataagcccggggtggagcccaagaggccgtgccgccccatcaacctcacccacctcatgtacctgtcctcggccaccaaccgcatcactgtcacctgggggaactacggcaagagctactcggtggccctgtacctggtgcggcagctgacctcatcggagctgctgcagaggctgaagaccattggggtaaagcacccggagctgtgcaaggcactggtcaaggagaagctgcgccttgatcctgacagcgagatcgccaccaccggtgtgcgggtgtccctcatctgtccgctggtgaagatgcggctctccgtgccctgccgggcagagacctgtgcccacctgcagtgcttcgacgccgtcttctacctgcagatgaacgagaagaagcccacctggatgtgccccgtgtgcgacaagccagccccctacgaccagctcatcatcgacgggctcctctcgaagatcctgagcgagtgtgaggacgccgacgagatcgagtacctggtggacggctcgtggtgcccgatccgcgccgaaaaggagcgcagctgcagcccgcagggcgccatcctcgtgctgggcccctcggacgccaatgggctcctgcccgcccccagcgtcaacgggagcggtgccctgggcagcacgggtggcggcggcccggtgggcagcatggagaatgggaagccgggcgccgatgtggtggacctcacgctggacagctcatcgtcctcggaggatgaggaggaggaggaagaggaggaggaagacgaggacgaagaggggccccggcccaagcgccgctgccccttccagaagggcctggtgccggcctgctgaccccggccgcacactcgactttcctggtgctcaccacgcagaggggcacgggccagcctcgggcgcagagggaggagtgacctttctttttctttttattgtcgttcgttttgtttttccacccttttgcctggctcctggcacctgtacctctggactctcctatcgggggattaaaaaaaaaagtaaaatgacaaaaaaagatacaaaaaagaaaaatgaaacaaaaaagtcaaactcttaaaaacaaggccggccacccacacagccgcctccccggctggagtccgagccgggaaggggtagtgggcgggagggaccaggacgccgccccgcgccctcccctccggatgccccgccgcccgccgccctctgcccacgaccattccagccagtgcgcggggacccgggcggcgggcggtggggcgcagcccctctctggcgaccactttgacgtttgtctcttcctttgctttttctctgcaaatgcatcctcgcccagagaccctcacgcgccgagcagcgagcgttttagccgagaagccatggagtgggttggggcggggaggggcagtagggtggggggatgggtgggcaggatgggggtacagtgggcggctggggagggtttagccacagatgtgttgtattttttgaaagtgcaataatttggtattttgaagacccggcgtgtggtcaggaacccccggggaaggcgggggcccagggtgcggcaccgtgtggcgtgggggggtctcagttttctagccagctacctcggtaattccaattcaggttaacttccctacggaacagcacagatgtccacagatgtccacagctgccgccgccgccgccgccaccataccccggtccttggggcatgggttgcggtcgcttcccaaggggcagcagggaccccggccaccccggctctcggtttgggttgattcctctcctttttgctcttggttttccgacgggtacgaggctggcccggcaccctgtcccccgggagcctcactcttccagcaggaccagaccaggggcctccttcctgtccccaggcgttcccggcccctcgcaggccccacccatgcccttggcctcagggtccaacaactgggggagctaccagggctctgccttcaggagcccacagctgggcaccccccttgccccgcaggagaccggggcgcaggcggggcaccggcctcacctggttctccaacaccgctgcctgcggtctgttttgcttttgtcctccccagcccagaattttcctttgtataaacagaactcctagtcaggaagcaatatcatttcaggtctaaagaaagggacgtgcatctggccgagggcagttcagtctcactgcagagcccgcagcccgctgcgcagctcggcccctcccgcccgcacgggcagctgaaggccgctgttttctaatatttgtattctaatttaattgtttttaaaaaatgcaaataaaaaaggtcgaggtgaagcc

SEQ ID NO: 412 - DNA, 830 bp, Homo sapiens
  source 1..830: mol_type = genomic DNA
gtgcattgtgcttccgctcggggaaagaccgcttccggtgcttccgtcgctccttgccgggcataatggccgcgcagcgacccctgcgggtcctgtgcctggcgggcttccggcagagcgagcggggcttccgtgagaagaccggggcgctgaggaaggcgctgcggggtcgcgccgagctcgtgtgcctcagcggcccgcacccggtccccgaccccccgggccccgagggcgccagatcagacttcgggtcctgccctccggaggagcagcctcgaggctggtggttttcagagcaggaggccgacgttttctccgcattggaagagcccgccgtctgcaggggcctggaggaatcactggggatggtggcacaggcactgaacaggctggggccttttgacggccttcttggtttcagccaaggggctgcgctagcagcccttgtgtgtgccctgggccaggcaggcgatccccgcttccccttgccacggtttatcctcttggtgtctggtttctgtccccggggcattgggttcaaggaatccatcctgcaaaggcccttgtcattgccttcgctccatgtttttggggacactgacaaagtcatcccctctcaggagagtgtgcaactggccagccaatttcccggagccatcaccctcacccactctggtggccacttcattccagcagctgcaccccagcgtcaggcctacctcaagttcttggaccagtttgcagagtgaaagatcaagaaatgtctctgctcctacatccagctcctctaggggcagcctccgtcatccatgccctcccaggaccctcca

SEQ ID NO: 413 - DNA, 2510 bp, Homo sapiens
  source 1..2510: mol_type = genomic DNA
ataatgaattgggtaaggaacagttaataagaaaatgtgccttgctaactgtgcacattacaacaaagagctggcagctcctgaaggaaaagggcttgtgccgctgccgttcaaacttgtcagtcaactcatgccagcagcctcagcgtctgcctccccagcacaccctcattacatgtgtctgtctggcctgatctgtgcatctgctcggagacgctcctgacaagtcgggaatttctctatttctccactggtgcaaagagcggatttctccctgcttctcttctgtcacccccgctcctctcccccaggaggctccttgatttatggtagctttggacttgcttccccgtctgactgtccttgacttctagaatggaagaagctgagctggtgaagggaagactccaggccatcacagataaaagaaaaatacaggaagaaatctcacagaagcgtctgaaaatagaggaagacaaactaaagcaccagcatttgaagaaaaaggccttgagggagaaatggcttctagatggaatcagcagcggaaaagaacaggaagagatgaagaagcaaaatcaacaagaccagcaccagatccaggttctagaacaaagtatcctcaggcttgagaaagagatccaagatcttgaaaaagctgaactgcaaatctcaacgaaggaagaggccattttaaagaaactaaagtcaattgagcggacaacagaagacattataagatctgtgaaagtggaaagagaagaaagagcagaagagtcaattgaggacatctatgctaatatccctgaccttccaaagtcctacataccttctaggttaaggaaggagataaatgaagaaaaagaagatgatgaacaaaataggaaagctttatatgccatggaaattaaagttgaaaaagacttgaagactggagaaagtacagttctgtcttcaatacctctgccatcagatgactttaaaggtacaggaataaaagtttatgatgatgggcaaaagtcagtgtatgcagtaagttctaatcacagtgcagcatacaatggcaccgatggcctggcaccagttgaagtagaggaacttctaagacaagcctcagagagaaactctaaatccccaacagagtatcatgagcctgtatatgccaatcccttttacaggcctacaaccccacagagagaaacggtgacccctggaccaaactttcaagaaaggataaagattaaaactaatggactgggtattggtgtaaatgaatccatacacaatatgggcaatggtctttcagaggaaaggggaaacaacttcaatcacatcagtcccattccgccagtgcctcatccccgatcagtgattcaacaagcagaagagaagcttcacaccccgcaaaaaaggctaatgactccttgggaagaatcgaatgtcatgcaggacaaagatgcaccctctccaaagccaaggctgagccccagagagacaatatttgggaaatctgaacaccagaattcttcacccacttgtcaggaggacgaggaagatgtcagatataatatcgttcattccctgcctccagacataaatgatacagaaccggtgacaatgattttcatggggtatcagcaggcagaagacagtgaagaagataagaagtttctgacaggatatgatgggatcatccatgctgagctggttgtgattgatgatgaggaggaggaggatgaaggagaagcagagaaaccgtcctaccaccccatagctccccatagtcaggtgtaccagccagccaaaccaacaccacttcctagaaaaagatcagaagctagtcctcatgaaaacacaaatcataaatccccccacaaaaattccatatctctgaaagagcaagaagaaagcttaggcagccctgtccaccattccccatttgatgctcagacaactggagatgggactgaggatccatccttaacagctttaaggatgagaatggcaaagctgggaaaaaaggtgatctaagagttgtaccacctatataaacatcctttgaagaagaaactaagaagcatttgcaaatttctcttctggatattttgtttattttttctgaagtccaaaaaattatcattacagtgtaccatattaagccatgtgaataagtagtagtcattatttgtgaaaaattcccaaaaagctggggaaaacaaatgtgtaacttttccagttacttgacacgattcagtgggggaaaaccagcattttttattctattgataccaaagcatttctaataagagcttgttaaatttaagaataaagttatttaaaatattctgagtatagtatattaactggcattgtaattttgatgatacaaagattgaaagatcataggaaagcattgcccttcatcacagaagtattcaactctgacaaataaatatgtcatcctgaattaataatgccttaataaaagtacatcctcctgctaactatca

SEQ ID NO: 414 - DNA, 1909 bp, Homo sapiens
  source 1..1909: mol_type = genomic DNA
gatttggcgggagtcttgaccgccgccgggctcttggtacctcagcgcgagcgccaggcgtccggccgccgtggctatgttcgtgtccgatttccgcaaagagttctacgaggtggtccagagccagagggtccttctcttcgtggcctcggacgtggatgctctgtgtgcgtgcaagatccttcaggccttgttccagtgtgaccacgtgcaatatacgctggttccagtttctgggtggcaagaacttgaaactgcatttcttgagcataaagaacagtttcattattttattctcataaactgtggagctaatgtagacctattggatattcttcaacctgatgaagacactatattctttgtgtgtgacacccataggccagtcaatgtcgtcaatgtatacaacgatacccagatcaaattactcattaaacaagatgatgaccttgaagttcccgcctatgaagacatcttcagggatgaagaggaggatgaagagcattcaggaaatgacagtgatgggtcagagccttctgagaagcgcacacggttagaagaggagatagtggagcaaaccatgcggaggaggcagcggcgagagtgggaggcccggagaagagacatcctctttgactacgagcagtatgaatatcatgggacatcgtcagccatggtgatgtttgagctggcttggatgctgtccaaggacctgaatgacatgctgtggtgggccatcgttggactaacagaccagtgggtgcaagacaagatcactcaaatgaaatacgtgactgatgttggtgtcctgcagcgccacgtttcccgccacaaccaccggaacgaggatgaggagaacacactctccgtggactgcacacggatctcctttgagtatgacctccgcctggtgctctaccagcactggtccctccatgacagcctgtgcaacaccagctataccgcagccaggttcaagctgtggtctgtgcatggacagaagcggctccaggagttccttgcagacatgggtcttcccctgaagcaggtgaagcagaagttccaggccatggacatctccttgaaggagaatttgcgggaaatgattgaagagtctgcaaataaatttgggatgaaggacatgcgcgtgcagactttcagcattcattttgggttcaagcacaagtttctggccagcgacgtggtctttgccaccatgtctttgatggagagccccgagaaggatggctcagggacagatcacttcatccaggctctggacagcctctccaggagtaacctggacaagctgtaccatggcctggaactcgccaagaagcagctgcgagccacccagcagaccattgccagctgcctttgcaccaacctcgtcatctcccaggggcctttcctgtactgctctctcatggagggcactccagatgtcatgctgttctctaggccggcatccctaagcctgctcagcaaacacctgctcaagtcctttgtgtgttcgacaaagaaccggcgctgcaaactgctgcccctggtgatggctgcccccctgagcatggagcatggcacagtgaccgtggtgggcatccccccagagaccgacagctcggacaggaagaacttttttgggagggcgtttgagaaggcagcggaaagcaccagctcccggatgctgcacaaccattttgacctctcagtaattgagctgaaagctgaggatcggagcaagtttctggacgcacttatttccctcctgtcctaggaatttgattcttccagaatgaccttcttatttatgtaactggctttcatttagattgtaagttatggacatgatttgagatgtagaagccattttttattaaataaaatgcttattttaggctccgtcccc

SEQ ID NO: 415 - DNA, 3249 bp, Homo sapiens
  source 1..3249: mol_type = genomic DNA
gcggccgcaggggtctgggcagggctgggcagtgctgccggagcaaaagcggtagcgggagcccggccggagctgggtctggagacgccgtggcagcctgaacggagtgtgcgacggattgggaggtttgtctacagattttgagcgttcgaagttgacccctgactaagtatactttgctgctccctcagcctttgaaaaaatgtctgtcacatatgatgattccgttggagtagaagtgtccagcgacagcttctgggaggtcgggaactacaagcggactgtgaagcggatcgacgatggccaccgcctgtgcagcgacctcatgaactgcctgcatgagcgggcgcgcatcgagaaggcgtatgcgcagcagctcactgagtgggcccggcgctggaggcagctcgtggagaaagggccccagtacgggaccgtggagaaggcctggatggccttcatgtccgaggcagagagggtgagcgagctgcacctcgaggtgaaggcctcactgatgaacgatgacttcgagaagatcaagaactggcagaaggaagcctttcacaagcagatgatgggcggcttcaaggagaccaaggaagctgaggacggctttcggaaggcacagaagccctgggccaagaagctgaaagaggtagaagcagcaaagaaagcccaccatgcagcgtgcaaagaggagaagctggctatctcacgagaagccaacagcaaggcagacccatccctcaaccctgaacagctcaagaaattgcaagacaaaatagaaaagtgcaagcaagatgttcttaagaccaaagagaagtatgagaagtccctgaaggaactcgaccagggcacaccccagtacatggagaacatggagcaggtgtttgagcagtgccagcagttcgaggagaaacgccttcgcttcttccgggaggttctgctggaggttcagaagcacctagacctgtccaatgtggctggctacaaagccatttaccatgacctggagcagagcatcagagcagctgatgcagtggaggacctgaggtggttccgagccaatcacgggccgggcatggccatgaactggccgcagtttgaggagtggtccgcagacctgaatcgaaccctcagccggagagagaagaagaaggccactgacggcgtcaccctgacgggcatcaaccagacaggcgaccagtctctgccgagtaagcccagcagcacccttaatgtcccgagcaaccccgcccagtctgcgcagtcacagtccagctacaaccccttcgaggatgaggacgacacgggcagcaccgtcagtgagaaggacgacactaaggccaaaaatgtgagcagctacgagaagacccagagctatcccaccgactggtcagacgatgagtctaacaaccccttctcctccacggatgccaatggggactcgaatccattcgacgacgacgccacctcggggacggaagtgcgagtccgggccctgtatgactatgaggggcaggagcatgatgagctgagcttcaaggctggggatgagctgaccaagatggaggacgaggatgagcagggctggtgcaagggacgcttggacaacgggcaagttggcctatacccggcaaattatgtggaggcgatccagtgatgagtcggggacaggccagcggggggacggaggcggcgggcccaggagcctcagccagccacgtgggcatccactccttttcctgcaagagatgatggttccattgctcttggcttcatggtgttcctggaaggcagatgagctggtcatttcgcctgggactcggcacctttccgagtgcagctggagggatctgagcgcaggaagacgcagaacaacagaaatagccgcccctccccgcccactgtgcctgttggcctatcatagatctctatgttcttgactttgtctctcctttccgagtcaatggtgggttacactgatcttgttccactgattactctctctgacgagtccatcacctgcaacttaaatgaacaagcttacatcccattttgagtgaagattttgaggtttttaatttaaaggctgtgtacagttatacttttttatacacctgttcatttctacttaaattatggcacagattgatgcgcaccagtcttgaggaaacgatctccctattcccttaccctgttactcagccacgccgtgtgtaggcttagcctcaggtggcagatgtttgaggaaaggaattatgccaggaaggtgggaccgggttatggtcgggtttctattgggaatgctctttgtgcttttgggcatctgaatggaagctttacatagaaccttaggtagaactcccccaaatcgccatatttaaaaattattttcactctattcttgcttaaaactgtactcttttgcaaattaacaattttatcactgattcagagttaaaaagaagactaacttttcaagcaaatgcatctgtaaagatgctttagattagactgtcatgtctcagtgtctatctgtatatattatttgatattcagagaatctaaagcactcgtctactgttttaatgagatttaacagcttttaacagtgagtttcgtttgtaaactgcttgaagtctgtggcattcaggcacacgtctggctggccggctgggtctcctcccgggctcagtgggcctggggcctctctgacgtggtgcctgctggagggaggctcgtcgtcaccagctgactgctggtccggcttctgaccggcctttgtcctggctccgtagcagaacactgtaaaagtgcccgcgtctttgcagtagttgcagatttcagtcgtcgtgttacttgtgcacaaacagaagctgggtcttacccgcagcacgagtgtctcgggctgcccggagtcgcccgggagcaggtgctgcagccagagttacgcgggggccacgcgggccggcgggggtggggggaacgtgggggaacctgtgtttcacgtgactcagcagtgcccgccgccgtcaccagctatgcattcactccgtttccagtgagcagatgtcttgcttggaaagtggacctgtgtctgtgtctgtcctgagaacttaccagcagaaatcctcatttctgtgctacggatttaccaaaaattgtcaagtctttttcagtttaacagttcctttacatgtgtagtatttgaggaaaaaaatcaataaacagttgatctcgtgcata

SEQ ID NO: 416 - DNA, 3187 bp, Homo sapiens
  source 1..3187: mol_type = genomic DNA
acagcgggcgcgcaggccggccccggggcctccatgatggaggagcgagcggccgccgcggtcgccgccgccgcctcctcctgccgtccgctcggctcaggcgcgggccctggccccactggggcggccccggtctccgcccctgcccccgggccgggcccggcaggtaagggaggcggcggcggaggcagccccgggcccacggcgggcccggagcccctgagcctgccggggatcctgcactttatccagcacgagtgggcgcgcttcgaagccgagaaagcccgctgggaggccgagcgcgccgagttacaggctcaggtggccttccttcagggagagaggaaagggcaggagaatctaaagacggacctggtgcggcggatcaagatgctagagtatgcgctgaagcaggaaagggccaaatatcataaactgaagtttgggacagacctgaaccagggggagaagaaagcagatgtgtcagaacaagtctccaatggccccgtggaatcggtcaccctggagaacagcccgttggtgtggaaggaggggcggcagcttctccgacagtacctggaagaggtgggctacacagacaccatcctcgacatgcggtccaagcgcgtccgttccctgctgggccgctcgctggagctcaacggggcagtggagccgagtgaaggggcccccagggctccaccaggccctgcagggctcagtggtggggagtcgctgctggtgaaacagatcgaggagcagataaagaggaacgcggcaggcaaagatggcaaagagcgcttgggcggctcagtgctggggcagatccccttcctgcagaactgcgaggacgaagacagcgacgaggacgatgagctggacagcgtgcagcacaagaagcagcgtgtgaagctcccatccaaggctctggtgcccgaaatggaagacgaggatgaggaagacgactctgaggatgctatcaatgagtttgatttcctgggctcaggagaggatggggaaggggctccagaccctcggcggtgcactgtggatgggagcccccatgagctggaaagccgtcgggtcaaactccaaggcattctggctgacctgcgggatgtggatgggctgcccccaaaagtgactggcccgcctcctggcacaccccagccccggccacatgaagacgtcttcatcatggacactatcgggggcggggaggtgagcctgggggacttggcagatctcaccgtcaccaacgacaacgacctcagctgcgatctgtctgacagcaaagatgcttttaagaagacgtggaaccccaagttcaccctgcgctcgcactacgacggcattcgttccctggccttccaccacagccagtcggctctgctcaccgcctccgaggacggcacgctcaagctctggaacctgcagaaggcggtcacggccaagaagaatgcggcgctagatgtggaacctatacatgctttccgggctcacaggggcccagtgttggctgtggctatgggcagcaacagtgaatactgctacagtggcggggcagatgcctgcatccatagttggaagattccagacctcagcatggatccctatgatggctacgacccaagcgtgctgagccacgtcctggagggccacggggacgccgtgtggggcctggccttcagtcccacctcccagcgcctggcctcctgttctgctgatggcaccgtccgcatctgggaccccagcagcagcagcccggcctgcctctgcaccttccccacagccagcgagcacggggtccccacctcagtggccttcaccagcaccgagcctgcccacatcgtggcctccttccgctctggcgacaccgtcttgtatgacatggaggttggcagtgccctcctcacgctggagtcccggggcagcagcggtccaacccagatcaaccaagtggtgagtcatccaaaccagcctctcaccatcaccgcccacgacgacaggggcatccgcttcctggacaatcggacaggtaagccggtgcactccatggttgcacacctggacgcagtcacctgcctagccgtggaccccaacggcgcattcctgatgtcaggaagccatgactgctccctgcgtctctggagcctggacaacaaaacgtgcgtgcaggagatcacggcccaccgcaagaagcacgaggaggccatccacgctgttgcctgccaccccagcaaggccctcattgccagtgctggcgctgatgccctggccaaggtcttcgtatgatgcccacctggccctgccctggccgccacgctggctggggtgtagggccgggcaggtggggctgaggggactcccagcctcgctggaggtgcagaggcctggcctctgtctgtttgccatggagcctggtggtgctaacggccctttccccaggaatccctccccaacggctgccttccccaagcatccagcctggggatgggcccctttcaggaatcacccccgaggatggcctcggggtttccccctgtgccctgacagccgctcctggtatcagagctgctttccagagggcagcacagccagggccgggtgtctttagggatcagtttttccaagactccagaaggtgccaggttctccccttgagctcctgctcccccatcccccatcctcccagacctgggcaggagctgtgctgggagaaagggtggcagccgggagcctcagagctgagccccggcctggctgcccctcccctccggccctctccactgctttccagacactaaccaaggcttccaggccagggattgcccaacactcctagggcagccctcccagcgccccatggggtcgcccatgggtagagacggctttcttgtgcccctccctggggcatggagggtggagtgggcctcgggtccccctgaactccctgtatatctgtataaataacgggattttcatggcgccgccccacccgcattatcactgtgtgatggtctcagtcagtctcctccctgtctccactctttccctctatttatttcactctcttgtttggttctaccctgcaccctcggtccccttccaggttcctgtttataagccccaacccctctgtccccatcttgtatgtgaaaacttgtctcaataaaccctttggagt

SEQ ID NO: 417 - DNA, 1825 bp, Homo sapiens
  source 1..1825: mol_type = genomic DNA
atgcgcatgcacacccggctctcccttccaggccctccccaccacgtgggcgcggcctaccctcccgcagggggtaatagaagcgagaacgccggatcctggggcggggctggagcttcgtcagttgaaccgctcgcgaggagggttgctagtggagaagcaaccttggccatggaccagccggctggcctgcaggtggactacgtcttccggggtgtggagcatgccgtgcgggtgatggtttctgggcaggtgctggagctggaggtggaggaccggatgacggctgaccagtggcggggcgagttcgatgctggcttcattgaagatttgactcacaagacagggaacttcaaacagttcaacatcttctgtcatatgctggagtcagccctcactcagagtagtgagtcagtcaccctggacctgctgacctacacagacctggagtccctgcggaaccgcaagatggggggccgcccaggctccttggcccccaggtcggcccagctcaactccaagcgctacctgatcctcatctactccgtggagtttgacaggattcactacccgctgcccctcccgtaccagggcaagccagaccccgtggttctgcagggcatcatccggtcactgaaggaggaactgggccgcctgcaagggctggatggccagaacactcgggacacccgggagaatgagatctggcatctgcgggagcaggtgtcgcgcctggcgtccgagaagcgggagctggaggcgcagctgggccgatcgcgcgaggaggcgctggccgggcgcgcggcacgccaggaggccgaggcgctgcgcgggctggtgcgcgggctggagctggagctgcggcaggagcgcggcctcgggcacagggtggccggccgtcgcggccaggactgccgccgtctggccaaggagctcgaggaggcgaaggcatcggagcggagcctgcgcgcccggctgaagacgctgaccagcgagctggcattgtacaagaggggcggccgcgggagccggggtcggggccgccctgcgcgcccctcgccctcgcccacaggtggtcgcgcgctccgcttcgaccccacggcctttgtgaaagccaaggaaaggaagcagagagagatccagatgaagcagcagcagcggaaccgcttaggcagtgggggaagcggggacggtccgtccgtctcctggtctcgccagacccagccccctgctgccttgactggccgaggggacgcccctaaccgctcccgaaaccgcagctcctcagtggacagtttccgcagccgctgctcgtctgccagctcctgcagcgatttggaggatttctctgagtcgctctccagagggggtcaccgccgccgtgggaagcctcccagcccaacgccctggagtgggtccaatatgaagtctccccccgtggaacgcagccaccatcagaaatctctggccaactccgggggctgggtccccatcaaagagtacagctcggagcaccaggcggctgacatggccgaaatagacgcacgcctgaaggccttgcaggagtacatgaaccgactggacatgcggtcataacgtggagaaggggtactacccctccatcccccacccacttgctgggtatggtgtggggggtggggccagggtggcctccagccctgcccagtccctgccctggccccgtccctcctgctgcccctggggtctcaggtgtgtgaggccctgaccctgccctctccccaggcagtgcatgctgggagggaggatgtgtgcattttgtaaataaacatatttgccctgggga

SEQ ID NO: 418 - DNA, 1836 bp, Homo sapiens
  source 1..1836: mol_type = genomic DNA
agccttccagcgcctgcgcgccgcaccgcggtggtcgcgggcgcggacgcggacgcctgccccctaaggaagcccattggccagcggatggggccagcaccgcctcgcgccggtggtggaagcacgtgctgggggcgggagcagcaatcgcagccatggcgtcgttactgtggggaggcgacgcaggggcggcggagagcgagcggctgaacagccacttttcaaacctcagccaaccccggaagaacctttggggtattaagagtactgcagtccgaaacatagatggttctattaataacatcaatgaagatgatgaagaagatgtagtggatttggcagctaattcactcttaaacaagttaatccatcaatccttagtagaatccagtcaccgtgtggaagttttacagaaggatcccagctctccactttactcagtaaagacatttgaagagctgcggctaaaggaagagttactaaaaggaatctatgcaatgggatttaataggccatctaaaatccaagagatggctctccctatgatgctggcacatccaccccagaacctcatagcacagagccagtctggaacaggaaagacagcggcatttgtgttggcaatgttaagcagagttaatgccttggaattgttcccacagtgcctctgcctagctcctacttatgaattggctctgcaaactggccgtgtggttgagcagatgggaaaattctgtgtggatgttcaagtgatgtatgccattcgagggaatcgaattcccagaggcaccgacatcactaaacagattataattggcactcctgggactgtcctagattggtgttttaaactaaaattgattgatttgactaagattcgtgtgtttgtcctggatgaagcagatgtgatgattgacactcaaggattctcagatcatagtattcgtattcaaagagctctaccctccgaatgccaaatgctcctcttttcagcaacctttgaggactctgtgtggcactttgctgagcgaatcatccctgaccctaatgttatcaagttacgcaaagaggagctcacactgaacaacatccggcaatattacgtgctgtgtgagcacaggaaagacaaataccaagctctgtgcaacatttatggcagcatcaccattggtcaggccatcatcttctgccagactcgtcgaaacgctaagtggttgaccgtggagatgatacaggatggccaccaggtgtctttgttaagcggggagctgaccgtggagcagcgagcttccatcattcagaggtttcgggatgggaaagagaaggttctcataacaactaatgtttgtgcccgagggattgatgtgaagcaggtcacaattgttgtgaactttgatctccctgtaaaacaaggagaggagccggactatgagacctacctccaccgcatagggcggacggggcgctttgggaaaaaaggccttgccttcaacatgattgaagtagatgagctgccctcgctcatgaaaatccaggaccactttaacagcagtattaagcaactcaacgctgaagacatggatgaaattgaaaagattgactattgaagaaagaactttattgtttgtgcagtatcctagtttatgtgagaatgtctcagtgggttttgaaggtaatttttttatgttgaggctttttcgacgtgaaactgtcacagatggcaaaataaatgtcacggtacttagttttaagacatgaggtctttttgaagccaaattgatgtgaagcttgtgatccttttgaataaaaaaaaggcaagattatttcttattctaa

SEQ ID NO: 419 - DNA, 1479 bp, Homo sapiens
  source 1..1479: mol_type = genomic DNA
gggcgtcttcggctcccaccccggggcgtgggcctgggggtccctcttcactgcgcagccacctctagcccgccgctttcgggactctcagccttcttttcccttccctgagggccggccggcaccacaacggggccaaaggcagtaactcggttgaaaggcgcgccctgggacaggtcagcgggctccgccatgcgcggcacgcatcccgcaggagcgggtgccagagcagggtaggccgggagttagcagcccagccaggccgctggactcgggctaggggcggggccagcgcagggggcgcaggcgcacaccgcctccgcggcagcatggcggacgcagctcctcaactaggcaagaggaagcgcgaattggacgtggaggaggcccacgccgccagcacagaggaaaaggaggcaggagttggaaatggtacctgtgctcctgtccgcttaccgttctccggcttcagactgcagaaggtgctgagggagtctgcgcgggacaaaatcattttcctacacgggaaggtgaatgaggcctctggggatggggatggagaggatgccgttgtgatcctggagaagacgccatttcaggtggaacaggtggctcagctcctgacgggcagccctgagctccagttgcagttctccaatgatatctacagcacctatcacttgttccctccaagacaactgaatgatgtaaagacgaccgtggtttaccctgccacagagaaacacctgcagaagtacctgcgccaggacctccgcctgatccgagagacgggagatgactacaggaatattactttaccccacctggagtcccagagcctcagcatccagtgggtgtataacattctcgacaagaaggctgaagcggaccggattgttttcgagaacccagatccctctgatggttttgtcctcatccctgacctcaagtggaaccaacagcagctcgatgacttgtacttgatcgccatctgccatcgccggggcatcagatccctacgcgaccttactccggagcacttgccgctgctcaggaacatcctccaccaggggcaggaggccatcctgcagcgctaccggatgaagggagaccatctgcgagtatacctgcactacctgccctcctactaccacctgcatgtgcacttcaccgccctgggcttcgaggcccccggctcaggcgtggagcgggcccacctgctggctgaggtgatcgagaacttggagtgtgaccctaggcactaccagcagcgcacgctcaccttcgccctcagggctgacgaccccctgctcaagctcttgcaggaggctcagcaaagctgaattaactcaggcagaagagcacagatgtgtgggattgggggaggagtggggacaagattttttatctccaagtgaattttctaaaaatgtattttataccggcttattcctagtattgaataaactagcgggctca

SEQ ID NO: 420 - DNA, 2788 bp, Homo sapiens
  source 1..2788: mol_type = genomic DNA
acgcggacgcggctggcggctcggtttctgcaaatgcgtgaatgagccggatgccagcctctgtcccctggagcccagcgtgaggaagaggcatgccccatcagccttcagcttgagcccggcggcccccgcccccgccccctgccaccctgcactgccccggctcccccgcggcccccacgctgcagtgcggccgggccccctccccgcaggggccgcccccgccgcccacccctagcgcccgtggtggtggtggtggtggtggtggtggtggcccgggccgcagggccatgaaactacaggccgtgatggagacgctgttgcagcggcagcagcgggcgcgccaggagctggaggcccggcagcagctgccccccgatccccctgctgcaccccccggccgggcccgggctgcccccgacgaggacagagagcccgagagtgcccggatgcagcgggctcagatggccgcactggcagccatgcgggctgcagctgcgggcctgggacacccagccagccccggcggctctgaggatgggcccccaggctcggaggaggaggacgcggcccgggaggggacaccgggctcacccgggcgaggcagagaagggccaggagaggagcactttgaggacatggcctccgacgaggacatgaagcccaaatgggaggaggaggagatggaggaagacctcggggaggatgaggaggaggaggaggaggattacgaggatgaggaggaggaggaggacgaggaggggctgggccccccaggccctgccagcttgggcaccacggcactgttcccccgaaaggcccagccaccccaggccttccgcggcgatggcgttcccagggtgctggggggccaggagcggccggggcctggccctgcccaccccggaggggccgcccacgtagccccgcagctgcagccgcctgaccacggcgactggacttacgaggagcagtttaagcagctctacgaactcgacggggaccccaagaggaaggaattcctggatgacttgttcagcttcatgcagaagcgagggacacctgtgaaccgcatccccatcatggccaaacaggtccttgacctgttcatgctgtacgtgctggtgacggagaagggcggcctcgtggaggtcatcaacaagaagctgtggcgtgagatcaccaagggcctcaacctgcccacgtccatcaccagtgcagccttcaccctgcggacccaatacatgaagtacctgtacccctacgagtgtgagaagcggggcctcagtaaccccaatgagctccaggcagccatagacagcaaccgacgggagggccggcgccagagctttggtggctccctctttgcctactcgccaggcggggcacacggcatgctctcctcacccaagctacccgtgtcctccctgggcctggccgcaagcaccaatggcagctccatcacccccgcccctaagatcaagaaagaggaggactcagccatccccatcacagtccctggccgcctgcctgtgtccctggcgggccaccctgtggtggcagcccaggcagcagctgtgcaagcagcagccgcccaagcagctgtggccgcacaggcagctgccctggaacagctgcgggagaagctggagtctgcagagcctccggagaagaagatggccctggtggccgatgagcagcaacggctgatgcaacgtgcactccagcagaacttcctggccatggcggcccagctgcccatgagcattcggatcaacagccaagcctccgaaagccgccaggactctgctgtgaacctgacgggcaccaacggcagcaacagcatcagcatgtcggtggagatcaacggcatcatgtacacaggagttctgtttgctcagccgccggcccccacgccaacctctgctcccaacaaaggaggcggcggcggcggcggcagcagcagcaacgcaggcggccggggaggaaacaccggaaccagcggcggccaggctgggccagcggggctgtccacaccctccacatctacctcaaataactcgttgccttaaccgcatcactccccacccgccacccaccctggagcccgccggcctgggcagggggtccaggtgggccacacaggggccaggatggcggaagatacgggtggggagggaagatatccagaaaggagccacagctgacgccaaaaagaaaagaaaaaagatatatatatatatatatatatatacacgtatatatataaagagaatttaataaaacaggggaaaaccaaggaacacttgaatttctcaggttttggacattcagagagatgaattgtgagaacagcaaagaaatccatcagaaaaacagaaagaggcagacgtttcccagggcgttcaggcagccctgatggaccgaaggctctggtgtctggtttggccccacagcagtgtgggccgatcctgtttacctcatacatccctgcactgtgtgttttcatttttgtctgctttagttctcttttattttctattcaccacacactcaccactcccagcttctcgtgtccagtgaaacccctgaaccaagatcactgaatttttgtttttttcttgttgctttgggaaatttttttttctctgtagggtttttaagaggtttcgggggttttgttgtgtaaatattctattttattcttggggggatcaaaccttaggaaaaggatatctatatatctatatagctatatatttgtgttccttcagggaaactggtcttg

SEQ ID NO: 421 - DNA, 7853 bp, Homo sapiens
  source 1..7853: mol_type = genomic DNA
gagcgagcagccaagggcgttgggcaggcggacgcagagtcgaggaaccaagcgctgggatcccgcccaggcggtgccgcggtgcccctggtcgctccagccgcggcgggggctgggcctgggggtcggcgctgaggcgggaggggccgcccgggatggagacgttgcggccggtggccacagaaacttgagccgcggcagagaaacctctgctccggtctctgcgtcctcttcccacactcccgtgcgctgctttcggcgtgggccgctgcgctcctagggagtgggggcgcagggggggttggccgcggctgcccgaggccagcccccccggagtgagttacgccactatggcggacggggcaccccggccccagctttaccgcagcgtctcgttcaagctgctggagcgctggagcggcggccccgggctgagggaggaggacacggacacccccggcttgaggcgacgcgcctcgtgccggccgaccacggctgcccggggccagccctctcggcgcgtgtccaagctggcgtctgggcccctggccgcccccgcgcagccgcgcccgctccgcagcctctcgccgtcggttcgccagctctcccggcgcttcgacgcgccgcgtctggacgacggctccgctgggacccgagacggaggcgtcttacccgcggccgcggaagaagcggccgagggcccagcgcgaggagcctggcccagcgtcaccgagatgcgcaagctcttcggcggtcctggctccaggaggcccagcgccgactctgaatccccaggaacgcccagccccgacggtgccgcgtgggagcctccggctcgggagtcgcggcagccaccgacgccaccccctcggacatgcttccccctggcgggtctgcgttcggcgcggcccctgaccgggccggagaccgaagggaggctgcgccggccgcagcagcaacaggagcgggcgcagcgtccagcggatggtttacattcttggcatatcttctcccaaccgcaggccggggcccgggcctcctgctcctcctcctccatcgccgcctcctatcctgtcagccgcagtcgtgctgccagctccagcgaggaggaagaggagggcccgccgcagctgcctggagcccagagtccggcctaccacggcggccactcctcgggcagtgacgacgaccgagacggtgagggcggccaccgctggggagggaggcccgggctcaggcctggaagctccctattggatcaggactgcaggcctgacagtgatgggttaaatctaagcagcatgaactcagcaggggtttctgggagccctgagcccccaacatctccaagagcccctagagaagaaggactccgggagtggggtagtggctctccgccctgcgtcccaggtccccaggagggacttcggcctatgtctgactctgtgggaggagctttccgtgtggccaaggtgagctttccctcgtacctggccagccccgcaggctcccgcggtagcagccgttattccagcacggagaccctcaaggacgacgacctatggtctagtaggggttctgggggctggggcgtgtaccgctcccctagctttggagctggggaagggctcctgcggtcccaggctcgaacccgtgccaaaggacctggaggcacctctagggcattgagggatggaggatttgagcctgaaaagagtcgacagcggaagtccctgtcaaatccagatatcgcctcagagaccctgacgcttctcagtttcctgcgctcagacctttcagagctgagggtccgaaaacctggtgggagctccggggaccgtggaagcaaccccctagatggcagagactcaccatccgcaggtggccctgtggggcaacttgaacccatacccatcccagccccagcatcacctggcacgcgccccacactcaaggacttgacagccactctgcggagagcaaagtcattcacctgctctgagaagcccatggcccgccgcctgccccgcaccagtgctctgaagtccagctcctccgagctcctgctcacaggccctggtgccgaggaggatccgctgcccctcatcgtccaggaccaatatgtgcaggaggcccgccaggtttttgagaagatccagcgcatgggtgcccaacaagatgatggaagcgatgccccccctggaagccctgactgggcaggggatgtgacccgagggcagcggtcccaggaggagctctcaggccctgagtccagtctgacagatgaaggcattggggcagaccctgagcctcctgttgcagcattttgcggcctgggtaccacagggatgtggcgacctctttcctcatcctcggcccagacgaaccaccatggccctgggactgaggacagtctgggcgggtgggccctggtgtcgcctgagacccctcccacaccaggtgccctccgccgacgacgcaaagtcccaccttcaggttctggtgggagcgaattgagcaatggggaggcaggggaggcctacaggtccctgagtgacccaattcctcagcgccaccgggctgccacctctgaagagcctactgggttctctgtggacagcaacctcctgggctcactgagccccaagacagggctccctgccacctcagccatggatgagggcttgaccagtggtcacagtgactggtctgtgggcagtgaagagagcaagggatatcaggaggttattcagagcatagttcaggggcctggcaccctggggcgtgtggtggacgacaggattgctggcaaagcccccaagaagaaatccctgagtgaccccagccgccgtggggagctggctgggcctggattcgagggccctggaggggagcccatccgagaagttgagcccatgctgcctccatccagcagcgagcccatccttgtagagcagcgggcagagccagaagaacctggtgccaccaggagccgggcacagtctgaaagggccctacctgaggctctgcctccccctgccactgcccaccgaaactttcaccttgaccccaagctggctgacattctgtccccgaggctaatccgccgaggctccaagaagcgcccagctcggagtagtcaccaggagcttcggagagacgagggcagtcaggaccagactggcagcctgtctcgggcccggccctcctccagacacgttcgccatgccagtgtgcccgccacatttatgcctattgtggtgcctgagccaccaacttctgttggtccccctgtggctgtgccagaacccataggcttccctacccgagcccatcccacgttgcaggcaccatcgctcgaggacgtcaccaagcagtacatgctgaacctgcactccggtgaggtccctgccccagtgccagtggacatgccctgcttgcctctggctgcaccgccctctgctgaggccaagccccctgaggcagctcggcctgcagatgagcctacccctgccagcaagtgctgcagcaagccacaggtggacatgcggaagcacgtggccatgaccctgctggacacagagcagtcgtatgtggagtcgctgcgcaccctgatgcagggctacatgcagccgctgaagcagccagagaactccgtgctctgtgacccttcactggtggacgagatcttcgaccagatccccgagctcctggagcaccacgagcaattcctggagcaggttcggcactgcatgcagacctggcatgcccagcagaaggtgggagccctgctcgtccagtcgttctccaaggatgtcctagtaaacatctattctgcctatatcgataacttcctcaatgcaaaggatgctgtgcgtgtggccaaggaggcgaggcctgcctttctcaagttcctagagcaaagcatgcgtgagaacaaggagaagcaggcgctgtctgacctcatgatcaagcctgtgcagcggatcccacgctacgagcttctggtgaaggacctcctgaagcatacacctgaggaccacccggaccatccactcctgctggaggcgcagcggaacatcaagcaggtggctgagcgcatcaacaagggtgtgcggagtgccgaggaggcggagcgccatgcccgtgtgctgcaggagatagaggctcacatcgagggcatggaggatctccaggcccctctgcggcggttcctgagacaggagatggtcattgaagtgaaggcgatcggtggcaagaaggaccggtctctcttcctgttcacggacctcatcgtctgcaccactctgaagcgaaagtcaggctccctgcggcgcagctccatgagcctgtacacggcagccagtgtcattgacacagccagcaagtacaagatgctgtggaagctgccgctggaagacgcagacatcatcaaaggggcatcccaagccaccaatcgggagaacatccagaaggccatcagccgccttgatgaggacctcaccaccctgggccaaatgagcaagctctctgagagccttggtttcccccaccagagcctggacgatgcactgcgggacctctcagctgccatgcaccgggacctgtcggagaagcaggcgctgtgctacgcgctttccttcccgccaaccaagctggagctgtgcgccactcggcccgagggcaccgactcctacatttttgagttccctcaccctgacgcccgccttggttttgaacaggccttcgatgaggccaagaggaagctggcatccagcaaaagctgtctagaccctgagttcctgaaggccatccccatcatgaaaacccgcagtggcatgcagttctcctgtgcggctcccaccctgaacagctgcccggagccctcgcctgaggtatgggtctgcaacagcgacggctacgtgggccaggtgtgcctgctgagcctgcgcgccgagccggacgtggaggcctgcatcgccgtctgttccgcccgcatcctctgcatcggggcggtgcccgggctgcagcctcgctgccaccgggagcctcctccgtcgctgaggagtcctccagagacggcaccggagcccgccgggccggagctggacgtcgaggccgctgcagacgaggaagccgcgacgctcgcggagccggggccgcagccctgccttcacatctccattgcaggctcgggcttggagatgacgccgggcctcggcgagggtgacccccgcccagagctggtgccctttgacagtgactctgacgatgagtcttcgcccagcccctcggggacgctgcagagccaggccagccggtccaccatctcctccagctttggcaatgaggagaccccgagttccaaggaggccacggcagagaccaccagctcagaggaggagcaggagccaggcttcctgccactgtctggctcctttgggcctggtggtccctgcggcaccagcccaatggatgggagagcccttcgccgctccagccacggctccttcacccggggcagccttgaggacctgctgagtgtcgaccctgaggcctaccagagctccgtgtggctgggcactgaggatggctgtgtccacgtgtaccagtcctccgacagcatccgtgaccgcaggaacagcatgaagctccagcatgcggcctctgtgacctgcatcttgtatctgaataaccaggtgtttgtgtctctggccaatggagagcttgtggtctaccaaagggaagcaggccatttctgggacccccagaacttcaaatcagtgaccttgggcacccaggggagccccatcaccaagatggtatctgtgggtgggcggctgtggtgtggctgccagaaccgagtccttgtcctgagccctgacacgctgcagctggagcacatgttttacgtgggtcaggattcaagccgctgcgtggcttgcatggtggactccagcctgggtgtgtgggtgacattgaaaggtagtgcccacgtgtgtctctaccatccagacacctttgagcagctggcagaagtagacgtcactcctcccgtgcacaggatgctggcaggctcggatgccatcatccggcagcacaaggctgcctgtctgcgaatcacagcgctgctggtgtgtgaggagctgctgtgggtgggcaccagtgctggtgtcgtcctcaccatgcccacttcgcccggtactgtcagctgcccacgggcaccactcagtcccacaggcctcggccagggacacaccggccacgtccgcttcttggctgcagtccagctgccagatggcttcaacctgctctgcccaaccccaccacctcccccagacacaggccccgagaagctgccatcactggagcaccgggactccccttggcaccgaggccccgcccctgccaggcctaaaatgctggttatcagtggaggtgatggctatgaggacttccgactcagcagtgggggcggcagcagcagtgagactgtgggtcgagacgacagcacaaaccacctcctcctgtggagggtgtgaccctgtctgccgtggcccaggactcgcccgcccacctgccttcagcctgcttgcctctccctagcccacacgcagactttgaccaggagtatccagccaggggcacacatgtgcctgcgtgggctctgccttgtcttcgcggaagcattcctgatggaacacccactggccagccaggccatggcttctcccgaccctctggctgccccggtgcttccagtcatgatcgggtgggggacatgtgggctgaccaggacctctgaccctggagcttctaccaaagacacagctgggtctggaccccacggggctggggagggccatgtgcaatatttggagggttttctggagggcagcaggaaggctggggaattccccatgtacagtatttatgtttctttttagatgtgtaccttcccaagcacttatttatgcagtgacctggtcacctggggtgggggtgatttgaggaaatgacatgaggaaaagaaacctattcctgccctggggaccaccctgggactctaaccaagccttcctggagggacccatgcgcccctgagccccattccattcatacagacacacacgtacgcacactgcatgtccaaggccctaaacattgcccgttgacataaactttccagggccccagcctgatggggctgccctcagtcctctagatcaagatgctgactattagggggcagtgattgccatctggggacctgtcaggctttgtcatttcccagtttgttggtggtgcctttagtggttccctaatttgggaacactgatggggccttggacagggctttctctcaggtaggagaaatgggcccatgatctcctcacagtcgcccccagtccttggccctgcttccctgtgtctcatgcactggcacatatggtcaccttggagggcagacctaggagcccctctgaccactgaatccgtctccacaccccttctgccaagggaagccccttcaggaaggaccccccaaagctgaggggctgaatgtagccttttcaacagagaaggctcccacttgagagcagcctctacctgaccccctggaccacagagagccactctgaccctcagccccctcgcttcttcagctaaaactccaaaggtttggtttcagatggggtttgttttgttctgtttggttttggttttgtttggggtgggtgggtcattgcggtcttagattatgtttctcttgctaccaaacagtcatgtattaactctctttggatgatgaagtttaaagagtcaataaatagaaacaccagatgactgca

SEQ ID NO: 422 - DNA, 4833 bp, Homo sapiens
  source 1..4833: mol_type = genomic DNA
ccgcgggcagcggaaaagaggccgtggggggcctcccagcgctggcagacaccgtgaggctggcagccgccggcacgcacacctagtccgcagtcccgaggaacatgtccgcagccagggcgcggagcagagtcccgggcaggagaaccaagggagggcgtgtgctgtggcggcggcggcagcggcagcggagccgctagtcccctccctcctgggggagcagctgccgccgctgccgccgccgccaccaccatcagcgcgcggggcccggccagagcgagccgggcgagcggcgcgctagggggagggcgggggcggggaggggggtgggcgaagggggcgggagggcgtggggggagggtctcgctctcccgactaccagagcccgagagggagaccctggcggcggcggcggcgcctgacactcggcgcctcctgccgtgctccggggcggcatgtccgaggctggcggggccgggccgggcggctgcggggcaggagccggggcaggggccgggcccggggcgctgcccccgcagcctgcggcgcttccgcccgcgcccccgcagggctccccctgcgccgctgccgccgggggctcgggcgcctgcggtccggcgacggcagtggctgcagcgggcacggccgaaggaccgggaggcggtggctcggcccgaatcgccgtgaagaaagcgcaactacgctccgctccgcgggccaagaaactggagaaactcggagtgtactccgcctgcaaggccgaggagtcttgtaaatgtaatggctggaaaaaccctaacccctcacccactccccccagagccgacctgcagcaaataattgtcagtctaacagaatcctgtcggagttgtagccatgccctagctgctcatgtttcccacctggagaatgtgtcagaggaagaaatgaacagactcctgggaatagtattggatgtggaatatctctttacctgtgtccacaaggaagaagatgcagataccaaacaagtttatttctatctatttaagctcttgagaaagtctattttacaaagaggaaaacctgtggttgaaggctctttggaaaagaaacccccatttgaaaaacctagcattgaacagggtgtgaataactttgtgcagtacaaatttagtcacctgccagcaaaagaaaggcaaacaatagttgagttggcaaaaatgttcctaaaccgcatcaactattggcatctggaggcaccatctcaacgaagactgcgatctcccaatgatgatatttctggatacaaagagaactacacaaggtggctgtgttactgcaacgtgccacagttctgcgacagtctacctcggtacgaaaccacacaggtgtttgggagaacattgcttcgctcggtcttcactgttatgaggcgacaactcctggaacaagcaagacaggaaaaagataaactgcctcttgaaaaacgaactctaatcctcactcatttcccaaaatttctgtccatgctagaagaagaagtatatagtcaaaactctcccatctgggatcaggattttctctcagcctcttccagaaccagccagctaggcatccaaacagttatcaatccacctcctgtggctgggacaatttcatacaattcaacctcatcttcccttgagcagccaaacgcagggagcagcagtcctgcctgcaaagcctcttctggacttgaggcaaacccaggagaaaagaggaaaatgactgattctcatgttctggaggaggccaagaaaccccgagttatgggggatattccgatggaattaatcaacgaggttatgtctaccatcacggaccctgcagcaatgcttggaccagagaccaattttctgtcagcacactcggccagggatgaggcggcaaggttggaagagcgcaggggtgtaattgaatttcacgtggttggcaattccctcaaccagaaaccaaacaagaagatcctgatgtggctggttggcctacagaacgttttctcccaccagctgccccgaatgccaaaagaatacatcacacggctcgtctttgacccgaaacacaaaacccttgctttaattaaagatggccgtgttattggtggtatctgtttccgtatgttcccatctcaaggattcacagagattgtcttctgtgctgtaacctcaaatgagcaagtcaagggctatggaacacacctgatgaatcatttgaaagaatatcacataaagcatgacatcctgaacttcctcacatatgcagatgaatatgcaattggatactttaagaaacagggtttctccaaagaaattaaaatacctaaaaccaaatatgttggctatatcaaggattatgaaggagccactttaatgggatgtgagctaaatccacggatcccgtacacagaattttctgtcatcattaaaaagcagaaggagataattaaaaaactgattgaaagaaaacaggcacaaattcgaaaagtttaccctggactttcatgttttaaagatggagttcgacagattcctatagaaagcattcctggaattagagagacaggctggaaaccgagtggaaaagagaaaagtaaagagcccagagaccctgaccagctttacagcacgctcaagagcatcctccagcaggtgaagagccatcaaagcgcttggcccttcatggaacctgtgaagagaacagaagctccaggatattatgaagttataaggttccccatggatctgaaaaccatgagtgaacgcctcaagaataggtactacgtgtctaagaaattattcatggcagacttacagcgagtctttaccaattgcaaagagtacaacccccctgagagtgaatactacaaatgtgccaatatcctggagaaattcttcttcagtaaaattaaggaagctggattaattgacaagtgattttttttcccctctgcttcttagaaactcaccaagcagtgtgcctaaagcaaggtggtttagttttttacaaagaattggacatgatgtattgaagagacttgtaaatgtaataattagcacttttgaaaaaacaaaaaacctccttttagcttttcagatatgtatttaaattgaagtcataggacatttttattttatggaatagattttaatctatttactactattaaggtaaattttctatggcatgtccattagctatttcatgatagatgattaggggtttcctcaaaacctgtgtgtgaggaaattgcacacagtagcaaaatttggggaaatccataacattttcagaccatgaatgaatgtttccatttttttctaatggaatgtgagagtttacttttattttattctgaaggactttaaggaagggatacatgattttaaaaaagcctgtaagaggtgaaatatgtgatgtttgaagtctctttatagactttttatatatattttttaaaacactcatctagatgaggtgctttgagcagttctgaaaaatgcagttccaggaaagcaactgctttggttcctaaggaagaaattctaaataatgcaaacttttaaaataagcatctaggtttttgataattctgtctacttacaacaaacttgttagtacataaccactattttaataattattttctctacacaaatgtgtaatatcatatttgactttgcttatgcaggccataagttccaaaagataatttccctgcccacaaaggcataaacttgaaaacacatgagattgaatcaacatgctttaataggaaaagatgtatggtctatatatgtatcaatctggtgaatcctcgttctaataaaggttctttttcttttctatgatacacacagccacgctgataatatgcaaatgaacattttcctttatgtctctccagataatgtttattgtctgaggtaaattaaattcccaccagggtttgctgtcagtattttaacacccacattagtatatgcgtccagggtcataaccccctaaaatccatcatgcaaccttattaatctgtcttgggattccagtttagtgcttggatttatttcctgattacactacatagaaaagtgagacatctgccattcccaactctgggaaaaccaactaatatacaaccatataaatgaaggccatcttgatggtctcaacactaatttttatgatgcaaatttatacactgatttttgtaaaggacaaagttttaaaagcgtatttaacttgatgttttctatcagcataaataaaatggtcatgaatagtcattaaaaacagttgccagtgataatctgcatgaaggaaaaagaaccctgcaaatggctattgagttggaagtattgtttttgatatgtaagagatattcagaatgctcacactgaaaatgcctcaactttttaaagtgtaagaaaccaccatgagtggtgtctagatttctaatgaagaatcatgatacagtttggattaagtatcttggactggttttaaacagtgctttgtaccggatctgctgaagcatctgtccagctggtatcctgtgaaagtttgttattttctgagtagacattcttatagagtattgtctttaaaatcagattgtctcttctatattgaaagcatttttatgttttctaatttaaaaattaatattttcttatagatattgtgcaataaagctgaagtagaatgtgtggtttttgcaaatgctttaacagctgataaaaattttacatttgtaaaattaatatattgtactggtacaaaatagttttaaattatattttaaaaagcttccaa

SEQ ID NO: 423 - DNA, 5499 bp, Homo sapiens
  source 1..5499: mol_type = genomic DNA
cgccgcccaggcaaggccgccctgccttgggcgcagcgctgccatggctgggggccgtggggcccccgggcgcggccgggacgagcctccggagagctacccgcaacgacaggaccacgagctacaggccctggaggccatttacggcgcggacttccaagacctgcggccggacgcttgcggaccggtcaaagagccccctgaaatcaatttagttttgtaccctcaaggcctaactggtgaagaagtatatgtaaaagtggatttgagggttaaatgcccacctacctatccagatgtagttcctgaaatagagttaaaaaatgccaaaggtctatcaaatgaaagtgtcaatttgttaaaatctcgcctagaagaactggccaagaaacactgtggggaggtgatgatctttgaactggcttaccacgtgcagtcatttctcagcgagcataacaagccccctcccaagtcttttcatgaagaaatgctggaaaggcgggctcaggaggagcagcagaggctgttggaggccaagcggaaagaagagcaggagcaacgtgaaatcctgcatgagattcagagaaggaaagaagagataaaagaagagaaaaaaaggaaagaaatggctaagcaggaacgtttggaaattgctagtttgtcaaaccaagatcatacctctaagaaggacccaggaggacacagaacggctgccattctacatggaggctctcctgactttgtaggaaatggtaaacatcgggcaaactcctcaggaaggtctaggcgagaacgtcagtattctgtatgtaatagtgaagattctcctggctcttgtgaaattctgtatttcaatatggggagtcctgatcagctcatggtgcacaaagggaaatgtattggcagtgatgaacaacttggaaaattagtctacaatgctttggaaacagccactggtggctttgtcttgttgtatgagtgggtccttcagtggcagaaaaaaatgggtccattccttaccagtcaagaaaaagagaagattgataagtgcaaaaagcagattcaaggaacagaaacagaattcaactcactggtaaaattgagccatccaaatgtagtacgctaccttgcaatgaatctcaaagagcaagacgactccatcgtggtggacattttagtggagcacattagtggggtctctcttgctgcacacctgagccactcaggccccatccctgtgcatcagcttcgcaggtacacagctcagctcctgtcaggccttgattatctgcacagcaattctgtggtgcataaggtcctgagtgcatctaatgtcttggtggatgcagaaggcaccgtcaagattacggactatagcatttctaagcgcctcgcagacatttgcaaggaggatgtgtttgagcaaacccgagttcgttttagtgacaatgctctgccttataaaacggggaagaaaggagatgtttggcgtcttggccttctgctgctgtccctcagccaaggacaggaatgtggagagtaccctgtgaccatccctagtgacttaccagctgactttcaagattttctaaagaaatgtgtgtgcttggatgacaaggaaagatggagtccccagcagttgttgaaacacagctttataaatccccagccaaaaatgcctctagtggaacaaagtcctgaagattctgaaggacaagattatgttgagactgttattcctagcaaccggctacccagtgctgccttctttagtgagacacagagacagttttcccgatacttcattgagtttgaagaattacaacttcttggtaaaggagcttttggagctgtcatcaaggtgcagaacaagttggacggctgctgctacgcagtgaagcgcatccccatcaacccggccagccggcagttccgcaggatcaagggcgaagtgacactgctgtcacggctgcaccatgagaacattgtgcgctactacaacgcctggatcgagcggcacgagcggccggcgggaccggggacgccgcccccggactccgggcccctggccaaggatgaccgagctgcacgcgggcagccggcgagcgacacagacggcctggacagcgtagaggccgccgcgccgccacccatcctcagcagctcggtggagtggagcacttcgggcgagcgctcggccagtgcccgtttccccgccaccggcccgggctccagcgatgacgaggacgacgacgaggacgagcacggtggcgtcttctcccagtccttcctgcctgcttcagattctgaaagtgatattatctttgacaatgaagatgagaacagtaaaagtcagaatcaggatgaagattgcaatgaaaagaatggctgccatgaaagtgagccatcagtgacgactgaggctgtgcactacctatacatccagatggagtactgtgagaagagcactttacgagacaccattgaccagggactgtatcgagacaccgtcagactctggaggctttttcgagagattctggatggattagcttatatccatgagaaaggaatgattcaccgggatttgaagcctgtcaacatttttttggattctgatgaccatgtgaaaataggtgattttggtttggcgacagaccatctagccttttctgctgacagcaaacaagacgatcagacaggagacttgattaagtcagacccttcaggtcacttaactgggatggttggcactgctctctatgtaagcccagaggtccaaggaagcaccaaatctgcatacaaccagaaagtggatctcttcagcctgggaattatcttctttgagatgtcctatcaccccatggtcacggcttcagaaaggatctttgttctcaaccaactcagagatcccacttcgcctaagtttccagaagactttgacgatggagagcatgcaaagcagaaatcagtcatctcctggctgttgaaccacgatccagcaaaacggcccacagccacagaactgctcaagagtgagctgctgcccccaccccagatggaggagtcagagctgcatgaagtgctgcaccacacgctgaccaacgtggatgggaaggcctaccgcaccatgatggcccagatcttctcgcagcgcatctcccctgccatcgattacacctatgacagcgacatactgaagggcaacttctcaatccgtacagccaagatgcagcagcatgtgtgtgaaaccatcatccgcatctttaaaagacatggagctgttcagttgtgtactccactactgcttccccgaaacagacaaatatatgagcacaacgaagctgccctattcatggaccacagcgggatgctggtgatgcttccttttgacctgcggatcccttttgcaagatatgtggcaagaaataatatattgaatttaaaacgatactgcatagaacgtgtgttcaggccgcgcaagttagatcgatttcatcccaaagaacttctggagtgtgcatttgatattgtcacttctaccaccaacagctttctgcccactgctgaaattatctacactatctatgaaatcatccaagagtttccagcacttcaggaaagaaattacagtatttatttgaaccataccatgttattgaaagcaatactcttacactgtgggatcccagaagataaactcagtcaagtctacattattctgtatgatgctgtgacagagaagctgacgaggagagaagtggaagctaaattttgtaatctgtctttgtcttctaatagtctgtgtcgactctacaagtttattgaacagaagggagatttgcaagatcttatgccaacaataaattcattaataaaacagaaaacaggtattgcacagttggtgaagtatggcttaaaagacctagaggaggttgttggactgttgaagaaactcggcatcaagttacaggtcttgatcaatttgggcttggtttacaaggtgcagcagcacaatggaatcatcttccagtttgtggctttcatcaaacgaaggcaaagggctgtacctgaaatcctcgcagctggaggcagatatgacctgctgattccccagtttagagggccacaagctctggggccagttcccactgccattggggtcagcatagctatagacaagatatctgctgctgtcctcaacatggaggaatctgttacaataagctcttgtgacctcctggttgtaagtgttggccagatgtctatgtccagggccatcaacctaacccagaaactctggacagcaggcatcacagcagaaatcatgtacgactggtcacagtcccaagaggaattacaagagtactgcagacatcatgaaatcacctatgtggcccttgtctcggataaagaaggaagccatgtcaaggttaagtctttcgagaaggaaaggcagacagagaagcgtgtgctggagactgaacttgtggaccatgtactgcagaaactgaggactaaagtcactgatgaaaggaatggcagagaagcttccgataatcttgcagtgcaaaatctgaaggggtcattttctaatgcttcaggtttgtttgaaatccatggagcaacagtggttcccattgtgagtgtgctagccccggagaagctgtcagccagcactaggaggcgctatgaaactcaggtacaaactcgacttcagacctcccttgccaacttacatcagaaaagcagtgaaattgaaattctggctgtggatctacccaaagaaacaatattacagtttttatcattagagtgggatgctgatgaacaggcatttaacacaactgtgaagcagctgctgtcacgcctgccaaagcaaagatacctcaaattagtctgtgatgaaatttataacatcaaagtagaaaaaaaggtgtctgtgctatttctgtacagctatagagatgactactacagaatcttattttaaccctaaagaactgtcgttaacctcattcaaacagacagaggcttatactggaataatggaatgttgtacattcatcataatttaaaattaaattctaagaagaggctgggtgcagtggctcacacctttaatcccagcactttgggaagccaaggcaggaagactgcttgaaaccaggagtttgagaccagcctgagcaacaaagcaagaccccatctctataaaaactaaaaaaattagttgggcatggtggcacatgcctgtagtcccagctactccagaggctgagatggatcatctgagcctcaggaggttgaggctgcagtgagctgtgactgcgccactgcactccagtctgggacaacagagcaagaccctgtcttaaaaaaaaaaagaaaaaaaaaatttttttctaagaagctgtcctacaaagttgagctttgttagtttttcatgtgtaatatattataaatttatcttttgggatataataaatgctttcatat

SEQ ID NO: 424 - DNA, 10459 bp, Homo sapiens
  source 1..10459: mol_type = genomic DNA
gagtgcagctggcaccatgggtgtgctccagagcaacttctgcttgctctgagccccctgccctgcctcccctttcaccatgtttcctctgacaagattttaagtacagcaattcaagaagatttctcctcctaaacgacatttatctgaagtctattgcctcttgattgctggaaaagaatcttaaaatcatttcaaaagtaacttataaacaaacttattaaaagtgatgaaaggagcattgaaattaattagcactaatttttcactgtgccaaagtgtgcagtgtccttcagaggaaacaataacagatctggtgagtgtgccatgccagtggggagaattgaatgtccctcatctccctctttccctagggacattagtcatgagtgccgagtgtgcggggtcacagaagtgggtctttctgcatatgcaaagcacatttctggccagttgcacaaagataacgttgatgcccaggaaagagaagatgatggaaaaggagaggaagaggaagaagattattttgacaaggaactcattcagttaataaaacaaaggaaagaacaaagtcgacaagatgaaccttccaatagcaaccaagaaataaactctgatgacagacgaccccaatggagacgagaagaccgaattccttaccaagacagagagagttacagtcagcctgcatggcatcatcgtggacctccacagcgggattggaaatgggaaaaagatggctttaataatactaggaaaaacagctttccacattctttgaggaatggtggtggaccaagaggacgttccgggtggcataagggtgttgcaggaggctcctcgacttggtttcacaaccatagtaattctggaggtggttggctttcaaatagtggagcagtagattggaatcataatggtacaggaaggaattccagttggctttctgaaggaacaggtggcttttccagttggcatatgaacaacagtaacggaaactggaaatccagtgtacgtagtacaaataattggaattacagtggccctggagacaaatttcaaccaggcagaaacagaaattctaactgtcaaatggaagacatgactatgctatggaacaagaaatctaataagtcaaacaaatacagtcacgacagatataattggcagcggcaagaaaatgacaaacttggtacagttgccacatatagaggtccttctgaaggatttacaagtgataaatttccttcagaaggcttactcgacttcaattttgagcagctggaaagccaaaccactaaacaagcagacactgctacttccaaagttagtggaaagaatggcagtgcggcaagggaaaagcctcgtcgctggacgccttacccttctcagaagactctggatttacagtcgggattgaaagacatcactggtaacaagtcagaaatgatagagaaacctctctttgattttagcttgataactacaggaatacaggagccccaaactgatgaaacacgtaattccccaacacagaaaacacaaaaagaaatacatactggatctcttaatcacaaggcctcttctgattccgctgcttccttcgaggtggtgagacagtgccccactgcagaaaaacctgaacaagagcatacaccaaataaaatgccatcattgaaatccccactccttccatgtccagccactaaatcattgtctcaaaagcaagatccaaagaatatctcaaaaaacaccaaaacaaattttttttcccctggagaacactcaaatccctcgaacaagcccactgtggaagataaccatggtccttacatatccaaactgcgtagttcatgtcctcatgttttaaaagggaataaaagtacatttggctctcaaaagcaatctggtgataatttaaatgatactttacgaaaggccaaagaggtgctacagtgtcatgagtcattgcaaaatccacttcttagcacttctaaaagtaccaggaactatgcaaaagcaagtagaaatgtagaagaatctgaaaaagggtctttgaaaattgagtttcaagtgcacgcactagaagatgaaagtgatggagagacatctgacacggaaaagcatggaacaaaaattggaaccctaggttctgcaactacagaattgttatctggcagcactcgaactgctgatgagaaagaggaggatgaccgcatcctgaagacttctagagagctatccacttccccatgtaatcccatagttcgccagaaagaatctgaattacaaatgacatctgcagccagtccacaccctggcttattgctagacttgaaaacctctctagaagatgcacaggttgatgactctattaaatctcatgtatcttatgaaacagaaggctttgagagtgctagcttggatgcagagcttcaaaaaagtgacatcagtcagccctcgggccctctcctgcctgaactaagtaagcttggctttcctgcctcacttcagagggatctaacccggcacattagtttgaagagcaaaactggagtacaccttcctgagccaaacctcaatagtgcccgccgcattcgcaatattagcggtcaccgaaagagtgagacagagaaggagtctgggctcaagccaaccctacggcagattctaaatgcatctcggagaaatgtcaactgggaacaggtcattcagcaagtaaccaagaaaaagcaagagctgggcaaaggcttacccaggtttggcatagaaatggtaccccttgttcaaaatgaacaagaagccttagatttggatggggaacctgatctgtccagtctagaaggattccagtgggaaggtgtttccatttcctcgtcccctggcttggcaagaaagcgaagcctttctgagagcagcgtgatcatggacagagctccttctgtgtatagcttcttcagtgaggaaggtacaggcaaagaaaatgagccccagcagatggtttcacctagtaactcattgagggctggacagagccagaaagcaaccatgcacctcaaacaagaagtgacacctcgggctgcctccctccgaacaggtgaaagggctgaaaatgttgctacccaaaggcgacatagtgcacaattatcctctgaccatataatacctttgatgcatttggcaaaagacttgaacagccaggagaggtctataccaccgtcagagaatcagaattcccaggagagtaatggagagggaaactgtctgtcatcaagcgcatcctcagcccttgcgatctccagtttagcggatgcagccacagatagtagctgtacctctggtgctgaacaaaatgatggccaaagtattagaaagaaacgaagagccactggagatggatcttctcctgaactcccaagtcttgagagaaaaaataaaagaaggaaaattaaaggaaaaaaagaacgttctcaggttgaccagctgctgaatatttctttaagggaggaagaacttagtaagtcattgcagtgcatggataacaatcttctgcaagcccgtgcagcccttcagacagcttatgtggaagttcagaggctacttatgctcaagcagcagataactatggagatgagtgcactgaggacccatagaatacagattctacagggattacaagaaacatatgaaccttctgagcacccagaccaggttccctgtagcctcacacgagaacgaaggaacagtagatctcaaacatccattgatgccgcactgctgcccactccctttttcccactttttctggagcctccatcttcccatgtgtctccatcacccaccggagcctctcttcaaataaccacgtctcctactttccaaacccatggcagtgtccctgctccagactcatcagttcagattaaacaagagcccatgtctcctgaacaagatgagaatgtgaatgctgtgccaccaagctctgcctgcaatgtgtccaaggaattactggaagctaatagagagatcagtgacagttgtccagtttatccagtcatcactgctagattgtccttaccagagtcaacagaaagtttccatgagcctagccaagaactgaagttttctgtggagcaaagaaataccagaaacagagaaaactctccctcttcccaatcagctggtctttctagcataaataaagaaggggaagagccaaccaaaggcaatagtgggtctgaagcctgtaccagttcttttctaagattgtcttttgcttcagaaacccctttggagaaggaaccccactctccagctgaccagcctgaacaacaggcagaatccactttgacatcagctgagactaggggaagcaagaaaaagaagaaactccggaagaagaaaagtctacgggctgcccatgttcctgagaatagtgacactgaacaggatgttttgactgttaaacctgtaaggaaagtaaaagctggaaagttaattaaaggggggaaagtaacaacctccacttgggaagacagcaggactggtcgggagcaggagagtgtcagagatgagccagatagtgactcgtctctggaagtcctagaaattcctaatcctcagttagaagtagtagccattgattcttcagaatcaggagaagagaaaccagacagcccatctaaaaaggatatttggaactctacagagcaaaacccactagaaacgtctcgttctgggtgtgatgaagttagctctaccagtgaaattggcactcgctataaagatggcatccctgtaagtgtggcagaaactcagactgtgatctcctccataaaaggatcaaagaattcttcagaaatatcttcagagccaggagatgatgatgaacccacagaaggaagctttgagggacaccaagctgccgtaaatgcaattcagatatttgggaacttgctatatacctgttcagcagataaaactgttcgggtttataatctggtgagtcggaaatgtattggtgtctttgagggtcatacctccaaagttaactgcctcctggttactcagacctccgggaagaatgctgccctttacaccgggtccagtgaccataccatccgctgctataatgttaagagccgagagtgtgtggagcagttacagctggaagaccgggtcctctgcctccacagtagatggcgaatcctctatgcgggactggcaaatggcactgtggtcaccttcaacataaagaacaacaaacgacttgagatctttgaatgccatggccctcgggcagtcagctgtcttgctacagctcaggaaggtgcccgaaaactgctggtcgtggggtcttatgactgcacaattagtgtacgcgatgcccggaatggactgctcctcagaactctggagggccatagcaaaaccattctttgcatgaaggtggtgaatgatctcgtgttcagtggctccagtgatcagtcagtccatgctcacaacattcacactggtgagctcgtgcggatctataaaggtcacaatcatgcagtgactgtggtgaatatcctaggaaaagtgatggtgactgcttgcctggataaatttgttcgtgtctatgaattacagtctcatgatcgattacaagtttatggaggacacaaagacatgattatgtgtatgaccatccataaaagcatgatttacactggctgttatgatggcagtattcaggccgtgaggcttaatctgatgcagaattaccgctgttggtggcatggttgctctctgatatttggcgttgtagatcatttaaaacaacacttgctgaccgaccacactaatcccaacttccagactctgaaatgtcgctggaagaactgcgatgcttttttcactgctaggaaaggatccaaacaggatgctgcaggacatattgaacgacatgctgaagatgacagcaaaattgattcatgaagttttttgcctcccacgttgggaagtcattagttgaactattttcacattggccccccacacaggccactctcttccctttcttggtgaagtaaggaaggagaaagtggttactagccaggcatacccctagcataagtctgggcagctctatgggatgataaattacacttttaagttcttgctggaggttttaaatagatttagacaaatgttaaggaaccatacttctctgggacagcatggcatatagtgatatatgctatttgcgttctccagatgtttattgaagatacagatcctaattggttacccagtttgaccctaatcatatgtatattttattgatttcagtttgcaatttttaatttatgttcttatgatggtttaaacctatagtcaggcttttaagtacaagtttgtttaagtgccagactttgaggatcagttttaatttctccatttgtaatagctgggtatttaaactggaagcaaatagttttctttcttaacaattatgtgcagtgtgtgtcactgttttcttgctttatagatagagctggctttaagtgctaaaggacacagtagatttttgacaaacagtggctgctctgctgactatcttttaggaattcaggaagcaaatcacatagtgacaagtccttacagacaccacttctagtaaatctctgtaaatgtggatagaaagctcagtgtgaggcagtgcgtagacctaacgtctacctttacatctgctgttgaacctgggcactacctgttacagatcctgtcaggctgttgaactggaggtgtacctttatcttcctttctagtgtctgaccctgcaagcctaatgttggtttgaacccttttggtttgttcagttgccagcctccatctctcccactgtatggccgtgcctagaccgatggcagccatcgaatattcctctgggctcacggggtgttttccacccccctgcagcaactaagatggtgggggagagggggttagaataaagcatctgaatacagttttcaggacctcaagcagacttcctagagacttgtttctgagacagttctttgccttcacttccctgctagctgggaaagaagagtggagcagagactctgcctggccactgagaacagccaaattcacaaaccctcagtggggctttgtttttggattttctccggactcatcagtaaacctgtagaagtgtcgctttccagccttttgtttctggatcctcaaaactcagaacgtggccgggcgtggtggctcacgcctgtaatcccagcactttgggaggctgaggcaggcagatcacctgaggctaggagttgcagaccagcctggccaacatggcaaaaccccgtctctactaaaaatacaaaaagccgggcgtggtgggcgcctgtaatcccagctgctcaggaggctgaggcaggagaatcgcttgaacccgggaggcagagattgcagtaagctgagatcgtgccactgcactccagcctggtgacagagtgagactccgtctcaaaaaaaaaaaaaaaaactcagcttcttcagagagataaaattgggggaggagcccagggccacataccaagctttgggacatggtgcctcatgctctctgggattgcagaccatccaggtctgtcttcgcccctgttagtgcacatatatccactcacatgtcttccctcaggctatcgggcagggggacttcaccagggggtttatggataggcttcaagagggtctgtgagcccccagaaattgtgtgtgagactgagtatgtgttcttttttccaggaaaggctccagtggttcttacttgatccaaaaaatgtcaagaattaatctaggaggccgggcctggtggctcacacctgtaatcccagctctttgggaggccgaggcgggtggatcactcaaggtcaggcatttgagaccagcctggccaacatagtgaaaccccgtctctattaaaaatacaaaaattagctgggtgtggtggtatgtgcctgtagtctcagctactcaggaggctgagacaggagaatcacttgaaccctggaggtagaagttgcagtgagccaagatcatactactgcactccagcctgggcgacaagagtgaaactccacctcaaaaaaaaaaaaaaaagagttaatctaggagataatgaatggcctagtactagataatatatggccccacaagctcttgacttctgtccttggggaaagccattttgttaaccacactagtgagatttacatgatgcttaatggagaacagagaagatcttgttgcaaaaggtgtattaaatatttgtgctgtttctgtatgagattgagaagcttttcccacctctcacccctatttcctataaggatatccagagaagccaaactgttctgtgggtttgggaatggtcatttcccgggaaaatgcatctggatcgatgactaaacctggcccttttctctgggctgtagtgaagccgcattttcacgctggctggcagtgtgctgagagcctcgaatgctctgcggcgtagtgcccttctgccctgcctgacgatgtatcgaaaagatgagagtgaaggagactttgtgcagcaggaaacgggtaggtgaggtgttgggcagttgtgggaacttctgagagtattacagagtggtagaatcggtaagaactctgatttggacttcgctttggtggaactgtgtgcctatacctgcctgtgtgtgtgcaagtgtgcaggttcctttgtatgtatgtgtacgtgtgggaacctgtgtttgtcatatttttcttcatttcacaaaggctttttttgaagcagtggcagtatgcctttgtttcaagaacacatgaaattcttttaacaccagattagtgtgttaccccaaatgaacggttctagccctctattaagaaataaagggaccataagcattttggctgcttatggctgtgtgttactacttacaagagtcttgaaaattatacagaactttgccttctttttttaatgtcttccacaatgttgtgactgattataaccctgtttcccctcagagaagagctatggctcagggatctgtgttgactctggcatttagtggctttgtgaaggaaagaaaccattaaatgacctgacaaaaactgactcatgtctttaaagtagttgaagccacttttagaatgttactctcggttgcttttgtctaattctaatggcttaaagccaagaaaaccatagtataaatctttttgtgtacctatgctagtgtttaaatggcagttcgttgtgataaagtatcagtcacttcaagttttctgtgaaagtttttaattaggttaaaaataattttggcatacgtctctactcagtttataaagcagttccacaccatgcaaacaaaactctaacagcaaaggttatcttgacctgatgttacttgaatctgagagaaagtcattacttactactgcactcctgcttttgtgggaaaaattttcttcttccccagaagagttaacagttgagtgttcagctcctgacttacctttaatttagaggcaatattattactgtttaagtgattatttgcttaacacaggttttattttgtctttttgctggtagattatacaagggacaactttagtgatgaggcatgtggatgatttggtgggagtaggtatatacttagtggaatggtttattttatggaagagaattcattggaggtgagattgaagtatattgtgaagtgggatttgaacagcacatatgctctggtttgctcaaataactgcagtttatgcttacatctaaattttgtttctgttacctaaacgggagcttctagaattacgaaggccatacctgccacatttataaaataatggttttatccctgcccccaaatcatcaggttcctcgggtttaagagaagtggtctaatagacaggaatagaagttgtggtggaggtgatttgggatagactaggtttccttatgcaagtggatatgagctcctcatagaaaccagacctactgtattagacagtaacctctaacctcacctccaagcccaagtatatggccctgctgggttacctggtgactacatttcccagattcactctaaattcaaggtagtgacccaaataaattgggaaaggagggggtcaaggaggaaaagctgttgaaaatctttctcctatttaagagaaatatatgccctagagctgctccagcacccttggtttctgatttttttaatattgaatatggattagaagaatgaaatcagatgacacctgactgcaaaaatgtttataagcaaatagccttcttacattttggtataaagctgtgaacttcgtaactttgtaaagcaagatataaagcaaatacaagaggaaaataaagtacttttactaattg

SEQ ID NO: 425 - DNA, 1078 bp, Homo sapiens
  source 1..1078: mol_type = genomic DNA
aggcggtggggcccacagccatggcggagcctgtgcaggaggagctctcggtcctggccgcgattttctgcaggccccacgagtgggaggtgctgagccgctcagagacagatgggaccgtgttcagaattcacacaaaagctgaaggatttatggatgtggatatacctctggaattggtgttccatttgccagtcaattatccttcatgtctacctggtatctcgattaactctgaacagttgaccagggcccagtgtgtgactgtgaaagagaatttacttgagcaagcagagagccttttgtcggagcctatggttcatgagctggttctctggattcagcagaatctcaggcatatcctcagccaaccagaaactggcagtggcagtgaaaagtgtactttttcaacaagcacgaccatggatgatggattgtggataactcttttgcatttagatcacatgagagcaaagactaaatatgtcaaaattgtggagaagtgggcttcagatttaaggctgacaggaagactgatgttcatgggtaaaataatactgattttactacagggagacagaaacaacctcaaggtgccaaaaagttaaatgtttctggcatttgaagtcaaagagtattcagcgttggatgaattacaaaaggaatttgaaactgcaggacttaagaagcttttctccgaatttgtacttgctctggtaaaatgaaatggaagacaggaatcttttagtaaaatagcagtgttttttgttgtttttgcattggatttggggagtggttaattgaaatagtcaattttaaagtttctctgaagcaaaatgataggcatcattctaacttcaggaacaaaagccagttctgttttatgaaatattaaacatgaagaaaacttgtatattctaatgtttgccaggaaaggctaggttcagtagatgagacattatttaaaagataaatttaaaaagatggtaaatgaacacttgtttttatagacaatatttgtttgaaactatgtaattttctggctaattttcttgtaattaaatgattttttaaaaaa

SEQ ID NO: 426 - DNA, 5287 bp, Homo sapiens
  source 1..5287: mol_type = genomic DNA
ccgcgactgcaagcttcggtagtcctctccgctgctgtcgccaggagtcacttcacgagaagccaggtcacaaccgtcggcccttgtctggaaaagtaaaagtggatcctgccacgttcggagctccctggcgcctcgcccggctggagctagagaactcgtcctgtggcggcccccggcgtggggcgggacagcggccccctggagggggcagtcccgggagaacctgcggcggccggagcggtaaaaataagtgactaaagaagcagacctgggaatcacctaacatgtcgaggaggagatttgattgccgaagtatttcaggcctactaactacaactcctcaaattccaataaaaatggaaaactttaataatttctatatacttacatctaaagagctagggagaggaaaatttgctgtggttagacaatgtatatcaaaatctactggccaagaatatgctgcaaaatttctaaaaaagagaagaagaggacaggattgtcgagcagaaattttacacgagattgctgtgcttgaattggcaaagtcttgtccccgtgttattaatcttcatgaggtctatgaaaatacaagtgaaatcattttgatattggaatatgctgcaggtggagaaattttcagcctgtgtttacctgagttggctgaaatggtttctgaaaatgatgttatcagactcattaaacaaatacttgaaggagtttattatctacatcagaataacattgtacaccttgatttaaagccacagaatatattactgagcagcatataccctctcggggacattaaaatagtagattttggaatgtctcgaaaaatagggcatgcgtgtgaacttcgggaaatcatgggaacaccagaatatttagctccagaaatcctgaactatgatcccattaccacagcaacagatatgtggaatattggtataatagcatatatgttgttaactcacacatcaccatttgtgggagaagataatcaagaaacatacctcaatatttctcaagttaatgtagattattcggaagaaactttttcatcagtttcacagctggccacagactttattcagagccttttagtaaaaaatccagagaaaagaccaacagcagagatatgcctttctcattcttggctacagcagtgggactttgaaaacttgtttcaccctgaagaaacttccagttcctctcaaactcaggatcattctgtaaggtcctctgaagacaagacttctaaatcctcctgtaatggaacctgtggtgatagagaagacaaagagaatatcccagaggatagcagcatggtttccaaaagatttcgtttcgatgactcattacccaatccccatgaacttgtttcagatttgctctgttagcacttttttctttgactcatttggactgaatttgaaattttatatccactccagtgagattatgatttgtagcttcatatatgacatgtttatattgtaaatgcacttttccatggaataatttagggaagtgttttaatgttaaattactagttgctagcatgttatgatttcatatcctgagatagctctgcagataagaaaatatttaaatatatgacaaaaagtaaaattgtacatgtgagtttacatgttaatgaaataattcaacttcaaatgaacttaccagaatgttttgcatatcaacaaaaaaagtggcttgagttttattatagttggtgtaaactgaacacagtgaagacattggaatttaataggttctctctctaaggtgactcttataccatgcctctatcaacataatttgtttaggaaagcagtatgaagtttaagccaaaataatttctactttatagatgctcaagagacattttacaattgaaaatgtctttcaattacaaatattttgaaacttcgtaagattttcattctctgtggtctgttatatgagagagatcctttaactagagcaaagagggagttagaaacctgatcagggatattctttacaagttggagcagaggaaagagtagcatgccttcgtattttaacgcaaatgtctttttcctcctcccaacctacttgagatctgataaggtctggaagatggagatatttggtatgcaagtgtagagttttttaatcctccagaatttctagagtagaagatacttaggtatagttaaatattctgtatttttagtcaaacatatttattaattgaatatagaagaaaatgttgacacactcagacagcttactgaattttagatgtcttctgcatcttagaatacaagccagtcattcagagttctaaaagtatgcataaaaaattacagcaccggtaggtctattaacacagtgcccgagtcagcggtagcaagactgatgtgatcataaaacatgacatcaggctcgtctgaagttcttgtgtgaaattcctagtgagtgaggaggctcagcttaaagccatctgcagagtggcccctcattgtggtcttttgctgggaccaatgcaagagactagggagagcaaaatgtttgcttatggctagagactatatccagccctaatgatggggaaagttagtccttttcgggtaatcttttatgaattttcacctgatgaccgttatattggtctgttatcatgttacgataactgtgatctcatgaccatgttgctgtatcagaagaaatagtttgacaaatggtaacaacaacctgatgttccccctttagacctttaacttctcaaaattttggtaagtttccaaattctttaataataacttaaaactttttgaataactatcaggtcactttatttgaccacatggtgaattcctttaatgtcttcagcatttgttaaggaaaagttttctctacttgtgtgtgtatgtgtgcacatgtgtgtatgtacaggtgtatgtatatatctatagatagatacaatacattctttagacacttttcaagattctttgctgtggtatattgtgctcaactcaggtgccaaaggagctttttttttttttttttttttttgagatggagttttgctctgtctctcaggctggagtgcagtggcatgatctcagctcacggcaacctctgcctcccgggttcaagcaattctcctgtctcagcctcctgagtagttgggattacaggcgcatgccaccgtgcccagctaatttttgtatttttagtagagacggggtttcaccatgttggccaggctggtcacaaactcctgacttcaagtgatccacccgcctcggcctcccaaagtgctgggattacaggcgtgagccactgcgcccccgcccaggagctcttttcttatgacatataaattatgacatttatattctttatatgactttatgttctcttcttatgacatttaaattctttaagtagtttgttggtccaataaactagacgttgtataatctaaattgagcccttgtatatctaaaactgatgagttgtttctaaattgttgattgtccatttacttgcctttggtattaagataatgcaagtaaagtttagtaagtcattggataatgaaatgattatgtttctgaagaccatattatatttttaatttttagaggaatcatgccatcccccaaaaaatcaagaaatatttgaattttaaattataagttcatttgttaaaagacatttttacaaatgtctgaaaatcttaaaatactttacatctacctttaagtagtagaatacagagctgtaaatttccatgccttttttcctgatattaagttttatagtaaaaaagcaactagtgattgcacaaagaatataaaaatccactctttttacaaaggtgtgaatttaaataacgttattgattggaatatgaaaatagaccaatcatttaagagctttttagcaaatgattcaattcttactctttttctcccaagattgaaaagcataatgtatttctctaaagtaggaatctagagagcccctgtgagtggacaaatgtcagtaacacttgaacacatgagaagataagtgttatgttgtgataatttaaagttaaatttgctttttgggtaggatccctaaatagatgggatttttaaatagatgatatatagatgacaattgcaattgtcattttaattattttccctacagtaaagaacctagctctgagcagtgaaattgtaatggcactttaaaggaagtaagccgttaactgttctctagtggagcgatctccaactgttttggcactagggacgggttttgtggaagaaaatttttccacaggactgggggtttagggggatggtttcaggatgattcaagtacattacatttatcattagattctcataaggagcatgcaacctagatctcttgcacgtgtggttcacagcaggattcgagctcctttgagaatctaatgccatggctgatctaacaggaaactgagctcaggcagtaatgcttggcaccgccccccaccttctatgcagcccggtcgtggcctggggactggggacccctgctctagtcagtaataaggtacttgtgccagaatataaatcaacacattgcttcctttatcaaagaagtcttgttatttaaaaaaagtcaactgagccagtatgattagtgatgtaattgattttcattctggcacaagcctctttcattctggacagctcacaaatagttaatggaccatgctttgaatagccttcctctaagcaacatttataaatactgatattttagaactgtttacatttcttctgtttatttttgaattttcagtttgatatcttgtccttattcattgttgtataaacaactgtactttaatttcaagtagtattaaaagtatttcacttcagtttggggggattattatcaatttataattttataaaagtattttaaagaataattgtaaattttccataaattacaacttcctgccatattttattaaataataatcttgcttaaggcatatagacagacattattatgagtattccagtaaaaaaaatctacatcaacttgaccattctggctaaaaattaaaaagcacttttttatatctgtggttgtcatttgtttcaaagcatttctaaatttattgttcttaaaagtatgtctgcatgttctagcctttgacctaggtcatctatgaaccctctttgtgtctaataaacatatctgtaaaggcatataaatctgaaaacaa

SEQ ID NO: 427 - DNA, 4064 bp, Homo sapiens
  source 1..4064: mol_type = genomic DNA
gtgctcagcggcagccactatggaggccgccaggaccgctgtactccgggtgaagcggaagcgcagtgcggagccggcggaggctcttgtgctcgcttgtaaacgcctccggagcgacgcggtcgagtcagcggcacagaagacgtcggagggtttggagagagcggcggagaataatgtcttccacttggtggccactgtgtgctcccaggaggaaccagtccagcctctcctgcgggaagttctgcgcccgtcacgggacagccagcagcgtgtccgccgtaatctccgcgcctcggctcgggaggtccggcaggagggccgctaccgggtgctttccagccgccgatccttggggaccacctcgagcggccaggagtccgagtacacgccggggaacccagaagccgccgggaactcgggctttcagttgttagaccttgtccacgaggagggagaacctgaagccgcctctgcaggctcctgcaaaacatctgacccagatgtgatcctctgcaattctgtagagttgatccgtgagcgattgactgtgtctgaggatggaccaggagtcaggcgccaggaagaacaaaaacacgatgactatgtgtatgacatttactacttggagacggccactccaggctggattgagaacatcctctccgtgcagccctacagccaagaatgggagctggtgaatgatgatcaagaaccagaggacatttacgacgatgaagatgacgagaacagtgagaataactggcgcaatgagtacccagaggaggagagcagtgatggagatgaggattccagaggctctgctgactacaacagcctgagtgaggaggaaagaggcagcagcagacagcggatgtggagcaagtaccctctggatgtgcagaaggagttcggctatgacagcccccacgacctggattcagactgatggtcttgtgatgtccatgaggttctgccacatgcccttgagggctctgagtccagagttaactgccctgctgacatcctgttaggtttcctagcttaacatgtggaaggaaaagcatatcaagcatatcgggcggcaccatcccaccacagtgaaaacttatgttaggggagtgagtcttttccacttacagtaggacccctttgcctcaatcaaaagtgaccctacagtttgaaagaaaaaaaaacgttgaaaaaaggaaggtttctttagctttagcttcttggcccaggaatttttcctggcattcaggttctgtgctgaaaccacaagggagggggaggttcccatttcattagcagtaagcttctgctgtgccataccaccaggctgcctgcctctaggaaaaccctgttccttttgatagaatctaaaaggggtaccagtgggtcccttgtagcaatacagactggatagtaatggccattagggcagaaagtagtctgagcagtgggagattttagttaacagctatttctgcttccaaactctgataacggttgtgaaattactgactgacttcctttggcagtggggccaagaaacaatatatatgaatgtgatacatgtgtttagtaaaatctagctttgaacatggaagaaagtaattctttgaaaaccttttaaatctgaatatctaaaacagggagcggtagtgaaatagaaggttcagcattgattataaataccaaggacttaaggcaagggaggaaaaacaaagtaccttctgaacttagctttccactgagtaatgtttactcttcacagcacccaccacaaaaacaaactactatcaacaggatcaattttattaacaacttgtatctcttctaagcagactctgtccgtatgcctttccaaaccatagctgccttaactgactgccttggtgtttattctagcgtaacattgtccagtagaactatctgcagtgatgatatgttctgtgtctgcactgtgtagtagtagacacgggtggctgctgagcacttgaaatgtgattagcgcaactgagaaactgagcttttaattttatttcattttaatgtaattagctacacgtggctagtagctgttgcagcggacaccacaggtctaaggaaacaacacagaacattcagctaggggtgtaccctcatagcctgtgagtgtctcttactcactgtcatgggggaaggtgagttacacagggaggtaccttcttgccgcctcttttaggatttcctaagtatctctccttcatcctacctgccatcattctttgactttatgtccattttctaaacctttgcctacacttgctcttatctacatggagttgttcaacctgccgaagtgattaaattctgtgtacacaggccgtatatattgcagctaattaaaacaacaaacatcctaggcatgcacaaaggtataattcaccgttataacaggcagcaacttgtatgtctaatattagacatcttgctttctgtctgtaggcatagaaacaaaggattgaaagccattctcatacagcaaccgggtgaaaaaaacaaaacactgtgctgttacaatgtgctccctgctatttatactcattaagtttccccaatattaaagggctgacaacttaataaactgtactcactgcaaaagggataataagcacaccaggaaaaggatttaaggagacagacaacaaagagctggcagaaattaattccaccatgaagcttgagtgctgtagggatcctctggcttcgctcccaaagagaggatcctgggagaagtctgtatccagcacagaggggaaaaatgctgtcaccatccaaaaatgaaaggaggatgacatggctcactaagcaagtactagggcacctggcatgtgaggtccttgctttccctagaagccactggtggggggcagcaaattcctgggattagctggttatctggtggagaaagctaaagctggggtcagggatctttaaaaggcaagcacattttgcttaaaggattagctccagaggagccctgggatgggtgccagcttagctcagacagaagtcatgttcttagcgttcaggcaagtcagcctttgcataagacaccctgtcgtcgggcaggaatttgccgttacaaatcccaaacccatgacagtaggaatgtcaccccatgcttcacatatgcattatgctctgaacccagggcaactatgaccatgcttccttcaatctttattgagcaaatatatggccaaggttattcccttatctgtgactgggtggagaagaatggtcaggaagggagactgcctcactgttgaccaattccaaaacctaaggataagcccatggggtatgtcaagctagcaggttcttctcggcccaggatgacagtgtctgggggcatcacaaaacagttgtacaatccaatgcagccgtcctgctcatacagtaagatccattaggccagagcaggcctaacttgggtggagagcccagcctgagcaccagaattagttgcttccacttgtgcagcctgctgaagagccggactcaggttgaagcagctttcctcccagtcttcactgatctccacagggagaaaacagaagtccccacaagtaccaagctcttcctgagactgcagccaccacacctcggggaaggggaggctggcaggagaggagtacactgtcccggtgacccacaccaaggtggctccaagtgtaaacaaagcctggtgccagggacagaagaggatgcagcctgatgtgaggttttcagaaaagtgaaatgacctagcaccaggttgggattgcttgggtctgcacagcagtccctcacactgcccttacagagaggaacaggttatttgatgacttgggcccatgagatgttctccaagccattgacagctgagagaattcaggtgatccacctgaatatcagaagtttcagccctcttagagttcgtaacagaaacccagagatttactgtcagctagaacaaagatgtaaggtctcaagtaaaataaaggattgtccttcaaaacagcaatattaacaga

SEQ ID NO: 428 - DNA, 1819 bp, Homo sapiens
  source 1..1819: mol_type = genomic DNA
gtgactccttgatcttcttcctgcgtggagagccttcgcgggtgaggcttaacgcgcaggaggtctcacgagagtggaagcaactctcgcgaattttaaaatttatctttttgcctagcgactgacaacaggctggttgcttggcgtggaatcctaaagtggcctggctttgagactggagtgagaccccagccctaggctggggttctttccattatagaggagacggattcagaagggctacagaccaaggttgttgaaaaccagacatatgatgagcgtctagagattaacgactccgaagaggttgcaagtatttatactccaaccccaagacaccaaggacttcctcgttctgcccatcttcctaacaaggctatggctgataacagcagtgatgagtgtgaagaggaaaataacaaggtcctaagggagggcatgccacaggctccaggccacagaggcaaagacatggaccctgttccacctgcccctgcaagtctcaagtgccaccagaccccttctcatgtacttgagagggtgggatggtacagagagagccagaagcacagaaaggagaagaagaagacctcacagttgacacctcaacggggctttagtgaaaatgaggatgacgatgatgatgatgatgattcatctgaaactgattctgattctgatgatgatgatgaagagcatggagcccctctggaaggggcctatgaccctgcagactatgagcatttgccagtttctgctgaaattaaggaactcttccagtacatcagtaggtacacacctcagttgattgacctggaccacaaactgaagcctttcattcctgattttatcccagctgtcggggatattgatgcattcttaaaggtcccacgtcctgatggaaagcctgacaaccttggcctattggtattggatgaaccttctacaaagcagtcagaccctacggtgctctcactctggttaacagagaattctaagcagcacaacatcacacaacatatgaaagtaaaaagcctagaagatgcagaaaagaatcccaaagccattgacacgtggattgagagcatctctgaattacaccgttctaagccccctgcgactgtgcactacaccaggcccatgcccgacattgacacgctgatgcaggaatggtccccggagtttgaagagcttttgggcaaggtaagcctgcccacggcagagattgattgcagcctggcagagtacattgacatgatctgtgccattctagacatccctgtctacaagagtcggatccagtccctccatctgctcttttccctctactcagaattcaagaactcacagcattttaaagctctcgctgaaggcaagaaagcattcactccttcatccaattccacctcccaagctggagacatggagacattaaccttcagctgagacacttcccaagctgctgtttcaaggctgagctggcccctctgccccagctgagatggacagatcgttgtcagctacttgatgtccttgcccatgccacagcttggctcaggggcagtgcatgtcctgctgccctctctgccagagggcacagaacatgtttgtttaatgaacctgcctgcctcagattgctgtccccggggagttaatgcatctacaccactgtggggatttgagttataagaattggaatttctgagatcccatggaggttagattgggaggaaagcttaaaagatgtcctttttgtgagagggatggaattgttttctttcattcgtaaagttagtgagtaaagattttataaatcaaa

SEQ ID NO: 429 - DNA, 1722 bp, Homo sapiens
  source 1..1722: mol_type = genomic DNA
tagacaaacaggcgacttggccgcccagagaggctttatccgtgactccttgatcttcttcctgcgtggagagccttcgcgggtgaggcttaacgcgcaggaggtctcacgagagtggaagcaactctcgcgaattttaaaatttatctttttgcctagcgactgacaacaggctggttgcttggcgtggaatcctaaagtggcctggctttgagactggagtgagaccccagccctaggctggggttctttccattatagaggagacggattcagaagggctacagaccaaggttgttgaaaaccagacatatgatgagcgtctagagattaacgactccgaagaggttgcaagtatttatactccaaccccaagacaccaaggacttcctcgttctgcccatcttcctaacaaggctatggctgataacagcagtgatgagtgtgaagaggaaaataacaaggagaagaagaagacctcacagttgacacctcaacggggctttagtgaaaatgaggatgacgatgatgatgatgatgattcatctgaaactgattctgattctgatgatgatgatgaagagcatggagcccctctggaaggggcctatgaccctgcagactatgagcatttgccagtttctgctgaaattaaggaactcttccagtacatcagtaggtacacacctcagttgattgacctggaccacaaactgaagcctttcattcctgattttatcccagctgtcggggatattgatgcattcttaaaggtcccacgtcctgatggaaagcctgacaaccttggcctattggtattggatgaaccttctacaaagcagtcagaccctacggtgctctcactctggttaacagagaattctaagcagcacaacatcacacaacatatgaaagtaaaaagcctagaagatgcagaaaagaatcccaaagccattgacacgtggattgagagcatctctgaattacaccgttctaagccccctgcgactgtgcactacaccaggcccatgcccgacattgacacgctgatgcaggaatggtccccggagtttgaagagcttttgggcaaggtaagcctgcccacggcagagattgattgcagcctggcagagtacattgacatgatctgtgccattctagacatccctgtctacaagagtcggatccagtccctccatctgctcttttccctctactcagaattcaagaactcacagcattttaaagctctcgctgaaggcaagaaagcattcactccttcatccaattccacctcccaagctggagacatggagacattaaccttcagctgagacacttcccaagctgctgtttcaaggctgagctggcccctctgccccagctgagatggacagatcgttgtcagctacttgatgtccttgcccatgccacagcttggctcaggggcagtgcatgtcctgctgccctctctgccagagggcacagaacatgtttgtttaatgaacctgcctgcctcagattgctgtccccggggagttaatgcatctacaccactgtggggatttgagttataagaattggaatttctgagatcccatggaggttagattgggaggaaagcttaaaagatgtcctttttgtgagagggatggaattgttttctttcattcgtaaagttagtgagtaaagattttataaatcaaatgctctattatattg

SEQ ID NO: 430 - DNA, 2286 bp, Homo sapiens
  source 1..2286: mol_type = genomic DNA
cgcagggaccgtgctccgccgtctccgccgcatcttccaccctcgccgccgccgcagctccccgcgctcgtgccaccgccgccgcgtccaccctcagcgccaccgccatgcgggagatcgtgcacctgcaggccggccagtgcggcaaccagatcggggccaagttttgggaggttatcagtgacgaacatggcatcgaccccacaggcacataccatggggacagtgacctgcaactggagaggatcaacgtgtactacaacgaggccacaggaggaaattatgtccccagagcggtgctggtggacctggaacccggcaccatggactctgtccgttctggccccttcggtcagatctttcggccggacaacttcgtgtttggccaatccggagccggcaacaactgggcaaaggggcactacacggagggcgcagagctggtggacgctgtcctggacgtagtccggaaggaggccgagagctgcgactgccttcagggcttccagctgacccactcgctggggggtggcacggggtccggaatgggcacgctgctcatcagtaagatccgcgaggagttcccagaccgcatcatgaacaccttcagcgtggtgccctcgcccaaagtgtcagacacggtggtggagccctacaacgccacgctgtctgtgcaccagctggtggagaatacggatgagacctactgcatcgacaacgaggcactctacgacatctgtttccgcaccctcaagctgaccacccccacctacggggacctcaaccacctggtgtcggccaccatgagcggggtcaccacctgcctgcgcttcccgggccagctgaacgccgacctgcgcaagctggccgtcaacatggttccctttcctcgcctgcacttcttcatgcccggcttcgcacccctgaccagccggggcagccagcagtaccgggccctgacggtgcccgagctcacccagcagatgttcgatgccaagaacatgatggcggcgtgcgacccgcgccacggccgctacctgaccgtggccgccgtgttccggggccgcatgtccatgaaggaggtggacgagcagatgctgagcgtgcagagcaagaacagcagctacttcgtggagtggatccccaacaacgtgaagacggccgtgtgcgacatcccgccccgcggcctgaagatggccgcgaccttcatcggcaacagcacggccatccaggagctgttcaagcgcatctccgagcagttcacggccatgttccggcgcaaggccttcttgcactggtacacgggcgagggcatggacgagatggagttcaccgaggccgagagcaacatgaatgacctggtatctgagtaccagcagtaccaggacgccacggccgaggagggcgagttcgaggaggaggcggaggaggaggtggcctaggctgctcccatcgcttcccacctgtcccctcgaggcttctgacctttgatccgctaggccccccatctctgaaccctagagccccgctttccctccaaggctgactccccgctgaccctaacaatacctttggagctcgctttacctctggctacttcatctccgaccctggctcccctttgagccctaatttatctttaacccccttgagctcttccaaccttgacattcccaggaggagccccgcttcaccccttctgactctggaaaccgcacctttaactttgcagaccttccttcacccctgacttctgcttcacctttgacctctgccccccatgaatcccattttacctctagacctataagttctggtttatgtttgacccctccctctgagctgcacttcaccgctgaccttgcctcacctttaaccccccacctgagccccagctcctacctctgaccccaacttctctttgatctctgaatcccctctgactccaacttctctttcaccctctatgagtcccattttacttctacacctgcaagtcctggtttatattggacccctccctccgagctgcagttcacctttgaccttgcctcacctttcaccccccaccccccacagcgtcagctcctacctctgaccccagcttctctctgattcccacaggccccatgcatcctccctgcctcactcccctcagcccctgccgaccttagcttatctgggagagaaacaaggcctggtgcctgtgaggaagagaggtcacccctaccctccctccccgcttccctgcctcaccctcaataaataaattaattgttgtcatgg

SEQ ID NO: 431 - DNA, 1805 bp, Homo sapiens
  source 1..1805: mol_type = genomic DNA
tggcatttgaaatggtgggcaggagcacatgttgcttaaatttctgacagtggctggagattaccgattggttaggggagaggaagtaaagtaaaatatttataaattctccactgggtggagtctgagcagttctttgaatttctcaccctaagatctggcctgtacattttcaaggaattcttgagaggttcttggagagattctgggagccaaacactccattgggatcctagctgttttagagaacaacttgtaatggagccttcatctcttgagctgccggctgacacagtgcagcgcattgcggctgaactcaaatgccacccaacggatgagagggtggctctccacctagatgaggaagataagctgaggcacttcagggagtgcttttatattcccaaaatacaggatctgcctccagttgatttatcattagtgaataaagatgaaaatgccatctatttcttgggaaattctcttggccttcaaccaaaaatggttaaaacatatcttgaagaagaactagataagtgggccaaaatagcagcctatggtcatgaagtggggaagcgtccttggattacaggagatgagagtattgtaggccttatgaaggacattgtaggagccaatgagaaagaaatagccctaatgaatgctttgactgtaaatttacatcttctaatgttatcattttttaagcctacgccaaaacgatataaaattcttctagaagccaaagccttcccttctgatcattatgctattgagtcacaactacaacttcacggacttaacattgaagaaagtatgcggatgataaagccaagagagggggaagaaaccttaagaatagaggatatccttgaagtaattgagaaggaaggagactcaattgcagtgatcctgttcagtggggtgcatttttacactggacagcactttaatattcctgccatcacaaaagctggacaagcgaagggttgttatgttggctttgatctagcacatgcagttggaaatgttgaactctacttacatgactggggagttgattttgcctgctggtgttcctacaagtatttaaatgcaggagcaggaggaattgctggtgccttcattcatgaaaagcatgcccatacgattaaacctgcattagtgggatggtttggccatgaactcagcaccagatttaagatggataacaaactgcagttaatccctggggtctgtggattccgaatttcaaatcctcccattttgttggtctgttccttgcatgctagtttagagatctttaagcaagcgacaatgaaggcattgcggaaaaaatctgttttgctaactggctatctggaatacctgatcaagcataactatggcaaagataaagcagcaaccaagaaaccagttgtgaacataattactccgtctcatgtagaggagcgggggtgccagctaacaataacattttctgttccaaacaaagatgttttccaagaactagaaaaaagaggagtggtttgtgacaagcggaatccaaatggcattcgagtggctccagttcctctctataattctttccatgatgtttataaatttaccaatctgctcacttctatacttgactctgcagaaacaaaaaattagcagtgttttctagaacaacttaagcaaattatactgaaagctgctgtggttatttcagtattattcgatttttaattattgaaagtatgtcaccattgaccacatgtaactaacaataaataatataccttacagaaaatctgatataa

SEQ ID NO: 432 - DNA, 5793 bp, Homo sapiens
  source 1..5793: mol_type = genomic DNA
gtaacacaagtggcaagacagccgggaacccctaccccatccccttattcagcacatgaaataaacaaggggcatccaaatcttgcggcaacgcccccgggacatgcatcgtcccctggactctctcaaaccccttatccctctggacagaatgcaggtccaaccacgctggtataccctcaaacccctcagacaatgaattcacaacctcaaacccgttctccgtttttccagaggcctcaaatacagcctcctagagctaccatcccgaacagcagtccttccattcgtcctggtgcacagacacccactgcagtgtaccaggctaatcagcacatcatgatggttaaccatctgcccatgccgtacccagtgccccaggggcctcagtactgtataccacagtaccgtcatagtggccctccttatgttgggcccccccaacaatatccagttcaaccaccggggccaggtcctttttatcctggaccaggacctggggacttccccaatgcttatggaacgcctttttacccaagtcagccggtgtatcagtcagcacctatcatagtgcctacgcagcaacagccgcctccagccaagagagagaaaaaaactataagaattcgggatccaaaccagggaggtaaagacataacagaggagattatgtctggaggtggcagcagaaatcctactccacccataggaagacccacgtccacacctactcctcctcagcagctgcccagccaggtccccgagcacagccctgtggtttatgggactgtggagagcgctcatcttgctgccagcacccctgtcactgcagctagcgaccagaagcaagaggagaagccaaaaccagatccagtgttaaagtctccttccccagtccttaggctagtcctcagtggagagaagaaagaacaagaaggccagacatctgaaactactgcaatagtatccatagcagagcttcctctgcctccatcacctaccactgtttcttctgttgctcgaagtacaattgcagcccccacctcttctgctcttagtagccaaccaatattcaccactgctatagatgacagatgtgaactctcatccccaagagaagacacaattcctatacccagcctcacatcttgcacagaaacatcagaccctttaccaacaaatgaaaatgatgatgatatatgcaagaaaccctgtagtgtagcacctaatgatattccactggtttctagtactaacctaattaatgaaataaatggagttagcgaaaaattatcagccacggagagcattgtggaaatagtaaaacaggaagtattgccattgactcttgaattggagattctcgaaaatcccccagaagaaatgaaactggagtgtatcccagctcccatcaccccttccacagttccttcctttcctccaactcctccaactcctccagcttctcctcctcacactccagtcattgttcctgctgctgccactactgttagttctccgagtgctgccatcacagtccagagagtcctagaggaggacgagagcataagaacttgccttagtgaagatgcaaaagagattcagaacaaaatagaggtagaagcagatgggcaaacagaagagattttggattctcaaaacttaaattcaagaaggagccctgtcccagctcaaatagctataactgtaccaaagacatggaagaaaccaaaagatcggacccgaaccactgaagagatgttagaggcagaattggagcttaaagctgaagaggagctttccattgacaaagtacttgaatctgaacaagataaaatgagccaggggtttcatcctgaaagagacccctctgacctaaaaaaagtgaaagctgtggaagaaaatggagaagaagctgagccagtacgtaatggtgctgagagtgtttctgagggtgaaggaatagatgctaattcaggctccacagatagttctggtgatggggttacatttccatttaaaccagaatcctggaagcctactgatactgaaggtaagaagcagtatgacagggagtttctgctggacttccagttcatgcctgcctgtatacaaaaaccagagggcctgcctcctatcagtgatgtggttcttgacaagatcaaccaacccaaattgccaatgcgaactctggatcctcgaattttgcctcgaggaccagactttacaccagcctttgctgattttggaaggcagacacctggtggaagaggcgtacctttgttgaatgttgggtcacgaagatctcaacctggccaaagaagagaacccagaaagatcatcacagtttctgtaaaagaagatgtacacctgaaaaaggcagaaaatgcctggaagccaagccaaaaacgagacagccaagccgatgatcccgaaaacattaaaacccaggagctttttagaaaagttcgaagtatcttaaataaattgacaccacagatgttcaatcaactgatgaagcaagtgtcaggacttactgttgacacagaggagcggctgaaaggagttattgacctggtctttgagaaggctattgatgaacccagtttctctgtggcttacgcaaacatgtgtcgatgtctagtaacgctgaaagtacccatggcagacaagcctggtaacacagtgaatttccggaagctgctactgaaccgttgccagaaggagtttgaaaaagataaagcagatgatgatgtctttgagaagaagcagaaagaacttgaggctgccagtgctccagaggagaggacaaggcttcatgatgaactggaagaagccaaggacaaagcccggcggagatccattggcaacatcaagtttattggagaactctttaaactcaaaatgctgactgaagccatcatgcatgactgtgtggtgaagctgctaaagaaccatgatgaagaatccctggagtgcctgtgtcgcctgctcaccaccattggcaaagacttggactttgaaaaagcaaagccacgtatggaccagtactttaatcagatggagaaaattgtgaaagaaagaaaaacctcatctaggattcggttcatgcttcaagatgttatagacctaaggctgtgcaattgggtatctcgaagagcagatcaagggcctaaaactatcgaacagattcacaaagaggctaaaatagaagaacaagaagagcaaaggaaggtccagcaactcatgaccaaagagaagagaagaccaggtgtccagagagtggacgaaggtgggtggaacactgtacaaggggccaagaacagtcgggtactggacccctcaaaattcctaaaaatcactaagcctacaattgatgaaaaaattcagctggtacctaaagcacagctaggcagctggggaaaaggcagcagtggtggagcaaaggcaagtgagactgatgccttacggtcaagtgcttccagtttaaacagattctctgccctgcaacctccagcaccctcagggtccacgccatccacgcctgtagagtttgattcccgaaggaccttaactagtcgtggaagtatgggcagggagaagaatgacaagccccttccatctgcaacagctcggccaaatactttcatgaggggtggcagcagtaaagacctgctagacaatcagtctcaagaagagcagcggagagagatgctggagaccgtgaagcagctcacaggaggtgtggatgtggagaggaacagcactgaggctgagcgaaataaaacaagggagtcagcaaaaccagaaatttcagcaatgtcagctcatgacaaggctgcattatcagaagaggaactggagaggaagtcgaaatctatcattgatgaatttctacacattaatgattttaaggaagccatgcagtgtgtggaagagctgaatgcccagggcctactacatgtttttgtgagagtgggagtggagtccaccctggaaaggagccagatcaccagggatcacatgggccaattactctatcagctggtacagtcagaaaaactcagcaaacaggactttttcaaaggtttttcagaaactttggaattggcagatgacatggccattgatattccccatatttggttgtaccttgctgaactggtgacccccatgttaaaagaaggtggaatctccatgagagaacttaccatagaatttagcaaacctttacttcctgttggaagagctggggtcttgctatctgaaatattgcacctactatgcaaacaaatgagccataagaaagtgggagccttatggagggaggctgacctcagctggaaggactttttaccagaaggagaagatgtacataattttcttttggagcagaagttggacttcatagagtctgacagtccctgttcctctgaagcactttcaaagaaagaactgtctgccgaagagctgtataagcgactcgagaaactcattattgaggacaaagcgaatgatgaacagatctttgactgggtagaggctaatctagacgaaatccagatgagttcacctacattccttagagctttaatgactgctgtttgtaaagcagctattatagccgactcttctaccttcagagtggacactgctgttatcaagcagagagtgccgatcttactcaagtacctagactcagatacagagaaggaactgcaagcactttatgcactacaagcatcgatagtaaaacttgatcaacctgccaatttgctgcggatgttttttgattgtctatatgacgaggaggtgatctccgaggatgccttctacaaatgggagagcagcaaggaccctgcagagcagaatgggaagggcgtggctctgaaatctgtcacggcattcttcacgtggctgcgggaagcagaagaggagtctgaggataactaaaacttcaaatacacaaaatgaaacaaaagaaacaatttaagtatttttttaaaaagtttcacgtcttcgccaatcacagtgcagcaaggccaattctcgcagaaacccccacgtgtgcacgagtgggagaggggaaagagaaaaaaaggtgatcatggaggaaaaaggtactggataaaagtaaacttcaaaccttagggcgggagcactaaaaccaaaatacatgtattatttatagaaaatattttctgttttaatcttttctttttaaacaaggactcatacttaaaaaaatgtttagcaaaaaaaaaaaaagttgagaacttttaatttattttaaggactgcaaatgccagtgtaattttttaatttgcagtttctgtaaacaacttgtataatagaaaagcagagaaataaatttccctccccttcaagatgcacctcatgtttgttttaaggtatagcatttagtccagatttgagaaagtttggggtgaacaaggtaagaaagatttttttttttttggcatcaaatctttctgcctgcctctcagcttgcttcagaaaatttaaaaaatcacaatagtaatcaaaacatacataacattgaaacagaaggaaatgctgtggaccacagaactccaagaattgtttaaaaaaaaaaaagtgctaccctgagaaaagtactcttaatactcttgaaatctttagagcaactttaaggcttgtaaatacatagaacaaatatttaaaaaaacaaaaagaaattgactcagtactatttcttttcactttgaaaatataaagaacaaaataaagacaaacattgcaagtttaaaa

SEQ ID NO: 433 - DNA, 1865 bp, Homo sapiens
  source 1..1865: mol_type = genomic DNA
ctcagatctccctgtcgtgtcatctcacatctgtcatctctcaggtcatatccaacacactgggccacccacgcacagggacgacgcgacagccctgtggctccaccgcacaggacagccacgactggcaatcctgtgccggccctgctcgacgcaagcacctccagcgccgggttgcgtcttagtgaccctgggaccgccagccaggcaccgcgcccgacgcaggctcagtcagtgttggtcggatgcatgaatgaatgggaaaaacgaagtctctctctccctggccctgctcccatacatctgtaggcctaggtcttggttttatccgaagacttagagaagggacgcaagttccttcgcggagccagaaggaatccgtcgagaagcgggacctcaagctcgcggcccaaaagcgcggccccgccacgacgcctgctagctggccccacttcggcgcgcgccgcttacatcatagctcgcctctccccttccctagccacacccccttgcctggcgacccggaagttgtacttgcaactgcggctttccttctcccacaatccttcgcgctcttcctttccaacttggacgctgcagaatggctcccgcaaagaagggtggcgagaagaaaaagggccgttctgccatcaacgaagtggtaacccgagaatacaccatcaacattcacaagcgcatccatggagtgggcttcaagaagcgtgcacctcgggcactcaaagagattcggaaatttgccatgaaggagatgggaactccagatgtgcgcattgacaccaggctcaacaaagctgtctgggccaaaggaataaggaatgtgccataccgaatccgtgtgcggctgtccagaaaacgtaatgaggatgaagattcaccaaataagctatatactttggttacctatgtacctgttaccactttcaaaaatctacagacagtcaatgtggatgagaactaatcgctgatcgtcagatcaaataaagttataaaattgccttcatgtttttgttctttttagttgcaacataatgtacttgtataccctatcctaattatgggatcatttgaagagcttttcccaaattgatggcctgtgctgccttctccccatcccctggggttttaaagtgatttcaaactgcaacctagttttagaaccactgttctgggtagttgggatactgaaggcatattgttaattattctacttgtatgttttgctaattctaagataagcatttttccagaaaccaggatgtagaatccagttgccattgacatcttaacattttaggaaacaactttaaaatgatatactatctatctatctatctgtagcatcttaaaggtaatgaaattaatgtggcagtaggtcttttaagcttctgcctacatccatattgagtatagttgttgtcttctaaaataattaattgatttttggtgagataaccagattcatattttaagccttttgtaatggccccgtggtacctggagtcaaggttcagaagtaaaaagttccttaaggtatcaataacaaaaatttgtattaatagttcagtcctaaagcagtgttgctgagattatgtttcaccagcatttacaagctgtatgttaaatgctgccataaagaggtctctgaagccgtagggcacacccaaggcagggctgagaagtacctagtagtgttgcaccacccaaaaaccatggatgggcagcagcaacatctccagcttacccattcactgccacagtctacagcttaagacacttaactacaaggtaaaagaaaaggaccaagtaaatacaaaaagtttcttattaaaaaacttggaagccaa

SEQ ID NO: 434 - DNA, 2046 bp, Homo sapiens
  source 1..2046: mol_type = genomic DNA
gttgctatcccagaatcctcagagaaggagtagcgcgttcgtgcgtcctagttccagtacagcgtggagggtttaggcagcgtgttctgattctttgcgggacggcgagcgcatttgtgctttgcccgccgcggcctaggaggccttttgaggccgcgtagtcggtgtttttgaactgactctacagcttctggcaggccgtgcggcgccctgacccggcctcaccatgttggtgctgtttgaaacgtctgtgggttacgccatctttaaggttctaaatgagaagaaacttcaagaggttgatagtttatggaaagaatttgaaactccagagaaagcaaacaaaatagtaaagctaaaacattttgagaaatttcaggatacagcagaagcattagcagcattcacagctctgatggagggcaaaatcaataagcagctgaaaaaagttctgaagaaaatagtaaaagaagcccatgaaccgctggcagtagctgatgctaaactaggaggggtcataaaggaaaagctgaatctcagttgtatccatagtcctgttgttaatgaacttatgagaggaattcgttcacaaatggatggattaatccctggggtagaaccacgtgaaatggcagctatgtgtcttggattggctcacagcctgtctcgatatagattgaagtttagcgctgataaagtagacacaatgattgttcaggcaatttccttgttagatgacttggataaagaactaaacaactacattatgcgatgtagagaatggtatggctggcatttccctgaattaggaaaaattatttcagataatttaacatactgcaagtgtttacagaaagttggcgataggaagaactatgcctctgccaagctttctgagttgctgccagaagaagttgaagcagaagtgaaagcagctgcagagatatcaatgggaacagaggtttcagaagaagatatttgcaatattctgcatctttgcacccaggtgattgaaatctctgaatatcgaacccagctctatgaatatctacaaaatcgaatgatggccattgcacccaatgttacagtcatggttggggaattagttggagcacggcttattgctcatgcaggttctcttttaaatttggccaagcatgcagcttctaccgttcagattcttggagctgaaaaggcacttttcagagccctcaaatctagacgggatacccctaagtatggtctcatttatcatgcttcactcgtgggccagacaagtcccaaacacaaaggaaagatttctcgaatgctggcagccaaaaccgttttggctatccgttatgatgcttttggtgaggattcaagttctgcaatgggagttgagaacagagccaaattagaggccaggttgagaactttggaagacagagggataagaaaaataagtggaacaggaaaagcattagcaaaaacagaaaaatatgaacacaaaagtgaagtgaagacttacgatccttctggtgactccacacttccaacctgttctaaaaaacgcaaaatagaacaggtagataaagaggatgaaattactgaaaagaaagccaaaaaagccaagattaaagttaaagttgaagaagaggaagaagaaaaagtggcagaagaagaagaaacatctgtgaagaagaagaagaaaaggggtaaaaagaaacacattaaggaagaaccactttctgaggaagaaccatgtaccagcacagcaattgctagtccagagaaaaagaagaaaaagaaaaaaaagagagagaacgaggattaacagaaaggaattacgattatatcacccggacacacatcatgcttaagattcaactgggagcataccagggatgctctctaacgtaatcaagggaaggttcagtaagacaaagtgatttatcatctataacttcaaacctatttgtcttgacatcaactctgttaaccttatgtcatcatttcttagagtctttgatatacaaataaaattttctttgtattttaagacaa

SEQ ID NO: 435 - DNA, 1414 bp, Homo sapiens
  source 1..1414: mol_type = genomic DNA
tgcctccgggtcgcggtcattttgagcccctgtctggatgacttcttgcggctgttctacccctccccctccccgcggtaccttgcacttttctccctccctgccccctctcgagtccaccctccgggccttctgcccctgatcgcttggttttccttgcagtcgcctgctgctgtcgtcgggaggaaagatgaatgggagggctgattttcgagagccgaatgcagaggttccaagaccaattccccacatagggcctgattacattccaacagaggaagaaaggagagtcttcgcagaatgcaatgatgaaagcttctggttcagatctgtgcctttggctgcaacaagtatgttgattactcaaggattaattagtaaaggaatactttcaagtcatcccaaatatggttccatccctaaacttatacttgcttgtatcatgggatactttgctggaaaactttcttatgtgaaaacttgccaagagaaattcaagaaacttgaaaattccccccttggagaagctttacgatcaggacaagcacgacgatcttcaccacctgggcactattatcaaaagtcaaaatatgactcaagtgtgagtggtcaatcatcttttgtgacatccccagcagcagacaacatagaaatgcttcctcattatgagccaattccattcagttcttctatgaatgaatctgctcccactggtattactgatcatattgtccaaggacctgatcccaaccttgaagaaagtcctaaaagaaaaaatattacatatgaggaattaaggaataagaacagagagtcatatgaagtatctttaacacaaaagactgacccctcagtcaggcctatgcatgaaagagtgccaaaaaaagaagtcaaagtaaacaagtatggagatacttgggatgagtgaaaaattacatcattggacatgaaggagtttcaacatccagcttcatctaggtggtcatgattacctgcatgctttgagctcagcagcagtcttcataaacacatttaaaacaagatcctgggtttttgtggtttgacttctatggtgttttaaaaaaacacagatttttagtgttaatattgtgtaaatgtactcaccttagggattcatttgaatgatggtattataccatgattgtatacagtttgtgaaattgttgcaagggcaaagataactcttaaaaaaccgtcgagattacaatgctctagaatcagcatataagaaaataaatgatatctgcatgttgaattggggtggatggggggagcaagcataatttttaagtgtgaagctttgcatcaagaaattattaaaaagctttttttctccagtattttctgtattatcttaatgtttatggcaaataaaatgtaaaggaacatgcaa

SEQ ID NO: 436 - DNA, 6146 bp, Homo sapiens
  source 1..6146: mol_type = genomic DNA
aatccccgcccctcaagcaccggccccgccccataggccccgtccgtggccccgccccgccgcgagctggcgccgggtcctctcagcgcccgccggcggccgcgtccacccccgacgctctgaggtcaccgactgggccggcccgcggggggcggagggacggagggaagatggcggcaggggccggatattggcgccgcctcccccaatcccggagccggcgcagatgaggcagttcggctggggccagcggcgctttggaacccgaggtggggggaccctggcggtggggcctggtcctgctatatgccggcgcctcggctagagtgagcggcggcgacgcctctttcctccgtctctttccctgtcgctgcgagagcgagcgggcggcggaggcggcggcggcggcggggccgggatggaggacgttaactccaacgtgaacgcggaccaggaggtgcggaagctgcaggagctggtgaagaagctggagaagcagaacgaacagctgaggagccgctcgggggccgtgcagggcgccggctcccttgggcccggcagcccggttcgggccggcgcgtccattccctcctccggcgcggcgtctcctcggggcttccccttgggcctcagcgccaagtcgggcggcgggcccgggtcgggcccgaggcggacgagtagcgaagagctgcgggacgccacctccttgctagcggcgggcgagggcggcttgctggacgaggtggagccgctgcggcccgacgagctggagcgcctgtcaggctgggaggaggaggaggagagctggctgtattcatcaccaaagaaaaaacttacaccaatgcagaaatcggttagtccattagtttggtgcaggcaagttttggattacccaagtcctgatgttgagtgtgctaaaaaatctcttatccacaaacttgatcaaactatgtcagctctcaagaggcagaatttatataataatcctttcaactctatgagttacaccagtccttacagtccaaatgccagtagcccatacagcagtggcttcaattctccatcctcaaccccagtgcgacctcctatagtcaaacagcttatacttcctggaaattcaggtaacttgaaaagctcagacagaaatcctccactcagtcctcagtcctctatagatagtgagttaagtgcttcagaattagatgaagattcaattggatccaattataagctaaatgatgtaactgatgtacagattctagcccggatgcaggaagaaagtctccggcaagaatatgcagccaccacgtctcggcgcagttctggttcatcttgcaattctacaagacggggtacttttagtgatcaggaacttgatgcacaaagtttagatgatgaagatgacaatatgcatcatgcagtataccctgctgttaacaggttttcaccatcaccacgcaattcacctcgaccgtcacctaagcagtcacccagaaattcacctcgttcacgatctcctgctcggggaatagaatatagtagagtgtccccacagcctatgattagccgcttacagcaacctcgcctttcacttcaaggccatcccacagatttacagacaagcaatgttaaaaatgaagaaaaactaagacgcagtcttccaaacctgtcccgaacatctaatacacaagttgactcagtgaaaagcagcagaagtgactcaaattttcaagtgccaaacggaggaatacctcgtatgcaacctcaggcttcagccataccttctccaggcaaattccgttcccctgcagcaccatctcctttggctcttcggcaaccagtgaaagcatttagtaaccatggctctggttctcctggtagccaagaaataacacagctcacacaaaccacctcctcacctgggcctcctatggttcagagcacagtctcagcaaatcctcccagcaatatcaacagcgctactctaaccagacctgcagggacaactgcaatgagaagtggcttgcccagacccagtgccccttctgctgggggcataccagtgcctcgcagcaaacttgcacagcctgttcgcagatccttgccagctcctaaaacctatggtagcatgaaagatgacagttggaaagatggctgttactgaccagcaaagacaagaatgcagaagtccacggcttcatggatacccttcaccaggctaaaaaacaacttttatatgcagactgttcagataagactcttgggatttataaaatcccagccctctctgtcttaattagcacaaaccgacagagatcatcaaacagcactttaatgacatttaacatcagatgtgtttggtaatcatacaatcactctccatagaatcacttttagttttgtttaatagaaactaggttgatttttaaaaaatatttgacagaggccaatatctgggcaaatacctaatggatgccaaagagaaatgcccatttgtaaatgagaaaaatgcccatttgtgcacaagaaaatggtgaattcaggctatccaaaacttcacattcaacctaatttactgtataaatagtatcaataaatatttgtgttaatgagaactaatattctgactaattatctaaagtgtttcactagtacaccaggaaactacagattgagattagggggtgggaggaaagaaacctgggctagagattaaaacattcctaaatttagcagaatttcagaaatgatttttgcagattcattagaaaagaaaaattgtcatttaatcttaagttttggatgtagctcacatgtcaccaccaccagatagtgttacagcatgtatccatcatgttgcattgacacatcaaacttgtgtgtgtttgttttgattgccaaaagggcttaatatcagttgtacaatctttctgaactttatagttcctggctcaggaaagatggcctttgctattgaagccaacttcttcacatgctgttatctttacagaactaagagatcttgtttctattagcaggttttcatgataggaaagaacaagtagtgtgtgtctttattcttgatacaacaccacctcggtgcttgcaacctggaacaaaaccataccatgagagagagggggaaaaaaatctatgcacttaacctacaaaatctctggtgatgacagttgtattgttgctattacatggcataacggtctattatgtggtaggaaaatatagcctgctaaatcctacttaagttgatccactttaaactgagtaactgtataaaacatctattgaaaattcttttccttttgacttagattctgccttacatcaatttttgcatttttggtaaaaaaaaaaccctactacgtatgactctaacctgatacttgctctctaatggctcttaatatatccttgaaatcggctatttcaattttatcagacttttaccagagtaaaacttgcttctgtagcaggcctctcattttttattatgaggtctgtttttaaatacttaatttgaacagctctaagatattgtcacttaggtcatctaaaagcttttagagatttgaacataagttcatttcctgttaatcaaagacattccgtaagttggcaaaagaaattgggagagagaaatagaaggcttgatattctggacagcattaaggttgataggttgatgataaaaacttaaaaccaggacctccattctgtcatgactgacaccatggtagtctgtcagcttgaccagtggagagtcattcatttagcacaagcagctggagatttaaactgccagtactatgtatttggtgtataatgcaaggaagaaactttatccttgaatttgagggtgatggggtgggtcaggaaaggatggcgccagaattctacatgataatgaactaaaaaatgttgcttttcagaggaagataaagcatcttcttttgggaggggggtatctcatgtctaagtaagtaaaagaaagaagtagctactgtctcttttaaaaaccacgtacaaaacagaacaagtctcagttttcagtgcaacatttcaaaaaatatatatgctgcaatctaataattaaaaggaattttacctattatgaaacatattacattttttaagttagataatcagtttcaaaaggagtattcaggttatttaactttgtttttaaatggctgcatcagaaaaaaatgtctatttttttttattaaaatatttcatcacttgttaaaacatatttttgatctgagtttggtaaagtattattttacctgctgttgtactaccacagactgttgacttttagtttcttaaagagaaaaattgcctttttactagaaagcctttgtatattgcaatttttctgtttgggaaaatctaaggatttactgtggttagtcttacagaagaaatgtggatttgataaactagtgcctatgattttaacttatgtttgatatatagtagtaagggttttatgaatgttgattattttgtgccaacagcccagaattgtcacttatatgtaagcagaaaacaatgagctctgcttccaaagttatttaattttctcagtgtttgaatgttattttttgtaagtgtgttaataaaagtgtaaagaattggaaaaaatataaatattcttaactcaagcatttgctggatcatttttctacaaaacttgtttgtacaatataaaacactctctgaagagttgactttttttcagtttcgtatcctggaaatcacattttgtaaaactggggaccattcataattgtcagatactttttaaaattatctcaatacatcacttttataaaaaaaaaaagtttttttgaaagaaaattagatacatatgtggccccagatgtttgtataactctagaatgatctagactatgtatgtttaaattaactttttattgaatgtacaggtgtccatttttgacgttaagcatggtcctttaaggtcacatgacgtttgatttgcaaacatttctatagccgaacttgtatatgtggttgcctccttaataaacagcctgaccataatgtttattattaaatttatattctttaagtgtttaattaatctctggatatggtaagattccttttttcctctcagttgcctacacttggttttaataaattactcagttgagtttttctttaaccacagaaacccaaatcatattgccctttcagatttagtcttcatggggttggattatgtcttatattttctctgtcagagttatttcatatatggattttacttgaaggaaatttacagtttactctaaattgatttgttcttggaacttttttacctgctgtgaattgatacctagttataaaaagctagcatttgcctagatcataactatgtatggtatctagttagaaaaaaacaagcaaaaagctattatgagtttccaagagggacaattaatgcattttcataccaaatgcgaatatttaggtgatcacgtgcatcttttcttgtatggatggaaaaatcaagaattgtacactgtttaatgagttctccatattcctttaggagatatttgctttgcaattacatgttacaattagaataattacaattaaaataatattacatgttacaattagattaatagtgatgagagggaaaaaagacacccttctgtttttttctctcaagccagtctaaaaacttgaagagccatttaaaattaaatgtcactatacttgtattataaatcaatacataagtttaaacctgttatatactcagtgcaacagaaaaacccatatggaggttcaaccactgatgtattttgaatgatcctaaatataagtcttgggtggctaaatggccctctgcttaccagtctgaaaatgaaaccgattatactcatcggccttatttactgtaatacaaactggttaaaactatgttaactgaatgctagtttgaaacaaattatctacattaagtcatcttaatgttttctctttaaaagaaataaaaaaatctgtttcttctgatttcgaaagtaatagaaactctgctgtagaacataaactaaaaatattaaaaagtataaaggtaaaaaatg

SEQ ID NO: 437 - DNA, 4758 bp, Homo sapiens
  source 1..4758: mol_type = genomic DNA
ggctacatgattccctgaaagataagaacaatgttatgttggggatattggtctctgggccaacctggtatcagcaccaacctgcagggaattgtggctgagccccaggtgtgtgggttcatatctgacagaagtgtcaaggaagtggcctgtgggggaaaccactctgtgttcctgctggaagatggggaagtttacacatgtggtttgaacaccaaggggcaactgggccatgagagggaaggaaacaagccagaacaaattggagctctggcagatcagcatatcattcatgtggcatgtggcgagtcccacagtctggccctcagtgaccgaggccagctgttttcttggggtgcagggagtgatggtcagctaggactcatgactactgaggattctgtggcagtgcccaggttaatacaaaagctgaaccagcaaacaatattacaagtttcctgtggcaactggcattgcttggctcttgcggctgatggccagttcttcacctggggaaagaacagccatgggcagcttggcttagggaaggagttcccctcccaagccagcccacagagggtgaggtccctggaggggatcccactggctcaggtggctgccggaggggctcacagctttgccctgtctctctcaggagctgtttttggctgggggatgaataatgccgggcagctagggctcagtgatgaaaaagatcgagaatctccatgccatgtaaaactcttacgcacgcaaaaagttgtctatattagttgtggagaagaacacacagcagttctcacaaagagtggaggtgtgtttacctttggcgctggttcctgtgggcaacttggacacgactccatgaatgatgaggttaaccctagaagagttctagagctgatgggtagtgaagtaactcaaattgcttgtggcagacaacataccctagccttcgtgccttcttctggactcatctatgcatttggttgtggagcaagaggtcaattaggaactgggcacacttgtaatgttaagtgcccatctcctgtcaagggttactgggctgcccacagtggccagctttcagcccgagctgatcgctttaaatatcatatcgttaagcagatcttctctggaggagaccagacttttgtactttgctccaaatacgagaattattctcctgctgttgacttcaggactatgaaccaagcacattataccagtttaataaatgatgaaaccatagcagtttggagacaaaaactctcagaacacaacaatgcaaatacaatcaatggtgttgttcagatattatcttctgcagcctgttggaatggaagttttcttgaaaaaaaaattgatgaacattttaaaacgagtcccaaaatccctgggattgacctgaactcaactagggtgttatttgagaagttaatgaactctcagcactccatgattctagaacagattttgaacagttttgaaagttgtctgattccccagttgtcaagctcaccaccagatgttgaagccatgagaatctatttaatactacctgagtttcccctactccaggattccaagtattatataacattgactattcccttggctatggccattcttcggctggatacaaaccccagcaaagtactagataactggtggtctcaggtatgcccgaaatatttcatgaagctggtaaacctctataaaggtgcagtcctttatctactgaggggaagaaagacattcttaattcccgtactgtttaacaattatatcacagcagctctcaaactcttggagaagttatataaggtaaatcttaaagtgaagcatgtggaatatgatacattttacattcctgagatttccaatctcgtggacattcaggaagactacctcatgtggttcttgcatcaagcagggatgaaggctagaccatcaataatacaggatactgtaacactttgttcctaccctttcatctttgatgcccaagccaagaccaaaatgttacagacagatgctgaactacagatgcaggtggcagtcaatggagccaacctgcagaatgtcttcatgcttctcaccctggagcctctgctggccagaagccccttcctggtccttcacgttcgcaggaacaaccttgttggagatgccctaagagagctgagcattcattctgatattgatttgaaaaagcctctcaaagtaatctttgatggtgaagaagcagtggatgccggtggtgttacaaaggaattttttcttttgctgttaaaagaacttttgaatcccatctatggaatgtttacctactatcaagattcaaatctcttgtggttttcagacacgtgttttgtagagcacaactggtttcacttgattggtataacctgtggactagctatctacaactccactgtggtcgatctccacttcccattggctctctacaagaagttactcaatgtaaagcctggcttggaagacttaaaggagttgtcacccactgaaggaaggagtctccaagagcttttagattaccccggggaggatgtggaggagactttctgcctcaacttcacgatctgccgagaaagctatggagtgattgaacagaagaagctgatacctgggggagataatgtaactgtgtgcaaggataacaggcaggaatttgtggatgcttatgtgaattatgtcttccaaatctcagttcatgaatggtacacagccttctctagtggcttcctaaaggtgtgtggtggcaaagtacttgagctcttccagccttcagaactgagggctatgatggtggggaacagcaactacaactgggaagaactggaagagactgccatctacaagggagattactcggccacacatcccactgtaaaactattttgggaaacatttcatgagtttccattggaaaagaagaagaagtttctcttgttcctgacaggcagcgatcggattcccatctacggcatggccagtctgcagattgtcatccagtccacagccagcggggaggagtacttgccggtggcccacacttgctacaaccttcttgacctccccaagtacagcagcaaagagattctgagtgcccggctgacccaggcccttgacaactatgaagggtttagtttggcctgaggcttctcagcttgtccagtatttcccttcgttcctcagtgtccacattgaggcctatacagaaaatcatggggagtgatttctatttttttattgtctaagtgggttgggacttttaaatactgagcctggttgatgtgtttctgggattgtatagcagtaaacaacctttttgaaaaattagaggttggggatggggtgaaaaattggcccttgtatgggaggtgtttttgtttttgttttaaaccaaactacccagtattccttgcacttgtgaatgtgttgcactctgctggatgaaatggcagtggatttttaaactttaatttcccaaatgtctctctcagccctgatgttttctcacagtgcttccttgtccttctcttaacttctcattcctctataagaatgatttagactgacctgtccttttttatctgcgcatgcgagaacatcaccttcctctgtacacttggaaatgcctctggcttgttgcagccctcctttaacccaaaggaggaaaggactgcttcagaaactcccaattccaaaaagctgagtctgggtccattattttggcagaactcctaagaatttatgggagcctatataaacatatcttgcttttaaaaagttcttgagggaatagcaactttcccatggctgtgcctatttcctagaccttttaaaagatgtgcagagcagcttagcattcgttgcagctgagcctaattttttcttgctcatccttgtccctttgacaataaggttaattgatagacccaccacctcttgcactctcgcttttggagcaagttgcattaactattttgagtctctatattgtccaagaaaagtagaaataataaatttactttccctttttctatcaccttatgtcctctaccattttctccttcctcccttcccttattttctccttttcgtaccctgtgtcctccctgattttcctttcgtttcttctttattttatcccattctctgttacttgactcagtgctcccttcctctcctctccttctagtggatgcatgcagcctttttttcaatttttatttaaattgcaaaatttttactcagattttttttcctcttccctaattgctaagatttaaggacgttctttattatgaaactttatcacattcgaaatgtttgtttacagtgggattttaggggggattgtgtttaaatcaaatatatgtattttaaaaataatgacatgctcaaccttcctcatcatggagtaagaaaattctacatgattaaagaatccatgtaagtctaattttaaattcctagtaactagagaaaagacttatttatataaaatgaagtatttatgaactgtgataaagcatcaaatcttgatgaaggattgtagatttttgctttttctttttgtttttaaaacttattccaattgctaaattggtagtttttcagtctttataaatacaggattaaaaatatatatacagttatatgaaatgtttattttctatgtgtgtgcatatagttcaatattatgcaataaatttggtgttttaactt

SEQ ID NO: 438 - DNA, 3779 bp, Homo sapiens
  source 1..3779: mol_type = genomic DNA
ggagcctgtcgcagcgggaccgacggaatccggagcaggcgacagggcgcagaagcgggatgtacttctgttggggcgccgactccagggagctgcagcgccggaggacggcgggcagccccggggctgagctactgcaggcggccagcggggagcgccactctctgctgctgctgaccaaccacagggtcctctcgtgcggagacaacagcaggggtcagctgggccgcaggggcgcgcagcgcggggagctgccagaaccaattcaggcattggaaaccctaattgttgatctcgtgagctgcgggaaggagcactccctggctgtgtgccacaaaggaagggtcttcgcatggggagctggttctgaagggcagctggggattggagaattcaaggaaataagtttcacacctaagaaaataatgactctgaatgatataaaaataatacaagtttcctgtggacactaccactccctggcattatcaaaagatagccaagtgttttcgtggggaaagaacagccatgggcagctgggcttggggaaggagttcccctcccaagccagcccgcagagggtgaggtccctggaggggatcccactggctcaggtggctgccggaggggctcacagctttgccctgtctctctgtgggacttcgtttggctggggaagtaacagtgccgggcagctggccctcagtgggcgtaatgtcccagtgcaaagcaacaagcctctctcagtcggtgcactgaagaatctaggtgtggtttatatcagctgtggtgatgcacacactgcggtgcttacccaggacgggaaagtgttcacatttggagacaatcgctctggacagctgggatacagccccactcctgagaagagaggtccacaacttgtggaaagaattgatggcctagtttcgcagatagattgtggaagttatcacaccctggcatatgtgcacaccactggtcaggtggtatcttttggtcatggaccaagtgacacaagcaagccaactcatccggaggccctgacagagaactttgacattagctgcctgatttctgctgaagacttcgtggatgttcaagtcaaacacatttttgctggaacatatgccaactttgtgacaactcatcaggatactagttccacacgtgctcccgggaaaaccctgccagaaataagccgaattagccagtccatggcagaaaaatggatagcagtgaaaagaagaagtactgaacatgaaatggctaaaagtgaaattagaatgatattttcatctcctgcttgtctgactgcaagttttttaaagaaaagaggaactggagaaacgacttccattgatgtggacttagaaatggcaagagataccttcaagaagttaacaaaaaaggaatggatttcttccatgataactacgtgtctcgaggatgatctgctcagagctcttccatgccattctccacaccaagaagctttatcagttttcctcctgctcccagaatgtcctgtgatgcatgattctaagaactggaagaacctggtggttccatttgcaaaggctgtgtgtgaaatgagtaaacaatctttgcaagtcctaaagaagtgttgggcatttttgcaagaatcttctctgaatccgctgatccagatgcttaaagcagccatcatctctcagctgcttcatcagactaaaaccgaacaggatcactgtaatgttaaagctcttttaggaatgatgaaagaactgcataaggtaaacaaagctaactgtcgactaccagaaaatactttcaacataaatgaactctccaacttattaaacttttatatagatagaggaagacagctctttcgggataaccacctgatacctgcagaaacccccagtcctgttattttcagtgattttccatttatctttaattcgctatccaaaattaaattattgcaagctgattcacatataaagatgcagatgtcagaaaagaaagcatacatgcttatgcatgaaacaattctgcaaaaaaaggatgaatttcctccatcacccagatttatacttagagtcagacgaagtcgcctggttaaagatgctctgcgtcaattaagtcaagctgaagctactgacttctgcaaagtattagtggttgaatttattaatgaaatttgtcctgagtctggaggggttagttcagagttcttccactgtatgtttgaagagatgaccaagccagaatatggaatgttcatgtatcctgaaatgggttcctgcatgtggtttcctgccaagcctaaacctgagaagaaaagatatttcctctttggaatgctgtgtggactctccttattcaatttaaatgttgctaaccttcctttcccactggctctgtataaaaaacttctggaccaaaagccatcattggaagatttaaaagaactcagtcctcggttggggaagagtttgcaagaagttctagatgatgctgctgatgacattggagatgcgctctgcatacgcttttctatacactgggaccaaaatgatgttgacttaattccaaatgggatctccatacctgtggaccaaaccaacaagagagactatgtttctaagtatattgattacattttcaacgtctctgtaaaagcagtttatgaggaatttcagagaggattttatagagtctgtgagaaggagatacttagacatttctaccctgaagaactaatgacagcaatcattggaaatactgattatgactggaaacagtttgaacagaattcaaagtatgagcaaggataccaaaaatcacatcctactatacagttgttttggaaggctttccacaaactaaccttggatgaaaagaaaaaattcctctttttccttacaggacgtgataggctgcatgcaagaggcatacagaaaatggaaatagtatttcgctgtcctgaaactttcagtgaaagagatcacccaacatcaataacttgtcataatattctctccctccctaagtattctacaatggaaagaatggaggaagcacttcaagtagccatcaacaacaacagaggatttgtctcacccatgctcacacagtcataatcacctctgagagactcagggtgggctttctcacacttggatccttctgttcttccttacacctaaataatacaagagattaatgaatagtggttagaagtagttgagggagagattgggggaatggggagatgatgatgatggtcaaagggtgcaaaatctcacacaagactgaggcaggagaatagggtacagagatagggatctaaggatgacttggacacactccctggcactgaagagtctgaacactggcctgtgattggtccattccaggaccttcatttgcataaggtatcaaaccacatcagcctctgattggccatgggccagacctgcactctggccaatgattggttcattccaggacattcatttgcataaggagtcaaaccacaccagtcttggattggctgtgagccaattcacctcagtctctaattggctgtgagtcagtctttcatttacatagggtgtaaccatcaagaaacctctacagggtacttaagccccagaagattttgctaccagggctcttgagccacttgctctagcccactcccaccctgtggaatgtactttcacttttgctgcttcactgccttgtgctccaataaatccactccttcaccacccattcatgcatgtcgc

SEQ ID NO: 439 - DNA, 1744 bp, Homo sapiens
  source 1..1744: mol_type = genomic DNA
acacccgacgctctggcccacacagacgctactctgtagcatctcaggttccctctggctgcactctggaggaccacactcgttttctttttggctgccagaggcccccgcatccaccgctgagctgggagaaagatggcggcagccgtgcgacaggatttggcccagctcatgaattcgagcggctctcataaagatctggctggcaagtatcgtcagatcctggaaaaagccattcagttatctggagcagaacaactagaagctttgaaagcttttgtggaagcaatggtaaatgagaatgtcagtctcgtgatctcgcggcagttgctgactgatttttgcacacatcttcctaacttgcctgatagcacagccaaagaaatctatcacttcaccttggaaaagatccagcctagagtcatttcatttgaggagcaggttgcttccataagacagcatcttgcatctatatatgagaaagaagaagattggagaaatgcagcccaagtgttggtgggaattcctttggaaacaggacaaaaacagtacaatgtagattataaactggagacttacttgaagattgctaggctatatctggaggatgatgatccagtccaggcagaggcttacataaatcgagcatcgttgcttcagaatgaatcaaccaatgaacaattacagatacattataaggtatgctatgcacgtgttcttgattatagaagaaaattcattgaagctgcacaaaggtacaatgagctctcttacaagacaatagtccacgaaagtgaaagactagaggccttaaaacatgctttgcactgtacgatcttagcatcagcagggcagcagcgttctcggatgctagctactctttttaaggatgaaaggtgccagcaacttgctgcctatgggatcctagagaaaatgtatctagataggatcatcagaggaaatcaacttcaagaatttgctgccatgctgatgcctcaccaaaaagcaactacagctgatggttccagcatcttggacagagctgttattgaacacaatttgttgtctgcaagcaaattatataataatattaccttcgaagaacttggagctcttttagagatccctgcagctaaggcggaaaagatagcatctcaaatgataaccgaaggacgtatgaatggatttattgaccagattgatggaatagttcattttgaaacacgagaagccctgccaacgtgggataagcagatccaatcactttgtttccaagtgaataaccttttggagaaaattagtcaaacagcaccagaatggacagcacaagccatggaagcccagatggctcagtgaatccttgcagaacttctgtgcacatgacatctttttccatgttgtgcagatcagtttcactatctccaaagcatttgcatcatgaccttatacatttcaatcccttttatgctggattccgtttaaagaagacattattagagcaggaagtacaagcatttaaaatatgtagttcccatatatttcagggtctctgtgtattaagctaactcagatgttttgaaagctttttctttaaacagaggtgaaatatctgtggctaaaaagtttgagatttgtgataactttgtagtcatgtaaaacttaagtgcttcatgcctctccaaatgtggttattctaataaatggagaaatgagccaaataaaagtagtactttgtttttagtta

SEQ ID NO: 440 - DNA, 2145 bp, Homo sapiens
  source 1..2145: mol_type = genomic DNA
atttctccagtgctgctacagaatgggactttttgcttgaccttgtggaaactcatgggttctccaagttgtaaagagttaagaaaagggatggaatgtctggggaatgttgcagggaaggctgcagctctctgctcttagctttctcaccctggaggggatcccaacactcggtggtgcttctgggtctgaggtcttccctaagttctgtttgatctgccaaagagccagcctcagtccactgagaaacagggatgtgccgttatctgcacactgaggtttatttttaccttgtccctggtgagtccccagagacaaggagaaaacactttgggagggagttaagagccttttgcttatccttgaaggaaagcagtctctgaggattagtgagggtggtggtgagggtaggtagggggaggagagtcagaggaatcagagttatttggactgcattttttccttgcctgattaaatcttactgacattggcactttgtgtcactaaaagaacacagccctggatgtggggccagggaccagagggttggcggcagagtctggggctggcatggctgctgggctgcttggctctgaggacccaccgtggagttggaacctgacttgtcgggcgctgaggacctgccaagtgaggaacattcgagttctgcagctgctgctaaaaccatggtgcatctccagggccgtctatcagatgacggagggccgccgatgtcaagtacatcttcttgatgacaggaagctggaactcctagtacagcccaagctgttggccaaggagcttcttgaccttgtggcttctcacttcaatctgaaggaaaaggagtactttggaatagcattcacagatgaaacgggacacttaaactggcttcagctagatcgaagagtattggaacatgacttccctaaaaagtcaggacccgtggttttatacttttgtgtcaggttctatatagaaagcatttcatacctgaaggataatgctaccattgagcttttctttctgaacgcgaagtcctgcatctacaaggagcttattgacgttgacagcgaagtggtgtttgaattagcttcctatattttacaggaggcaaagggagatttttctagcaatgaagttgtgaggagtgacttgaagaagctgccagcccttcccacccaagccctgaaggagcacccttccctggcctactgtgaagacagagtcattgagcactacaagaaactgaacggtcagacaagaggtcaagcaatcgtaaactacatgagcatcgtggagtctctcccaacctacggggttcactattatgcagtgaaggacaagcagggcataccatggtggctgggcctgagctacaaagggatcttccagtatgactaccatgataaagtgaagccaagaaagatattccaatggagacagttggaaaacctgtacttcagagaaaagaagttttccgtggaagttcatgacccacgcagggcttcagtgacaaggaggacgtttgggcacagcggcattgcagtgcacacgtggtatgcatgtccggcattgatcaagtccatctgggctatggccataagccaacaccagttctatctggacagaaagcagagtaagtccaaaatccatgcagcacgcagcctgagtgagatcgccatcgacctgaccgagacggggacgctgaagacctcgaagctggccaacatgggtagcaaggggaagatcatcagcggcagcagcggcagcctgctgtcttcaggttctcaggaatcagatagctcgcagtcggccaagaaggacatgctggctgccttgaagtccaggcaggaagctctggaggaaaccctgcgtcagaggctggaggaactgaagaagctgtgtctccgagaagctgagctcacgggcaagctgccagtagaatatcccctggatccaggggaggaaccacccattgttcggagaagaataggaacagccttcaaactggatgaacagaaaatcctgcccaaaggagaggaagctgagctggaacgcctggaacgagagtttgccattcagtcccagattacggaggccgcccgccgcctagccagtgaccccaacgtcagcaaaaaactg

SEQ ID NO: 441 - DNA, 2158 bp, Homo sapiens
  source 1..2158: mol_type = genomic DNA
ggcgtttcccagaaggcccagcgccgggaaggggtttgcagctgctccgtcatcgtgcggcccgacgctatctcgcgctcgtgtgcaggcccggctcggctcctggtccccggtgcgagggttaacgcgaggccccggcctcggtccccggactaggccgtgaccccgggtgccatgaagcaggagggctcggcgcggcgccgcggcgcggacaaggcgaaaccgccgcccggcggaggagaacaagaacccccaccgccgccggccccccaggatgtggagatgaaagaggaggcagcgacgggtggcgggtcgacgggggaggcagacggcaagacggcggcggcagcggctgagcactcccagcgagagctggacacagtcaccttggaggacatcaaggagcacgtgaaacagctagagaaagcggtttcaggcaaggagccgagattcgtgctgcgggccctgcggatgctgccttccacatcacgccgcctcaaccactatgttctgtataaggctgtgcagggcttcttcacttcaaataatgccactcgagactttttgctccccttcctggaagagcccatggacacagaggctgatttacagttccgtccccgcacgggaaaagctgcgtcgacacccctcctgcctgaagtggaagcctatctccaactcctcgtggtcatcttcatgatgaacagcaagcgctacaaagaggcacagaagatctctgatgatctgatgcagaagatcagtactcagaaccgccgggccctagaccttgtagccgcaaagtgttactattatcacgcccgggtctatgagttcctggacaagctggatgtggtgcgcagcttcttgcatgctcggctccggacagctacgcttcggcatgacgcagacgggcaggccaccctgttgaacctcctgctgcggaattacctacactacagcttgtacgaccaggctgagaagctggtgtccaagtctgtgttcccagagcaggccaacaacaatgagtgggccaggtacctctactacacagggcgaatcaaagccatccagctggagtactcagaggcccggagaacgatgaccaacgcccttcgcaaggcccctcagcacacagctgtcggcttcaaacagacggtgcacaagcttctcatcgtggtggagctgttgctgggggagatccctgaccggctgcagttccgccagccctccctcaagcgctcactcatgccctatttccttctgactcaagctgtcaggacaggaaacctagccaagttcaaccaggtcctggatcagtttggggagaagtttcaagcagatgggacctacaccctaattatccggctgcggcacaacgtgattaagacaggtgtacgcatgatcagcctctcctattcccgaatctccttggctgacatcgcccagaagctgcagttggatagccccgaagatgcagagttcattgttgccaaggccatccgggatggtgtcattgaggccagcatcaaccacgagaagggctatgtccaatccaaggagatgattgacatctattccacccgagagccccagctagccttccaccagcgcatctccttctgcctagatatccacaacatgtctgtcaaggccatgaggtttcctcccaaatcgtacaacaaggacttggagtctgcagaggaacggcgtgagcgagaacagcaggacttggagtttgccaaggagatggcagaagatgatgatgacagcttcccttgagctggggggctggggaggggtagggggaatggggacaggctctttcccccttgggggtcccctgcccagggcactgtccccattttcccacacacagctcatatgctgcattcgtgcagggggtgggggtgctgggagccagccaccctgacctcccccagggctcctccccagccggtgacttactgtacagcaggcaggagggtgggcaggcaacctccccgggcagggtcctggccagcagtgtgggagcaggaggggaaggatagttctgtgtactcctttagggagtgggggactagaactgggatgtcttggcttgtatgttttttgaagcttcgattatgatttttaaacaataaaaagttctccacagtgc

SEQ ID NO: 442 - DNA, 10370 bp, Homo sapiens
  source 1..10370: mol_type = genomic DNA
gggttgaagttgaggctgaggagagagccgagctagcgacgagcagtcgttgcggccgccggcgccgcgggaggtggtggaggcctagccggagccgagaggtctcttgttcccgtcccacggtcccggcgtcacccctccggcgcccagtccccgtcccggaactcccgggcctgtcctgggcccccggtctgtgcactccgctcgccgcagcgcccggcccgggccgcacccgccggccccatgaggagggacgtgaacggagtgaccaagagcaggtttgagatgttctcaaatagtgatgaagctgtaatcaataaaaaacttcccaaagaactcctgttacggatattttcttttctagatgttgttaccctgtgccgctgtgctcaggtctccagggcctggaatgttctggctctggatggcagtaactggcagcgaattgacctatttgatttccagagggatattgagggccgagtagtggagaatatttcaaaacgatgtgggggctttttacgaaagttaagtcttcgtggatgtcttggagtgggagacaatgcattaagaacctttgcacaaaactgcaggaacattgaagtactgaatctaaatgggtgtacaaagacaacagacgctacatgtactagccttagcaagttctgttccaaactcaggcaccttgacttggcttcctgtacatcaataacaaacatgtctctaaaagctctgagtgagggatgtccactgttggagcagttgaacatttcctggtgtgaccaagtaaccaaggatggcattcaagcactagtgaggggctgtgggggtctcaaggccttattcttaaaaggctgcacgcagctagaagatgaagctctcaagtacataggtgcacactgccctgaactggtgactttgaacttgcagacttgcttgcaaatcacagatgaaggtctcattactatatgcagagggtgccataagttacaatccctttgtgcctctggctgctccaacatcacagatgccatcctgaatgctctaggtcagaactgcccacggcttagaatattggaagtggcaagatgttctcaattaacagatgtgggctttaccactctagccaggaattgccatgaacttgaaaagatggacctggaagagtgtgttcagataacagatagcacattaatccaactttctatacactgtcctcgacttcaagtattgagtctgtctcactgtgagctgatcacagatgatggaattcgtcacctggggaatggggcctgcgcccatgaccagctggaggtgattgagctggacaactgcccactaatcacagatgcatccctggagcacttgaagagctgtcatagccttgagcggatagaactctatgactgccagcaaatcacacgggctggaatcaagagactcaggacccatttacccaatattaaagtccacgcctacttcgcacctgtcactccacccccatcagtagggggcagcagacagcgcttctgcagatgctgcatcatcctatgacaatggaggtggtcaaccttggcgaactgagtatttaatgacacttctagagctaccgtggagtctctccagtggaagcaaccccagtgttctgagcaagggttacaaagtgagggagggcagtgtccagatccccagagccacacatacatacacatacacacccttacccccatccactctagctttgtgaccatgggactgaagtttgtgatggcttttttatcaagtagattggtaaaatttaaccattcctgttgaggtgcccataagaaaatcataggccaagatagggaggggcattccagcaaaccccgtgttaatgctactgtggtttttaaatttttgtctaggggtttctttggggattttagaacagcatctgctgtcctccggggtcaagaaaagcatggaaagacaatatatgatgtacccagggaccagaaagaaaatttctttgcatcttagaaatggtagacattcattgtgactaaagagcttctatgcttccttgtttccatgccaacatgctgagcatgctcacaaagaaggctcgtccattcctcctgtgttttagtatttggcccagaggtttcctaaatggttgccttgaaatcactgtggtccaaatgtaattcttacacactcaaattatcactgtctgtagcacacttgtgcacctgtcttacattctctgttgctcccccccacactcttgctcagtctgtcacctgttcagtctgcttactcactcaattgttacccttttgctgttgtcgtgtttacagtttgcattttgaatgattagttgggattaccaaacattttttaaaaagatattatcaataaatatttttttaattctaaattttaccattaggggaccctgcctgaatctttgccaacctgcaaggaaactctaatgaaagcaagaaaagttatgagaagaaactgttttgatgaaaacagatgctaccttttggtttctattttatcttctgatatgtgataattcgcatggtatccccaatattccccctacatattcttccttctgtcagactccaccaactgtatcataaggaaagagagagatgtattattaggaaagagtgaaaatgataaatcacaaaacagagcctgaaagtccccaacacccaagttcagacattaatgattaatgttattatatatttactgaaatctaggagtgatcagtggcatctctgacctatgaggttgttttaacaggaatgccactagaggagctgtgtattctagccagtctgtttctctcttttcccccatttcagcctttcagggatacaagaatggctctataacagctggtcaattgtatgtcagtgttaatggattcatatctagtgttggcaccccaaagggccagaaccttcccataacctgtcagtcatctctcttttctgccccagtctttttttttttttttttttttttttaagacgggttctcactcttgcccagactggagtgcagtggtgcgatctcggctcaccgcaacctccacttcccaggctcaagcgattctcttgcctcagcctaccgagtagctgggattacaggcatgcaccactactgcctggctaatttttgtatttttagtagagatggggtttcacatgttggccagcctggtcttgaactcctgacctcaaatgatccacctgcctcagcctcccaaagtgctgggactacaggcatgagccaccatgcccggccctgttcagacttctgaatgaagtatgaatgtagccaggtgaagcattgaggcagctgaaagagaacactgagaggaagtaaggggtttagtgtctctgcttagcctgggcactagaactgagggaggaatttagtgtccaggactcaagagtccaagaagaagcaccctctgtcttcccaaaaaatcagaggataaaggaagtaaaatgagtttttaaagcataagaagaaaatttctaaaccccaagattagaaacccagtgtgatttttagtagggtgattttggcggggggtgtcctttgagacattaatgtgcaatccatcataatattaatcttctatatgatccagactattaaaaggcttgttttatttatttattttattttattttatttttttagagatggggtctcgctatcttgcccagcctggactcaaactcctgggctcaagccttcctcccacctcagcctcccaagtagctgggactacaggtgtgtgccactgtacccagcttaagaggtttgttttaatgctgcagttgctgattataccagcatatataagaataaagtctgatttatttatccattgatttagaaggcaattggatgaaagggtcttagaagtctatactatccattaatatttatcatattaaatttattttaaatcctgttttattgtgccgctttaaaaacgcagattacttgtttattcattcccctttccccttattctctttcagattaccttataaggaatatagtttttaacatgaaactcagtttcttgtctgtacccctacacataaaaatacatacgtgcatacacacatacttccagatgtggttaataatattcagatccctaggttactcaaacaaaactaaaggagagaactatttaggggccatctgctttaaagtttaaggtgttttgttgttgttttagtgcctgtacaaattgaccataaaacccagattgattagtgagtgtggatttgagttgcctaagttgaggctattaaggtacttctttacttaaaagataagtttaaaagactctattcatcagttcatgatgatcttggaaatgctgtttctctgctcaaaggatatacccacaggcaggtccatggggacttgctctggtgatctctgctattaaggcaaattccagcctgtttgtgccaagaacagagtcaagtgagagagaatgaagactcagagatgtgcagcactggcttgtatgttgtcaggcagaagccttgttcctttctcaagaaaacttcaggcctatcaagcttggaaggaaatacatttttttatgctgatttgcagcctacaccagctgatgaatatgctaggactttgagagaacacaaagcatggtaagttttggtcaggtggaaaggagcctgacatctgaacataatgcttcctctctcaacatctgggatacttttgaaaattcagtaaggcttaatgtaggaaaaattctttacaggaaaagctaattgatctgtttgtctaacctcatagccactccaaaatatgccttttataatggaaaaaaacagtgaacagagagaagagatttggggataagttagaaggtaccctcaaaactactgccgtaaacctacaggtgggcaaggaggaattactgtagtgtctctggagaaagttcttgaacatccaaatcatctcttttctaagcagtttttcccctaatctcataccttacatcttccagcatcatttgctacatcaatgtcttttcatcctcttcatcagccccattgagctgactccagcttatttttgcactgatttccaccatttccttcccacacccatcctttccctctatttaaagcctccatctcaccctcagtaatgctgctgatttactctcagatgtctcaagtctagcttcctttttgaatccttctcctactccaggggctgtcaaaggcagccttaaagttcagtgactgttaggtggctcaggccatttttcattgggtggtctttggtgtttgcatactgaatttgaattcagtttaaaagcaaactgttggatatgaggaagaaagggatatggccttagccctttttccaatatttggaatatgaaagcatattgtgctttgtgtaaaaaatgttttcttctcctattctgctcttgtctttactgaaggtaaaagtattccttaagtagcttttgcaaatttctagtctgatttccacattcattaagttgatttagcagacatgtaagtcagaagtttcacatatcccttgtatcaaacattttatagggaaacctagtaaatttatgatgcttcattttgggctttccagactatttgagttattcaagatagccataatgttttagtagcgacattcttttattacttctaattgccttgtaaaatgcattgttatggcccggcacggtgggtggatcacaaggtcaggagttcaagaacagcctggccaagatggtgaaatgctgtctctactgaaaatacaaaaattagccaggtgtggtggcaggtgcctgtaatcccagctactcgggaggctgaggcagagaattgcttgaacccgggaggtggaggttgcagtgagctgagatcgcaccactgcactccaccctgggcgacagagtgagactatctcaaaaaaaaagaaagaaagaaagaaaaaaatgcatcgttactagtttgatagcccactaatgccatgggggactaaacaaaatatgtgatgaaacctgtcttggtttgaagttgttagaaagtgtgagagtgtcactggaaagaagagagtggcttcctgcctgcttgtttagtcagcatgtccttaggtgactgtgttgttgggagaagagcactcatgggtcatgggtgacccttggccattttatgtttattgtgctgaaagtcacaggcggctcatgccagttgctaccagtgagaggaggggtttaaaggaaattgctctattttgccttattcctccttatgtgtatgatttaagggtaggcttttatcctggttgtatctcctggctgacagactttctcaatcatatgtttgagctctgaagcattttacaaaaagattgcctctctatctgcctgccaatcctagaatctttagccacctcaaacccaggcactgtgaattagccaagtcctgtttgagaagaaatgtaggatgtttggttggaattcttgagacagaacctctctccccattaatgatgttgtaccaaagaattctaaagcagtaaaaggataatggggaaaaatggagtcacagcctttcctcgcctatatttcttttttttttttttttttttgacatggagtctcgctctgtcacccaggttggagtgccatggcacaatctcagttcactgcaacctctgcctcctgggttcaagtgattcttctgtttcagcctcccaagaggccaggattacaggtgcccaccaccacgcccagctaatgtttgtatttttcatagagatggggttttgccatgttggccaggctagtctcgaacttctgacctcaagtggtccacctgccttggcctcccaaagtgctgggattacaggtgtaagccaccgcacctggccagtttctatcataaattttaaatgtaagattggaagatacagagagctgtataaaatcataccagtagggtataattagcccaggtagtttaggaataaaattgggttgtatccgagtgccctaacttgacattttgattctccagcaaagaacataggttactaggttactaaccttgccttctcacttgggataaactttttttttttttcttgttgcccaggctggagtgcaatagtgagatctcggctcaccgcaacctccgcctcttgggttcaagcgattctcctcccttagcctcccgagtagctggaattacagcctgtgccaccacgcccggcaaaatttgtatttttagtagagacggggtttcaccatgttggtcaggctggtttcaaactcccaacctcaggtgatctgcccacctcagcctcccaacatgctaggattacaggcgtgagccactgcgcccagcccaggataaacattctacctgcctgaaagtaccataagaggcaagtgagtttcttgcatgatgggcttctgcagcttccccctcaagtcacatctacctgttgtatttatttatttatttatttttgagacagagtctcgctctgtttcccaggctggagtgcagtggcgtgatctcggctcactgcaagctccacctcccaggttcacgccattctcctgcctcagcctcccaagtagctgggactacaggctcccgccaccacgcccggctaattttttgtatttttagtagagacggggtttcaccctgttagccaggatggtctcgatctcctgacctcatgatccacccgcctcggcctcccaaagtgctgggattacaggcgtgagccaccgcgcccggcccgttgtatctattttttttagacgcatcaattcagtgtctctgaagcctttgatcgttaggaaggtcagtacataacctcttaggtgaagctgagttgatctttggagcccaagagagttaattttcaggagaaaaagaattagggcaagctcccctgtgggatgttaagagaaagtccatatgcgcttcttccatctctgcctcttgtttttaaataagtgcttgtgaagttcagtttatagaggttgagtctcagtgcttcctcagccagggtggtttattgctgttttacaaagaaccatgaacaagcaaaatcctatcaatagtcctttctgttttatgttttatagtcttattttgaagaatcggcatggtaaaatgatagacaagtttcaaataaagcagataattagctctagaattggggtactttgcctcaggtacagcatctgtcttgaatacatagtgatggctgtgtcacacatgggtacatttactttcctctctgatcaactgcacccctttttactggcaaagagggctcctactttctacacacttaaccagtcaaacagataggttttggcaccaccgaaagaaccacaagtgcaccccagctgcatctgggcatggttttggtactaggactagagaagtgagcagtaaatgacagtccttaccctaggaagagatgggagaagagaggtgtccagacatatttaccttttctcttctgtcatgccccaagaaccaaggatcatctttgaagtgacgtcttttttgttaaattggaagaagaaaactttgcagccaggcgtggtggctcacgcctgtaatcccagcactttgggaggccgaggcgggcggatcacaaagtgtcaggagtttgagaacagcctggccaacatggtgaaaccccatctctactgaaaatacaaaatcccagctacttgggaggctgaggcaagagaatcacttgaacctgggaggcggatgttgcagtgagccgagatcacgccactgcactccagcctgggcaacggagtgagactccatctcacaaaaaagagaaaagaaaagaaaactttgcttcactaagtttctcttgccattatctcattaattcagatctgtacctcattgctgctcacacatatatgtttcttaccttagcctgaaccttctcaggccttgaagtcattattctactctttttttttcttttccttttttatggcactagagaatgaaaacctaaggtcttagaaaatcttaacttgaaaaagtctctaactggcatgatttgattacttttttcccctgtggacaaataattttctttcctatataatagatttttagtaagtgaaacctttgctgctgctttcctgggtttacattagttttttcctgcccttaagaataatttatctgtgcttctctgatgactgttaatttctaatagtgcaggaagggatgagcttttgatttcttctcactcccctcctcaccctacttccaaattacacactaacttctaacccttacagcctgttggcacatacacaagatccacgagaccatgctcctcagaagctacccatgtcctttctcaccatggtgtggctcttggagccctgagtatctgtgactacccactccaaaggttgactgtaagaggagagcggccttcttaattttgcatttcttaattttgtttttctccattcctgttttatgacttggccttcagatgcttcctactctggcctcctccttttttctcctaggaattgtttccaggtaacctaccatgtgcacttctcagctgctctgctcacctttgcccaccttcccgtgaccctgagagtacagatccgaataatgtggcctgtgcagagctcagagaactgtgaggactacccatgcctgtcagactctgctcagggacagagatggatgggtaaatggtgctgttggagacatttttatcttcataccaggctctgtttcatccctgcaccccgcacccccactcactcccctgagggggtaaaatgcagaggtggttgacctgaagggtctgattccctccttcccaagccttagggcctaccctggagtgctgcagtgtgtgagagctgctgcttgcttgtttctccactaggcctgctccaaatgcttagccaatctctggagccgacacagttgcctacggggtgacttagcaccaggttccattagctctccaagtgactgtttccacccagtacttttggcgcttgaggatggggggagggggattatttaaaataaataaaatccgaggtggcagtagaggattccttttgctttaaaaatctttggactaaaaaaaaaaaaaaaaagttttttatatataaatatataaagtaaattgttatgtaactattattgtttcttgtatgttctaattttgttttatgatgtaattaaagaaagtaagctgtgaagacttttcattttcctgtg

SEQ ID NO: 443 - DNA, 2496 bp, Homo sapiens
  source 1..2496: mol_type = genomic DNA
attgcggaagtttctctacccatgcggtgtctctatggtcgggtgggtggggccaggaggaagatggcggcgtccgcagctgccgctgagctccaggcttctgggggtccgcggcacccagtgtgtctgttggtgttgggaatggcgggatccgggaaaaccacttttgtacagaggctcacaggacacctgcatgcccaaggcactccaccgtatgtgatcaacctggatccagcagtacatgaagttccctttcctgccaatattgatattcgtgatactgtaaagtataaagaagtaatgaaacaatatggacttggacccaatggcggcatagtgacctcactcaatctctttgctaccagatttgatcaggtgatgaaatttattgagaaggcccagaacatgtccaaatatgtgttgattgacacacctggacagattgaggtattcacctggtcagcttctgggacaattatcactgaagcccttgcatcctcatttccaacagttgtcatctatgtaatggacacatcgagaagtaccaacccagtgaccttcatgtccaacatgctctatgcctgcagcatcttatacaaaaccaagctgcctttcattgtggtcatgaataaaactgacatcattgaccacagctttgcagtggaatggatgcaggattttgaggctttccaagatgccttgaatcaagagactacatacgtcagtaacctgactcgttcaatgagcctggtgttagatgagttttacagctcactcagggtggtgggtgtctctgctgttctgggtactggattagatgaactctttgtgcaagttaccagtgctgccgaagaatatgaaagggagtatcgtcctgaatatgaacgtctgaaaaaatcactggccaacgcagagagccaacagcagagagaacaactggaacgccttcgaaaagatatgggttctgtagccttggatgcagggactgccaaagacagcttatctcctgtgctgcacccttctgatttgatcctgactcgaggaaccttggatgaagaggatgaggaagcagacagcgatactgatgacattgaccacagagttacagaggaaagccatgaagagccagcattccagaattttatgcaagaatcgatggcacaatactggaagagaaacaataaataggagactttagcacacttcacttgtttctagaagtccagaattttggacctccacgtgaaagaactgttcttacctctgaactgggggctcccataagggataattttcctcagagtagcaaagtttctcttattagagaaatcttgtgactcagatgaagtcagggatagaagacccttggacctggcaggttaatgctgattattccttggcctttcccttgtatttatgcaaggaaggatatactgagctgatactcttccaagcctacaacttcaagttttatcatttgaactcaagtacttttgctgctgaggaatggaatcaaaagaacgtagtctcctggtgaccacctcagatctctattattaggctagatgtatagcctctactcccccagcttcttgctcttgaccctgcactgtaagttgcccttctattagcagccaaggaaaagggaaacatgagcttatccagaacggtggcagagtctccttggcaatcaaccaacgttgctatgaaatatgcctcacactgtatagctcattataggacgtcaggtttgttgaaaaaagtgggcaagacatgattaatgaatcagaatcctgtttcattggtgacttggataaagactttttaattttaactttgttctaagactgcttgtcatgatttcaaattagaaaattatataattgcaaacagcttcacttctcctgttcaacagaggcttaaggccagatgtccaaacttgtctcaataaggaggtgatattttactaaagtttcccacgtgcacatactgactaaatacagagctaggcccagtttgtattgtactctgaacttaatgcaaagtctccttggtgattttcgcaaagtccgtggatttgggtcagaggcacatttcatacataacagcccttataaacgtttgccctgcctccacattttacagtatcttaaaacagtacatttctttcaaagaattttatctctatgagtcagtactccaacttagtggttctcacattgtggaccaggagcatcagcatcatctggggaattgttcaacttacctcttataacctatgaactcagaaaccctgggggtgggctgagcagtctgttttagaaagccctccatgtgattctgatgcatagtagcctatgacataattccagaccaggtgaatctcaagatactaatcctcacatcatttgccttctcatatttccctcgtcttgaccatctggtgcctgttatgcagtttaacattctgcagcaataaaagtgttttattataaa

SEQ ID NO: 444 - DNA, 8794 bp, Homo sapiens
  source 1..8794: mol_type = genomic DNA
gcgcgcgcgcgcgcgtgtttgtgtgtgtgtttcccctgccgcggggaaatggctgctgttgcttctgggccagaggaagagaatgagactaatagggatgccaaaggaaaaatatgatcctccagatcctcgcagaatttataccatcatgtcagcagaggaggtagccaatgggaaaaaatctcactgggcagaattagaaatctcgggtagagtgcggagcctaagtacatcactttggtcattgacacacttgacagcgctgcacctaaatgacaattaccttagtcgcattccacctgatattgccaagcttcataatctggtttacctggatctgtcatccaataaactcagaagtttaccagcagaactaggaaacatggtgtctctcagggaattgcttttaaataacaatctgttacgggttttgccttatgaacttggtcggctcttccagctacaaactctaggtttgaaaggcaatcctttatcacaggatattctcaacttataccaggacccagatggaacccgaaagctactgaacttcatgcttgacaatctcgcagttcatccagagcagcttcctccgaggccatggattacattaaaagaacgagaccaaattctgccgtcagcatcattcacggttatgtgttacaatgtgttatgtgataaatacgctacccggcagctatatggctattgcccatcctgggcattaaactgggaatacaggaaaaagggaattatggaagaaattgttaactgtgacgcagatatcattagtcttcaggaagtggaaacagagcaatacttcactctctttctgccagcattgaaggagcgtggatatgatggatttttttctccaaagtcacgtgccaaaatcatgtctgagcaggagagaaagcatgtagatggttgtgcaatattcttcaaaacagaaaaatttacattggtgcagaagcatacagtggaatttaaccaagtggcgatggctaattcagatggatccgaagctatgctgaacagagtgatgacaaaagataacattggtgtcgctgtggtattagaggtccacaaagaactatttggagcaggtatgaagcctattcatgctgcagacaaacagctgcttatagtggcaaatgcccacatgcattgggacccagagtattctgatgtgaagctcatccagaccatgatgtttgtctcagaggttaaaaacattctggagaaagcctctagtaggcctggaagcccaactgcagatcctaattccatcccgctggtgctatgtgcagatcttaactcattgccagattcaggtgttgtggaatacttaagcaatggaggagtagctgacaaccataaagacttcaaggaactaaggtacaatgagtgtcttatgaacttcagctgcaatggaaagaatggaagctcagaagggagaatcacacatggcttccaacttaagagcgcctatgaaaataacttgatgccttacaccaattacacctttgatttcaaaggcgtgattgactacattttctattccaagactcatatgaacgtgcttggtgtcctggggcctttagatcctcaatggctggttgagaacaacatcactgggtgtccacaccctcacatcccttcagaccacttctcactgttaacacaacttgaactccaccctccactcctgcctcttgtcaatggtgttcacttgcctaatcggaggtagtggagtactgccccgccaagacggggatctgttgctatggacctgtacagttgtaaatcaaagtatgtaggagtgaagtatggccatccttaagctgcttcttcaggtttctttcattatgtgtttgctgtaagactttgtacatttttgtgcatattggtatcatttggcagtagggctggaaccaaagtattactctctttacaaaattttaatttaacatgtttttaaattggaccttctttatattgtattaacagccagcattcaaaattgataaattaccaatttgaggcccaataacagtgtatttgtttttccaaaacaaatactttcttttgaatggtttcagtgagccaaccattttataaaaggcaatttttaaaaactataaatacagtattttaaactgaatgatgatatgccttccagggaaaaccttgaatttttcctttataactgacttttggattccaaagtcatttgcacattaacagagtacttaaatttacttgttcagtccataaactatgatatagcctctatacatggtaagaaaatttgaaaaattaaagatggttgcacagtatacttttataatccagcatgtaacaccacatgacaatttgttggccaaatgctggtttggagtttttttgaggaatcactttggtttttttgtcctttatatataaccttattggaagtattaattctaagcctgtctctcaagtttatttatagagaaaaagtaagtaatctgtattgccacataccttgaaaatagaatgtggtatgtttaggatgcccacggaatgaatttttccttattccaattcaaccttctgtctggttgtgccaggaaaacagatgttatatgacctatgtcatttttgccattatagtcaaatgttaaaagaagaaaaaagtctgctgaataaaaaggccttgatcaaagtttcagatggggaaaatcatacagatattttatgtgtttccaacatagattatgtggctgttggtttcttgagatgacagtgcaaaggatttgggagagagaacaaatttggggcagtagttgaaaacgttgggtcattttcctgactctagctgccaaatggccatcatatgcttttaatctttgtttcagttgtctgtcagggttgaattaagaagctactggtttattcccaattgttgatgcctttaggtatgttggaatcttttttttgcctaggaggggccagttgaaaatctgtgactcaagaggcagtgaacagaatactgttttctggggaaaaattggttggctacttgatgttaattatggcacagtaacaggaaaaggttgtgtctgtgtttttaagtttttctttattctgcttttttgctgctataagagttttctgaaatttatattttaaacttttcatgcactttactgtttctagtctcaaaatgtgatatttttaataaacaagaaattttccattatgtgaatgaaattttaaaagacaatagcctatatttgtgtctcactaatatataaagtataggtcaaatttaaattatttaattagttttaaatatacacaatttgtctcctctttcaaacctgacatcttcggctgttttattagtcttaaatgatgcatttactttggtcattttatgctaatttcttccatagtaaattaatcaggctatataaggtaatatttccccagagggtaattttagtgggacgagggtggtgggatgatgtcatatcatacatgggattgcatcagaagggttctgtaaagcctgaactcccttttaaaagtgcctagtgatagaggcgttgtttgtcatctattataattggaatgtcattgtagttcagtgaattttgatgtaaataaaatatcttttaaaaatgttaaagtaccaggataaacaaacaaaaagaaacaacccttaagatgacagattttcctcaacatgcaggtttcccttcttatatacctcaagtatccaacatctagccatgcaaattgattacctgaagcatagtactggaaagtagaatagcatgaaaaacttaattttgtggacattacctttttttgtaatcagctactgtatgttttattttagatcttttgttttgggtgggttttctgctctggaggtatatgcactaacaaaacattttcctcctttcatatacgcatgttaattagcaatgtgagcaatatttcctaccatacttcactcccaatattttttgagatgtttgtataaaatggaatttaaagttcacttatgattgtatatgaaccacagaggagcccatttattaataaaaaacttttttaatagttaaatgtagagggaaaaaataaaaaaaaatgggaaacattgtaaacagcttaagtttattttgtgtatgatcgaggcactctgttgcaggaaggtgtgtaattgggttctctctgcttcaaatgcgctctttcaaaccattcattatcctgtgtatttttaatgtggttttagtaaatgttggtagtagctctgttgaagtaggtaattgtgttatgttttgggtggtacacacttggggcatggtaacccaaatttcatgtgcacggtttccctttagcccactgcccaaatttcacatacccttcaccctttgttccctttgtaaaaggagtggtatctgttttgagctgccaattcagatgatcagaaatgctgctttcctcagcattgtcttgttaaaccgcatgccatttggaactttggcagtgagaagccaaaaggaagaggtgaatgacatatatatatatatattcaatgaaagtaaaatatatatgctcatatactttctagttatcagaatgagttaagctttatgccattgggctgctgcatattttaatcagaagataaaagaaaatctgggcatttttagaatgtgatacatgtttttttaaaactgttaaatattatttcgatatttgtctaagaaccggaatgttcttaaaatttactaaaacagtattgtttgaggaagagaaaactgtactgtttgccattattacagtcatacaagtgcatgtcaagtcacccactctctcaggcatcagtatccacctcatagctttacacattttgatggggaatattgcagcatcctcaggcctgacatctgggaaaggctcagatccacctactgctccttgctcgttgattttgttttaaaatattgtgcctggtgtcaacttttaagcaacagcactgcctaaaagcaagcagagaacagaatcccagcaccattctataggcaactttttagaattcagatatagtaaatctgttccagatttatgatgttttatgtaaaaaaaattttgtataataacatagctgaatatttttgtttcatttctttgatgtaaggcgtgtgaacattcgtttgaatatcacatgttgaagtcaggtatggcacaatgggttctgagaccagcttttcctcccctcccatttgccttgttccaagctctttcttttcaaattacttttctgatattcataggcaggtatttaattttactaattagcatcctgtgtgaatgtattaaagaagccactgtgttttagtgtagttggcaaaaatataaaagctgtttcttatttgcccctatttttttggtgtcttaaagttatatattaaatcacagagaagcaagggagaaagttgaaagatatctaaggctcatatcacttgattctatggtagattatattagaattgaggatgtggcacattaaaactggaacatgggcaaatatagtgttccattttaaaattctaagtttatattgttaaatgggtgaaaatttaagtttatatttgcatttccaagcgtttctaaaaatcactaatgccatctatacttttagtatgaaacagcagactatagaaagcacagggaagaataggctaaatacattctttgaagaaccagaggcatataaccacatcattatgtcattcctaatacatggctagattttctaatgataaaattgactgtgtcccaatgcttatttgattctaagcttttttattctgtttctgagatattttaatagctttgcaaaatatgctgaccagtttttggaaaataatggtttttatagcaagcaaagactttatggcacattttcaaaatagcactcatacatacttacattttgacagaaatgtgaattctcacattgatgagatattctttttcccacctgccctaccctttaaaaaaggtcacttttctaatgtgtagtagattcatttacgcctttccctttgagtcataccatgtttggagaactgtgtgaattgtaggtagagaaattaactagggaagccagaagcttgaactaaagttttaaatttgtaggcagatgagaacttttatactatggttgctttgggcgattctaattttgtaatagcatcatgatcaccaaaattaattcaaacattttagtacatctttaatctgtcttatttaccaaagttctaatctgtttaagaacaggatgccaagagcatctttcattttatagaatgatatgctcacctttataagtgtcacctaaaagcttgagggtaaaaaagaagcagcccatatatctaaactacaggatgtcttgaacaagattcacagaaagaaagaaaaaaaagcagttctttccaggaaggtggtaaggaagagcatgcatatttcttgttttaaccaaataccttttttatgtaaatgtctctattaaaccccaggtcctacaccaggaaatagggtgataaccaggaaaataccaagctttaacccagttggcagttccttgtggcatacatttggttagacttgggtttttcctggaaccaaaggaaaataagcatgttgagttcttcgttcaacagacatgacattgaagtaatagaatattttttaagtaaaatagttttcactttcaaagcctatgacataaggacatttgtgcttattaattgttaatttttttttatggtacattgtataaactgagtagcattgaactgcattttagaagtatgtcatcagaaacaaatcacattatggaaaggatatacaaatgccaagtgatatgactcttttggcatggtggtagcatggtccattcagctttcagaatctttcggaggctctagtttggtgcctagtactagttatttttgttagaacaatctctcaaaatttagataattttccagttgtatgtctgtcacttttaactctaaagcgtaagaatcatggtaaccctctcagaagtggtcctttcttgctcatttcagtttcgtattaacttcaaatcactgatgtattgtctttcaagctatcaattgttatatgtaccaatttaatttagtttgtagttatctgaagtcacaaaattggttcagcattgatgtcaaacaatggctttgcttcttaccaaacagacttagtatcctgctgcttgtttcaatcttgatgcagtaagtgatgcagtatctgggtctgtatttacttagaaactgtactgtcctttctctgtgcttaacttgctaaaaatatattcccttacctgtgaaattcctgagcggtgctctgccaacttttcaaggggagggatttggatggctgtgttactgcacactggatctggaattgttcagggttatgagtgacaaatttcttaaacaccagcagcactgagatgtgcactatgggcattcgtacagttgttgtccaaatgcaaacaactttttcatcttggagaagctgagatacagagttcaatagaactacttggaatattttgagaaggttgaatgtttcatctttggctttgttgtctctggagtggggaagtatggagggctttttttttttttttttttttttttttttttttttttaaagagagtgtgtatgtactttttctctctataagggccagggtgttggtcaaattcaccatcgattaatttatatcttctgttgtgatttttttcaactatataacaagtgccaactaattgtccatgggacaatctacttttccactcaatttatcgttttgagtagggaaaggttcatttattttcattacctggcattaagttaaagaattcattattttgcatacatttgagtcattctgtgacctataaagtgtttttgtaactatctaattctaatggttgcaaagcaaagcacatgactgtaaaaccaagcaaggtgttttagtaactttttccctgaatacttggtagtttccattgatactattccaaaacaaattctgctgttttaggttgtatatttactttgcttttgttctaagaaaaagccaaggactaaatcaacttgtttttgtgtttcagtaatcagtttaaaatctaagatttttttttaaattagactatttaatgaagtgccatgtaattgtagcttgctagtgtttaatgtttaatagactggttctgtaggtgttttaaccatttaacactctctgccatccctggagaaagtggttctactcttactgaacacattctctctgacaaaatcaccagctgctttatttttctatttattacagttaaacagttgatgaggtctgaatcttgaccaaaactgctcagctgagatgtttttcacaatagacactgtacaaagtgtgcgtgcaaaaggacacggttggtagtattttttcattaatgtgaacattgactaaaaaaaagcagtcctgccttttaaatcttgtggcagctcagaagggaggtgcttaagaaccttaactactatgtcagataacaaaatatttttttccattttggagattggttactgctcacacatgatgtatagggctaaatatatgcttgtttccttgcacctgtgtacttcccctctctccctccctttccttcccctgtaggcaataaatggccattttgcaactgca

SEQ ID NO: 445 - DNA, 3589 bp, Homo sapiens
  source 1..3589: mol_type = genomic DNA
agttcagattctgaaataataggttatgctttggacacactatataatataatatctaatgaagaagaagaagaagtagaagaaaattccacaagacagagtgaagatttgggaagccaatttacagaaattttcattaagcagcaggaaaatgtcactcttctgttatctttattggaggagtttgatttccatgtccgctggcctggtgtgaagcttcttacttctcttttaaaacaactagggcctcaggtgcaacaaattattttagtcagtcctatgggtgtttcaagattgatggacttactagcggattccagggaagttatacgtaatgatggcgtcttactactgcaggcactaacaagaagcaatggtgcaatccagaaaattgttgcttttgaaaatgctttcgagagactactggacattatttcagaggaggggaacagtgatggaggtatagtagttgaagattgtttgattttgctccaaaacttattaaaaaacaacaactccaatcaaaatttttttaaagaaggctcatatattcaacgtatgaaaccttggtttgaagttggagatgaaaattctggctggtctgcacagaaagtgaccaatctacatctaatgctacagcttgttcgtgtattggtatctcccaccaaccctcctggtgctaccagtagctgccagaaggctatgttccagtgtgggttattgcagcagctttgtactatcctaatggctactggggttcctgctgatatcctgactgagaccataaatactgtatcagaagttattcgaggctgccaagtaaaccaagactactttgcatctgtaaatgcaccttcaaacccaccaagaccggcaattgtagtacttctcatgtccatggttaatgaaaggcagccatttgttttgcgctgtgctgttctctattgtttccagtgtttcttgtataaaaaccaaaaaggacaaggagaaatcgtgtcaacacttttaccttctaccattgatgcaacaggtaattcagtttcagctggccagttattatgtggaggtttgttttctactgattcactttcaaactggtgtgctgctgtggcccttgcccatgcgttgcaagaaaatgccacccagaaagaacagttgctcagggttcaacttgctacaagtattggcaaccctccagtttctttacttcaacagtgcaccaatattctttcacagggaagcaaaatacaaacaagagttggattattaatgttgctttgtacctggctaagcaattgtcccattgcagtaacgcattttcttcacaattcagccaatgttccatttcttacaggacaaattgcagaaaatcttggagaagaagagcagttggtccaaggcttatgtgcccttttgttgggcatttcgatttatttcaatgataactcacttgagagctacatgaaagagaagctaaaacaactgattgagaagaggattggcaaagagaatttcatagagaaactaggatttattagcaaacatgagttgtattccagagcatctcagaaaccccagccaaactttcccagtccagaatacatgatatttgatcatgagtttacgaagctggtaaaagaacttgaaggtgttataactaaggctatttataagtccagtgaagaagataaaaaagaagaagaggtgaaaaaaacattagaacagcatgacaatattgtgactcactacaaaaatatgattcgagagcaggatctccaacttgaggaattaaggcagcaggtttctacattaaaatgtcaaaatgaacagctccagacggcagtcacacagcaagtatcacagatccagcagcacaaagaccagtataatcttcttaaaatacagctaggaaaagacaatcagcatcaaggttcttacagtgagggggctcagatgaatggcattcagccagaagaaattggtagattgcgagaagagatagaagaattaaaacgtaatcaggaacttttacaaagccagctgactgaaaaggactctatgattgaaaatatgaaatcttcccaaacatctggcacaaatgaacagtcttcagcaatagtttcagctagagattctgaacaagttgcagaattaaaacaggaactggcaactttaaagtctcagttaaactcacaatctgtggagatcaccaaactacagacagaaaagcaggaactgttacagaaaacagaagcgtttgcaaaatcagttgaggtacaaggagagaccgagactataatagccaccaaaactactgatgtagaaggaagactgtcagcattattacaagagaccaaagagttaaagaatgaaattaaagctctgtctgaggaaagaactgccattaaagagcagctggattcatctaatagtaccattgccattttacaaactgagaaagacaaactagagttggaaattacagattctaaaaaagaacaagatgatctcttggtgctcttggccgatcaagatcagaaaatactgtcattgaagaataaactcaaggatcttggtcatccagttgaagaagaggatgaacttgaatctggagaccaagaggatgaggatgatgaaagtgaagatcctggcaaggatctagatcatatctagttttcaaatctctaggaacaatagagattatatcataactctgaagatggactctaaactttggtttacctccatggaaaataaagatttagaaaccaggtggaaaacattcactattaagactattgatatatttttgtaatgttgccacccatgttgaaaaccttaaaactgaatttatgtagaacacacatcttttatttaaatccatctgaactgtcccaaaatgtaatttgcaaagagcttcaaacaccaaaaatataccattttaaggcatgtggtgacaatgctatttgccttagttcattcgttgtttactttgcaaaatttgtgacttttaagtactaacacatttgattgaatgtgtattgaattggaattattatttctaaattcagcatttgagtccttagttgatgattttcttttaaagaaattagtttatttaaaagcaagatagcctgggttgggagttagtgcatatcatcagccctccatctaatgtgattgctaagatgtgcaggataggacagcttagaatgagtgccttgacacctacatatggctgcattccatacctcagtgaagaagccgaaggatgctgacacacagtgatgtggagggcattccggagaaacttttgcaacagtgtattaatgtgattggttttctttttgttttaagctaaacatctaaaacaaatttcaagttaacagttcatacaactcagatttagtagtattgtttatcataaaacatattatgttcctagttttaaaaagacccaaagtatgattaatataatttattggcatttttgctgaataggtttaagtcagataatagattttaaaaaagcaaatgaggcaatgtgtcaaaatttaatgtttcataataaaaatagatacgttgactt

SEQ ID NO: 446 - DNA, 2434 bp, Homo sapiens
  source 1..2434: mol_type = genomic DNA
ggctctcggttctgccgacgcaggtcccgcccctctcgtagcctcgccccgcccgccgcgcaggcgccgtccgagggctccgtttgaaacatggcgcgggctggccctcggctggtgctgagcgaggaggcggttcgggcgaagagcggcttagggcctcaccgcgacctggctgagcttcagtcattgtctattcctggaacttaccaagagaagatcacccacctgggacattctctgatgagtttaacaggtctgaaatctttggatctctcgcgcaactccttggttagtctggagggcattcagtacctgactgcattggagagtctcaatctctactacaactgcatctcctcgttggcagaagtgtttcggctccacgccttaaccgagctcgtggatgtggacttccggctgaaccccgtggtgaaggttgagcctgactaccgcctttttgttgtgcacctgctccccaagctccagcagctggacgatcgccccgtgagagcaagcgagcggaaggcttcccgactgcattttgcatcagaggactcactcgactccaaagagagcgtcccagcttctttgaaagagggcagaccacaccaccccagagccaagtgcaccgaggccttggccaagcagagcctggtcatggatgcggatgacgaggcagtcctgaacctcattgcagagtgcgagtgggacctcggcaggcctcccgggagcacgagcttcagccagaaggggcgtgaggccgactctcgtggttcccaagaatccagacatctgttgagcccgcagttggtacagtaccagtgtggggactctgggaagcagggccgtgagacgaggaggagcagctgcagagggtgctgtctggagaagatgccttggagccagctctgtggagagcttccgccactgtacggagcggagccagaggcctcccgtgcccccaggccacacacgtacttcaccccacacccagactccatggataccgaggactcggcctcttctcagaagttggatttgtcaggagaaatggtgcctggtcccctgccagcccccggaaagtgcaggaagcgaagaatgcctgttggaagattccagacgttttcggaccaggagggtttgggctgcccggagagaactcatgggtcctccgtgcccaaggagagcctgagcagacaggacagctcagaaagcaggaacgggaggaccttgtctcagcctgaggcctcggagactgaggagcagaggtctcggggtgtgaccgacaccagagagccgtctcccgggtcacactcggctctacccgggaagaagacggccctgcaggcggcgctcctggagacgctcttggacctggtggacaggagctggggcggctgcaggtccctgcacagcaacgaggcattccttgctcaggcaagacacatcttgtcatctgttgaagaattcacagcagctcaggacagctctgcgatggtgggtgaagatgtcggctccctggctctggagagtaagtccctgcaaagccgccttgctgagcagcagcagcagcacgcccgggagatgagcgaggtgacggcggagctgcaccacacacacaaggagctggatgatttgagacaacatttagataaatctttggaagagaacagtaggttaaaatcgcttttgttgagtatgaaaaaggaagtgaagagtgcagacactgcagccacgttaaatttgcagatcgctggacttcaaacaagtgtgaagaggctgtgtggcgagattgtggaactgaagcagcacctggagcactacgacaagatccaggagctcacgcagatgctgcaggagagccacagctccctggtcagcaccaatgaacacctgctgcaggagctgagccaggtgcgggcgcagcacagagccgaggtggagcagatgcactggagctaccaggagctcaagaagaccatggccctgtttccacacagcagcgccagccatggaggctgccaggcctgctgactcctgccgagaagctgggccaccccttaagcttcctggtaaagttacattgtctgcacctttgtacttctttattgagtgtactggctggcaagagttctctcttctgttggtaattatttaggatttttggaatgtattcaggacctgtagcttggttttctaaagcacctcgtaaaatgatatgattactccaagccctctgcatgttttcagacagaacacattgacatattttgagacaaactgactattaatcttgtatccagtatcctgagatgaagtaaatgcagtgttctactgcctgatgtgaaagagagctatgtatgataattaaagaaaataattttctgtgtaacaagcaatctttatttaataaacaaatacattgttctgaaaa

SEQ ID NO: 447 - DNA, 3307 bp, Homo sapiens
  source 1..3307: mol_type = genomic DNA
ctggctcgcgcgtgccttttcccctcaggttgtggggagagcggaatcctgctccgccgtcgcagcagcagcggcagccccggcagcctcgggcgacagcggcggcgcgcgagcccccgggcggaccgtaccaccgctcgccagcacgcagggggagccgcccgtctcgccgcgcacgcctcggcgaccccgcggggctgaggcgtcgccgcgcccggcagcgtgagcgcagagccggcctcgaccccgagctcggagccccgcgggccgcgcccgccgccggccccacccatccgggtcgaggaggccgaggccatggctgagacggaggagcggagcctggacaacttctttgccaagagggacaagaagaagaagaaggagcggagcaaccgggcggcgagtgccgcgggcgcagcgggcagcgccggcggaagcagtggagccgcgggtgcggcgggcggcggggcgggcgcggggacccggccgggtgacggcgggaccgccagcgcgggggctgcgggcccaggggccgccaccaaggctgtgacgaaggacgaagatgaatggaaagaattggagcaaaaagaggttgattacagcggcctcagggttcaggcaatgcaaataagcagtgaaaaggaagaagacgataatgaaaagagacaagatccaggtgataactgggaagaaggtggaggtggtggtggaggtatggaaaaatcttcaggtccctggaataaaacagctccagtacaagcacctcctgctccagtaattgttacagaaaccccagaaccagcgatgactagtggtgtgtataggcctcctggggccaggttaaccacaacaaggaaaacaccacaaggaccaccagaaatctacagtgatacacagttcccatccctgcagtcaactgccaagcatgtagaaagccggaaggataaagaaatggagaagagctttgaagtagtaagacacaaaaatagaggtagggatgaggtttcaaaaaaccaggcccttaaacttcagctagacaaccaatatgctgtgcttgaaaatcagaaaagcagccactcacaatacaattaaggaatgggctttgctaacccttctgaggtaactagactgcagctaaccaccaccaacagccattcatcatctgatctctgctggatctacagacaccgatgcagaccactcgatttcatgaccggccctattgcactatggaagttaaagtgtcacgactgctctatgcatattggatttaggggaattttcattgttacataaatgtgtgaactagtttcaacagtgttctttcatatttactctgcaaatacaaaaaaccaaaacctgcagccagtggtcatttcaaaatctttttatgttcagatactgagccttcataagggttgactacctcagatttgctgcactcattgtggacttcatgtggatcacaacttctggataagaagattacaactattaagtgtcgatgtgaaccttgcaaccagctctactggattcttatcagaaatcctgcataaaaagtcagccatctgggttctgatctgctgtaaaagatgaagatttaagtgaccttaattaacctgtcctgtgccctacccttaaggaatactctctgtagtaggctgttgttatattagacttcctggaacacactgctgaaaagaactgatgtgttcagatcatctgtgtagggctgtgatttgtaatttaaactaattgtattctgaggtaaccacaaaataaattcaaccaaactggggtccaccaagtgggggaaggggaagggagagaataatcttgggggttttttttttttggtaatttttttatttggatagtgcttttttgttttgtttttgttctgcattaaggccttttttgctttgacttgaaataagttctttgacagagcatattgcttggttaattaagtaacctaaagtatgcattaggattgtgaaatgtctcgtgagtatgccaatcctgagggtggaaccaaatagcctttgatgaaaagggcagtggattctggaggctctacttcaggtgctgctataatgcctcatctaatcaggactaaattgtgtaggaaactgcagtgggaagaatatgctttctgctcaggctaagagggtcactgatctgtccttagaaattcagagtaacatgagcaaaacctcagctaaaacccatttaagtggcatggattgtgcatgatctttgataagaattcctcatgtacttgtgcctagtttttcaaggtattggctgttctatagatgcagtgattgtcccagctagctctgttaccagccttttggtgtgtctttatgttcatttggagagtcagggcgaaagacaggtgatgtagcacttctgtttttaataattattgcttaaaatacctattaatagttttgggtcatttaaagggacttgaggaagctacccaggattacagaagagtgtccacctaacaagatggtctggcagtttcctagttttgtatctggttcaatagaaatatgtgaaagtggtaatgtcatcatttgatgcagagtccgggtttctctataataaatccctttgccaaatgcatgagttgcagacttgctactggcaagagtgaagcaagtgggtgagtaaaactattttgacgtgggagcgttttcagataggagtttagtcttgacgaaagtgtccgtgcaggaattggactccgaggagggttacagtatctcctgacgggacctgccactcgcatctgggcaatgttgacatttgaggtggcaggcaggatgcctgccttctaatatatttgggtgagtaactgagccagccaagggaaggttgaatgattaaatcagaaatgggattcttggtaaactgaagacttttatttgggaatgaaaaaccttaaaaaaatctcttcatcgttgaactgtgcattttccctgcattttttcccaacaaaattttgttgggggttatgttactgaagaatgaacagatgagtaagtggaggtgttatgtaaaggcatattgtactcgaaatctgaagacctgcagcagatttaaattacaactcttgttataactttttaaaagattgtgaaaatatcaaaatataaatgaatcaagttttaatatactgtatgatgggtggatgaggctgtccattgtaccatttgtttgaattctcaggcatggtttggcagtgcaagaattctgtaacattaacaaattcaataaaaagtaaatatatgga

SEQ ID NO: 448 - DNA, 1688 bp, Homo sapiens
  source 1..1688: mol_type = genomic DNA
ttggctctcgcctaccgggggcttctctcaccgggactcgggactcccgggaagtggaccggcagaagagggggctagctagctgtctctgcggaccaaggagacccccgcgcccccccggtgtgaggcggcctcacagggccgggtgggctggcgagccgacgcggcggcggaggaggctgtgaggagtgtgtggaacaggacccgggacagaggaaccatggctccgcagaacctgagcaccttttgcctgttgctgctatacctcatcggggcggtgattgccggacgagatttctataagatcttgggggtgcctcgaagtgcctctataaaggatattaaaaaggcctataggaaactagccctgcagcttcatcccgaccggaaccctgatgatccacaagcccaggagaaattccaggatctgggtgctgcttatgaggttctgtcagatagtgagaaacggaaacagtacgatacttatggtgaagaaggattaaaagatggtcatcagagctcccatggagacattttttcacacttctttggggattttggtttcatgtttggaggaacccctcgtcagcaagacagaaatattccaagaggaagtgatattattgtagatctagaagtcactttggaagaagtatatgcaggaaattttgtggaagtagttagaaacaaacctgtggcaaggcaggctcctggcaaacggaagtgcaattgtcggcaagagatgcggaccacccagctgggccctgggcgcttccaaatgacccaggaggtggtctgcgacgaatgccctaatgtcaaactagtgaatgaagaacgaacgctggaagtagaaatagagcctggggtgagagacggcatggagtacccctttattggagaaggtgagcctcacgtggatggggagcctggagatttacggttccgaatcaaagttgtcaagcacccaatatttgaaaggagaggagatgatttgtacacaaatgtgacaatctcattagttgagtcactggttggctttgagatggatattactcacttggatggtcacaaggtacatatttcccgggataagatcaccaggccaggagcgaagctatggaagaaaggggaagggctccccaactttgacaacaacaatatcaagggctctttgataatcacttttgatgtggattttccaaaagaacagttaacagaggaagcgagagaaggtatcaaacagctactgaaacaagggtcagtgcagaaggtatacaatggactgcaaggatattgagagtgaataaaattggactttgtttaaaataagtgaataagcgatatttattatctgcaaggtttttttgtgtgtgtttttgtttttattttcaatatgcaagttaggcttaatttttttatctaatgatcatcatgaaatgaataagagggcttaagaatttgtccatttgcattcggaaaagaatgaccagcaaaaggtttactaatacctctccctttggggatttaatgtctggtgctgccgcctgagtttcaagaattaaagctgcaagaggactccaggagcaaaagaaacacaatatagagggttggagttgttagcaatttcattcaaaatgccaactggagaagtctgtttttaaatacattttgttgttatttttttcatg

SEQ ID NO: 449 - DNA, 2244 bp, Homo sapiens
  source 1..2244: mol_type = genomic DNA
gtctcgtgacaggtacttccgctcggggcggcggcggtggcggaagtgggagcgggcctggagtcttggccataaagcctgaggcggcggcagcggcggagttggcggcttggagagctcgggagagttccctggaaccagaacttggaccttctcgcttctgtcctccgtttagtctcctcctcggcgggagccctcgcgacgcgcccggcccggagcccccagcgcagcggccgcgtttgaaggatgacctctaggaagaaagtgttgctgaaggttatcatcctgggagattctggagtcgggaagacatcactcatgaaccagtatgtgaataagaaattcagcaatcagtacaaagccacaataggagctgactttctgaccaaggaggtgatggtggatgacaggctagtcacaatgcagatatgggacacagcaggacaggaacggttccagtctctcggtgtggccttctacagaggtgcagactgctgcgttctggtatttgatgtgactgcccccaacacattcaaaaccctagatagctggagagatgagtttctcatccaggccagtccccgagatcctgaaaacttcccatttgttgtgttgggaaacaagattgacctcgaaaacagacaagtggccacaaagcgggcacaggcctggtgctacagcaaaaacaacattccctactttgagaccagtgccaaggaggccatcaacgtggagcaggcgttccagacgattgcacggaatgcacttaagcaggaaacggaggtggagctgtacaacgaatttcctgaacctatcaaactggacaagaatgaccgggccaaggcctcggcagaaagctgcagttgctgagggggcagtgagagttgagcacagagtccttcacaaaccaagaacacacgtaggccttcaacacaattcccctctcctcttccaaacaaaacatacattgatctctcacatccagctgccaaaagaaaaccccatcaaacacagttacaccccacatatctctcacacacacacacacacgcacacacacacacacagatctgacgtaatcaaactccagcccttgcccgtgatggctccttggggtctgcctgcccacccacatgagcccgcgagtatggcagcaggacaagccagcggtggaagtcattctgatatggagttggcattggaagcttattctttttgttcactggagagagagagaactgtttacagttaatctgtgtctaattatctgattttttttattggtcttgtggtctttttaccccccctttcccctccctccttgaaggctaccccttgggaaggctggtgccccatgccccattacaggctcacacccagtctgatcaggctgagttttgtatgtatctatctgttaatgcttgttacttttaactaatcagatctttttacagtatccatttattatgtaatgcttcttagaaaagaatcttatagtacatgttaatatatgcaaccaattaaaatgtataaattagtgtaagaaattcttggattatgtgtttaagtcctgtaatgcaggcctgtaaggtggagggttgaaccctgtttggattgcagagtgttactcagaattgggaaatccagctagcggcagtattctgtacagtagacacaagaattatgtacgccttttatcaaagacttaagagccaaaaagcttttcatctctccagggggaaaactgtctagttcccttctgtgtctaaattttccaaaacgttgatttgcataatacagtggtatgtgcaatggataaattgccgttatttcaaaaattaaaattctcattttctttcttttttttcccccctgctccacacttcaaaactcccgttagatcagcattctactacaagagtgaaaggaaaaccctaacagatctgtcctagtgattttacctttgttctagaaggcgctcctttcagggttgtggtattcttaggttagcggagctttttcctcttttccccacccatctccccaatattgcccattattaattaacctctttctttggttggaaccctggcagttctgctcccttcctaggatctgcccctgcattgtagcttgcttaacggagcacttctcctttttccaaaggtctacattctagggtgtgggctgagttcttctgtaaagagatgaacgcaatgccaataaaattgaacaagaacaatg

SEQ ID NO: 450 - DNA, 4738 bp, Homo sapiens
  source 1..4738: mol_type = genomic DNA
agtgcggtcggaggcggcggtctgttctccgctgaggaggagcggggcagaggagggaggcagcgggtgagagttcagagttcagcagcagcagcccgagcccatgattcccatatgccctgtagtttctttcacctatgtgcccagccggctgggggaagatgccaaaatggcgaccggcaactactttggattcacccacagcggggcggcggcggcggcggctgcggcccaatatagccagcagccagcttcgggtgtagcctattctcatccaactacagttgctagctacactgtccatcaggctccagtagctgctcacacagttactgctgcctatgcaccagcagccgccacagttgcagttgccaggcctgctccagtagctgttgcagctgctgcaacagctgctgcttatggaggctaccccactgcacacacagcaactgactatggttatactcagaggcaacaagaagcaccaccaccaccacccccagctactacacaaaactaccaggattcatactcatatgtaaggtccacagctcctgctgtagcttatgatagtaagcaatactaccaacaaccaacagcaactgctgctgctgtagctgccgctgcccaacctcagccttctgttgctgaaacttactatcagacagcccccaaagcaggttacagccaaggtgcaactcagtatactcaagcccagcaaactcgacaagtgacagccataaaaccagccacaccaagtccagctaccactactttctccatctatcctgtatcctccaccgtacagccagtagcagctgcggctactgtggtgccatcctatactcagagtgctacttacagtaccacagcagttacatattctggtacgtcttattcaggttatgaagcagcagtgtattcagctgcatcttcctactatcaacagcagcagcagcaacagaagcaggcagcagcagcagctgctgctgctgctgcaacagctgcctggacagggaccacctttactaaaaaagcaccattccaaaataaacaactgaaaccaaaacagcctcccaaaccaccacagattcactattgtgatgtttgtaagatcagctgtgctggaccacagacttataaagaacatttagaaggacagaaacataaaaaaaaagaagctgcattgaaagcctcacaaaataccagcagcagcaacagttctactcgtgggactcaaaatcagctacgttgtgagctctgcgatgtgtcttgtacaggagcagatgcgtatgctgcccacattcgtggtgctaagcatcagaaagtggttaagttacacacaaaacttggtaaacccattccatcaacagaaccaaatgttgttagccaagctacttcttcaacagctgtatctgcttcaaagccgactgcctctccttcaagcattgcagcaaacaattgtactgtgaatacgtcatcagttgcaacgtcttcaatgaagggtcttacgactacaggaaactcgtctcttaatagcacatctaacactaaagtatcagcagtgcctacaaatatggctgccaagaaaacatctacccccaaaataaattttgttggtggtaataagctgcagtcaacaggaaataaagcagaagacataaaaggaaccgaatgtgttaaaagtactcctgtcacttctgctgtgcagattcctgaagtaaagcaagacacagtgtcagaaccagtcacacctgcatctcttgctgctttacagagtgatgtgcagccagtgggccatgattatgtggaagaggtacgaaatgatgaaggaaaagtaattcggttccattgtaaattatgcgagtgcagctttaatgatcccaatgctaaggagatgcacttaaaagggcgaagacacagacttcaatataaaaaaaaagtaaatccagatttgcaagtagaagtaaagcctagtattcgagcaagaaagattcaagaagagaaaatgaggaagcaaatgcagaaggaggagtactggcgaagacgagaagaagaggagcgttggagaatggaaatgagacgttatgaagaggacatgtactggaggagaatggaggaagaacaacatcattgggatgatcgccgccgaatgccagatggaggttatcctcatggtcctccaggcccattaggccttctgggagtccgaccaggcatgcctcctcagcctcaggggcctgcacccttacgtcgtcctgactcatctgatgaccgttatgtaatgacaaaacatgccaccatttatccaactgaagaggagttacaggcagttcagaaaattgtttctattactgaacgtgctttaaaactcgtttcagacagtttgtctgaacatgagaagaacaagaacaaagagggagatgataagaaagagggaggtaaagacagagctttgaaaggagttttgcgagtgggagtattggcaaaaggattacttctccgaggagatagaaatgtcaaccttgttttgctgtgctcagagaaaccttcaaagacattattaagccgtattgcagaaaacctacccaaacagcttgctgttataagccctgagaagtatgacataaaatgtgctgtatctgaagcggcaataattttgaattcatgtgtggaacccaaaatgcaagtcactatcacactgacatctccaattattcgagaagagaacatgagggaaggagatgtaacctcgggtatggtgaaagacccaccggacgtcttggacaggcaaaaatgccttgacgctctggctgctctacgccacgctaagtggttccaggctagagctaatggtctgcagtcctgtgtgattatcatacgcattcttcgagacctctgtcagcgagttccaacttggtctgattttccaagctgggctatggagttactagtagagaaagcaatcagcagtgcttctagccctcagagccctggggatgcactgagaagagtttttgaatgcatttcttcagggattattcttaaaggtagtcctggacttctggatccttgtgaaaaggatccctttgataccttggcaacaatgactgaccagcagcgtgaagacatcacatccagtgcacagtttgcattgagactccttgcattccgccagatacacaaagttctaggcatggatccattaccgcaaatgagccaacgttttaacatccacaacaacaggaaacgaagaagagatagtgatggagttgatggatttgaagctgaggggaaaaaagacaaaaaagattatgataacttttaaaaagtgtctgtaaatcttcagtgttaaaaaaacagatgcccatttgttggctgtttttcattcataataatgtctacattgaaaaatttatcaagaatttaaaggatttcatggaagaaccaagtttttctatgatattaaaaaatgtacagtgttaggtattatttgaatggaaagacacccaaaaaaaaaaatgtgctccgactagggggaaaacagtagttccgattttttcccattatttttattttattttctggttgccctagcttccccccctatttttgtgtcttttattaactagtgcattgtcttattaaatcttcactgtatttaatgcaggatgtgtgcttcagttgctctgtgtattttgatattttaatttagaggttttgtttgctttttgacactagttgtaagttactttgttatagatggtatcctttaccccttcttaatattttacagcagtacgtttttttgtaacgtgagactgcagagtttgtttttctatatgtgaaggattacaacacaaaaagttatcctgccattcgagtgctcagaactgaatgtttctgcagatcttgtggcatttgtctctagtgtgatatataaaggtgtaattaagacagagttctgttaatctaatcaagtttgctgttagttgtgcattagcagtataaaagctaatatatactatatggtcttgcaacagttttaaagcctctgcataattgataataaaaatgcatgacattcttgtttttaatagacttttaaaatcataattttaggtttaacacgtagatctttgtacagttgactttttgacatagcaaggccaaaaataactttctgaatatttttttcttgtgtataagtggaaagggcatttttcacatataagtgggctaaccaatattttcaaaagaacttcatcattgtacaactaacaacagtaactagcccttaattatggtgacagttccttattggtgtgtgtgagattactctagcaactattacagtataacacagatgatcttctccacacaccccatcacccagataatttacagttctgttaacagtgaggttgataaagtattactgataaaaaattatctaaggaaaaaaacagaaaattatttggtgtggccatcttacctgcttatgtctcctacacaaagctaaatattctagcagtgatgtaatgaaaaattacatcttactgttgatatatgtatgctctggtacacagatgtcattttgttgtcacagcactacagtgaaatacacaaaaaatgaaattcatataatgacttaaatgtattatatgttagaattgacaacataaactacttttgctttgaaatgatgtatgcttcagtaaaatcatattcaaattta

SEQ ID NO: 451 - DNA, 722 bp, Homo sapiens
  source 1..722: mol_type = genomic DNA
acttccggccctgcgcactcagggtctgaggcagctagtagccggagggtcaccatgaagttcaatcccttcgttacctcggaccgcagtaaaaaccgcaaacgtcacttcaatgccccctcacacgtgcgcaggaagatcatgtcatccccgctctccaaggagctgcggcagaagtacaatgtccgctccatgcccatccgcaaggacgacgaggtccaggtagttcgaggacactacaaaggtcagcaaattggcaaggtagtccaggtgtacagaaagaaatatgtcatctacatcgagcgggtgcagcgtgagaaggccaacggcacaactgtccacgtgggcattcacccaagcaaggtggttatcaccaggctaaaactggacaaggatcggaaaaaaattcttgaacgcaaagccaagtctcgacaagttggaaaagagaaaggcaaatataaagaagaacttattgagaaaatgcaggaataaatagaacctgttgtgcaaccacggtttaaccggagattttgaggctagggtgtgtttctttcgaacttttcggaatgtctggaacatttcatttcctgttttgttacctgtgcctctgtaaatctacttttgcaattttaagtaataattttatgaataaaaatgggaaatgcttcctaattccacatagtatttgcattgttttataaataaattccacttactatcaa

SEQ ID NO: 452 - DNA, 5905 bp, Homo sapiens
  source 1..5905: mol_type = genomic DNA
gctgcactgggtgtcaagcgccacggggtttgatggggactccttctggttccaccctcgcccactcacttctcgggctggccataatgctgcacagagccccggccagccattaatatcaggcgcaggagaaaacccagtaaaatcacttaccagtcttccacctccggtgctgatctagcaagagcctgacccgctggccagactcaagctctgcaccaggtattaccaccctggcgacggctccggagcgtcactgacaaccacccggaaatggtactatcgcttccggggctgcctagcgcgcggcgggaaattgtttcccagagcccggattcgtgaagcagttgagtgctgcagcggcagtcgtcgcccctgccgccgctgccaccgaaggaagcatcccagacaccgggaagatggaagatggtaccccaaagcatatcatccagatgacaggatttaagatggaagaaaaagaagcgctagtcaaattacttttaaaactagattgcacttttattaagagtgagaaatacaaaaattgtacacatcttatagctgaacgcctatgtaagagtgaaaaatttttagcagcttgtgcggcaggaaagtggatactaaccaaggactatataattcatagtgccaaaagtggcagatggcttgatgaaacaacttatgaatggggatataaaattgaaaaagattcccgttattcacctcaaatgcaatctgcacctaaaagatggcgtgaagaactgaaacgcactggtgctccaggagccttccacagatggaaagttgtcctccttgttagaactgataagcgaagtgattctcttataagagttttggaggctggaaaggcaaatgttattttaccaaaaagttcaccaagtggaataactcatgtgattgccagtaatgcaagaattaaagctgagaaagaaaaagataactttaaggctccattttatccaattcagtatctaggggattttcttttagagaaagaaattcagaatgatgaagattcccaaaccaattctgtttggactgaacatagcaatgaagaaacaaacaaagatttcaggaaagatgcaggatttcttgaaatgaaaggtgccttaagagagaccatgtatagaacccagaaagaaatgcaaaatcatgaagatgttaatgttggttctattttgattcaacatcacaaaaaagaaaaattcagtggttccagtaaagatttgaaatttgttaaaatgagaaatacctttggaagccatacatatgaaaatcagaaggaaattaagaaaaaagatgaagatattcagaggagttatactttgaggagaaaacgcaagaaaggaaaagaaagcaattgcaagaaaggcgttgaacatgaaaaaataaaaagtaccttaagaaggcacatatataatagagatcagaaagaaatgaagaattctatttttgctgaatatgccaaagaatcaaaagccatggctattaagacagatgtggatgttgttgaaataaaaaataccttaaggaagcacatatatagagctcaggctgtcagatacaactgcattagaatagataaacaaccagtgtacaacgtagaggttaaaaatgctgaatttcccagaggtgtattaaatttaattgaaagcctcatagaaggacatttttttaaagaagcaattgaggaactttccactttgcaggcacattatatccctcctgtatgcgttcttcatgcccttctagagaacgttctacaggataacatagatacattttctggtcgatactttcatatattgtcagctcttcttcacctgcatcctccttggaagtctccagccatgtcgagatattatttagagttgtttcagtgtccaacttgtatgaaaggagcatggtctttagtagaagtccttatcaggtcttgccttttcaatgaaagcttttgtcatcaaatttcagaaaatattggctccaaggtgctccacctgacgctactcaaatttttctttaatttaattgaaagtgaagtacaacatctgagtcaaaagttgtatgactggtcagattctcagaatctgaaaataacaggaaaggcaatgcttcttgaaattttttggtcaggaagtgaaacctctgggcttttgaccaaaccagtaaatatgcttttggaatggactatatattctcacaaggaaaaattcaagtctaatgatgtcttcaaacatgaactagcttacttattggctggaattcttggagcagcaatagattattggattttccttggtcttaagatgggtagaaatgtgatgcgacacatgtctgatgacttaggaagttatgtttctctttcgtgtgatgacttttcttcacaggaattagagattttcatttgctccttttcctcctcctggcttcaaatgtttgttgcagaggcagtctttaaaaagttgtgtctacagagctctggcagtgtttcttctgagccactctctcttcagaaaatggtatattcctatttaccagccttggggaaaactggtgtgcttgggtctggaaagattcaggtgtcaaagaaaataggacagcggccttgttttgactctcagagaaccttactaatgctgaatggtactaaacaaaaacaagtcgaagggctgccagagttactagacctgaaccttgctaaatgttcctcatcattaaaaaaattgaaaaagaagtcagaaggagaattgtcatgttccaaggagaattgcccctctgtagttaaaaagatgaattttcacaagactaatctaaaaggagaaacagccctgcatagagcttgcataaataaccaagtggagaaattgattcttcttctctctttgccaggaatagacatcaatgttaaagacaatgctggctggacgcctttgcatgaagcctgtaactatggcaacacagtgtgtgtccaggaaattttgcaacgttgtccagaggtagatctgctcactcaagtggacggggtgactcctttgcatgatgcactgtcaaacggacatgtagaaattggcaagctgctactacagcatgggggcccagtgcttttacaacagaggaatgctaagggagaattgcccttggattatgtggtttcacctcaaatcaaagaagaactgtttgctattacaaaaatagaagatacagtggagaactttcatgcacaagcagagaaacattttcattaccagcaacttgaatttggctcctttttacttagtaggatgttgctaaatttttgttcaatttttgatttatcttcagagttcattttagcttccaaagggttaactcatctaaatgaactgcttatggcttgtaaaagtcataaagaaaccaccagtgttcatactgactggttactggatctttatgctggaaatataaagacattgcagaaactcccacacattcttaaggaactgcctgagaatttgaaagtgtgtcctggggtacacactgaggccttgatgataacattggaaatgatgtgtcggtcagtcatggagttttcatgatgatgctagaaagtatggattgactttctaaatctgttcagtttgcattggtacttactgtggacttcatagcttactgacagatagtaatttgatttatttattgacagactttgcagccttgctaaattttaaaagcatttttaaaaaaacttctacaaaactctagtatgggcttctgactttttccagggtgtagaatttgactcaaaagtaaaaataattttgttttagtatattctactttcattaatgtttttttgttctgaaagtgatattatattgtacatgtaaaattaatttaaatattttttcaaataaaaatgtaatgtcctgtattctagatgttctaggtcttagaatcatggcaagcatattcatacaaatgcgtacctataaacttgtagctcctgactcttagggatggattttgaggaaaaaacaagactaaacaaaaacatgtagctccctatttcttctctctaggttgttggactgaaatatgcattttagctttgtgtgtttctaaaataaacatttctaaaatttacagtaataattaatattcttttggtttttaaatgcagcaaatatgcagagtctgacagttcaattccttgatctgttttattttagcaattcatatacaaaatgtatctgtcgctgccctatgtaacccagtattctgtacctgaaaacattctgctgcataggtttatgagtttaatattaagatattgagtggcatctaagtaatagatttgagattatttaagatcttaatatatagtatgaatttactgagtagtaatgttttaatttgcagtttttccttatagcagtttgtagtaaaactaaaagaaagggtgtggataataaccacttttgagattggagtttcttcactactgggagtaagttacattatgatacaggtggaaaataaacacttccatttagcttttatgtaattcaagtgatgaccttagcagttaatctgctaaagcaatacacttcagttttattttggaaatagatattttaacaagatacaaatgctcagtatcatattactgggtttgtaatctaaattgaaaactgctatatcagtatgaaaaaatattttaaataagtactttttccacacatactcaggaaatactagtttctatttagccttcaaatttggcatcatacaaatctctttattattaatctgccaaagtatcagacaaaaaatgatatagtgaagactatctaagaagagtttaaatgcttatagagagtaaagtgcttctccagatgatgaataagaacgttttttattccaatgagtacctctttacttcacttgtaaaggtgtctgggatagtgtttgcttggtaaactaatataaacttgtaaacataggctttgacatcatacacattttcaaatccttgtctagtttcttaataactaaattgcaaggcaaattcttttctgagctttggctttcctacatgtcaaatagaaatcacaccaggtatctttgtcatgatagaattgttagcatatcacatcatatgacacttaataaatattatttcctttctaattcttacctcctcttttgattataatgaatcatttagacaaaaggcaatatagtaattgtttaagttggtagtaattctaaggtaattaaggaatcaacatcatgagttagggttttatactgttagtacaaagtagttttccaaattagatgttcataacgtatatttgtttaattgcaattagcattaatatttcataattgactgctctgtctgccaacttctacaagcagtgatgacatgaagtgtgaaacagatgtcactgaggtctctgcctttaagaagttttacacttcttcgaaagtccaacgtggcaaacataggttactgtgttctgtgccctggctaacaataccagtatatgagtatgaatctaaatgttcaggaaaaggcttcattcccaaaattacttcttatactttattttagaaaacataataataattgccttgaataattgcccaaatctatcttggaggtataggaagaagaaattctcaataagtaaagtataattcatagtcttagtcctagattttcaatggcagacttttcaaagttgcatctgaagacaaggttgagaaatgctattcttcactgtattttgccagatgtgatatcatagttctatggaatcatattttttaaatttctgtaagagaccttattacaatgtaaataaagctggagaggagatttctgagcagttaa

SEQ ID NO: 453 - DNA, 1437 bp, Homo sapiens
  source 1..1437: mol_type = genomic DNA
agtcacagccaggtaaccctggagtgaagcggtttagttagaagggagcagataaactcgtcactctagtagctttaaccctcaccctgaggcaccttagcaatcagccattgcctgcaagcctccaaagcttgtctttgcctaatatggagcccaaagaagccactgggaaagaaaacatggtcaccaagaaaaagaatctggccttcttgaggtctagactctatatgctggagagaaggaagactgacactgtggttgagagcagtgtttctggggaccactctggcaccttgaggaggagccaatctgacaggactgaatacaaccagaaattacaagaaaagatgactccacagggtgagtgttctgtagctgagaccttaaccccagaggaagagcatcatatgaagaggatgatggcaaagcgggaaaagatcattaaggagctgatacagacagaaaaggattatctcaatgatctagagctgtgtgttagggaagtggttcagcccctgagaaataaaaagactgataggctggatgtggatagcttgtttagcaacattgagtccgtgcatcagatatcagccaagctgctgtcattgttggaagaggccacaacagacgtggaaccggccatgcaagtaattggagaagtattcttgcagattaaagggccactggaagatatttataaaatctactgctatcaccatgatgaagcacatagtatactggagtcctatgaaaaggaagaagagctgaaggaacatttgagccactgtatccagtccttaaagtaaggccttttcaaatgatgattcccatctcctctcagttgcctagcagggaacattttaaatggatgtagatgaaaggtctcacataaatcctatgttttatgagacttgctgggagctctgctttgcattccctttataaaaagctgacatgccagaagccctgattgactttttttccccctgcgagaatgactaaaaataacatggaagaagatttagagctctgcagcgattgaaaaatgcaatatcaaaatataaaatgtggaagaaaagcctcttcttaaagctattgtaacttgcctggccccacgtagttcaaggattatgtgagataacacgtggccccatgaccactggagcacatgggttaatggagttaggggaatggcctacaactctgcatggccgtcttctttccccaaactcactgtggggagatgggtgaagacaagtcaggccttgttaaagttagtttcagaacaattactcatgccttcctttctcatccctaaaacattggtgggggagctacacaatgtactttttcttttctagaggaagtatctattcactgtgaaaatctgaaaaatataacaaagtatgtgtaagataaaaaccccttgctatttca

SEQ ID NO: 454 - DNA, 6451 bp, Homo sapiens
  source 1..6451: mol_type = genomic DNA
gggttagttcctgttaggccccggccgggggagtaggttgaagtctcctaagatgcccggtgggctggggcaccgggagctgtgaagggaacgtgagggggcggcgtagtggagacccacggcaggcctgaagaagagcggcggccgagcccgccttccctgcaccatgctcatagaggatgtggatgccctcaagtcctggctggccaagttactggagccgatatgtgatgctgatccttcagccttagccaactatgttgtagcactggtcaagaaggacaaacctgagaaagaattaaaagccttttgtgctgatcaacttgatgtctttttacaaaaagaaacttcaggttttgtggacaaactatttgaaagtctctatactaagaactaccttccacttttggaaccagtaaagcctgagccaaaaccactagtccaagaaaaagaagaaattaaagaagaggtatttcaggagccagcagaggaagaacgagatggcagaaaaaagaaatatcctagtccccagaagactcgttcagaatctagtgaacgaaggacacgtgagaaaaaaagagaagacgggaaatggagagactatgaccggtactatgagcggaatgaattgtaccgtgagaagtatgactggagaagaggcaggagtaagagtcggagtaagagtcgaggcctgagtcgcagtagaagccgaagtagggggcgcagcaaagaccgggatccaaataggaatgttgagcacagggaaagatcgaagtttaagagtgaaaggaatgacctggagagttcctatgtgcctgtgtctgcaccacctccaaactcttctgagcagtattcctctggggcacagtctattcccagcactgttactgtgatcgcacctgctcaccactctgaaaacacaactgagagttggtctaattactataacaatcatagctcttccaattcttttggtcgaaacctaccaccaaagaggcgatgcagagattatgatgaaagaggattttgtgtacttggtgacctttgtcagtttgatcatggaaatgatcccctagttgttgatgaagttgctctgccaagtatgattcctttcccaccccctcctcctgggcttcctcctccaccacctcctggaatgttaatgcctccaatgccaggtccaggcccaggcccgggcccaggtccaggcccaggcccgggcccaggtccaggtcctggccatagtatgagacttcctgttccccaaggacatggtcagcctccaccatccgttgtgcttcccataccaagaccacctataacacaatcaagcttgataaacagccgtgaccagcctgggacaagtgcagtgcccaatcttgcatcagtgggaacaagactacctcctcctttaccccagaacctcctttacacagtatcagaacgacagcccatgtactctcgtgaacatggtgctgctgcatctgagcgacttcagttggggacaccgcctcctctgttggcagctcgtttggtgccacctcgaaacctcatgggatcctccattggataccatacctcagtctccagccctacccctctggttccagatacatatgaaccagatggttacaacccagaagctcctagtattactagttctggtagatctcagtacagacagttcttttcaagaactcagacacagcgtcccaatctgattggcctaacatctggagatatggatgtaaatccaagagctgctaacattgtgatccagactgaaccaccagttcctgtttcgattaatagcaacataaccagagtagttcttgaaccagatagtcgaaaaagagctatgagtggtttggaagggccactcacaaagaaaccttggctgggaaagcaaggaaataacaatcaaaataaaccagggttcttacgaaagaatcagtatacaaacaccaaattagaagtcaagaaaatccctcaggaattgaacaacattaccaagctcaatgaacacttcagcaaatttggaactattgttaatatccaggttgcttttaagggtgacccagaagcagccctaatccaatatcttaccaatgaggaggccaggaaagccatttctagcacagaagcagttctaaacaaccgattcattcgagtcttgtggcatagggaaaataatgagcaaccgacactacagtcctcagcacagctgctcctgcaacaacagcaaacacttagtcacctctcacagcagcaccatcacctgccacagcatctacatcagcagcaggtgctagtggcccagtctgctccttcaacagtgcacggaggtatccagaagatgatgagcaaaccacagacatcaggtgcatatgttcttaacaaagttcctgttaaacatcgtcttggacatgcaggtggtaaccagagtgatgcatcacatttgttgaatcagtctggtggtgctggagaagattgccagatattttcaactccaggccatccaaaaatgatttacagctcctcaaacttaaagacaccttcaaagctctgttcagggtctaaatctcatgatgttcaagaagtgcttaaaaaaaaacaggaagcaatgaagttacaacaagatatgaggaaaaaaagacaggaagtgttagaaaagcaaatagaatgccaaaagatgttaatatccaagttagaaaaaaacaaaaacatgaaaccagaagaaagagcaaatataatgaagactttgaaagagcttggagagaagatctcacaattaaaagatgaattaaaaacatcttctgcagtctccacaccatctaaagtgaagacaaaaacggaggcccagaaggagttattagatactgaactggacctccacaagaggctgtcctcaggagaagacaccacagaattacggaaaaaactcagtcagttacaggttgaggctgcacggttaggtattttacctgtgggtcgaggaaagaccatgtcctctcaaggtcgaggaagaggccgagggcgtggaggaagaggaaggggctcactaaatcacatggtggtggaccatcgtcccaaagcactaacagttggaggattcattgaggaagaaaaagaagacttgcttcagcatttctcaaccgcaaaccaagggccaaaatttaaagaccgtcggctacagatatcatggcacaagcccaaggtaccatctatatccactgagactgaagaagaagaagtcaaggaggaggaaacagaaacctcagatttgtttttgcctgatgatgacgatgaagatgaagatgaatatgagtctcgctcatggcgaagatgaaatctgatgctagctgtataatttttaggaatattgtttagaagaacaacttttaaaaattatttaaaagaagtcaatgagccaaaaaaaatttttttatttttcttttcaacacagtaggttcaagaacagcaagtttgctatttaaacacatctcataactgtacatgatattaaagcaccaaaggcctagtgacttttacacagttgtgaagatccacagcaatgacatggataatctctagagccttattttccacaccaccttttttttgttgctgttggtgttggattatgatgtaaatgacagggtgttcagaaattttattttggattataatctactgataaaatttaattaaatgtcaaaatcacctgtaatcttttaactctcagttgttatggatgggtcatcagacagtaggaaatatttgtaattaaaatacccttttgctttcaagagtggtcttggaagaaaaatatgtttattttaattttaatttttttttttttttactttggaggagcccaatttgtattcagtctaaatttgtttttcatggtttttatgtgtggtagtactagttcagtgaaaatcacaacaaactgtgtgttcttaaatgctacagcaatggtagctagctctatagtatttccattctcttgtcatatgaactcctggacttttcctgctactgattcttagtttgctttgatatttagtgagcgctggttcggctggtctttttaaaaatttttataactcagaatgtaaaaggctttcacctattgcccctttctcgtcccccttttcttcctcttgcctttctattaataggcctgacttagtcatcattgatataagtggttcatttgggcaaccgcaggcagtctccaataaaaggttcaaaccagcacctggataaataagtgatgttttgatgagaatgatggaaggattttggggagaagagaatcaccagctttattttttccctcttttgaagcttcagttcagtatagttacacagaagggtttaaaaatgtctgaaattcttttcctaaatttaaaccatgatggtgaggtgactggggggtggggggtggaggtgggagggggttgagggctgagtatgctagtaataaatgggagtcatatatgactttgttcagatgaccttattttttcataattttgtagcttgttgctatccatgaacatacgcatccctcagtagacagtttcctttactgtgtgcatttttactgtacactgtatagagtagagtatctgttaagtaaaatatatatgtaaatttatgtcttcgtgttctgaatgttagatggaaaagcagaggagcaacactacactgtactgacccctgggaaaataaaatgattaatgtacctaggctgtcactttttcaaggatatacacatctgtgtttttatatatgtgtggtatgaaaatttgaaacctcctgttgtctccaaaagggtcttggtgaccactatatcaaggattttgtttgctgaggtaaagacaatttctcaatatagaaactattcactaagaacttaaaaccatcaggattctagatttacttagctataagaagttaaatcccacgttctgataatctttattcttctacatgttttcctggaatgatgtgtcaaaccagggtcatttttaagttcatataattttctttcataataatgaggacttcctttttctaggttattgttatatttctagtaacactgaaggtaaaataagcttataaaagaaggaaaacatcagaatggtgtatctagaatacacaatcttgctccttactcctccatcatctctaatgaaatttttcttgatgtctgtggctcagtcagtatatattttgaaagattcattgtggtgaatattttgagtcctgacagtttaaacgtgatagagggaacaaaggatttatatattttttgtacaaagttttttcttaaactgtataattttgtaaataatttgtttgggttttttttttgtgtactaaaactaccagcgtatagatttcaataagaattgttgtatttttgtatttggaaactgaaaattacagtaaataaatggaactctaagaaaaatttcagtagacagttcaacagaatgagattccttttcatatgatttttttgacctcaaaatggacatcttatttcactctcagtaaaaagttgaaaatttgactttttagtattgggggcagaagatagaagtgtgttaaagtgaaaaacagttttttcagtaaggtttgaggccctttctataagttttcagtacaccttaaacaggactaaaaatactttaaaagtgtgctttcaaagaattttaaaacatgtttgactcaaagatgaatttgaagtgagttaattataatactggaaaacttcaggttagcataaaatagtttatatatatcccctgccccctttgggatttacttccaccatcaaatcttcaactgttagaatttcacttaaaagtgaataactgccatacatgttttcttggcatcttcatttacagaaataacatacagcatctaaagcaagttctgtccctcttaatgtgtatgacatctttttaagtagctgatcagcaataatagccaccagttgactaggtcagcctgatatactagtggatcactgtccaagataaaaaggtaaccccaagtattgcaaaatttccctcaatttctttatgtaacattgaagaaatgttgttaccagctaagatgataaattggaaaacagtcttgttaaggtgaaaggggtccttggtgatggatcattatttcaaaaaagaaaaaaatcatgtgaaaaggaatagtggttcctcttgatgtatagtatgcctgtattatagtttttacaaaattgtgaacttgtgtaatagtataataggagatattgttgaatttctaactgtttatacatttaaattcatatatgtaatgtttgttttatcaattacaatctgaatttctaagaagcatgttgacttttgcaataaagatgcaatatggaatggttcacaattgg

SEQ ID NO: 455 - DNA, 2668 bp, Homo sapiens
  source 1..2668: mol_type = genomic DNA
acatgcgcagtagctgtaggagggggtgggcgctccattgggcgtttctcttggtttttcctttccgcgcggcttgggcggacgtctcgtgagacgtgggacttctcgcgggaactgcattcaaatatcccaggcgcttactcgagagctagctgagcgaatgggccggcgactgtggagttagcgtcctcaatgtggacgccctgagctcccattaggagccgctggctgcggcagcaggggactagcgtgagagttggctaaaaaaaagaaaagaacatggaggcagatataatcacaaatcttcgatgcaggctcaaagaggctgaagaagagcgactaaaagctgcacagtatggtttacaactagtagagagtcaaaatgaattacagaatcaattggataaatgtcgtaatgaaatgatgaccatgactgagagttatgaacaagaaaaatatacccttcaaagagaagttgaactcaagagtcgaatgttagaaagtttgagctgcgaatgtgaagctattaaacaacaacaaaaaatgcacctggagaaattggaagaacaactaagcagaagccatggacaggaagtgaatgaactaaaaactaagatagaaaaactgaaagtggaattagatgaagccaggcttagtgaaaagcagctgaagcaccaagtagatcatcagaaggaactcctctcttgtaaatcagaggaactgcgcgtaatgtctgaacgtgtgcaggaaagcatgtcttcagagatgctggctcttcaaattgagctgacagaaatggagagtatgaagaccaccctcaaagaagaagtgaatgaactacaatacagacaagaacagctagaacttcttattactaacctaatgcgccaggtagaccggcttaaagaggaaaaagaggagcgagagaaagaagcagtttcttactataatgccctagagaaagctcgtgtagcaaatcaagatcttcaggtacagttggaccaggcactccagcaagccttggatcccaatagtaaaggcaactctttgtttgcagaggtggaagatcgaagggcagcaatggaacgtcagctcatcagtatgaaagtcaagtatcagtcactaaagaagcaaaatgtatttaacagagaacagatgcagagaatgaagttacaaattgccacgttgctacagatgaaagggtctcaaactgaatttgagcagcaggaacggttgcttgccatgttggagcagaagaatggtgaaataaaacatcttttaggtgaaattagaaatctggagaaatttaagaatttatatgacagtatggaatctaagccttcagtcgactctggtactctggaagataacacctattatacagatttacttcagatgaagctggataacttaaacaaagaaattgaaagcactaaaggtgaattgtccatacagcgaatgaaagcattatttgagagccagcgggctctagatattgagcgaaaactttttgcaaatgaaagatgcctccagctttcagaaagtgaaaatatgaaactgagagctaaactagatgaattgaaactaaaatatgaacctgaagagacagttgaagtgcctgtactgaaaaagaggcgtgaggtgctccctgtggatataaccaccgctaaagatgcatgtgtcaacaacagtgctctcgggggagaagtttatcgattaccgcctcagaaagaggagacacagtcctgccctaacagtttagaagataacaacttgcaattagaaaaatcagtttctatatacacaccagtagtcagtctctctcctcacaaaaatctgcccgtggatatgcagctgaagaaggaaaagaaatgtgtgaaactcataggagttcccgctgacgctgaggccttaagtgaaagaagtggaaacacccctaactctcccaggttagctgctgaatcaaagcttcaaacagaagttaaagaaggaaaagaaacttcaagcaaattggaaaaagaaacttgtaagaaattacaccctattctatatgtgtcttctaaatctactccagagacccagtgccctcaacagtaaagacttgtctttaataagagtacggtgccacttgcctcaaaagttactatggtgcttaagattgtcttgatctgacatatatcaccttctgggttatttactcattgtgccaggacctggcattttcatgtgcctttgaccaagtgttcagaatttgcttgactctaacctggagagcttcttaagtgatgccccttcatggagcttctatgacagtgaataaactattaattgaaggaaaatgttataattaatgtatctatttgctgcattgtatatggattaaatgataaaaaacaagtaatctaccctcagagccatgtatttgagaatgcttcaatcatattttcctatgtacttttttttataaacttagttttagactatgttgtaaaaatgggaaggttgtaaactatgttgtaaaaataggaaatgtggcttaaaatatatacattatattgtttcaggattttgtcagtgtttaaagaaccaatgttcatctttgtatttatatacatgatttaaattttgtctaaaattttaaataaaactgcagtgatttatccttaaa

SEQ ID NO: 456 - DNA, 1511 bp, Homo sapiens
  source 1..1511: mol_type = genomic DNA
aacagttgccttttcctctcacagaaggaagatttcattttgtttgagacgagaaaccaaaccacacaccaaagagaggggtatgatggctaagaagcccccaaaaccagcccctcgcaggatcttccaggaaaggttaaagattactgctctacctttgtactttgaaggttttttattaatcaagcggtcaggataccgggagtatgagcattactggacagagttgagaggaactactcttttcttttataccgacaaaaagagtataatatatgttgacaaattagacatagtagacctcacatgccttactgagcagaattcaactgaaaagaactgtgcgaaattcacccttgttttgccgaaagaggaagtacaactgaagacagagaacacagaaagtggggaagaatggagaggcttcattcttacagtaacagagctgtcagttccccaaaacgtgtcactcctacctgggcaagtaattaaactgcatgaagtcctagagagagaaaagaaaaggaggattgagacagagcagagtacgtccgtggaaaaagagaaggaaccaactgaagattatgtggatgtactgaaccctatgccagcatgtttttatacagtgtcccggaaagaggcaactgagatgctccagaagaacccttctttgggaaatatgatcctgaggcctggtagtgacagtagaaactactccatcactattcggcaggagatagacattccaagaatcaagcactacaaagtgatgagcgtaggacaaaactacactattgaactggaaaaacctgtaacactcccaaaccttttcagtgtcattgattattttgtgaaggagactcgaggaaatttaagaccatttatatgttcaactgatgaaaacactggtcaagaacccagtatggaagggagaagtgaaaagttgaagaaaaatccacacattgcatgaaatacaatgtgaaagctcctttgtatatcttggtaatttatattttcaaaacgaagttcttacttttaaagagaattacctatattctcctgatactgattaccaagtcattcacctgaacaccagaattagaattaaacattgtaccatacaatttcattatcttatcagaatgaaaccaattcacagggaaactagagactacggctgtggtggtaacctgcagatatacacattcccatgcactgacataagttgaaaacacatagtactttctagatggaatttttttctttaggcctcaatgaaatacatttcccctatataattccaacagcagtttctctagttctaaattttaccaattcccaaaaaacctaagttttgctgaaatctgatttgaccaatttatcaaatatgtcattttaattacctagctggaagttagagacatgaaatgtactagaggagcccttttccaatggaaatattatataccacattttttgttaatggaaataaatgtcttcattcccatgtt

SEQ ID NO: 457 - DNA, 6234 bp, Homo sapiens
  source 1..6234: mol_type = genomic DNA
atgtttcatatctgcccagcagagaatctgtaccagaacaggtttttaggcctggccgccatggcgtctccttctagaaactcccagagccgacgccggtgcaaggagccgctccgatacagctacaaccccgaccagttccacaacatggacctcaggggcggcccccacgatggcgtcaccattccccgctccaccagcgacactgacctggtcacctcggacagccgctccacgctcatggtcagcagctcctactattccatcgggcactctcaggacctggtcatccactgggacataaaggaggaagtggacgctggggactggattggcatgtacctcattgatgaggtcttgtccgaaaactttctggactataaaaaccgtggagtcaatggttctcatcggggccagatcatctggaagatcgatgccagctcgtactttgtggaacctgaaactaagatctgcttcaaatactaccatggagtgagtggggccctgcgagcaaccacccccagtgtcacggtcaaaaactcggcagctcctatttttaaaagcattggtgctgatgagaccgtccaaggacaaggaagtcggaggctgatcagcttctctctctcagatttccaagccatggggttgaagaaagggatgtttttcaacccagacccttatctgaagatttccattcagcctgggaaacacagcatcttccccgccctccctcaccatggacaggagaggagatccaagatcataggcaacaccgtgaaccccatctggcaggccgagcaattcagttttgtgtccttgcccactgacgtgctggaaattgaggtgaaggacaagtttgccaagagccgccccatcatcaagcgcttcttgggaaagctgtcgatgcccgttcaaagactcctggagagacacgccataggggatagggtggtcagctacacacttggccgcaggcttccaacagatcatgtgagtggacagctgcaattccgatttgagatcacttcctccatccacccagcagatgatgaggagatttccctgagtaccgagcctgagtcagcccaaattcaggacagccccatgaacaacctgatggaaagcggcagtggggaacctcggtctgaggcaccagagtcctctgagagctggaagccagagcagctgggtgagggcagtgtccccgatggtccagggaaccaaagcatagagctttccagaccagctgaggaagcagcagtcatcacggaggcaggagaccagggcatggtctctgtgggacctgaaggggctggggagctcctggcccaggtgcaaaaggacatccagcctgcccccagtgcagaagagctggccgagcagctggacctgggtgaggaggcatcagcactgctgctggaagacggtgaagccccagccagcaccaaggaggagcccttggaggaggaagcaacgacccagagccgggctggaagggaagaagaggagaaggagcaggaggaggagggagatgtgtctaccctggagcagggagagggcaggctgcagctgcgggcctcggtgaagagaaaaagcaggccctgctccttgcctgtgtccgagctggagacggtgatcgcgtcagcctgcggggaccccgagaccccgcggacacactacatccgcatccacaccctgctgcacagcatgccctccgcccagggcggcagcgcggcagaggaggaggacggcgcggaggaggagtccaccctcaaggactcctcggagaaggatgggctcagcgaggtggacacggtggccgctgacccgtctgccctggaagaggacagagaagagcccgagggggctactccaggcacggcgcaccctggccactccgggggccacttccccagcctggccaatggcgcggcccaggatggcgacacgcaccccagcaccgggagcgagagcgactccagccccaggcaaggcggggaccacagttgcgagggctgtgacgcgtcctgctgcagcccctcgtgctacagctcctcgtgctacagcacgtcctgctacagcagctcgtgctacagcgcctcgtgctacagcccctcctgctacaacggcaacaggttcgccagccacacgcgcttctcctccgtggacagcgccaagatctccgagagcacggtcttctcctcgcaagacgacgaggaggaggagaacagcgcgttcgagtcggtacccgactccatgcagagccctgagctggacccggagtccacgaacggcgctgggccgtggcaagacgagctggccgcccctagcgggcacgtggaaagaagcccggaaggtctggaatcccccgtggcaggtccaagcaatcggagagaaggtgaatgtcctatactccataattcccagccagtaagccagcttccttccctgaggcctgaacatcatcactacccaacaatcgatgagcctcttccaccaaactgggaagctcgaattgacagccacgggcgggtcttttatgtggaccacgtgaaccgcacaaccacctggcagcgtccgacggcagcagccaccccggatggcatgcggagatcggggtccatccagcagatggagcaactcaacaggcggtatcaaaacattcagcgaaccattgcaacagagaggtccgaagaagattctggcagccaaagctgcgagcaagccccagcaggaggaggcggaggtggagggagtgactcagaagccgaatcttcccagtccagcttagatctaaggagagaagggtcactttctccagtgaactcacaaaaaatcaccttgctgctgcagtccccagcggtcaagttcatcaccaaccccgagttcttcactgtgctacatgccaattatagtgcctaccgagtcttcaccagtagcacctgcttaaagcacatgattctgaaagtccgacgggatgctcgcaattttgaacgctaccagcacaaccgggacttggtgaatttcatcaacatgttcgcagacactcggctggaactgccccggggctgggagatcaaaacggaccagcagggaaagtcttttttcgtggaccacaacagtcgagctaccactttcattgacccccgaatccctcttcagaacggtcgtcttcccaatcatctaactcaccgacagcacctccagaggctccgaagttacagcgctggagaggcctcagaagtttctagaaacagaggagcctctttactggccaggccaggacacagcttagtagctgctattcgaagccaacatcaacatgagtcattgccactggcatataatgacaagattgtggcatttcttcgccagccaaacatttttgaaatgctgcaagagcgtcagccaagcttagcaagaaaccacacactcagggagaaaatccattacattcggactgagggtaatcacgggcttgagaagttgtcctgtgatgcggatctggtcattttgctgagtctctttgaagaagagattatgtcctacgtccccctgcaggctgccttccaccctgggtatagcttctctccccgatgttcaccctgttcttcacctcagaactccccaggtttacagagagccagtgcaagagccccttccccctaccgaagagactttgaggccaagctccgcaatttctacagaaaactggaagccaaaggatttggtcagggtccggggaaaattaagctcattattcgccgggatcatttgttggagggaaccttcaatcaggtgatggcctattcgcggaaagagctccagcgaaacaagctctacgtcacctttgttggagaggagggcctggactacagtggcccctcgcgggagttcttcttccttctgtctcaggagctcttcaacccttactatggactctttgagtactcggcaaatgatacttacacggtgcagatcagccccatgtccgcatttgtagaaaaccatcttgagtggttcaggtttagcggtcgcatcctgggtctggctctgatccatcagtaccttcttgacgctttcttcacgaggcccttctacaaggcactcctgagactgccctgtgatttgagtgacctggaatatttggatgaggaattccaccagagtttgcagtggatgaaggacaacaacatcacagacatcttagacctcactttcactgttaatgaagaggtttttggacaggtcacggaaagggagttgaagtctggaggagccaacacacaggtgacggagaaaaacaagaaggagtacatcgagcgcatggtgaagtggcgggtggagcgcggcgtggtacagcagaccgaggcgctggtgcgcggcttctacgaggttgtagactcgaggctggtgtccgtgtttgatgccagggagctggagctggtgatagctggcaccgcggaaatcgacctaaatgactggcggaataacactgagtaccggggaggttaccacgatgggcatcttgtgatccgctggttctgggctgcggtggagcgcttcaataatgagcagaggctgagattactgcagtttgtcacgggaacatccagcgtgccctacgaaggcttcgcagccctccgtgggagcaatgggcttcggcgcttctgcatagagaaatgggggaaaattacttctctccccagggcacacacatgcttcaaccgactggatcttccaccgtatccctcgtactccatgttgtatgaaaagctgttaacagcagtagaggaaaccagcacctttggacttgagtgaggacatggaacctcgcctgacattttcctggccagtgacatcacccttcctgggatgatccccttttccctttcccttaatcaactctcctttgattttggtattccatgatttttattttcaaaccaaatcaggattgacaaaagctgtgcatgaagaactgccttcttctaagatctaaccttcaggcttctctcctctgttttcaatgaactgctagcctgtatgcaatattaaaaaacagctgtctcaaggtctgtgtatatctccacatacctccattactaacaatgaaatatgaatgcaagttaagctacacttgaccaaatggtaataaatgtttacttccatttctatcattgaagggaaaatgtgagcattaagcactccaggctttcatatgcccatgtcttctgagcagagccaccattttttataatttctaataaccaactccagaactaggagctgatcaactctttgttttcctctccatctacttttccctgtgcataatatccatccaaaggacaacagtggcaaagctgaaatttttatacattcaactcatgattcacatgtggcatcagtcccatcagccggaactagcctagacatacggtgcaaatatgacacttctaacgattaacaacagcaagaaaacacctgctgctgatgcaatgcaatgcatcccaatggttgtggggattgtgggctcaactcaagagaagtttaggagggggagcatccctagtgaatactcacaccacaagaaggacaaacttgtgcacatgtccaagaaagaaagcttcttgattgaggtagcatgaaggatgaggcttcagcccccattgtcttatgtagaatgtggcaatgccaactggagaaagggaagaaggacatattaccttggtttgaatccctgagttctgtactgttctgttttgtttagtctagccacagttcttcacaaaggaaaaaaaaatgtgtagatgataccatgacttttgttaaagccatgacttttgtttgcttggcagacaaaccctttttttaaaactttgatatttttttttcacatttttttttccttttcctttcttaatcatggagttcaagttcctttgcattcgattgtccatcgggaccacactaggaagctgcagagagtgatggtgcttgttagggatcaagggcaacatagtacttctccttcacccatagtaatcctcctggggcagaaacataacaccccaaaggcacgttgatttgtatcaaaataaatatccagtttcttttagcattcagtgaaaacatatctcagaaaacttcatgttgtcagaaaaacagctgcaggctccaaagacagcctaacctctcaactacatttgaaataaacccaaccataatggt

SEQ ID NO: 458 - DNA, 3311 bp, Homo sapiens
  source 1..3311: mol_type = genomic DNA
gtggtgcccatcagcatgtggagccggccaccgcccctgcctccatagaagcccgctgccgcccagtccgcggtaccttgagggtcacgtcgcacagcttgccctgccgccggatctcctccatgacgccgtagccgcgactaggcaactcagacacggagaagtgcaccagatcctccagctcctccgcgccgtcctccaccatcttccccggccgctgcaactgcgcaggcctcgccggccggctagacactaaccagggcggggcgatagcgcacgccgacagccgctcggagcgcggagcagcaatcggacgggcctccgcggccgccgtagttgaatctcctcggcgccggaagccccgccactccgcttcctggttcatgtgcggccttcgttccctcgctatctcgaccttgacttcgcatgtgcatccgccgaagtctttctagatcaatcggccccatctctcgtcttcccgattcggccatgacctcacccgtatcctcgacgtaggacctcggacttcatttccgccaccccgacacttccggaatccccggaagcgacccgttgccatggcgactatgtacacagccaggcagccccgcgtggggagtgcaggtggtttcggttgcggcagtcgcgtcccgggagcgtcgctgcctggtgaacgctagaatgggtactaggaaaaaagttcatgcatttgtccgtgtcaaacccaccgatgactttgctcatgaaatgatcagatacggagatgacaaaagaagcattgatattcacttaaaaaaagacattcggagaggagttgtcaataaccaacagacagactggtcgtttaagttggatggagttcttcacgatgcctcccaggacttggtttatgagacagttgcaaaggatgtggtttctcaggccctcgatggctataatggcaccatcatgtgttatgggcagacgggagctggcaagacatacaccatgatgggggcaactgagaattacaagcaccgggggatcctccctcgtgccctgcagcaggtttttaggatgatcgaagaacgccccacacatgccatcactgtgcgtgtttcctacttggaaatctataatgagagcctgtttgatctcctgtccactctgccctatgttggaccctcagtcacaccaatgaccatcgtggaaaaccctcaaggagtcttcattaagggcttgtcagttcacctcacaagtcaggaggaggatgcattcagcctcctttttgagggtgagaccaacaggattatagcctcccacactatgaacaaaaactcttccagatcacactgcattttcaccatctacttagaggcccattcccggaccttatcagaggaaaagtacatcacttccaaaattaacttggtggatctggcaggctcagagaggctggggaagtctgggtctgagggccaagtcctgaaggaagccacctacatcaacaaatcgctctcattcctggagcaggccatcattgcccttggggaccagaagcgggaccacatcccctttcggcagtgcaagctcacccacgctctgaaggactcgttagggggaaactgcaatatggtcctcgtgacaaacatctatggagaagctgcccagttagaagaaacgctatcttcactgagatttgccagcaggatgaagctagtcaccactgagcctgccatcaatgaaaagtatgatgctgagagaatggtcaagaacctggagaaggaactagcactactcaagcaggagctggctatccatgacagcctgaccaaccgcacctttgtgacctatgaccccatggatgaaatccagattgctgagatcaactcccaggtgcggaggtacctggaggggacactggacgagatcgacataatcagccttagacagatcaaggaggtgttcaaccagttccgggtggttctgagccaacaggaacaggaagtggagtccactttgcgcaggaagtacaccctcattgacaggaatgactttgcagccatttctgctatccagaaggcggggcttgtggatgttgatggccacctagtgggtgagcctgaaggacaaaactttggactcggagtcgcccctttctctaccaaacctgggaagaaagccaagtccaagaagacattcaaagagccactcagctccttggcaagaaaggaaggtgccagcagccctgtgaatgggaaggacttggattacgtttccacctccaagacccagctggtcccatcctccaaagatggggatgtcaaagacatgctttcgcgggaccgggaaacttccagcattgagccccttccctcagactccccgaaggaggaattacgcccaattaggcccgacaccccaccctccaaaccagtggcctttgaggagtttaagaatgagcaaggtagtgagatcaaccgaattttcaaagaaaacaaatccatcttgaatgaacggaggaaaagggccagcgagaccacacagcacatcaatgccatcaagcgggagattgatgtgaccaaggaggccctgaatttccagaagtcactacgggagaagcaaggcaagtacgaaaacaaggggctgatgatcatcgatgaggaagaattcctgctgatcctcaagctcaaagacctcaagaagcagtaccgcagcgagtaccaggacctgcgtgacctcagggctgagatccagtattgccagcacctagtggatcagtgtcgccaccgcctgctcatggaatttgacatctggtacaatgagtcctttgtcatccctgaggacatgcagatggcactgaagccaggcggcagcatccggccaggcatggtccctgtgaacaggattgtgtctctgggagaagatgaccaggacaaattcagccagctgcagcagagggtgcttcctgagggccctgattccatctccttctacaatgccaaagtcaagatagagcagaagcataattacttgaaaaccatgatgggcctccagcaggcacatagaaaatagaacctcatcgccagtaccttaaaggacaagaccagcaactcccacctactgtagtggagctgctcaaccacctgcccagagctgcagccccctctactccaatgctgggacccagcacagagaacacatttggcctgcatgttgggaggagcatcctccaaggacaaccttgctcatctccacagagcactttgggttttaattcactgtcttatatgcagggacaggataaaataactttctagtttggactttca

SEQ ID NO: 459 - DNA, 1055 bp, Homo sapiens
  source 1..1055: mol_type = genomic DNA
gaggggacgcgcgcagatgacgtgcggctcgtggggcagctcggcagcatggcgtccgtgacgctgagcgaggcggagaaggtgtacatcgtgcatggcgtccaggaagacctccgtgtggatggccgtggctgtgaggactaccgatgtgtcgaagtggaaactgatgtggtgtccaacactagtgggtccgccagggtcaagctgggtcacacagacatcttggtgggagtgaaagcagaaatggggacgccgaagctggagaaaccaaatgaaggctacttggagttctttgttgactgttcagccagtgctacccctgaatttgaaggtagaggaggtgatgaccttggcaccgagatcgctaacaccctctatcggatatttaacaataaaagcagtgtcgacttaaagaccctctgcattagtcctcgggagcactgctgggttctctatgtggatgtgctgcttctggaatgtggtggaaatttgtttgatgccatttccattgctgtaaaggctgctctcttcaatacaaggataccaagggttcgagttttggaggatgaagaggggtcgaaggacattgaattgtcagatgacccttatgactgcatacgactaagtgtggagaatgtcccctgcattgtcactctgtgcaagattggctatcggcatgtggtggatgctactcttcaggaggaggcctgctcgctggccagcttgctggtgtcggtgaccagcaagggagttgtgacgtgcatgaggaaagtggggaagggcagcctggacccagagagcatcttcgagatgatggagactggcaagcgtgtgggcaaggtactgcatgcctccttgcagagtgttgtgcacaaggaagaaagcctggggcccaagagacagaaagttggattcctgggatgatttgcacatcaactgctcaactgtggattgttttttacttttccttttaaaccggttcgtatatatttttcttcgctgttacgaatttacagcagcatttgtacatgtaaaattaaaggctattttctggt

SEQ ID NO: 460 - DNA, 4794 bp, Homo sapiens
  source 1..4794: mol_type = genomic DNA
cgtgggcacctccagataagaaaacaagctcagagagatgtggtgacttgctcaaatagtgacagaacttcctcggccatatggaggggtcatataatacccttgtgtcttcagtttgaggagagcttgtttcatatccatatcccactgtattcctgctaatctgctaatgcagtaaattggaggaaaactgttaccaggataacctgtaatgggcaaggagccacaaagaagaaaacatttcttttaatttttaaacttggtttgaaagaccagcatgttttggaaatttgatcttcactcatcatcccacatagacacacttctagaaagagaagatgtaacactgaaggagttaatggatgaggaagatgttttacaggaatgtaaagctcagaaccgcaaacttatagagtttctgttaaaagcagaatgtctcgaagatttagtctcattcattatagaagaaccacctcaagacatggatgaaaagatcagatacaagtatccaaatatatcttgtgagttgctcacttctgatgtctcccagatgaatgatagactgggagaagatgaatccttgctaatgaaattatatagcttcctcctaaacgattcccctttgaatccactacttgccagtttcttcagcaaggtgctaagtattcttatcagcagaaaaccagaacagattgtggatttcttaaagaagaagcatgattttgtagaccttattataaagcacataggaacttctgctatcatggatttgttgctcaggctcctgacgtgtatcgaacctccacagcccaggcaagatgtgctgaattggttaaatgaggagaaaattatccagaggcttgtggaaatagttcatccatcgcaagaagaagatcgacattcaaatgcatcacaatcactttgtgaaattgttcgcctgagcagagaccagatgttacaaattcagaacagtacagagcccgaccccctgcttgccactctagaaaagcaagaaattatagagcagcttctatcaaatattttccacaaggagaaaaatgagtcagccatagtcagtgcaatccagatattgctgactttacttgagacacgacgaccaacatttgaaggccatatagagatctgcccaccaggcatgagccattcagcttgttcagtaaacaagagtgttctagaagccatcagaggaagacttggatcttttcatgaactcctgctggagccacccaagaacatgttcttcaagtatacatggaataactttttgcatacacaagtggaaatttgtattgcactgattcttgcaagtccttttgaaaacacagaaaatgccacaattaccgatcaagactccactggtgataatttgttattaaaacatcttttccaaaaatgtcaattaatagaacgaatacttgaagcctgggaaatgaatgagaagaaacaggctgagggaggaagacggcatggttacatgggacacctaacgaggatagctaactgtatcgtgcacagcactgacaagggccccaacagtgcattagtgcagcagcttatcaaagatcttcccgacgaagtcagggaacgatgggagacgttctgcacaagctccttaggagaaactaacaagaggaacacggtagatctagccttttctgattatcagatgcaacaaatgacgtccaattttattgaccagtttggcttcaacgatgagaagtttgcagatcaagatgacattggcaatgtttcttttgatcgagtatcagacatcaactttactctcaatacaaatgaaagtggaaatattgccttgtttgaagcatgttgtaaggaaagaatacaacagtttgatgatggtggctctgatgaggaagatatatgggaggaaaagcacatcgcattcacaccagaatcccaaagacgatccagctcggggagtacagacagtgaggaaagtacagactctgaagaagaagatggagcaaagcaagacttgtttgaacccagcagtgccaacacggaggataaaatggaggtggacctgagtgaaccacccaactggtcagctaactttgatgtcccaatggaaacaacccacggtgctccattggattctgtgggatctgatgtctggagcacagaggagccgatgccaactaaagagacgggctgggcttctttttcagagttcacgtcttccctgagcacaaaagattctttaaggagtaattctccagtggaaatggaaaccagcactgaacccatggaccctctgactcccagtgcggctgccctggcagtgcagccagaagcggcaggcagtgtggccatggaagccagctctgacggagaggaggatgcagaaagtacagacaaggtaactgagacagtgatgaatggcggcatgaaggaaacgctcagcctcactgtagatgccaagacagagactgcggtcttcaaaagtgaggaagggaaactgtctacctctcaagatgctgcttgtaaagacgcagaggagtgtcccgagactgcagaggcgaagtgcgcggcgcccaggcctcccagcagcagtcccgagcagaggactggccaaccaagcgcaccaggtgacacttcagtgaatggccctgtatgacgggtgacgtctgctgctgctgactgaggactgcagaccgccaccactcaggggctctggaggggtcagctggagcccaccaagctgtcactgctgcactcactctgcaagggatcaggaccagcaacctttatattctagattctaagacattgtacagagaaattcagaagtgtaaaaatattgcacattgacaaataccaagaatttttgcgtatgtttatattgtattgttctaaataatgggtagcctgtgaaataagatcttgccacccatgtaataatagtagtaatactatagttaaaatggctgtaagaatagttttataaaagtgaatacacagatctattgtatttgaaacataactttgacaattattagtgtgaccaaagtattaggcggttttcatacatttttcaccttgtacaaaattatgaattcatttttcctccaggccgacaaggagttgtagaatgaaaatgccctctaagtgttattttggttgttctaacttacaaaagtgattttgaataagaaatatttggtgttctttttataaccagtttttgattggtaattgttttctgtattgtttaaaacggatcaaaaatgtaagtctattggtagagattaagtaaagtatttattgctacatcatagttgataaattgatgttatcgtaaagccatatgttctgttcaagtcttgtttgcttgaaatgattattcctacaagtgaaacactagactatttggagtgtatatggcttgtgttttgggattttttttttttttttttggcttttgtttttgtttgtttttttgtttcatttggtagttcatctgccttttaacccattcaccaaaatttaccttgttaacaagcatcaccaatgaacatttcagagcaatctgcatatttaacagacctaaaataaatcctattaggcaagtcagttgaaaatgctcgtgctgctaatggaattagagtgcgttcattttacaggctagtattttaaaagtagaaatcaaaatctggcaccgaagcatgctaattgtttactgtaccttgtgaggttttcactcataaatttaaaccagtgtatttttttagaactggtttgtgtatatatatagtgattatggatactaattcaatgtaatttataattttctatgtcaatacaaaaatacatcacagccttctcaaacagctcaagcaatatattgtatattgccatatcgtctggtgaaagggttaaattacttcacctcttgcacttttagatgcaaatcagtttttcatttctgtaatagaaaattattcacgtatttttacatcatttgtttttcctgaccagtatttaaaaccaaaaggatattctgaaaaatggccaacaatttttttagaagtagcatcccaagcagcgtgcctaaacattacattgcatatggaaataaaagaatcaaacgtctaatgccttattatttctgatttcctttttcattttaagtggtgtggagattccagcactcccaggacagtggagtcagcagtaagccctgggacaggtggcaagggtgggtcccttgacctttgcacgcctcctcaggaaccccctttcccgggtgagcccctctctgaagagactgtccttgggcctcctctggaagcagcacccccagaggacagggctcctcctgcttgcctcagggctgcctgacttgaatggcgttggacctcggggattactggtagataatatgctctggtctcgcctggtggtgagttttgccagccatggccagggtttggctccactggtggcacacgtggcctccgtggtatggacctggtggcttctccatcccactgtggcctctgtggtatggacctggtggcttctccatcctacccaaggtaacagtgtcttgcttcatcccactgactgctgggagagagcctctgggacttttctttggggcatcattttgttttgtctttcgtagcagggaaaggatatgacaatggggaggacagttcttttggaggttggaggggccaagccaaggacaggagcaagtgtgccctcattttgtttctacttttaatttctgtgtgttggccatactga

SEQ ID NO: 461 - DNA, 4787 bp, Homo sapiens
  source 1..4787: mol_type = genomic DNA
agcgcgcatgctcgcggctcggcgctgaaattcaaatttgaacggctgcagaggccgagtccgtcactggaagccgagaggagaggacagctggttgtgggagagttcccccgcctcagactcctggttttttccaggagacacactgagctgagactcacttttctcttcctgaatttgaaccaccgtttccatcgtctcgtagtccgacgcctggggcgatggatccgtttacggagaaactgctggagcgaacccgtgccaggcgagagaatcttcagagaaaaatggctgagaggcccacagcagctccaaggtctatgactcatgctaagcgagctagacagccactttcagaagcaagtaaccagcagcccctctctggtggtgaagagaaatcttgtacaaaaccatcgccatcaaaaaaacgctgttctgacaacactgaagtagaagtttctaacttggaaaataaacaaccagttgagtcgacatctgcaaaatcttgttctccaagtcctgtgtctcctcaggtgcagccacaagcagcagataccatcagtgattctgttgctgtcccggcatcactgctgggcatgaggagagggctgaactcaagattggaagcaactgcagcctcctcagttaaaacacgtatgcaaaaacttgcagagcaacggcgccgttgggataatgatgatatgacagatgacattcctgaaagctcactcttctcaccaatgccatcagaggaaaaggctgcttcccctcccagacctctgctttcaaatgcctcggcaactccagttggcagaaggggccgtctggccaatcttgctgcaactatttgctcctgggaagatgatgtaaatcactcatttgcaaaacaaaacagtgtacaagaacagcctggtaccgcttgtttatccaaattttcctctgcaagtggagcatctgctaggatcaatagcagcagtgttaagcaggaagctacattctgttcccaaagggatggcgatgcctctttgaataaagccctatcctcaagtgctgatgatgcgtctttggttaatgcctcaatttccagctctgtgaaagctacttctccagtgaaatctactacatctatcactgatgctaaaagttgtgagggacaaaatcctgagctacttccaaaaactcctattagtcctctgaaaacgggggtatcgaaaccaattgtgaagtcaactttatcccagacagttccatccaagggagaattaagtagagaaatttgtctgcaatctcaatctaaagacaaatctacgacaccaggaggaacaggaattaagcctttcctggaacgctttggagagcgttgtcaagaacatagcaaagaaagtccagctcgtagcacaccccacagaacccccattattactccaaatacaaaggccatccaagaaagattattcaagcaagacacatcttcatctactacccatttagcacaacagctcaagcaggaacgtcaaaaagaactagcatgtcttcgtggccgatttgacaagggcaatatatggagtgcagaaaaaggcggaaactcaaaaagcaaacaactagaaaccaaacaggaaactcactgtcagagcactcccctcaaaaaacaccaaggtgtttcaaaaactcagtcacttccagtaacagaaaaggtgaccgaaaaccagataccagccaaaaattctagtacagaacctaaaggtttcactgaatgcgaaatgacgaaatctagccctttgaaaataacattgtttttagaagaggacaaatccttaaaagtaacatcagacccaaaggttgagcagaaaattgaagtgatacgtgaaattgagatgagtgtggatgatgatgatatcaatagttcgaaagtaattaatgacctcttcagtgatgtcctagaggaaggtgaactagatatggagaagagccaagaggagatggatcaagcattagcagaaagcagcgaagaacaggaagatgcactgaatatctcctcaatgtctttacttgcaccattggcacaaacagttggtgtggtaagtccagagagtttagtgtccacacctagactggaattgaaagacaccagcagaagtgatgaaagtccaaaaccaggaaaattccaaagaactcgtgtccctcgagctgaatctggtgatagccttggttctgaagatcgtgatcttctttacagcattgatgcatatagatctcaaagattcaaagaaacagaacgtccatcaataaagcaggtgattgttcggaaggaagatgttacttcaaaactggatgaaaaaaataatgcctttccttgtcaagttaatatcaaacagaaaatgcaggaactcaataacgaaataaatatgcaacagacagtgatctatcaagctagccaggctcttaactgctgtgttgatgaagaacatggaaaagggtccctagaagaagctgaagcagaaagacttcttctaattgcaactgggaagagaacacttttgattgatgaattgaataaattgaagaacgaaggacctcagaggaagaataaggctagtccccaaagtgaatttatgccatccaaaggatcagttactttgtcagaaatccgcttgcctctaaaagcagattttgtctgcagtacggttcagaaaccagatgcagcaaattactattacttaattatactaaaagcaggagctgaaaatatggtagccacaccattagcaagtacttcaaactctcttaacggtgatgctctgacattcactactacatttactctgcaagatgtatccaatgactttgaaataaatattgaagtttacagcttggtgcaaaagaaagatccctcaggccttgataagaagaaaaaaacatccaagtccaaggctattactccaaagcgactcctcacatctataaccacaaaaagcaacattcattcttcagtcatggccagtccaggaggtcttagtgctgtgcgaaccagcaacttcgcccttgttggatcttacacattatcattgtcttcagtaggaaatactaagtttgttctggacaaggtcccctttttatcttctttggaaggtcatatttatttaaaaataaaatgtcaagtgaattccagtgttgaagaaagaggttttctaaccatatttgaagatgttagtggttttggtgcctggcatcgaagatggtgtgttctttctggaaactgtatatcttattggacttatccagatgatgagaaacgcaagaatcccataggaaggataaatctggctaattgtaccagtcgtcagatagaaccagccaacagagaattttgtgcaagacgcaacacttttgaattaattactgtccgaccacaaagagaagatgaccgagagactcttgtcagccaatgcagggacacactctgtgttaccaagaactggctgtctgcagatactaaagaagagcgggatctctggatgcaaaaactcaatcaagttcttgttgatattcgcctctggcaacctgatgcttgctacaaacctattggaaagccttaaaccgggaaatttccatgctatctagaggtttttgatgtcatcttaagaaacacacttaagagcatcagatttactgattgcattttatgctttaagtacgaaagggtttgtgccaatattcactacgtattatgcagtatttatatcttttgtatgtaaaactttaactgatttctgtcattcatcaatgagtagaagtaaatacattatagttgattttgctaaatcttaatttaaaagcctcattttcctagaaatctaattattcagttattcatgacaatatttttttaaaagtaagaaattctgagttgtcttcttggagctgtaggtcttgaagcagcaacgtctttcaggggttggagacagaaacccattctccaatctcagtagttttttcgaaaggctgtgatcatttattgatcgtgatatgacttgttactagggtactgaaaaaaatgtctaaggcctttacagaaacatttttagtaatgaggatgagaactttttcaaatagcaaatatatattggcttaaagcatgaggctgtcttcagaaaagtgatgtggacataggaggcaatgtgtgagacttgggggttcaatattttatatagaagagttaataagcacatggtttacatttactcagctactatatatgcagtgtggtgcacattttcacagaattctggcttcattaagatcattatttttgctgcgtagcttacagacttagcatattagttttttctactcctacaagtgtaaattgaaaaatctttatattaaaaaagtaaactgttatgaagctgctatgtactaataatactttgcttgccaaagtgtttgggttttgttgttgtttgtttgtttgtttgtttttggttcatgaacaacagtgtctagaaacccattttgaaagtggaaaattattaagtcacctatcacctttaaacgcctttttttaaaattataaaatattgtaaagcagggtctcaacttttaaatacactttgaacttcttctctgaattattaaagttctttatgacctcatttataaacactaaattctgtcacctcctgtcattttattttttattcattcaaatgtattttttcttgtgcatattataaaaatatattttatgagctcttactcaaataaatacctgtaaatgtctaaaggaa

SEQ ID NO: 462 - DNA, 3352 bp, Homo sapiens
  source 1..3352: mol_type = genomic DNA
agtcaccccggcatgtgggcgcggcggggcggcgcgggcgggacggctacaagagctgttttgcgtccgggccggagtatttgctcagcccgcctgcgccgcttgggacgcctctgcctttccctccctcccttccccgacggcttctggcggccaagtggatgtggcgggtgatcgagccaccctgcccaggggcgcccagcactggttcagtgaacagcattttggacaggacatttggtgccaggtctgagtagccagtttgctgaattattgtcccagtcagccaggattgtgagctgtttgggaagtttcgtggaaacgcccaagtgccagcacaggtggagggacacctggaggccagtttcaggaacttttgccacaagtataaaagacttcagaagtgcaaagatgctgaaacagatactgtcggagatgtacatagatcctgatctactggcagagctcagcgaagaacagaaacagatcctgttcttcaagatgagagaggaacagatccgacgatggaaagaaagagaagcagctatggaaagaaaggagtccctgccagtgaaacccagaccaaagaaagagaatggcaaatcggttcattggaaacttggagctgataaggaagtctgggtatgggtgatgggcgaacaccatctagataaaccctatgatgtgctctgtaatgaaattattgctgagagggcccggctgaaagcagaacaggaggcagaagagcccagaaaaactcactctgaagaattcaccaatagcttgaaaacaaaatcacagtaccatgatctgcaggctccggataaccagcagactaaagacatctggaagaaagtggcagaaaaggaggaactggagcaaggatcgaggccagcaccaaccctggaagaagagaaaatccgatcactctccagttcttcaagaaatattcaacaaatgttggcagattcaatcaatcgtatgaaggcatatgcatttcaccagaagaaagaatctatgaagaaaaaacaagatgaagaaataaatcaaatagaagaagagagaacgaagcagatttgtaagagctggaaagaagactcggaatggcaggcatctctgcgaaaatccaaagcagctgatgagaagagacgctccttggctaaacaagcacgagaagactacaagaggttatccctcggggcccagaaaggaagaggcggtgagaggctgcaaagccccttgcgtgttccgcagaaaccagaaagacctccccttccacccaagcctcagttcctaaactcaggggcatatcctcaaaaacctcttagaaatcagggagtggtgaggacactgtccagctctgcccaagaggacatcatccggtggtttaaagaggagcagctaccacttcgagcgggctaccagaaaacctcagacaccatagccccctggttccatggaattctcacactcaagaaagcaaatgaacttcttctgagcacaggcatgcccggcagttttctcatccgagtcagtgaaaggatcaaaggctatgccctgtcctatctgtcggaggacggctgtaaacatttcctcatcgatgcctctgcagacgcctacagcttcctgggcgtggaccagctacagcatgccaccttggcggatttggtggaatatcacaaggaggaacccatcacttccctggggaaggagctccttctctatccctgtggtcagcaggaccagctgcctgactacctggagctgtttgagtgacagcctccatcagggtcatcctacagcctccaagcgggctttcccctggacaaatgccactgcaacatttatgtgtgaagccaaaatcaccctgcagcagagccaatactgatcaactgaaagtaaagtatccatggagtcctcattgacacctcttttctgcacaaatactggaattcaatgtcaagagaaaatgacctctgctcaaaagggagaagagtctcaatttcagcaagtacctgtcatgaagggtatgaccttaatgatgtacataaaataaaacaaatgaagaaatggaaaacttttagaaattaaggtgtacttgaaaacgaatatctatcatatgacccctgcactccctctgtatcatctcaggaggtttcaggggcctgttgacatgaagtttcgaagtttcatgttggctttggaatggtagcaaaagcctttcctggctgagatgatgcttaaaacacacctcacttattgtacatgttggaaccaggacatgagagacatagaaaaacagaagtcatgaatgtaaattgaatgagaggcttaacatgcatgaaaatacagatggacctgcaggaaagtgagcaaacatcgctgagtttgttttcttgttcgggagaatggggccggggctggcctggcctcccctggatatactctatagtgcaccaaaaggataaagcatctgtacatgtatttttttattttttatcagaagtgcttagacaagaacagaataagcaggctgtttggatgctacttgtggttgaattgtgttcccccaaaatatatggtgaagtcttaacccccatccccgtgaatgggaccttgtttggaaatagggtctttgcagatatagtcaagatgaggtcacattggattagggtgggccccaaatccaatgactggcatccttaggagaagagagagttttggtaatagacacaaatgcagtgggaagaagaccaggggacaagaggcaagttggagtgatgcagccggaagggaagggacaccaaggatctccggccaccagcagaagccagcagagaggcatgggacaggttccccacaagccttagaaggaagcatggccctgacttcagaattccagactccagaactggaagaataaatgtctgttgttttaagctgcttagttcatgctgagttcatgctgacttgttactatagccccagaaagctaatacagtcgtttatgtaattacataacctgacacacaagatcgacccattcactgctgcccagtccaccattttcataatgaagtagaaatgggaggtaagaaaaacattccagccagttctgtttagccctggcacacatatttgtcccgtcaggaatcttatgccctcctggaacccccgcccacctcagtccagtcccagtcaggcgaacggcctctggacagggactgaggtggctctgagccactggagatcatttttcttggaggatggagattggctagtacctctggcctaactgtgtaggtcaatactcttttacattgccttctaataaaagcagaatgatacagca

SEQ ID NO: 463 - DNA, 2238 bp, Homo sapiens
  source 1..2238: mol_type = genomic DNA
ccctttccccactgtggtgtgataagaggctgccctcacagtcacaatgctcccgggtcacagaggtgctgggccccaggccagcctctgcctgggaagttctctctgggaacatctggtgggtactacaggccctattccaggccctatggcctgtggaacctcaccacgggggggagggctgggccagacggagacatcacctgtggtgtcagccccatggatgagacagagtggatacacagacatcccaaggctgaggacctaagggttgggctcatcagctgggcaggaacctacctcacctttgaggcatgcaagaatacagtcactgcaactgcgaagagtttgggcaggagacagacctgggagatcttggtgagcaatgagcatgagacacaggccgtggtgcgactaaagagcgtgcagggcctctacctgctgtgtgagtgtgatggcaccgtgtgttatggccgcccaaggaccagccaccatgggtgctttctactgcgtttccaccggaacagcaagtggaccctccagtgcctaatctctggtcgttatttggagtccaatggcaaggacgtgttttgcacttcccacgtcctctcagcttaccacatgtggaccccccgaccagccctccatgtccacgtgatcctctacagccccatccaccgctgctatgcccgggctgaccccactatgggccgcatctgggtggacgcagcagttccctgcctggaggagtgtggcttcctgttgcatttccgagatggatgctaccacctggagacctctacacaccacttcttgtcccatgtagaccggctgttctcccaaccctcatcacagacagcttttcacatgcaagtgcggcctggagggcttgtggcactgtgtgatggagaaggaggcatgttatatccacagggcacgcatctgctcttgggcatgggctgcaaccccatgaggggtgaggagtggttcatcctacagcactgcccaacctgggtcagcctcaggtcaaagactgggcggttcatctcagtcatctacgatggtgaggtgcgtgctgcttctgagcgcttaaaccgaatgtccttgttccagtttgaatgtgacagtgagagccccactgtgcagcttcgttcagccaatggctactacctatcccagaggcgccacagggcagtaatggctgatgggcaccccctggagtctgacacgttcttccgaatgcactggaactgtggcaggatcatcctgcagtcctgcagggggcgcttcctgggcattgcacccaacagcctgctgatggccaatgtcatccttccaggcccaaatgaggaatttgggattttatttgccaatcgctccttccttgtattgcgaggtcgttatggctatgtgggctcctcatcgggccatgacctcatacagtgcaaccaggatcagcccgaccgcattcatctactaccctgccgaccgggtatctaccacttccaggcacaggggggatccttctggtcaataacatcctttggcacctttcgcccttggggcaagtttgccctcaacttctgtatcgagcttcaggggagcaacttactcactgtactggcccccaatggcttctacatgcgagccgaccaaagtggcaccctgttggcagacagtgaagacattaccagagagtgtatctgggaattttaggtcaatgggatgtcacctaccaaaatccaaatcctccaggaaaaactactacactaaatggaccaggaacctcagagtcaagatccaagagaagaacatctgttacaacttttcctacccagtttagcaaaacacctgttttatgcaacaatacatcacaacaggccacccccaagatccttgtgtgcatctgactcaatatagaataggggtctggatgagggttgaaacagacaccccaggctgctctaagttctatacaggagagaccaaatggcaagcagttcttccactgatcttccccgtccccatccagaactgctagactttttccagtgaacccatgagcagccagcattgccctgaagggtttagaatccagttatgactttaaatatctttttggtttagaaaaaaggaaagattgttaatctcgtgagcacaggataatggtaataacaccttatgcctgtataggccactttacctcctcctaccacgatttatttaacttccccaccc

SEQ ID NO: 464 - DNA, 1566 bp, Homo sapiens
  source 1..1566: mol_type = genomic DNA
ctctctcccggcctgcgggccgcttcccaccacagaccccgccccgcgccctacccatcacgcgtccccggtccggctccggcgctcacctacccccggcaggcgccgcccccgtgccgtccctcccggaagcgccggcggagcgtcctcgcatggagcgcgagcccagcgcctcggaggccgcccccgcggcggccgcgctcttcgcctggggtgcaaatagctatgggcaacttggcctcggccataaggaagatgtgctgttgccccagcaactgaatgacttctgtaaacccaggagtgtcaggaggatcacaggaggagggggccactctgcagttgtcacagatggaggagacctctttgtttgtggcctgaacaaagatgggcaactggggcttggtcacacagaggatatcccatattttaccccctgcaaatccctctttggctgtcccatccaacaggtggcctgtggctgggattttacgattatgctcacagaaaatggtcaagttctatcatgtggatccaactcctttggccagttaggagttcctcatggacctcgaagatgtgtggttccccaggccattgagctccataaagagaaggttgtttgtattgctgctggactgaggcatgcagtagctgctacagcgagtggcatcgtgttccagtgggggactggtttggcatcatgtggacgacggttgtgccctgggcagactcttccattgtttttcacagcaaaggaaccaagcagagtgacaggtctagagaattctaaagcaatgtgtgttcttgctggctcagaccactcagcttcattaacagatgcaggagaggtgtatgtttggggaagcaacaagcatgggcaactggctaatgaggctgctttccttcctgtgccccagaaaatagaagcacattgtttccagaatgaaaaggtcactgccatctggagtggatggacacacctggttgctcagacagaaactggcaagatgtttacctggggccgagcagactatggtcagctagggaggaagttggagacttatgaaggctggaaactagaaaagcaagattcatttctcccctgttcaagaccaccgaacagcatgccttcgtctccgcattgcttaactggagcaactgaggtctcttgtggctcagagcataatttggcaataattggtggagtgtgttactcttggggctggaatgagcatggcatgtgcggagatggcactgaagccaacgtctgggccccaaagccggtgcaggctctgctgtcatcgtcaggactccttgtgggctgtggggctggccactccttggccctctgccagctgccagctcaccctgcattggtccaggaccccaaggtcacctacctttccccagatgccatcgaggacactgaatctcagaaagccatggacaaagagagaaactggaaggaaagacaatcagaaacttcaacccaaagccaatctgactggtccagaaatgggggactgtgatagagaatctttaataaagtggcttttcccaccaaaa

SEQ ID NO: 465 - DNA, 3481 bp, Homo sapiens
  source 1..3481: mol_type = genomic DNA
agtcgtgcgacgccgggcggttgcgtgtggtgcgcgggggcgcgggctgcgtgtggcgcggggcggggcgcggctggtgcgcttgagaagcgatggcggcggcctgaactcacctaacaccgcagcagcaaccgggcccggccaggttcggcgttccgtgagtgaacgatttagaaatctggactggccagtgacctctgggcttgccattccagcctggtataacctctggctccatgggcagctactggctcctacagaccggatgaagcagactggagacacaagtggagaaaacctccagctggcaaatcctcagagtgtaggcctctggctgccagtcctgcccagcctgcctcatggagaggatgaattggctgagcagactggcctcccggggccctgggcaccgtatacctcaaggggccaatctccaaaccccagtcatggctgatcccgagacctgcctcatggtcttcaagaatcactggtcccaggtggtgcgaatcctggagcggcaaggccctcgggcagctcctgggggtgcagacgatctcagtgctgtgcgcaaccacacttaccagatgttgacactgctggcagaggaccgtgcagttccctcggcccccacaggccctgggcccctgctggagtttgctctgcacgaggatctgctgacccgtgtgttgacatggcagctgcaatgggatgagcttggggatggggtcgaggaacggcgggctgagcaactgaaactatttgaaatgctagtgagcgaagctcgccagccactgttgcggcatggtccagttcgtgaggctctgctcaccctgctggatgcctgtggccgccctgtgcccagtagcccagcactggatgaaggcttggtgctacttctcagccagctgtgtgtttgtgtggcccaggagccttcattgctcgagttcttcctgcagccacctcctgagcctggagccgctccccgtcttcttctcttttctcgccttgtcccttttgtgcatcgagagggcaccctgggccagcaggcccgtgatgccctacttcttctcatggctttgtcagctgggagccccactgtgggccgctacatcgcggatcactcttacttctgcccggtgctggccacagggctcagtgccctgtactcatcactgcctcgaaagattgaggttccaggggatgattggcactgtctgcgacgggaagactggctgggagtgccagcccttgcactcttcatgagttccctggagttctgcaatgcagtaattcaggtggctcaccccctggtgcagaagcagttggttgattatatccataatgggttcctggtgcctgtcatgggtcctgccttgcacaagacctctgtggaggagatgatcgccagtaccgcctatctggaacttttcctacggagtatctcagagcctgctttgctccgtaccttcctgcgattcctgttgttgcaccggcatgacacccacaccatcctcgacaccctcgttgctcgtattggcagtaactcccggctctgcatggtctctctgagtctcttcaggaccctcctgaacctcagctgtgaggatgtcctgctgcagctggttctcaggtatcttgttccatgtaaccacgttatgctgagccagaagccggctgttcgtgatgtggacctatatggacgagcagctgacaagtttctctccctaatcccacgctgttgtcggcaccacgcccccagcccacctcgtccagagcatgcctcatgggcacgaggtgggcctagcagagagacagggagaagggaggacatcacgggtcctggaagcccaagtgtggactcctcttctgtgacgacagtaccccggccctccacaccatctcgtctggctctcttcctgcggcagcagagcctgggtggctctgagtctccaggcccagccccttgctcaccagggctttctgcatcccccgcctccagccctggccgacggcctacccctgcagaggagcctggagagctggaagacaattacctggagtatctgcgtgaggcacgtcgtggtgtggaccgctgtgtccgagcctgccgtacctggtctgccccctatgatggcgagcggccctctcctgagcccagtccttttggctcccggactaagaaacgcagcctactgcctgaggaggacaggaacaacgtgggggaaggggaggaggaagagctggggaggagggggcgggctgggggtgcaggggagggccctggtcacctgccccctccccagctcaatggagtgccaggatcatggcctgagggggccaagaaggttcgtctggtgccaaaggagggagctggggaactgctagagggcatctccgagggcatggcaggactagagggctttgggcaggagctccgggagctagaggtggcattgagcaatgggggaactggctcagagtcccccttagaacctccactgccccttgaggaggaggaggcctacgagagcttcacctgtccccctgagccccctggccccttcctcagcagccctttgcggactctcaaccagctgccaagccagcccttcactggccccttcatggctgtgctctttgccaaactcgagaacatgctgcagaactccgtctatgtcaacttcctgctgacggggctggtggcccagctggcctgtcacccccagcccctgctccgctctttcctgctcaacaccaacatggtcttccagcccagtgtcaagtccctgctgcaggtgctgggctctgtgaagaataagattgagaactttgcggcttcccaggaggacttcccagcactgctgtccaaagccaagaagtacctcattgcccgtggcaagttggactgggctgagggccctgcagcaggacctgccccacgccgttctgatcccctagtgaagagccggaggccatccttgggggagttactcctgcggcatgcacacagtccaaccagggcccggcaggcggcacaattggtccttcagcctgggcgagacggagcaggacttggcctaagtgggggctcccctggggcttcaactccagttctactcacccggggcggggcccctgaacgccaaggtgaggctcttcgagtcaagaatgctgtctactgtgcagtcattttccctgaatttctcaaggagttggctgccatctcccaggctcatgccgtcacctcgcctttcttgttggagacttcagaggaaggatctggccctctcatctcaggctgtgggcccctcaatccttaactttcttccatggacaatcagggccatgggtggcccgggctggggctagggcacaggctcctttttatgtttggaggcagtggcaaaaggactttttaatttatttcagatgaatgttttatggagaacttgttgcaatatgtataaaagggaaatctcta

SEQ ID NO: 466 - DNA, 8544 bp, Homo sapiens
  source 1..8544: mol_type = genomic DNA
cacgcactacgggttggcgccagagtcaaaaggcgtcggccctctggcaagatggctgctgcggaggcgttggagcgcggaaatctggaaccgggatggcgacgtctacactgagtcggaggcgaaggagcttactccacgggaacagcctctagataatctgagttgttgaaaatacgaagcctgttactcgtgaacagtggctgacaacagtgttgttgtgagcctggctgtctgcttggacccagaggtttcgtctgccagggtttttggttgtatttaggatttcagggaaaagtgtccaagctttcagtgttggagcaggtatggacgacaaaggcgacccgagcaatgaggaggcacctaaggccatcaaacccaccagcaaagagttcaggaaaacatggggttttcgaaggaccactatcgccaagcgagagggcgcaggggacgcggaggctgacccactggagccgccacccccacagcagcagctgggcctgtccctgcggcgcagtgggaggcagcccaagcgcactgagcgcgtggagcagttcctgaccattgcgcggcgccgcggcaggaggagcatgcctgtctccctggaggattctggtgagcccacgtcctgccccgccacagacgccgagacagcctccgagggcagcgtggaaagcgcttctgagaccagaagcggcccccagtctgcttccacagctgtgaaggaacgaccagcctcttctgaaaaggtgaaaggaggggatgaccacgatgacacctccgatagtgacagcgatggcctgaccttgaaagagcttcagaatcgccttcgcaggaagcgggaacaggagcccactgagaggcccctgaaagggatccagagtcgcctgcggaagaagcgccgggaggagggtcccgccgagactgtgggctccgaggccagtgacactgtggagggcgtcctgcccagtaagcaggagcccgagaacgatcagggggttgtgtcccaggctgggaaagatgacagagagagtaagttggagggaaaggcggctcaggacatcaaagatgaggagcctggagacttgggccgaccgaagcctgaatgtgagggttacgaccccaacgccctgtattgcatttgccgccagcctcacaacaacaggtttatgatttgctgtgaccgctgtgaagaatggtttcatggcgattgtgtgggcatttctgaggctcgagggaggcttttggaaaggaatggggaagactatatctgcccaaactgcaccattctgcaagtgcaggatgagactcattcagaaacggcagatcagcaggaagctaaatggagacctggagatgctgatggcaccgattgtacaagtataggaacaatagagcagaagtctagcgaagaccaagggataaagggtagaattgagaaagctgcaaatccaagtggcaagaagaaactcaagatcttccagcctgtgatagaggcgcctggtgcctcaaaatgtattggccccgggtgctgtcacgtggcgcagcccgactcggtgtactgcagtaatgactgtatcctcaaacacgccgcagcgacaatgaagtttctaagctcaggtaaagaacagaagccaaagcctaaagaaaagatgaagatgaagccagagaagcccagtcttccgaaatgcggtgctcaggcaggtattaaaatctcttctgtgcacaagagaccagctccagaaaaaaaagagaccacagtgaagaaggcagtggtggtccctgcgcggagtgaagcactcgggaaggaagcagcttgtgagagcagcacgccgtcgtgggcgagcgatcacaattacaatgcagtaaagccagaaaagactgctgctccctcgccgtcactgttgtataaatccacgaaggaagacaggaggtccgaggagaaagcggcagccatggcagcctcaaagaaaacagcccctccaggctccgcggtgggcaagcagcctgcacctagaaacctcgtgccaaagaagtcttcttttgctaatgtggcagcagccacaccagccattaaaaagccaccctcaggtttcaagggcaccatccccaagaggccatggctctccgctaccccatcgagtggtgcttcagctgccaggcaggccggaccggcacctgcagcggcaacggctgcctccaagaagttccctggctccgctgctttggtgggagccgtaaggaagccagtggtaccttctgttccaatggcctcgccagccccaggacgccttggggctatgagtgctgcaccatcgcagccaaattcacaaattcggcaaaatatcagacgctccttaaaagagattttgtggaaaagagtcaatgacagcgatgacttaatcatgacagaaaacgaagtaggaaaaattgccctccatattgagaaggagatgtttaacttgtttcaagttacagataatcgctacaagagtaaatatcgcagcatcatgttcaacctgaaggaccctaaaaatcagggactcttccatcgtgttctgcgtgaggaaatctctttggcgaaacttgtgagactgaagccagaagaacttgtatctaaagagctttccacgtggaaagagaggccagcgagatctgtgatggagtccagaactaaactgcacaatgaaagcaagaagacggcccccaggcaggaggccatccccgatctggaggactctccgccagtgtcggattcagaggaacagcaagagtcagcacgtgctgtccctgagaagagcacagcgccgcttctcgacgtcttcagcagcatgttgaaagacaccaccagtcagcaccgcgcacacctcttcgatctcaactgtaaaatttgcacaggccaggttccctccgcagaagatgagccagctccgaaaaaacaaaaattgtcagcttctgttaagaaagaagacttaaaatcaaagcatgacagctctgcacctgacccagctccggattcagctgatgaggtgatgccggaggctgtgcctgaagttgcctctgagccaggcctagaaagtgcttctcatccaaatgtggacagaacgtatttccctgggcctccaggagatggccatcccgagccctccccgctggaagacctgtccccctgcccagcctcctgtgggagcggggtggtcaccaccgtcacagtgtccggccgggaccccaggaccgctccaagcagttcatgcacagccgtggcctccgcagcatcccgcccagacagcacccacatggtggaagccagacaggatgtgccgaagcctgtcttgacttctgtgatggtgcccaagtccatactagctaagccatcctcatctcctgacccaagatacctgtcagttcctccgtcaccaaatatcagcacttcagaatcacgttcccctccagagggagacacgaccctctttttgtctcgactcagcaccatttggaaaggatttattaacatgcagagtgtggcaaaatttgtcactaaggcgtatcctgtctctgggtgttttgattacctcagtgaggatttgcctgacacaattcacattggtgggaggatcgcaccgaagacagtttgggattatgttggcaaactcaagtcttctgtgtctaaggagctctgtctgatccgcttccaccccgccacagaggaagaggaggtcgcctatatctctctctactcctatttcagcagccgtggccgctttggtgttgtagctaataacaacaggcacgtcaaggacctctacctgatcccgctgagcgcccaggaccctgttccatccaaactcttgccctttgagggaccaggtcttgagtcaccacgtccgaatataattcttgggttagtaatctgccaaaaaatcaaacgtcccgcaaacagtggagagttagacaagatggacgaaaagcggacccgacttcaaccggaagaagcggacgttccggcctatccaaaagtagccacagtcccgcagtcggaaaagaagccctccaagtatccactctgctctgcagacgcggctgtcagcaccacacctcctgggtcgccgccgcctccgccccctcttccagaaccaccggtgctaaaagtgctgtcatccctcaaacctgcagcccccagcccagccacagcagccacaacagcagcggcagcctccacggcagcttcctccaccgcttcgtctgcttccaaaacagcatcaccgctggagcacatcctgcagactctctttggaaagaagaaatcattcgacccgtccgccagagagcctcccgggtccaccgcaggtctcccccaggagcccaaaaccacagcagaggacggggtgccggcacctccgttgttagatccgatcgtccagcagttcggtcagttctcaaaagataaggctctagaggaagaggaggacgacaggccatacgaccctgaggaggagtacgacccggagagggccttcgacactcagcttgtggagcgagggcggcgccacgaggtggaaagggctcctgaagcagctgcagccgagcgggaagaggtggcctatgaccccgaggatgagaccatcttagaagaagcgaaagtgactgttgatgacctgcccaacaggatgtgtgccgacgtgagaaggaactccgtggagaggcctgccgagccggtggccggggctgcgacgccctccctggtggagcaacagaagatgctagaagagctgaacaaacagatcgaggagcagaagagacagctggaggagcaagaagaagctctcaggcagcagagggccgccgtcggggtctccatggcccacttctcggtgtcggacgccttgatgtctccaccaccaaagtcgtccttgcccaaggcagagctgttccagcaagagcagcagtctgcagacaagcccgcctcactgccccccgccagccaggcgtcaaaccacagggacccccggcaggcgaggcgcctggccactgagaccggtgagggggagggggagcctctctccaggctctcggcacgtggtgcccagggtgccctgcccgagagagatgcttccaggggtggcctcgtgggccaggcgcccatgccagtcccggaggaaaaagagccagcctcttccccctgggcttcgggcgaaaagcccccagcggggtccgagcaggacggctggaaggcagagcctggggagggcacccgccccgccacggttggagacagctcggccaggcctgcccggagggtgctgctgcccacaccgccttgcggcgccctgcagcccggcttcccgctgcagcacgacggtgagagggaccctttcacctgcccggggttcgcgtcgcaggacaaggctctcggctcagcccagtatgaggacccaagaaatcttcattctgctggaaggagcagcagccctgcaggtgaaacagagggggacagagagccacaggccagacccggcgagggcaccgccccgctccccccaccaggacagaaagtggggggctctcagcccccgtttcagggtcagcgggaacctggacctcatgctttggggatgtcagggcttcacggccccaatttcccgggaccaagggggccagcccctccgtttccagaagagaatatcgcttctaacgatgggccacgagggcctccgccagccagattcggagcccagaaggggcccatcccttccttattctcggggcaacatgggccacctccttatggggacagcagaggcccctcaccctcttaccttggtggaccacgaggagtggcaccatcccaatttgaagaacgcaaggatccccatggggagaagagggagttccaggacgccccgtataacgaggtgacgggcgcccccgcccagtttgaagggacagagcaagccccatttctgggaagcagaggcggcgcgcctttccagttcggaggccagagaaggccactgctgtctcagctgaaaggcccccgaggcggcccccctccctctcagtttggaggtcagagaggaccaccccctggtcatttcgtgggcccaagagggccccatcctagtcagtttgaaactgcccggggccctcatcccaaccagtttgaaggacccagaggccaagcgcctaactttatgccaggtcccaggggcattcagcctcagcagttcgaagaccagagggtccattcaccaccaagattcacaaaccaaagggcgcctgcacccctgcagtttggtggactacgggggtccgcacccttttctgaaaaaaatgagcagaccccttcgcgatttcacttccagggccaggccccgcaggtgatgaagccgggccccaggcccctgctggagcttcccagccaccccccgcagcaccggaaggaccgctgggaggaggccgggccgccctccgcgctctcctccagtgcgcccggacagggccccgaggccgacggacagtgggcatcggccgacttccgagaggggaaaggccacgaatacagaaaccagactttcgaagggaggcagagagagcggtttgacgtggggcccaaagagaagccgctggaggagcccgacgcccagggccgggcgtccgaggacaggaggagagagcgcgagcgcggccgaaactggagccgagagcgggactgggaccggccccgggagtgggaccgacaccgggacaaggactccagccgggactgggacagaaaccgggagaggagcgccaaccgcgaccgagagcgcgaggccgaccggggcaaggagtgggaccgcagccgggagcggagcaggaaccgagagcgcgagcgagaccggaggcgcgaccgggaccggtcccggagcagagagcgggaccgagacaaggccagggacagggagcggggccgcgaccgcaaggaccggagcaagagcaaagagagcgctcgggacccgaagcccgaggcctcgagggcctccgacgctggcaccgcctcgcaggcctagacgccccggccgggcagagaccctttttaaagccacgttcgtaagatgcgttgaacaaatagcttttgaaatagccacgatcttagattcaggatagaatattctggacttaaacattactgtaattttgtgtaaatggtttcttacaagatttcacatctttacaattctgatgcttttttaaaaaaactaaactttaatatttccatttaaaattaaaagaaatgggaaattgcctacggagcatattgcttttcagatcatagttatcttttccaataactttattgtaaattttaagggagtttcgttggaccctagagccataccttcactgacatctcatccgtttgtgtttccaaaagctgcttttacaggtcttagccgccgccccggaggccggtgtgggcgtgacctgcaggcgtccaccctgcggctacgggagaagtcttagtagcttgtatctggagtcttgagaaacacaaaccttacaaatgcatctttcttttgtcataaaattggaattacaattttcaactgggaaacagaaacacatttcttagcgtgctcagattttatatatcaccttatcaattttttccaaaacatgatttaaagcaacatctgtcctagtataattgttgcattttaaataacaatttattgaaaaatgttaagttttaccagcctaaaaaaagtaacaaaccaattaagtgtactttgggggcagggaggagtccttgatttgaataatcaggagttttgttggtccagtttcgccttctgagcagttcttctgtatcccgggaaaagtacgctcggccccaaactggtatttgtcagacgatacatgtaaaagtttgtccttgaacgtggaacaagacttgtgtaaagtctgagacgggaactagtgatcactagctcaagaactgcaaatgagacaggaagctgttcactgtgaaacagtctcttgcttgtcgtgtatttttcgagtacttctgaagtgtgaagtaaaaaaatctggctaatttatttgtacaaatacactttgataattttttatattttcataaacttttacagatgtaaaattaaagaacttcacttgttctttggagtctgttattccattgtacgtcactacagatttttcactttatagcacagattttttaagttaagaaaacattgagaatgtatcagtttgagatgtttggtgttgaaagccaagtgtccataggttaaattacattaaagtaggtgtcacgttccaacatctagtacgatgagaaggttttgtttgtttaacatataaagcaaatttttctaatttaaatacacaaatgtaaaaatcaagtgtgtttctttagtttacttgatagagattcctgtacattgtattttatattgcggaggcttatatcactgtacatgagaacatggaacgacctaggttttgttactcgcagtagaataaacagctacaggaagtttc

SEQ ID NO: 467 - DNA, 1961 bp, Homo sapiens
  source 1..1961: mol_type = genomic DNA
cacgcactacgggttggcgccagagtcaaaaggcgtcggccctctggcaagatggctgctgcggaggcgttggagcgcggaaatctggaaccgggatggcgacgtctacactgagtcggaggcgaaggagcttactccacgggaacagcctctagataatctgagttgttgaaaatacgaagcctgttactcgtgaacagtggctgacaacagtgttgttgtgagcctggctgtctgcttggacccagaggtttcgtctgccagggtttttggttgtatttaggatttcagggaaaagtgtccaagctttcagtgttggagcaggtatggacgacaaaggcgacccgagcaatgaggaggcacctaaggccatcaaacccaccagcaaagagttcaggaaaacatggggttttcgaaggaccactatcgccaagcgagagggcgcaggggacgcggaggctgacccactggagccgccacccccacagcagcagctgggcctgtccctgcggcgcagtgggaggcagcccaagcgcactgagcgcgtggagcagttcctgaccattgcgcggcgccgcggcaggaggagcatgcctgtctccctggaggattctggtgagcccacgtcctgccccgccacagacgccgagacagcctccgagggcagcgtggaaagcgcttctgagaccagaagcggcccccagtctgcttccacagctgtgaaggaacgaccagcctcttctgaaaaggtgaaaggaggggatgaccacgatgacacctccgatagtgacagcgatggcctgaccttgaaagagcttcagaatcgccttcgcaggaagcgggaacaggagcccactgagaggcccctgaaagggatccagagtcgcctgcggaagaagcgccgggaggagggtcccgccgagactgtgggctccgaggccagtgacactgtggagggcgtcctgcccagtaagcaggagcccgagaacgatcagggggttgtgtcccaggctgggaaagatgacagagagagtaagttggagggaaaggcggctcaggacatcaaagatgaggagcctggagacttgggccgaccgaagcctgaatgtgagggttacgaccccaacgccctgtattgcatttgccgccagcctcacaacaacaggtttatgatttgctgtgaccgctgtgaagaatggtttcatggcgattgtgtgggcatttctgaggctcgagggaggcttttggaaaggaatggggaagactatatctgcccaaactgcaccattctgcaagtgcaggatgagactcattcagaaacggcagatcagcaggaagctaaatggagacctggagatgctgatggcaccgattgtacaagtataggaacaatagagcagaagtctagcgaagaccaagggataaagggtagaattgagaaagctgcaaatccaagtggcaagaagaaactcaagatcttccagcctgtgatagaggcgcctggtgcctcaaaatgtattggccccgggtgctgtcacgtggcgcagcccgactcggtgtactgcagtaatgactgtatcctcaaacacgccgcagcgacaatgaagtttctaagctcaggtaaagaacagaagccaaagcctaaagaaaagatgaagatgaagccagagaagcccagtcttccgaaatgcggtgctcaggcaggtattaaaatctcttctgtgcacaagagaccagctccagaaaaaaaagagaccacagtgaagaaggcagtggtggtccctgcgcggagtgaagcactcgggaaggaagcagcttgtgagagcagcacgccgtcgtgggcgagcgatcacaattacaatgcagtaaagccagaaaagactgctgctccctcgccgtcactgttgtataaatgctctggtaagtattcgtattctcttcatcccagtctgattgcatag

SEQ ID NO: 468 - DNA, 1731 bp, Homo sapiens
  source 1..1731: mol_type = genomic DNA
gtcctgagagtcagccctcgccgctgcagcctcggcgcccggccggccggccatggagcgccccccgccccgcgccgccggccgggaccccagtgcgctgcgggccgaggcgccgtggctgcgcgcggagggtccggggccgcgcgccgcgcccgtgacggtgcccacgccgccgcagggctcttccgtgggcggcggcttcgcgggcttggagttcgcgcggccgcaggagtcggagccgcgggcctcggacctgggggccccccggacgtggacgggggcggcggcggggccccggactccgtcggcgcacatccccgtcccagcgcagagagccaccccaggaaaagcccggctggacgaggtcatggctgccgctgcccttacaagcctgtccaccagccctctccttctgggggccccggttgcagccttcagcccagagcctggcctggagccctggaaggaggccctggtgcggcccccaggcagctacagcagcagcagcaacagtggagactggggatgggacctggccagtgaccagtcctctccgtccaccccgtcacccccactgccccccgaggcagcccactttctgtttggggagcccaccctgagaaaaaggaagagcccggcccaggtcatgttccagtgtctgtggaagagctgcgggaaggtgctgagcacggcgtcggcgatgcagagacacatccgcctggtgcacctggggaggcaggcagagcctgagcagagtgatggtgaggaggacttctactacacagagctggatgttggtgtggacacgctgaccgacgggctgtccagcctgactccagtgtcccccacggcctccatgccgcctgccttcccccgcctggagctgccagagctgctggagcccccagccctgcctagtcccctgcggccgcctgccccgcccctgcccccgccccctgtcctgagcaccgttgctaacccccagtcctgtcacagtgaccgtgtctaccagggctgcctgacgcccgcccgcctggagccgcagcccacggaggtcggagcctgcccacccgccttgtcctccaggatcggagtcaccctgaggaagccccgcggcgacgcgaagaagtgccggaaggtgtatggcatggagcgccgggacctctggtgcacagcctgccgctggaagaaagcctgccagcggttcctggactaagtccggctcgttcaagaacataagctaccaccttctccctccccaccccctccaggcccggggctgaaacagcccgaggacagccccaggggctggctttcaccagctgcagggtctgcttttacttggggtgggggggcggggctgaccctgaaccctcccccccgccaggtcggggaggggtcccaccactcaaagtgcctctaaagaaaccagctttttgcactaaagccaaaccacaccgctgtccccttagccccaagggccctgggggcagccaccctcccgcctgtcggcccgtagatttatcaagggtgttatgggcccagctttggggggccagtcccgatgcactttgaggggtgttggagaggggactcccccactcgcacttaactcaacggctctcgggccctggggctgtttttaccatgtttgtttttgaagctcaggtgtctcacgtctgggctgcaccaggcgaagagagaaattaaagatttgaggtttttccagaa

SEQ ID NO: 469 - DNA, 3039 bp, Homo sapiens
  source 1..3039: mol_type = genomic DNA
atgctgagattctgtgcaggcctttctgactttgcaccagtggcagttcgcagcctccaggacttggctcgcatcgccatccggggcaccattaaaaagattattcatcaggaaactgtgagcaaaaacggaaacggactaaagaacacccccaggtttaaacgaaggagagttcgccgccgtcgaatggaaacgattgtctttttggacaaagaagtctttgccagtcggatttccaacccctcagatgacaacagctgtgaagacttggaagaggaacggagggaagaagaagagaagaccccgccggaaacaaagccagaccccccagtgaacttcctacgccagaaggtcctgagcctccctctgccagatcccctgaaatactacttgctttattacagagaaaaataagtctcctgtttgaaagggggaaataggaagagcagattgctgagtgtgaagttcgtgctgcctgtgtgctgttgaagggtcacctggaggcagacgttgtggggaagggaactgctgggctcatccacaccatggttttcttctagttcctgattgacctctaaaattctattcagttgtatgatttgtttacatagttccacaagaccttcattgcatagaagattgttttcccaaagtggagagaatcttcatagagaaaaagagaaggctgtttctttttcggctctgacgaaacactgaagtctgcgtaagagagactgtttgatgaccgtccctcatgcaacatgcacggtactcactaaaaatgaaaactgaagtggaaactaacctgtgttgcttataaagtgtgaaagcacaagcttataaatgtataaaatcttttctgggtgtgacgcacctgcgtccaagtttgaatttttatgatatgtaccacttaattactggcactgagtatcactgaatttcttagttttctagtggggaaacattattgagaagccctcccttattttaagtaagttgattaaatcttatgtgagttgccagttgtaatttttcaaaggaaaaattttgatggggtggaggaatgaattgccagataatctttctggaattccgagagaattccaaagagggtttttttttttttttttaggacatcttttgatacctttaaaagaaccactgtcaagtaatccttaaaagaatatcttggaaaaggaaacagattttttcctgtgtgtaagcaataagtgaagttacatttgccctaaccctagggatgattctttacccagttttaaagcccatcatggtattctaaggtgttgacaccctccatcctcagagcaggtcgaaaatattaaatagactggggactctatgatgggcagcctgtgctttttgacttcagtttgctatttttctgtgatcacattagtactgattcatagattctatcttttataattctggagaaaaagatttgttagttttgtaatttttttgtaagaccaaatgtatgtattttagtagctccattgcatgagaagagtgtaactcacactgacttgtgatatcagccttctctgggccttgtgtgtggagagctttctatcttaccaagtggtagggctaaaagaacaacagcctttttggtagtcacatagcagaatgatcagagttacattgcttattccaaaacattggttctttttaaaacatttttttttacccaaagaaaagaataatagaaattactaacaataaatataaattcagagtgttgatataggattcagtatccagagtttatttttaatcttaatcctcagcttcttgggagttgctgggcttcagtgtctctgtggtttcaccagcttagcttgagctctggttattttggatcttttctgctttttttaagtaactgagtcatttttaccacacagtccagtttgcatgtatagctaggaaacatgtattgctctagattgggcagtttaagtcattttaaagaaagttagttcatagttgttgccttttaactcatagtcaagcttcagtctttcaaagagaaatgtgtgattttcatttacttgctgatattttgtagtttggagatccttgtgggcattattctaactgatacgtagacacttacttggaaatttttggacattatattaaatgagtgctatctgtgaaattggttatattaggtggcttgactaatgttttttctataattgtatatggactgcatttttaaaaaaaccgcatttgcctttatgctagattgtaaaaaattatattagaatgcataagacatgtttttccttcatatgctagacttttcctagcatttcgtatttctgtgttgtcagtgtgtgatttttaaaccggaatttggtttaaaaaaaatctggtggtaatatatgtgagaaatactttggtgtttaccttatgaaaataaaggattgtaagtaaagtttcctgcgcaccttataccagaattcagtataatacactactttctgttttcaaacagataaatcataatatagtctgtattatctgtaagatctgtcttgtaaaccacattcttgacaactatttgcttttgagtagtttgtattttaatatgtgacttttgtcttgaaaagtagtaaagccatagacttgtgcaaaacaagtttcaagtttatagatattaagtttgtaatgtgagcatcaaatgtgtatgtaaaaatactttttaccagtctggaacttgggaaaatccagggaatttgaaacatagattttaatgagctggtaaacacaaatcatgtcaataaaggtagtcaggatattttatccttagcattgcttctgcatcctgtgtaggattccaattcttgaatatgttcttttcaaaatcttaagaaaagaaccttttttctttattaacatcatgtgtttactttcagcaaatatttgtattactgcttgattctgtgacagtcacaatagatgtagagaaggcattatttttcattaataaatgtgaaattggaatgg

SEQ ID NO: 470 - DNA, 2505 bp, Homo sapiens
  source 1..2505: mol_type = genomic DNA
atgaggctcctggatgggaaacagacttccaggtactcagagaatgcctgcgagaagaagattttctctatctacggacactacccggtggtccgggccgctctgcgaaggaagggctgggtagagaagaagttccactttttgcccaaggtcattccggatgtcgaggatgaaggcgcccgggtcaatgatgatacatgtgccaaagtcaaagaaaatcaagaaatggctttggagaaaacagacaacatccacgacgtgatgtctaggttggtaaaaaatgagatgccgtacctcctctggaccatcaagagggacatcattgactatcacagcctgacctacgaccagatgctgaaccactacgcaaagacagcctccttcaccaccaagatcgggctgtgcgtgaacatgcggagcctgccctggtacgtcccggccaaccccgactccttcttcccacgctgctacagcctctgcaccgagagtgagcagcaggagttcctggaagacttccggcgcaccatggcatccagcatcctcaagtgggtggtcagccaccagagctgcagcaggagcagcagaagcaagcccagggaccagagggaggaggccgggagcagcgacctgagcagcaggcaagatgctgaaaatgctgaggcaaagctcaggggcctcccggggcagcttgtggacatcgcgtgcaaggtgtgccaggcctacctggggcagctggagcatgaggacatcgacacgtcagcagatgccgtggaggacctcactgaggccgagtgggaggacctgacccagcagtactactccctcgttcaggtgcctttggggagtagcattgtcttgtgcatcttcaaaatccagaaggttatgatgtcatttgagccccccacagcccgagacaggcagtgccaggctctgctgaatagaatcacgtctgtgaaccctcagacggacattgacgggctccggaacatctggattataaagcccgcggccaagtcccggggccgaggtgagtcccctgacatagtgtgcatggaccgtgtggaggagatcctggagctggcagctgcagaccaccctctttccagggacaacaagtgggtggtccagaagtacatcgagacgccgctgctcatctgtgacaccaagttcgacatcagacagtggttcctcgtcacggactggaaccccctgaccatctggttctacaaggagagttacttgcggttctcaactcagcgcttctccctggacaagctggacagcgccatccacctgtgcaacaacgccgtccagaagtacctgaagaatgatgtgggccgcagccccctgctgcccgcacacaacatgtggaccagcaccaggttccaggagtacctgcagcgccagggccgtggcgccgtgtggggcagcgtcatctacccgtccatgaagaaggccatcgcccacgccatgaaggtggcccaggaccacgtggagcctcgcaagaacagctttgagctctacggggctgacttcgtccttgggagggacttcaggccctggctgatcgagatcaattccagccccaccatgcacccgtccacgccggtcacggcccagctgtgtgcacaggtgcaggaggacaccatcaaggtggccgtggaccgcagctgtgacatcggcaacttcgagctcctgtggaggcagccggtggttgagccgcccccattcagcgggtccgacctctgcgtggcgggcgtcagtgtgaggagagccaggaggcaggtgctgcccgtctgcaacctcaaggcctcggcctcgctgttggacgcgcagccgctgaaggcacggggcccctcggccatgccagaccctgcccagggacccccatcaccagctctccagcgggacttgggactgaaggaagagaaggggctccccctggccttgctggcacccttaaggggggcagccgagagcggtggagccgcacagcccacccgcaccaaagctgctgggaaggtggagctcccggcctgcccctgtcgccacgtggacagtcaggccccaaacaccggtgtccccgtagcccagcccgccaaaagctgggatccaaaccagctaaatgcgcacccgctggagcctgtgctgcggggcctgaagacagcagagggcgcgctgcgtccgccgcccggaggaaaaggagagggcacggtctgcagccgcctgccacaccacgggcaccacgtggccgcctgccagaccacgggcaccacgtgggatggtgggcctggggtgtgcttcctccggcagctcctggcatcagaactgcccatgggccctgggctgccgagggacccccgagcgccgccctgcctcgtgtgccgcgggctgctgccacccgccgggccctgcaagcgctgccgctcgttctgcgccgcggtcctgcagggcgcgtccttcgtgcggctcggcgggcggagctgcagcccgcggaccccgtga

SEQ ID NO: 471 - DNA, 2039 bp, Homo sapiens
  source 1..2039: mol_type = genomic DNA
aatgacatgacagccattccgtggccagggacaccactgcccaagctggagaccacgaggattcagggactgaagccagcatgggaattcctggtttgagatcagagtcctgagtacctcgtgggaacttgggcactcatccgcaggaggtctagacccccagagaattccttgagtctaaggcacaggcccaacatgtgtagcaccagtgggtgtgacctggaagaaatccccctagatgatgatgacctaaacaccatagaattcaaaatcctcgcctactacaccagacatcatgtcttcaagagcacccctgctctcttctcaccaaagctgctgagaacaagaagtttgtcccagaggggcctggggaattgttcagcaaatgagtcatggacagaggtgtcatggccttgcagaaattcccaatccagtgagaaggccataaaccttggcaagaaaaagtcttcttggaaagcattctttggagtagtggagaaggaagattcgcagagcacgcctgccaaggtctctgctcagggtcaaaggacgttggaataccaagattcgcacagccagcagtggtccaggtgtctttctaacgtggagcagtgcttggagcatgaagctgtggaccccaaagtcatttccattgccaaccgagtagctgaaattgtttactcctggccaccaccacaagcgacccaggcaggaggcttcaagtccaaagagatttttgtaactgagggtctctccttccagctccaaggccacgtgcctgtagcttcaagttctaagaaagatgaagaagaacaaatactagccaaaattgttgagctgctgaaatattcaggagatcagttggaaagaaaggacactgccttcatccccattcccttggttgacaccagcatccagggttttccacaggatggtttgatggcctgcatttgagctaaagaatgaacttctgtctgcctcgtggagccaagctactgtactgagtgcttattcttttgtacacagctgaagaaagataaggctttgatgggccacttccaggatgggctgtcctactctgttttcaagaccatcacagaccaggtcctaatgggtgtggaccccaggggagaatcagaggtcaaagctcagggctttaaggctgcccttgtaatagacgtcacggccaagctcacagctattgacaaccacccgatgaacagggtcctgggctttggcaccaagtacctgaaagagaacttctcgccatggatccagcagcacggtggatgggaaaaaatacttgggatatcacatgaagaagtagactgaaatatcagatttgtcatcaggaatactctttgtctactgtggtcctgtgcacgttggcctcagatggactacaggagattacaacgtacaaggcagatggagcattgacgttttcaaaaccattattcctgtgactggagaggcatcaggagaggtctcgttcgtctccagctcataaaatgtagcagcatcatccttgacagtgatgtttttcaggccctccattgagaacctgaggaaatctgtaaagataagtggtgatgttgtttcaaacgttcagaacagataccatcatcctgcctttgttagctgctgtagggaaagtgcgttacagatgtctgctgacctcacaagagtgaaaagataaactgtgcatgtgtttccacttccgtttctagtactatttatttttaaactacacttggggtggcctaatacctaggaagatgttgctattcacgttagtaaacagcctaaagaaactcttaggtttactgctacatccatttgtttggagaggtaactgttgtctgtgcctttttgaaaaacttccatttggtacaaaatttttactccaacaccccctcaacccttttctcagggaccacacctcttcttcccaaggtccctgggacttcctcattctttgtggtagtacaatgattggtagcaggtaaaataaatacatagaaagactactgtcaaaa

SEQ ID NO: 472 - DNA, 1389 bp, Homo sapiens
  source 1..1389: mol_type = genomic DNA
ggtgggaggtgaaaggtcatagtcctgtttggcggccatttctcttgaaactgcggctcgggacctgcggtacctgctgtagtcacgagggacgggcggcggcctggtcggcagagagtagcctgcaacattcggccgtggttacgatgagtttacccctcaatcccaaacctttcctcaatggactaacaggaaagccagtgatggtgaaacttaagtggggaatggagtacaagggctatctggtatctgtagatggctacatgaacatgcagcttgcaaatacagaagaatacatagatggagctttgtctggacatctgggtgaagttttaataaggtgtaataatgtcctttatatcagaggtgtggaagaagaggaagaagatggggaaatgagagaatagcatcttttgtgggggattttttttatatatatttctagacaataaagatttgtttgtttttcaacttgacttgtgaactatttgtattcagatatttacaagcaaagctgaaatgatgaaccaattgggaaagattactcactgaactaatgctttaaaagccactgaatttcatttaagttgcttttcttttgtaagcccaatattcttttttttcccataaaggataattatttatatgctttagatatttttatgaaggtgaatttcagaccttttcttgtaaaattatctattagctgagaccttttaaatgcaactttttcttttaaagttatttttgagctacttttaacgtataaaattaaacattttcttggtattaataatatactgtcttattttacttagtagtcaataaattacatgttaattctgtgtcaatataagctaaatgcacatattgcagctaaaattgaagcatcttctaaaaattaaaatgattgtacagacagggcacaacagaaattgggaactgacattcaggctgaaggcatacggtttgttcactgaagagaaaaaagttctctgaacaaaatgtaatgtcaaataaaaaccagtctccccattatgttctgagacataacctcgaggttgagttttaagcccctcaaaacccttcaggtattttagggttgtacattgttaaaatgtatagtccatagtaataacagtatgctatgaacttccctacagatgggttgagaaaatacatcatttacattctcatgttgtaagagaatggccattattacacttcagtgttcatttaccatagttttatcagtaaactatctttgtgtatccccaagtgggacaactcaaagtatagaagaaagtgtttagctatatggaataatacttatgatatgaatacttaaagacttaaaatttacaaaatacacctaagacattctggtaa

SEQ ID NO: 473 - DNA, 2136 bp, Homo sapiens
  source 1..2136: mol_type = genomic DNA
accctcccagccccggacagcgcaggctgcggcttttcgtcctccactgagtcctgccggtggcccgagcccggtggcctcccggcgaccctcggcgcgaggcgacatggcaagcggccacagcctcctgctggagaacgcgcagcaagtggtgctggtgtgcgcccgcggcgagcgcttcctggcgcgggatgcgctgcgcagcctggcggtgctggaaggcgccagcctggtggtgggcaaagatggatttataaaagctattggtcctgctgatgttattcaaagacagttttctggagaaacttttgaagaaataattgactgctctgggaaatgtattctaccaggtttggtggatgcacacacacatccagtatgggctggtgaaagagttcacgaatttgcaatgaagttggcaggagccacctacatggaaattcaccaggccggaggagggatccactttaccgtggagcgcacgcgccaagccacagaggaggagctgttccgctccttgcagcaacggctccagtgcatgatgagggctggcaccacgctggtggagtgcaagagtggatatggcctcgacctggagaccgagctcaagatgctgcgcgtgattgagcgcgcccggcgggagctggacatcggcatctcggctacctactgcggggctcattcagtgcctaaaggaaaaactgctactgaagctgctgatgacatcatcaataaccacctcccaaagctgaaggaacttggcagaaatggggaaatacacgtggacaatatagacgtattttgtgagaaaggtgtctttgatctcgattccaccagaaggattcttcaacgtggaaaagatatagggttacagattaacttccatggggatgaactccacccgatgaaggctgctgagcttggggctgaactgggagcgcaggcaatcagccacctggaagaagtgagtgatgaaggcatcgttgccatggcaacggccaggtgctctgccatccttctgcccaccacagcctacatgctgagactgaaacaacctcgagccaggaagatgttagatgaaggagtaatagttgctctgggaagtgatttcaaccccaatgcatattgcttttcaatgccaatggtcatgcatctggcctgtgtaaacatgagaatgtccatgcctgaggccttggccgctgccaccatcaatgcagcttatgcactgggaaagtctcacacacacggatcgttggaagttggcaaacagggagatctcattatcatcaattcatcccgatgggagcatttgatttaccagttcggaggccatcatgaattaattgaatatgttatagctaaaggaaaactcatctataaaacatgatagatttgaaaagagaagactttttgactatatgaaataagtcaatatagttatattaaaagttaaaacaccttaatatttacaagaattatatcacttaaacctaaatgtacttcaatgtctttttaagtcactcaaaaaacccaagggatagatttattttcatttaacacatgcatttgacatataaacaggtaaacctattgtgattaaaatcacaaaacatccaattagttcacaaatattggttacaaatattctgtagattaatatggtggggtatcacaaaaatgcctttgtggggaaaagtaggcttggcttaaaatttccattttgtgtctgtatttcacatctcagtttttaaactatatttagtgaacattgagggatcgaaagaaatctaagtgatacgccccaatgaagctaaaatatagccttctgttaagcaaatagtatttcctttccccaagtagttcattttctagatgcttgtcaaatgaattaatgtcctctgatgaagagtgtccttccgtttctaaggtcttctcaatctcagcaatagagcttcccagcagcgttcaagacacatcatttatacacaggcacaggggccttcctgaaatgggtgcatttttaccaactacaatcatgtaatttttttggaaattttttaaaattttcgattctttacattacaattgggtgaaacacattttacagctctcaataaatgtttgctgtcgctctta

SEQ ID NO: 474 - DNA, 5909 bp, Homo sapiens
  source 1..5909: mol_type = genomic DNA
ggcgctcagcgcaggcaggtccccctgctgccgggtcccatttgttgccggctctgactcggggcggccgcggcgcgcggagctccggggagtcaggcggagcagccgcgcagccacgacggagcagcagcgggactggccgccccgcgcccccttcgccgccgtgcccttccccggcgcgctcaccccgttctcgggatgggattgtagcggcggcgcggactcggcggggatcgcggcggaggcggcggcgtcggcggcggcgtcggcggccgagcggggctccatgttttcccctggccaggaggaacactgcgcccccaataaggagccagtgaaatacggggagctggtggtgctcgggtacaatggtgctttacccaatggagatagaggacggaggaaaagtagatttgccctctacaagcggcccaaggcaaatggtgtcaaacccagcaccgtccatgtgatatccacgccccaggcatccaaggctatcagctgcaaaggtcaacacagtatatcctacactttgtcaaggaatcagactgtggtggtggagtacacacatgataaggatacggatatgtttcaggtgggcagatcaacagaaagccctatcgacttcgttgtcacagacacgatttctggcagccagaacacggacgaagcccagatcacacagagcaccatatccaggttcgcctgcaggatcgtgtgcgacaggaatgaaccttacacagcacggatattcgccgccggatttgactcttccaaaaacatatttcttggagaaaaggcagcaaagtggaaaaaccccgacggccacatggatgggctcactactaatggcgtcctggtgatgcatccacgagggggcttcaccgaggagtcccagcccggggtctggcgcgagatctctgtctgtggagatgtgtacaccttgcgagaaaccaggtcggcccagcaacgaggaaagctggtggaaagtgagaccaacgtcctgcaggacggctccctcattgacctgtgtggggccactctcctctggagaacagcagatgggctttttcatactccaactcagaagcacatagaagccctccggcaggagattaacgccgcccggcctcagtgtcctgtggggctcaacaccctggccttccccagcatcaacaggaaagaggtggtggaggagaagcagccctgggcatatctcagttgtggccacgtgcacgggtaccacaactggggccatcggagtgacacggaggccaacgagagggagtgtcccatgtgcaggactgtgggcccctatgtgcctctctggcttggctgtgaggcaggattttatgtagacgcaggaccgccaactcatgctttcactccctgtggacacgtgtgctcggagaagtctgcaaaatactggtctcagatcccgttgcctcatggaactcatgcatttcacgctgcttgccctttctgtgctacacagctggttggggagcaaaactgcatcaaattaattttccaaggtccaattgactgacgcccttgacagccatctacgactttattaacaggttactgtgaagattttgccactaactctagattttacctttttgtaatgctgtttatcagaggagggtgacaggggctggaaataaagagaggggacatggtgatgaaacatggcaggagtgtaacagataccagtggtgtgttgcatgctcaaaacagcagcgtcgtcattgaagtctgcttgattaaaccataatatctttgtaataattggatttaaaatgctatgcttctatttttaaccttgggtttttaaccaagtttttttttttttgtaatcttggacaagactttaaatcatattttacagatgtagaagaaatttattcaaaagtgtgggctcatgaagttcacttcagtgcagtgtggtgtaggtgttacgcgaagggcgcacagtgtctagaaatacttgatcgtggctcaaacctgaccagacagcagaggggcggctctgtacagtgtgactggtggacagatggccttaggcacaggtggttttgaaatctggggctttttctgatttatttttctgacttgttgggggagagaatattcataacttgtgggctttttttttttttaacttcagtggaatttactttagatattcattcatcaaatacatgggacttcacaaacaattttccataactttttagcctgtcttttgttatttctgcctaatatgatttgccccgatactcatcttgcacggccagaactgtttggttgattaaaatacatcagctcttaaaaactcattaactgagggtaattacagtagtagacatggtctgggtactatactaccatgtttatttgctgactgaattaagatttaagaatgattaaaaataagcttttactttttaaaaccacttgaggtttcataaagcttggggtttttttttttcctttgttaagaaagccaaccaatcacaatgatatagtcattgttgtgcactcccttttcaccatctgtcaccttcccttgcagcttaaggagcccagtaagttttgaaaatgtttgcgaatcaaactaaatttaagtgggatgattagatatacacaacaccaagtggtacatctgcagagataattcaaaattcctgcttttgagagagcaaatgagtgttgctgaggaataattaaatgagaatttcataggagctccaccattcctgttactttcatttcattttgattaataattcttggatgcttggcatcgatcgtatcactgctcctagaaggtaaagatcctttaggacatgagactggtagaagctggctgagataaaataagtatttatttaaactaatgttctcttaatttgaccattgcagatttgggtgacttttttttaacctttgtacatatacgtaatttatatgattctaatgtactatatccatacttgaattggttttttcgtattttgcctactggcaaatattttgcctattttcagtcgttctaacctatttgaatacgcttttccttaaagtgatacgataatattactcttgattgctgctgcttaatttgatgtaatatgtttaaagttcagcctctcagttttaatatagctttatttttcagtggagatcattgtttaggatgagacatttttggttttggttttgtttgggtaaattttaaatggtgtgaaaatcgatgacaacagtcctcttacagatagcttgctgtattctgtatagcttactctacctgcagacagaaaatgaaagaaaaaaatggacttgcctagaataatatattgaatgccttttgatttagccagagtctctgatgattagctttcactgatagagtatgtcttttcagcctgtaattctttgggccccaaagaatgacaaaggaggcactcgttctcttttcttgctgtatgcctagaaagtggttgaaggattcttgatgccctaaaaccatcttgtaagctaaatggtcttgcatccagaaaggccagattttacctaccaagaaaaaaagatatttttccagagagttaggtatatcataattttccatttcaagtcctgtttataagtctagtcattctgcaacgtgacatatcccccaaaatgaagttaccttccaagttggacacgtcccgtagttgggcatatgtctaactaaaagtttctgacttttagtaaattcagcttaaatataagttgaaatttgggaaataatttccaagctcttggaaggggtaacagtgaaccgccctccatgggctccacatcttttcctttggcttccaaagtcaggtcccgcccaccctgcctaaggaactgcagagaggtggcaaatcagcaaaaaggacaccaggctcttcttggccacttgtaggaagatccctttacaattttgactaaggagattttttttttcacagttgagttagtttgtgaaaataaagaactctgtagctcaccaaggtggagaaacgcaattcagaaaagtaatttctccaaggtcacttctttttttatgtcttgccatcactttaaaggactagccccactcccccatgtgtatacacaaggaaattgcagaccaattagttgtcttggcctgactctaatgccttttgcaagtagctttccagaagtaaaagtcccagtgatgtattcccatagaaatatttttcagttgtttatgtcgtttactacaaaaaaaaagattcagagtggatggagtacaactctgagtatttttctagtccggaattttttattaataatcggtgctgccgggtcatgcatgctgcaactctcaacatttcccttatttggttcagcttttagcaaaaagggctacagttcaccctgcagagtattaaggtttctggatttttttctcccaactgtggcccaaaagaattaaaatctgttaatataaatagagaacatatttatcattcctcgatagttaattatagactttggtacctttgtgcctcagggaagccacgtgatataactggttatagaatttcagggttagggtttaaagaaaggagaaagccattggaaaaatgatgggctccattaaggagactaatgaatctggatgcagaaatatgtcagaaactggcataaacatgattgtagtagaatttattttccagtaccaatagggaaattattttaagttattacatttactgtattgggaaacttgaggagaactctttagttcataaagcttcaatgtcttttttttttttttcatggaaaaactcaaacctctgttatttgggagctcagtattgtgtggacacttacgagagttttctgcttaattgaagtgtaatataggttgtagaattgttacctgcagttctatggttttgtttcacttcttttcttttttaaagccattctgttctttggatgtgcttgaaagggtgtgtgattacaccattgttaatgctgggtaaaaactatcttcttgcagccttgcctcataacagtggaatttctgatagacaaaccacaggactttgattttaagccaaatccatctccatccctttactgtcaatcttctgtcccagtagtttagcctttgtggcttaggttatgatgcgcctccttctgtgcgaccaatgagacgacttcagcatctttttaaaataatctaagcatcattgaagcagtaacacaaaaaaaaggttcagtattttctttttagtataacttacatcctttcaaataagtctttgccctcatgaagaatccctagaggaagataaggaaaataagtattttccagttttgcttgacagtttctaaacaaacaaaaataaactcaatgaaaggaaagatgtttctttttagctgagatgacagattgcttctctgtattaaatagtctagaagttaaggggatggtcacatttaccatgtattgtgttattagcagttaaattttatgaatatgtttgtaaaattgttgttttatatttcatgtcaaattgaaaagtttatttcttcactattgtacctgtggaaatacaagccattttacaggaaaaaatcttcaaaaactattaaatggatatcagcctgtttgtgagccattgtcttcagattctgtggttgtcactgagttcattaggacatttagtaggttgatacgagtagaactgatttttttcacttctctaacttccaagttaatctccagctgttgagtttattaattgttttatattctgcacaatacatatttaaaccttgattctgaaaatcccctacattttttaattaaagaaatttccttggtgcctata

SEQ ID NO: 475 - DNA, 2559 bp, Homo sapiens
  source 1..2559: mol_type = genomic DNA
agtgacgcgcgagcggctcccgcgactgtggctcccgaagctgcttcgggccccagcggtgaggaagaagactctcaaccagggtgacttctaggcgtcctcccggagctaccggggacactggcgttattgcccgcaacactgagatagggaatgctcgagaaacagaagcaggagtattttatacagaaatcttgtgaaaccactgcccaaccagagcaatgattgttcaaagagtggtattgaattctcgacctggaaaaaatggtaatccagtggcagagaatttccgaatggaagaagtctatttaccagataatattaatgaaggacaagtacaagttagaactctttatctttctgtggatccttacatgcgttgtagaatgaatgaagacactggcactgattatataacaccttggcagctatctcaagtcgttgatggaggaggtattggaattatagaagaaagcaaacacacaaatttgactaaaggcgattttgtgacttctttctattggccctggcaaaccaaggttattctggatggaaatagccttgaaaaggtagacccacaacttgtggatggacacctttcatattttcttggagctataggtatgcctggtttgacttccttgattgggatacaggaaaaaggtcatataactgctggatctaataagacaatggttgtcagtggggccgcaggtgcctgtggatctgtggctgggcagattggccatttcttaggttgttccagagtggtgggaatttgtggaacacatgagaaatgcatcctcttgacctcagaactgggctttgatgctgcaattaattataaaaaagacaatgtggcagaacagctccgtgaatcatgcccagctggagtggatgtttattttgacaatgttggtggtaacatcagtgatacagtgataagtcagatgaatgagaacagccacatcatcctgtgtggtcaaatttctcagtacaacaaagatgtgccttatcctcccccgctatcccctgctatagaggcaatccagaaagaaagaaacatcacaagggaaagatttctggtattaaattataaagacaaatttgagcctggcattctacagctgagtcagtggtttaaagaaggaaagctaaagattaaagagacggtaataaatgggttggaaaacatgggagctgcattccagtccatgatgacaggaggtaacattggaaagcagatagtttgcatttcagaagaaatctctttgtaattgctgtaaatgtcatcaaggcaatcatagatttcttttccattttgcatattttcaaagatatgttaaaaaatccttagactatacatagctcttgatttaaatgtgatcataggtgttatttttagttgcatagggtatttgatacaatcattaatggatcatacacaataggtttttaaaaattaataacttttagtaattacttttattaatttaaaatagaacgcttgagaggcactttgtaaagatttgttaaactggaaacgttttacatgatctgatacaaccattaatgaatcatacacaataggttttttaaaattaatattaataacttttattaatttaaaatagaatgcttaaaataaaatagaatgcttgagaggcactgagtaaagatttgttgaactggaaatgttttacatgattcttaaactgaaacttggtgtaaaaatagaattgagatggcctttttttcacattgtagactgaaaagagacttaatggtatgatgtgtacatagggactgggggcaggattgggggtttcggagcttgtgtaacagtttttgggataggagaccagcggttttgggttgggattagtatgggaagataaataacttaggttggttaagttgacaagatttactccagaggatcatctctttgtatttgccaaataatttactgtatagcctaaaaactccatatatattgagaaaagcatatgtttattttaggttagcaggcacatactgtcaagttgtaaagattgagagggcaaacagatgtaaacatcacttgtaggtgattaaaaagattgacagccgggcctgatgtctcaagcctgtaatcctagcactttgggaggcagaggcgggcagatcacttgaggtcaggagttcaagaccagcctggccaacacggtgaaaccccatctctctaaaaatacaaaaattagctgggcgtggtggcacacgcctgtaatcccagctactcaggaggctgaggctggagaatcatttgaacctgggagggggaggttgccgtgagctgagcttgcaccattgcactccagcctgggcgacaagagtgaaattccatctcaaaaaacaaaaacagattgacaacaaagacagtttcagaaaatgacaggactgggcaaattaacaaatgtttgtaaacatgaatgttcaggaactactgatgtacctcaaaagtttgttttattaattgtactcaaccctcgcagaacagtaaaactgaagattattgtt

SEQ ID NO: 476 - DNA, 3300 bp, Homo sapiens
  source 1..3300: mol_type = genomic DNA
aagcgagtggcgctttcaccttagcaaccagcgcggctcccaccatggctgaagaagaggaaactgctgctctcacggagaaggttatccggacccagagggtgtttataaacctgttggattcctacagcagcggaaacatcgggaagtttctatctaactgtgtagttggggcttcgcttgaagaaattacagaggaagaggaagaggaagatgaaaataagtcagctatgctggaagcttcctcaaccaaagtgaaggaaggcacattccagattgtgggcacgctgtccaagcctgacagcccgcggcctgactttgcggtggagacgtactctgccatctctcgagaagaccttctcatgcgcctgctggagtgtgatgttattatttataacatcactgagagctcacagcaaatggaggaagccatctgggcagtctctgcactcagtgaagaagtcagccactttgaaaagcgaaagctatttattttactgtcgacggtgatgacttgggcgcgctccaaagccctggaccccgaggattctgaggttccattcactgaagaagattatcgaagaagaaagtctcatcctaattttctggaccacataaatgctgaaaaaatggttctcaaatttggaaaaaaggccagaaaatttgcagcatacgtagttgctgctggactccagtatggagcggaaggaggcatgttacacacattttttaagatggcttggttgggcgagattcctgcattaccagtttttggcgatggaacaaatgtaattccaacaatccatgttcttgatctagcaggagtgatacaaaacgtcatagatcacgtgccaaagcctcactacctggttgctgtggatgagtctgttcataccctggaagacatagtcaagtgtatcagtaaaaatactggccctgggaaaatccagaaaatacccagagaaaatgcatacctaaccaaggacttaacgcaagattgtcttgaccatttactggtcaacttaagaatggaagcgctctttgtgaaggagaattttaatattcgatgggctgcccaaacaggatttgtggaaaatatcaacactatcctcaaggagtacaagcaaagcagaggattgatgccaatcaagatctgcattcttggtccccctgctgtgggaaaatccagtattgctaaagaattggccaactactacaaactgcatcacatccaactgaaggatgtcatttctgaagccatagcaaaactggaggcgattgttgcccctaacgatgtaggggaaggagaagaagaagtcgaagaggaagaggaggaggagaatgtggaagatgcacaggagctcctagatggcatcaaggagagcatggagcagaatgcaggtcaactagacgatcaatatataattagatttatgaaagaaaagctaaaatcaatgccttgcaggaatcaaggttatattttggatggattcccaaagacctatgatcaagcaaaagacctgttcaatcaggaagatgaggaggaggaagatgatgtcagaggcagaatgtttccctttgataaattaattatacctgaattcgtttgtgcactggatgcttcggatgagtttctgaaggagcgtgtgataaaccttcctgagagcatcgtggcggggacccactacagccaagaccgattcctccgggctctgagcaactaccgggacatcaatatcgacgatgagactgtcttcaactattttgatgaacttgaaattcacccgatacatattgatgtaggaaaacttgaagatgctcagaatagacttgctatcaaacagctcatcaaagagattggggagcctcgaaattatggtttaacagacgaagaaaaggcagaagaggagcggaaggctgcggaggagcggctggccagggaggctgctgaggaagcagaacgcgagcaccaggaggccgtggagatggcagagaagatagctcgctgggaggagtggaataaacgactggaggaagtgaaaagagaagaaagagaattactggaggctcagtcaattcccctgagaaactatttaatgacctatgtgatgccaactcttattcagggcctgaatgaatgttgcaacgtccgacccgaagaccctgttgattttctggcagaatatctcttcaagaacaatcctgaagcacagtgaaacttgaaagatctggtattatctacctttacagaaccacagatcacttattatactttgaaaaattgctttgaaaaatgcttttccagttcttagaaaattctttttttgtagacaaatattctataaactagaatctctattaaaagctatatgacatgactatgtcattaaaactatatttgaaatgtaaattgataaagacatttgtgcatagctcatgagacaaatactgatttaatattttattctttagtcagatctaaatataccgcttctgtacactaatgtttataggtatttatagcatgaagaaaatcagactatatattgtagactatgtattattctaacatgtaggctaatttacatgacttgttatcgccccaataacaatgttattagaaatggaaataaattgaagtgatttatgcctgttgactcacagtaaatcagacaagattggtgcctgtaaggtggctttttttttttttttttttaaatgaagcaatggttagggaaaggttgctttgagttcagggtcaggatcccagacaatgaatcggagagaactgtaaacctttaggcggagaaatctgcataacaggataattccaatctttgtgataagtgagaagttgctaaatattttcaacacactttataacataggcataagttatcaatcctatagtcttttccagttctaaaaatcccataagattcctagaattaccctaaatgagaaattagtttaggtttaatggcatatgtattttatctctttaaataatgtaacctaatataactgcccgactttttatttgtgctaaaatacatgtaacataaaattgaccactgtaaccattttaaagtgtataattcagtggcactaagttcattcacaatgatctgcagccaccactatctagtccagaactttctcatcaccccaaatggaaacccagcacctattaggcagtcacgctccattattccctccccccagttccaggcaaccacgaatctgctttctgtctctatggatttacctattataaataaaaccatataatgggtggtc

SEQ ID NO: 477 - DNA, 3118 bp, Homo sapiens
  source 1..3118: mol_type = genomic DNA
ggccgaggaggaagtggcggcggcggcggcgggactgcgcgccccagctccgatccccgttccgcgtccccgccgccgggaggaggtgcccactcgctcgcggcgcgcgccggccgccagactcggcctgtgggcgatttcctccggacccaggctccccgcccgaggaggaagatgcagacctttctgaaagggaagagagttggctactggctgagcgagaagaaaatcaagaagctgaatttccaggccttcgccgagctgtgcaggaagcgagggatggaggttgtgcagctgaaccttagccggccgatcgaggagcagggccccctggacgtcatcatccacaagctgactgacgtcatccttgaagccgaccagaatgatagccagtccctggagctggtgcacaggttccaggagtacatcgatgcccaccctgagaccatcgtcctggacccgctccctgccatcagaaccctgcttgaccgctccaagtcctatgagctcatccggaagattgaggcctacatggaagacgacaggatctgctcgccacccttcatggagctcacgagcctgtgcggggatgacaccatgcggctgctggagaagaacggcttgactttcccattcatttgcaaaaccagagtggctcatggcaccaactctcacgagatggctatcgtgttcaaccaggagggcctgaacgccatccagccaccctgcgtggtccagaatttcatcaaccacaacgccgtcctgtacaaggtgttcgtggttggcgagtcctacaccgtggtccagaggccctcactcaagaacttctccgcaggcacatcagaccgtgagtccatcttcttcaacagccacaacgtgtcaaagccggagtcgtcatcggtcctgacggagctggacaagatcgagggcgtgttcgagcggccgagcgacgaggtcatccgggagctctcccgggccctgcggcaggcactgggcgtgtcactcttcggcatcgacatcatcatcaacaaccagacagggcagcacgccgtcattgacatcaatgccttcccaggctacgagggcgtgagcgagttcttcacagacctcctgaaccacatcgccactgtcctgcagggccagagcacagccatggcagccacaggggacgtggccctgctgaggcacagcaagcttctggccgagccggcgggcggcctggtgggcgagcggacatgcagcgccagccccggctgctgcggcagcatgatgggccaggacgcgccctggaaggctgaggccgacgcgggcggcaccgccaagctgccgcaccagagactcggctgcaacgccggcgtgtcgcccagcttccagcagcattgtgtggcctccctggccaccaaggcctcctcccagtagccacggagccgggacccagaggggcagcgcagggcgcagagcacacccgctgggccagcagctcccaacggcgatgctactactaagaatccccagtgatctgattcttctgttttttaatttttaacctgattctctgatgtcatgatctaaatgaggggtagtgggggatggaagagagtaccaggtggtccaccgttggggagtggggccgtccgcctgctctctactgtgcagacctcctaactgagtttacacacgcttgtgtttgcaacactaggtctggatgggaggtgaggggtgtgcgtatggctgccatgccagtgtctgtgcacatccctgtctgttggtctccatggccactgtggaccgggacccttgggggaagcctgcccatgtcgggctgtgggaggctgatcggtgcatgtgagagtggcttcccttctgcctgactccccactccctgacctgccccttccttgtttttcctcctactggtctccaccaaggctttgttagcccccaccctgcctggtgtgcagctaacccctccctccccacagccagaggaggccacagacccctcaggggagttccgcgctggggtctgggctgtgctccctcactaaagggaaggaaaggaagctgggcgtcctctgggccccccaacacacgtcccatttagccctgcacagcggtctccttcccctaagccagcactgctgctccctggagcccgggaaggaggctgcctggctggaggcccgagccgatggcgcctgtgctgaggatttgtgctgtgatttgggcaaatcattccaggtctttgggcctccacccccttgtctctagtggacatttgagatcagagagcaccacagggctggctttgtgccctaacccctgggatgcagcctgcctttccataaagtcacctaggtgaggataggcgcgggagcctcggcatgacaccatggagatcggggccctcttcccagtgggttcactccttttcacacctgctgggtccctcctcacccagcaggcctggtccacctctcattgcaagccccaagcactgagccagcaggtgccagggagccacccgccccccatcgcttctgcacacctcagactcaccccatcaccttggcagcaaagcactggctctgccgtctgacccctgatccaggcagccccctctgcagagaaaagggttggggagaagcctctgcagtcctggaagatgtggggtgctgggtgagaggcatcagcccccacaagtatgtttttgtgtcttaagatagcagtttactttgaaaaagtgaaaaaggcttccgggctgtcctctgcccagtgagatggaggacgctagagaaagtgctgagtgtcccgagagaggcccccgagccagtgcatggaggtccttcggcctggctcagctgggctgcaggatgcccactttgaggagggaggcacagggcttgggcgaggggcagaggccatcagaactgcccggcttttttggaaactgaggacccaacaactaaccacgtttacacgacttgagttttgaaccccgattaatgtctgtacgtcacctttcctagttctgaccctgagccctggggaacaggaaagcgtggctggcctcttgcactgctttgtctccaaaataaactactgaaatcaaaccgca

SEQ ID NO: 478 - DNA, 1067 bp, Homo sapiens
  source 1..1067: mol_type = genomic DNA
agggaaggattctgggagacggaggaggagacgccagcatttcgccccctgcacctccagcgggctgcggtccgctcccggcctcactcgagcaggccccgccctcccagaggcagttagtccaagtcacgtgatcgtcgactcagctgaccctgcgggaccggaaaaagaaattcccgggccctggcttcttggcgcgatgaggttccggttctgtggtgatctggactgtcccgactgggtcctggcagaaatcagcacgctggccaagatgtcctctgtgaagttgcggctgctctgcagccaggtactaaaggagctgctgggacaggggattgattatgagaagatcctgaagctcacggctgacgccaagtttgagtcaggcgatgtgaaggccacagtggcagtgctgagtttcatcctctccagtgcggccaagcacagtgtcgatggcgaatccttgtccagtgaactgcagcagctggggctgcccaaagagcacgcggccagcctgtgccgctgttatgaggagaagcaaagccccttgcagaagcacttgcgggtctgcagcctacgcatgaataggttggcaggtgtgggctggcgggtggactacaccctgagctccagcctgctgcaatccgtggaagagcccatggtgcacctgcggctggaggtggcagctgccccagggaccccagcccagcctgttgccatgtccctctcagcagacaagttccaggtcctcctggcagaactgaagcaggcccagaccctgatgagctccctgggctgaggagaagggtgttccaggcctgtgtggagccgccctgcccgtatggagtcacgccctctgaactgctcttcgggaggcagccctggttctaggatgctgaggccctggcccggactctggcctcccagatccccagctgcctcacttctctcttgagaacttggctcagggctcctgaggacctttcccagcattaccttcccttcccttgaaaggcaattgttggctgttttcataagcaggaaaaataaacagaagtataaaggaa

SEQ ID NO: 479 - DNA, 2134 bp, Homo sapiens
  source 1..2134: mol_type = genomic DNA
ggcggctagcggcgaggccccttcctgaccttcagggatcggccaccatgtcccaccggaagttttccgcccctcggcacggacacctgggcttcctgccccataagaggagccaccggcaccggggcaaggtgaagacgtggccgcgggatgaccccagccagcccgtgcacctcacggccttcctgggctacaaggcgggcatgacccacaccctgcgggaggtgcaccggccggggctcaaaatttccaaacgggaggaggtggaggcggtgacaattgtagaaacgccgcccctagtggtggtgggcgtggtgggctacgtggccacccctcgaggtctccggagcttcaagaccatctttgcagaacacctcagtgatgagtgccggcgccgattctacaaggactggcacaagagcaagaagaaagccttcaccaaggcctgcaagaggtggcgggacacagacgggaaaaagcagctacagaaggacttcgccgccatgaagaagtactgcaaggtcattcgggtcattgtccacactcagatgaaactgctgcccttccggcagaagaaggcccacatcatggagatccagctgaacggtggcacggtggccgagaaggtggcctgggcccaggcccggctggagaagcaggtgcccgtgcacagcgtgttcagccagagtgaggtcattgatgtcattgctgtcaccaagggtcgaggcgtcaaaggggtcacaagccgctggcataccaagaagctgccgcggaagacccataagggcctgcgcaaggtggcctgcattggcgcctggcaccccgcccgcgtgggctgctccattgctcgggccgggcagaagggctatcaccaccgcacggagctcaacaagaagatcttccgcatcggcaggggcccgcacatggaggacgggaagctggtgaagaacaatgcatccaccagctacgacgtgactgccaagtccatcacaccgctgggtggcttcccccactacggggaagtgaacaacgacttcgtcatgctgaagggttgtattgctggtaccaagaagcgggtcattacgctgagaaagtccctcctggtgcatcacagtcgccaagccgtggagaatattgagctcaagttcattgacaccacctccaagttcggccatggccgcttccagacagcccaagagaagagggccttcatgggcccccaaaagaagcatctggagaaggaaacgccggagacctcgggagacttgtaggctgtgtggggtggatgaaccctgaagcgcaccgcactgtctgccccaatgtctaacaaaggccggaggcgactcttcctgcgaggtctcagagcgctgtgtaaccgcccaaggggttcaccttgcctgctgcctagacaaagccgattcattaagacaggggaattgcaatagagaaagagtaattcacacagagctggctgtgcgggagaccggagttttatgttttattattactcaaatcgatctctttgagcatttgcggagcagaggttttttttttttttttttttgagagagtcttgatcttgtcgcccaggctgctggagtgccggggagcagagtttttaaggataacttggcgggtggggagagccagtgagccaggagagccgattggtcagggaggaaatcacagggagtcagctgtcttcttgcgctgagtcagctcctgggtggtggccacaagatcagatgagccagtttatcaatctggttggtgccagcagatccatcaagttgcagggtcggcaaaatatctcaagcactgatcttaggggcagcttagggagggtcagaatcttgtagcctccagatgcacgactcctaaaccataattcccaatattgtggctaatgttagtcctaaaaatgcaatctagtccccaggcaaggaggtggtctgctttgggaaagggctgttactgtctttgttttaaactataaactggctgggcgcggtggctcacgcctgtaatcccagcactttgggaggccaagatgggcggatcacctgaggtcgggagttcaagaccagcctggccaacatcgagaaacctcgtctctattaaaaatacaaaatta

SEQ ID NO: 480 - DNA, 8473 bp, Homo sapiens
  source 1..8473: mol_type = genomic DNA
ggagggagaggggttgagtcaagatggcggccaaggtggcgaagcagcagccgcggcggcggcggcggctggagtgagcgtccgactcgccgcgccgaacgaggtcccggtgtagggccgcgcgccgtggccgcgtcccactcctcaggccggggcgcacgtcggctcccacgcttagccagctcccggtggtttcctagaaacatgattgtttattggcattgatctcacagtctggtgaggacttctttactgataatgtcaagttcaggttatcctcccaaccaaggagcattcagcacagaacaaagtcgttatcctcctcactctgtccagtatacatttcccaacacccgccaccagcaggagttcgcagtccctgattatcgttcctctcatcttgaagtgagtcaggcatcacagcttttgcagcaacagcagcagcaacagcttcgaaggcgaccttccttgctttcagaatttcacccaggttctgacaggcctcaagaaaggagaactagttatgaaccgtttcatccaggcccatccccagtggatcatgattcactggaatcgaagcgaccacgtctggaacaggtttctgattctcattttcagcgtgtcagtgctgcggttttgcctttagtgcacccgctgccagaagggctgagggcttctgcagatgctaagaaggatccagcattcggaggcaaacatgaagctccatcctctccaatttcggggcaaccatgtggagatgatcaaaatgcttcaccttcaaaactctcaaaggaagagttaatacagagtatggatcgtgtagatcgagaaattgcaaaagtagaacagcagatccttaaactgaaaaagaaacaacaacagcttgaagaagaggcagctaaacctcctgagcctgagaagcccgtgtcccctcctcctgtggagcagaaacaccgcagtattgtccaaattatttatgatgagaatcggaaaaaagcagaagaagctcataaaatttttgaaggtcttggcccaaaagttgaactgccactgtataaccagccatcagataccaaggtgtaccatgagaacatcaagacaaaccaggtgatgaggaaaaaactcattttattttttaaaagaagaaatcatgcaagaaaacaaagggaacaaaaaatctgccagcgttatgatcagctcatggaggcatgggagaaaaaagtggacagaatagaaaataatcctcggaggaaagctaaagaaagcaaaacaagggaatactatgaaaagcagtttccagaaattcgaaaacaaagagaacagcaagaaagatttcagcgagttgggcagaggggagctggtctttcagccaccattgctaggagtgagcatgagatttctgaaattattgatgggctctctgagcaggagaataatgagaaacaaatgcggcagctctctgtgattccacctatgatgtttgatgcagaacaaagacgagtcaagttcattaacatgaatgggcttatggaggaccctatgaaagtgtataaagataggcagtttatgaatgtttggactgaccatgaaaaggagatctttaaggacaagtttatccagcatccaaaaaactttggactaattgcatcatacttggagaggaagagtgttcctgattgtgttttgtattactatttaaccaagaaaaatgagaattataaagccctcgtcagaaggaattatgggaaacgcagaggcagaaaccagcaaattgctcgaccctcgcaagaagaaaaagtagaagaaaaagaagaggataaagcagaaaaaacagaaaaaaaagaagaagaaaagaaagatgaagaggaaaaagatgaaaaagaagactccaaagaaaataccaaggaaaaggacaagatagatggtacagcagaagaaactgaggaaagagagcaagccacaccccgggggcgaaagactgccaacagtcagggccgccgtaagggccggatcaccaggtccatgacaaacgaagctgcagctgccagtgctgcagccgcagcggctactgaagagcccccaccacctctgccaccgccaccagaacccatttctacagagcctgtggagacctctcgatggacagaagaagaaatggaagttgctaaaaaaggtctagtagaacatggtcgtaactgggcagcaattgctaaaatggtgggaacgaaaagtgaagctcaatgtaaaaacttctattttaactataaaaggcgacacaatcttgacaacctcttacagcagcataaacagaaaacttcacgaaaacctcgtgaagagcgagatgtgtctcaatgtgaaagtgtcgcttccactgtttctgctcaggaggatgaagatattgaagcctccaatgaagaagaaaatccagaagacagcgaagttgaagctgtcaagcccagcgaggacagtcctgaaaatgctacttctcgaggaaacacagaacctgcggttgagcttgagcccaccacggaaactgcacccagtacatctccctccttagcagttccaagtacaaaaccagctgaagatgaaagtgtggagacccaggtgaatgacagcatcagtgctgagacagcagagcagatggatgtagatcagcaggagcacagtgctgaagagggttctgtttgtgatcccccacccgctaccaaagctgactctgtggacgttgaagtgagggtgccagaaaaccatgcatctaaagttgaaggtgataataccaaagaaagagacttggatagagccagtgagaaggtggaacctagagatgaagatttggtggtagctcagcaaataaatgcccaaaggcccgagccccagtcagacaatgattccagtgccacgtgcagcgctgatgaggatgtggatggagagccagagaggcagagaatgtttcctatggactcaaagccttcactgttaaaccccactggatctatactcgtctcatctccgttaaaaccaaatccactggatctgccacagcttcagcatcgagctgctgttatcccaccaatggtatcctgcaccccatgtaacataccaattggaaccccagtgagcggctatgctctctaccagcgacacattaaagcaatgcatgagtcagcactcctggaggagcagcggcagagacaagaacagatagatttggaatgtagaagttctacaagtccatgtggcacatccaagagtccaaacagagagtgggaagtccttcagcctgctccacatcaagtgataactaatctccctgaaggcgttcggcttccgacaactcgaccaaccaggccaccgccccctctcatcccgtcatccaaaaccacagtggcttcagaaaaaccatcttttataatgggaggctccatctcacagggaacaccaggcacttatttgacttctcataatcaggcttcctacactcaagaaacacccaagccgtcagtgggatctatctctcttggactgccacggcaacaggaatctgccaaatcagctactttgccctacatcaagcaggaagaattttctccccgaagccaaaactcacaacctgagggtctgttggtcagggcccaacatgaaggtgtagtcagaggtaccgcaggagccatacaagaaggaagtataactcggggaactccaaccagcaaaatttcagtggagagcattccatccctacggggctctatcactcagggcaccccggctctgccccagactggcataccaacagaggctttggtgaaggggtccatttcgagaatgcccattgaagacagcagtcctgagaaaggcagagaggaagctgcatccaaaggccatgttatttatgaaggcaaaagtggacatatcttgtcatatgataatattaagaatgcccgagaagggactaggagtccaagaacagctcatgaaatcagtttaaagagaagctatgaatcagtggaaggaaatataaagcaagggatgtcaatgagggagtctcctgtatcagcaccgttagaggggctgatatgccgagcattacccagggggagtcctcattctgacctcaaagaaaggactgtattgtctggctccataatgcaggggacaccaagagcaacaactgaaagctttgaagatggccttaaatatcccaaacaaattaaaagggaaagtcctcccatacgagcatttgaaggtgccattaccaaaggaaaaccatatgatggcatcaccaccatcaaagaaatggggcgttccattcatgagattccaaggcaagatattttaactcaggaaagtcggaaaactccagaagtggtccagagcacacggccgataattgagggttccatttcccagggcacaccaataaagtttgacaacaactcaggtcaatctgccatcaaacacaatgtcaaatccttaatcacggggcctagcaaactatcccgtggaatgcctccgctggaaattgtgccagagaacataaaagtggtagaacggggaaaatatgaggatgtgaaagcaggcgagaccgtgcgttcccggcacacgtcagtggtaagctctggcccctccgttcttaggtccacactgcatgaagctcccaaagcacaactgagccctgggatttatgatgacaccagtgcacggaggacccctgtgagttatcaaaacaccatgtccagaggctcacccatgatgaacagaacttctgatgttacaatttcttctaacaagtctaccaatcatgaaaggaaatcgacactgacccctacccagagggaaagtatcccagcgaagtctccagtgcctggggtggaccctgtcgtgagccacagtccgtttgatccccatcacagaggcagcactgcaggcgaggtttatcggagccacctgcccacgcacttggatccagccatgccttttcacagggctttggatcctgcagcggctgcttacctgtttcagagacagctttcaccaactccaggttacccaagtcagtatcagctttacgcaatggagaacacaagacagacaatcttaaatgattacattacctcacaacagatgcaagtgaacttgcgtccagatgtggccagaggactctccccaagagagcagccactgggtctcccatacccagcaacgagaggaatcattgacctgaccaatatgcctccaacaattttagtgcctcatccagggggaacaagcactcctcccatggacagaatcacttatattcctggtacacagattactttccctcccaggccgtacaactctgcttccatgtctccaggacacccaacacaccttgcagctgctgcaagtgctgagagggaacgggaacgggagcgggagaaggagcgggagcgggaacggattgctgcagcttcctccgacctctacctgcggccaggctcagaacagcctggccgacctggcagtcatggatatgttcgctccccttccccttcagtaagaactcaggagaccatgttgcaacagagacccagtgttttccaaggaaccaatggaaccagtgtaatcacacctttggatccaactgctcagctacgaatcatgccactgcctgctgggggcccttcaataagccaaggcctgccagcctcccgttacaacactgctgcggatgccctggctgctcttgtggatgctgcagcttctgcaccccagatggatgtgtccaaaacaaaagagagtaagcatgaagctgccaggttagaagaaaatttgagaagcaggtcagcagcagttagtgaacagcagcagctagagcagaaaaccctggaggtggagaagagatctgttcagtgtttatacacttcttcagcctttccaagtggcaagccccagcctcattcttcagtagtttattctgaggctgggaaagataaagggcctcctccaaaatccagatatgaggaagagctaaggaccagagggaagactaccattactgcagctaacttcatagacgtgatcatcacccggcaaattgcctcggacaaggatgcgagggaacgtggctctcaaagttcagactcttctagtagcttatcttctcacaggtatgaaacacctagcgatgctattgaggtgataagtcctgccagctcacctgcgccaccccaggagaaactgcagacctatcagccagaggttgttaaggcaaatcaagcggaaaatgatcctaccagacaatatgaaggaccattacatcactatcgaccacagcaggaatcaccatctccccaacaacagctgcccccttcttcacaggcagagggaatggggcaagtgcccaggacccatcggctgatcacacttgctgatcacatctgtcaaattatcacacaagattttgctagaaatcaagtttcctcgcagactccccagcagcctcctacttctacattccagaactcaccttctgctttggtatctacacctgtgaggactaaaacatcaaaccgttacagcccagaatcccaggctcagtctgtccatcatcaaagaccaggttcaagggtctctccagaaaatcttgtggacaaatccaggggaagtaggcctggaaaatccccagagaggagtcacgtctcttcggagccctacgagcccatctccccaccccaggttccggttgtgcatgagaaacaggacagcttgctgctcttgtctcagaggggcgcagagcctgcagagcagaggaatgatgcccgctcaccagggagtataagctacttgccttcattcttcaccaagcttgaaaatacatcacccatggttaaatcaaagaagcaggagatttttcgtaagttgaactcctctggtggaggtgactctgatatggcagctgctcagccaggaactgagatctttaatctgccagcagttactacgtcaggctcagttagctctagaggccattcttttgctgatcctgccagtaatcttgggctggaagacattatcaggaaggctctcatgggaagctttgatgacaaagttgaggatcatggagttgtcatgtcccagcctatgggagtagtgcctggtactgccaacacctcagttgtgaccagtggtgagacacgaagagaggaaggggacccatcacctcattcaggaggagtttgcaaaccaaagctgatcagcaagtcaaacagcaggaaatctaagtctcctatacctgggcaaggctacttaggaacggaacggccctcttcagtctcctctgtacattcagaaggggattaccataggcagacgccagggtgggcctgggaagacaggccctcttcaacaggctcaactcagtttccttataaccctctgactatgcggatgctcagcagtactccaccaacaccgattgcatgtgctccctctgcggtgaaccaagcagctcctcaccaacagaacaggatctgggagcgagagcctgccccactgctctcagcacagtacgagaccctgtcggatagtgatgactgaactgcacaaagtgaggggaacagggtgcaggagagggatctctagtttttgtggtttaatttttagtagcaggtcaaaaacctgccctcctgtgacttattccctgagacttttcaggagagccagcccacagatgatgaagaaatgatggaagttcatttggagagtcaaatgggaaaaaaacaaacaaaaaactgcctttgatacaggcaattcagtggactataataatagtggagggttgagatgtagagtttttaaaaagtgaacagttgctgttcttacatctgtaaagaaaaccataatgtctttaaatcactcttctgtaaatagatgacctttttgcagtgtatatccccttgctgtagtatctggtgtacttatgttcaaatcagcgcatcaactttgggggtgatttttaaaaatctttttgtctatctatctttttaaccctagccttctaaacaacctcatacagcccagttacataatgttggctgtcacgggcattgtacttttatctgatattgtttcctctaaattcagctttccagtgatgtttaaaatcttgtgaaaatgtttagatttttaacacagaccctgtcataaaatctgtacattagggtcaaaaggtaaaagtaacaaattctgccatattgtaaatttccagtgcaggctttaatttttttttttcattagtagcactgaaaaaatattactgcatgggtatgttctagttcagtttataaagttttaaaggcttatttgaggcatacctcactgttacgcacactggtaatttaaccatgcccctaagtattccttttctcctgcatttgatgcagcccaacaaagcttttgttttgaaataaatttgactaccctgtccata

SEQ ID NO: 481 - DNA, 3326 bp, Homo sapiens
  source 1..3326: mol_type = genomic DNA
gcacttccgggccggccgattccgcgcgtctccgcccatcatggcgctcgtgccagtgtcccgtgggctacccactcctgtcatgtcctttgggctggtgcaggccagatcttctagggccgtagccctgagaggagcgcctggagaggaaacggcgcgccatgcacctcacacggcccctcagacctcacggcgaggccctatcagggtaatggtgtccgccggactcgcacaacactccgccggactcgcacaacactccgccgcactcgcacaagactccgccgcggcgacctctactgaaagacccccagtcctggtgtcgcccgaaggcccaggaaaccgtgcttccgcgcttctcccccagaacgtgggaagctgccgctttaccctcattttaccccagggtcgcaaaacatctcaccgtagttgaagccagcaagccggaccaggcgtcccggccaagccacgtgcgcgccccgcgccgcgagtgctcgccccgcccctagggaggagccggccgacccccggccacttagcagtgccgcagccgacggggtgcggttcggcgctcccaggttcctttcctcactgcacgctcttgcccctcctcttttctctcctgcccgtgttcttcccgccgcctgacctggcccgcccgcctttccagtctggccgggcgggggcctgaagcacggcggctcgggccgtgggaccgtgttcacaccctttccagaaattcttggctggtaaccgcgaaaccgactggagcaggagctgggagaactggagaaaactgctctaatctcacttgactccagctaggagctgatgctgcatcgtaataacatttgcagagcgctttcacaggcgctggagtgacttgtctgagattcctccagaactgagccctttgttggaaccataccccagcccatggtcccatgactaggtggatagtactccttgtacctcctgcaacccagaaccctggctgaccactttgaaggaggatgctccagcaggtcaatggccacaatccggggtctgatggccaagccagggagtacctcagagaagacctgcaggagttcctgggtggggaggtcctgctgtacaaactggatgacctcaccagggtgaatcctgtgacactagagacagtcctgaggtgcctgcaggcccggtacatggcagacacattctacaccaatgctggctgcaccctggtagccttgaaccccttcaagcctgttcctcagctctactcgcccgagctaatgagagagtaccatgctgcgcctcagccccagaaactgaagccccatgtgttcactgtgggtgaacagacctacaggaatgtcaagagcctgattgaaccagtcaaccagtctattgttgtcagtggagagagtggtgctggaaagacatggacgtctcgctgcctaatgaagttctatgctgtggtggccacctcacctgcatcttgggagagccacaagattgcagagaggatagaacagaggatcctgaactccaaccctgtcatggaagcttttgggaatgcgtgtacactgaggaataacaacagcagtcgctttgggaagttcatccagctccagctgaacagggctcagcaaatgactggagccgcagtccagacctacctcctagagaaaactcgagtggcctgccaggcttccagtgagaggaacttccacatcttctatcagatttgcaaaggagccagtgaggacgagaggctccagtggcaccttcctgagggagctgccttctcctggctgcccaacccagagaggagcttagaagaggattgttttgaggtgaccagagaggccatgctccatttgggcattgacacccctacccagaacaacatctttaaggtcctagctggactgctgcaccttggcaatatccagtttgctgcctccgaggatgaagcccagccctgccagccgatggatgatgccaagtactctgtcaggacggcagcctcgctgctggggctcccagaggacgtgctgctggagatggtgcagattagaaccatcagggcaggcagacagcagcaggtgttccggaagccctgcgcccgagccgagtgtgacacccgtagagactgcctggccaaactgatctatgcgcggttgtttgactggctggtatcagtgatcaacagcagcatctgtgcagacaccgactcgtggaccactttcataggcctgctggatgtgtatggatttgaatcatttcctgacaacagtctggaacagttgtgcatcaactacgccaatgagaagctccagctggaggcctgtggcctcgtggagaccatccatatcagtgctgctggcttccccatccgggtctctcaccgaaactttgtagaacgatacaagttactaagaaggcttcatccttgcacatcctctggccccgacagcccatatcctgccaaagggctccctgaatggtgtccacacagcgaggaagccacgcttgaacctctcatccaggacattctccacactctgccggtcctaactcaggcagcagccataactggtgactcggctgaggccatgccagcccccatgcactgtggcaggaccaaggtgttcatgactgactctatgctggagcttctggaatgtgggcgtgcccgggtgctggagcagtgtgcccgctgcatccagggtggctggaggcgacaccggcaccgagagcaggagcggcagtggcgggccgtcatgctcatccaggcagccattcgttcctggttaactcggaaacacatccagaggctgcatgcagctgccacagtcatcaagcgtgcatggcagaagtggagaatcagaatggcctgccttgctgctaaagagctggatggtgtggaagaaaaacacttctctcaagctccctgttccctgagcacctcgccgctgcagaccaggctcctggaggcaataatccgcctctggcccctgggactggtcctggccaatacggctatgggtgtaggcagctttcagaggaaattagtggtctgggcttgcctccagctccccaggggcagccccagtagctacactgtccagacagcacaagaccaggctggtgtcacgtccatccgagcgctgcctcagggatcgataaagtttcactgcagaaagtctccactgcggtatgctgacatctgccctgaaccttcaccctacagcattacaggctttaatcagattctgctggaaagacacaggctgatccacgtgacctcttctgccttcactgggctggggtga

SEQ ID NO: 482 - DNA, 5675 bp, Homo sapiens
  source 1..5675: mol_type = genomic DNA
agactgaggctggctggctggaggttgacacaggagtgctcaggggagcagcatcacaagagggcagatcgaaagcatcgtccttgctgaaaaacagatggcagaggtggaagcggtacagctgaaggaggaaggaaaccggcatttccagctccaggactacaaggccgccacaaatagctacagccaggccctgaagctgaccaaggacaaggccctgctggccacgctttatcggaaccgggcagcctgtggcctgaaaacggagagctacgtccaggcagcttcagatgcctccagagccatcgacatcaactcctcggacatcaaggctctgtatcggcgatgccaggcactggagcacctggggaagctggaccaggccttcaaagacgtgcagcgttgtgccaccctcgagccacggaaccagaacttccaggagatgctgaggagactcaacaccagcattcaggagaagctccgagtgcagttctccacagactcgagggtacagaagatgtttgagatcctcttggatgaaaacagtgaggctgataagcgggaaaaggctgccaacaatctcattgtcctaggccgtgaggaagcaggggctgagaagatcttccagaacaatggagtagccttgctactgcagcttctggacactaagaagcctgagctggtgctggctgcagtgcggaccctgtcgggcatgtgcagcggccaccaagccagagccacagtgattctgcatgcagtgcggatagaccgaatctgtagcctcatggccgtggagaatgaggagatgtctctggctgtctgcaacctgctccaagccatcattgactccttgtctggggaggacaagcgggagcatcgagggaaggaggaggccctggttctagacaccaagaaggacctgaagcagatcaccagccacctgctggacatgctagtcagcaagaaggtgtctggccagggcagggatcaggcgctgaacctgctcaataagaatgttcccaggaaggaccttgccattcatgacaactcacgtaccatctatgtggtggataatggtctgaggaagatcctgaaggttgtggggcaggttccagatctgccatcctgcctgcccctgactgacaacacccgcatgctggcctctatcctcatcaacaagctctatgatgacctgcgctgtgacccggagcgcgatcacttccgcaagatctgtgaggaatatatcacgggcaagtttgacccccaggacatggacaagaacttgaatgccatccagacagtgtcagggatcctgcagggcccctttgacctgggcaaccagctgctgggactgaaaggtgtgatggagatgatggtggcactatgtggctcagagcgcgagacggaccagctggtggccgtggaggccctcatccatgcctccacgaagctcagccgcgccaccttcatcatcaccaatggagtgtcactgctcaaacagatctacaagaccaccaaaaatgagaagatcaagatccgcacactggtgggactctgtaagctcggctctgcaggtggcacagactacggtctcaggcagtttgcggaagggtcgacagaaaaactggccaaacagtgtcgcaagtggctgtgcaatatgtccatagacactcggacccgacgctgggcagtggagggcctggcctacctcacgctggacgctgatgtgaaggacgactttgtccaggacgtccctgccctgcaggccatgtttgagctggccaaggcaggtaccagtgacaagaccatcctgtactcggtggccaccaccctggtgaactgcaccaacagctacgatgtcaaggaggtcatcccagagcttgtccagctcgccaagttctccaagcagcatgtgcccgaggaacaccccaaggacaagaaggactttatagacatgcgggtgaagcggcttctgaaggcgggtgtcatctctgccctggcttgcatggtgaaagcagatagtgccatcctcactgaccagaccaaggagctgctggccagggtattcctggcactgtgtgacaacccaaaggaccgaggcaccattgtggctcaaggtggtggcaaggccctgattcccctggctttggagggcacagatgtgggcaaggtgaaggcagcccacgctctagcaaagatcgctgctgtctccaatccggacattgcttttcctggggagcgggtgtatgaggtggtgcggccccttgtaagactcttggacacacagagggatgggcttcagaactatgaggctctcctaggcctcaccaacctgtctgggcggagtgacaaactccggcagaagatctttaaggagagggccttgccagacatcgagaactacatgtttgagaatcatgatcagctgcggcaggcggccaccgagtgcatgtgcaacatggtgctccacaaggaggtacaggaaaggttcttggctgacgggaatgaccggctgaagctggtggtgctgctctgcggggaggatgatgataaggtgcagaatgcggctgcaggggctctggccatgctgacagcagcacacaagaaactgtgcctcaagatgactcaagtgacaacccagtggttggagatcctccagcggctttgcctgcacgaccagctgtctgtccaacaccggggcctggtcattgcctacaacctactggcagccgatgctgagctggccaagaagctggtggagagtgagctgctggagatcctgactgtggtgggcaaacaggagccagatgagaagaaggcagaagtggttcagacagcccgagaatgtctcatcaagtgcatggattatggtttcattaaaccagtgtcttagacagcgaccctcagggatgctgggagtggtcctgtactgtgcagagtcctgggttggttgggttctcctgaagagtcaggtcatctagggatcatagcagtgacaatgaagtctcaatataaaggaaagacttgattgttctctgagttgtgagtcttctcctttgtcctgacagagtttggatgtttcactctctctcttgcttcctgtctccttatatttgtcatgtttcagaaattcccagaataattttcacccatgattagaaataggttggatcattctttctgtacccattctgaaggccaggataataggttgaagttctttatattttggaaaatggattttgtggtaaggtaggaactaacgggtgtgtgcatataaaggttaatgctgttgtatttggatgctgatctgtgctgttttcatgacctctctcccacactatttgaatcagtctgttcagaactgtgtgtttcacctgcagtgctctgtcccagtcccatgcccattcccatcacttcactgtgatggaaatagagtttatgttcaacagtggggcatgacctctgcaatttgcttgggaaagtcttccaagcaagatggacatgatgaatacaaataagatctactcaaagtacttcaaacaaaaaataaataattcattggctcatgtatcttggccacccagggaaggtctgacattgttagttagatccagagtttcaaatgtcatcaccatggatgtgtctttttctctctctcatttcccctccccatatcttgtcttttatttattataggtttgtctcattccctggcaggctctctccctgtgataggaaagagagtccccagcagccccagggtgacatagttgttatagttcattatggaatagaagagagaagagcattctcaataacccggcaaagttcccagggatgactctgatatgtctatgtctcaggtcacatttccatctatgaaccaatcatattcagaggtggaatgctaattggccaggcctgggtcatatatacaagtctagggaagaaatgagcttcatccctgtccaattgacatggactgattaggggtattaatggaagaggtgtgccaccacaaaagaatgtaccctgggcagatcaaagaacatattctgtatgtcaggcttggccacaaaagaatgacacaagtaatatgctgtagatcagaacctctctgctaatattgcctttttagcatggttaagatagctaagatctagtactgtcactccagtatgtcccaattctacctacgtttattgaagggtcaacagttctgatctcagcattgggtaaagggtgggacattcagatttacggtccttgataaaaacaatttacaacgttccgttgtgtaataaatgtaagtgtacatatgcctgggacatcagctggaaaagggacagactatcagagagttgcactgttgcggtatgggccaaatccaacataatacccgctgtacctctagagaactaaaaccttaatttctcagatcttttctgcactaatggtctttacatacagcctacattttaactaactcttgcatgggcttgtttcacagcaggaaactatattcatcatatccttattatgatagagaatgacaacattcaaaagggtgtggtgcttctgaaaatatacacaataaatggcatgatttgacctctgtcaaattcttctttcctgctttcctcatatgtgggcttgagtgggtgtatttagctcctttaaaggaaactctttcacaggcagggccacactcttactcgttttgatctcatgaggttacatctgccagtggcgttcagggccagttagataaagttcatcttgtttggattggagagactttttttttttttttttttgagacagggtcttgctctgtaacctaggctcaagtgcagtgcagtggtgcagtcatggctcaccgcagccttggtctcctgggctcaagtgatctttctacttcagcctcctcaatagctgggactacaggcacacaccaccacccccaggtaattaaaaaatttttttttgtagagacagggtctcactatgttgcccagtctgggagaccacattctttaacatgaatattttgtaaatagtccaagaagatctagaggaaagctgaattccttcatctgatttttgccactgggctgcctcccattgtctggctaagtcttcatgggaggcctttaagaaaagctgtgacaaatacctttgtttcccactgcctaggttacataagtagttggcttttccagcctagactcttatattgttgcttgtaagagggcccttctttgcagatttcttttttttttcatctatgctttcaaataggcagatgctagcctgagatcatctctttattgaggtagtttgcccaaaaacagcaaggaacagccaatacctgccaactttctaggtttttccaaccaattctcttacagaaaatctataaatatcttagaggtatgtttcttagtttcccaacatataatgggaaaattcatcatttatattattacttttaactgaagtatgttgttatcagagaacttggtctgtgtcatattaatcctttgccatttgagaagcatacagttttaaagtttatatctccaaaaggatattttgtaaaaatttaacccctttgactcttagtcttctcatttgtgaaaggtaaataataaagaatttctgttcctagt

SEQ ID NO: 483 - DNA, 2335 bp, Homo sapiens
  source 1..2335: mol_type = genomic DNA
gtagtggccccagtccgggccccggcgcgctaggctcacaaaggcaggcacagactgcaaccctgctcagtgctccgggcgcttcaggctggcttgggtcctgctgctccaaccccaagggccctggagcgctccctgatacctccatcactcaccatggccagccagttctgcctccctgaatccccatgtctctcgcccctgaaacccttgaagccacatttcggagacatccaagagggcatctacgtggcgatccagcgcagtgacaagcggatccacctcgctgtggtcacggagatcaacagagaaaactattgggtcacggtagagtgggtggagaaagcagtcaaaaaaggcaagaagattgacctggagaccatactcctgctgaatccagctctggactctgctgaacaccccatgccgcccccgcccttatcccccttggctctggcgccctcttcggccatcagggaccagcgtaccgccacgaaatgggttgcgatgatcccccagaaaaaccaaacagcctcaggggacagcctggatgtgagggtccccagcaaaccttgtctgatgaagcagaaaaagtctccctgcctctgggaaatccagaaactgcaggagcagcgggaaaagcgcaggcggctgcagcaggagatccgagctagacgcgccctcgatgtcaataccagaaaccccaactacgaaatcatgcacatgatcgaagagtatcgcaggcacctggacagcagcaagatctcagtcctggagcccccgcaagaacatcgcatctgcgtctgcgtgaggaagcggcctctcaaccagcgagagacaaccttaaaggacctggatatcatcaccgtcccctcggacaatgtggttatggtgcatgagtccaagcaaaaggtggacctcactcgctacctgcagaaccagaccttctgcttcgaccatgccttcgatgacaaagcctccaacgagttggtgtaccagttcaccgcccagccactggtggagtccatcttccgcaagggcatggccacctgctttgcctatgggcagacgggaagtgggaagacgtacaccatgggtggagacttttcaggaacggcccaagattgttctaagggcatttatgctctggtggcacaggatgtctttctcctgctcagaaactccacatatgagaagctggacctcaaagtctatgggacattttttgagatttatgggggcaaggtgtatgatttgttgaactggaagaagaagctgcaagtccttgaggatggcaatcagcaaatccaagtggtcgggctgcaggagaaagaggtgtgttgtgtggaggaagtgctgaacctggtggaaatagggaatagctgtcggacttccaggcaaacacctgtcaacgctcactcatccaggagccatgcagtgttccagatcatcctgaagtcaggacggataatgcatggcaagttttccctcgttgatttagctgggaatgaaagaggagcagatacaaccaaggccagccggaaaaggcagctggaaggggcagagattaacaagagtcttctagccctcaaagaatgtattctggctttgggtcagaacaagcctcacaccccattcagagccagcaaactcacactggtgctccgggactcctttataggccagaactcctccacttgcatgattgctaccatctctccggggatgacctcttgtgaaaacactctcaacactttaagatatgcaaacagagtaaaaaaattaaatgtagatgtaaggccctaccatcgtggccactatccgattggacatgaggcaccaaggatgttaaaaagtcacatcggaaattcagaaatgtcccttcagagggatgaatttattaaaataccttatgtacagagtgaggagcagaaagagattgaagaggttgaaacattacccactctgttagggaaggataccacaatttcagggaagggatctagccaatggctggaaaacatccaggagagagctggtggagtacaccatgatattgatttttgcattgcccggtctttgtccattttggagcagaaaattgatgctctgaccgagatccaaaagaaactgaaattattactagctgacctccacgtgaagagcaaggtagagtgaagccaatggcgagagatcaggtccgaaatgctgcattgctgcagtttccaccactcttatacaggaaaactgtccaaattatctaaagatcctcctgagaagcttaaaacatcttaaaatacactgatgggaaacatgctctttcttctgcctctgt

SEQ ID NO: 484 - DNA, 1734 bp, Homo sapiens
  source 1..1734: mol_type = genomic DNA
acgcacgcacgtctctcgctttcgcatacttaaggcgtctgttctcggcagcggcacagcgaggtcggcagcggcacagcgaggtcggcagcggcacagcgaggtcggcagcggcacagcgaggtcggcagcggcagcgaggtcggcagcggcacagcgaggtcggcagcggcagcgaggtcggcagcggcgcgcgctgtgctcttccgcggactctgaatcatggcgaccacggccacgatggcgacctcgggctcggcgcgaaagcggctgctcaaagaggaagacatgactaaagtggaattcgagaccagcgaggaggtggatgtgacccccacgttcgacaccatgggcctgcgggaggacctgctgcggggcatctacgcttacggttttgaaaaaccatcagcaatccagcaacgagcaatcaagcagatcatcaaagggagagatgtcatcgcacagtctcagtccggcacaggaaaaacagccaccttcagtatctcagtcctccagtgtttggatattcaggttcgtgaaactcaagctttgatcttggctcccacaagagagttggctgtgcagatccagaaggggctgcttgctctcggtgactacatgaatgtccagtgccatgcctgcattggaggcaccaatgttggcgaggacatcaggaagctggattacggacagcatgttgtcgcgggcactccagggcgtgtttttgatatgattcgtcgcagaagcctaaggacacgtgctatcaaaatgttggttttggatgaagctgatgaaatgttgaataaaggtttcaaagagcagatttacgatgtatacaggtacctgcctccagccacacaggtggttctcatcagtgccacgctgccacacgagattctggagatgaccaacaagttcatgaccgacccaatccgcatcttggtgaaacgtgatgaattgactctggaaggcatcaagcaatttttcgtggcagtggagagggaagagtggaaatttgacactctgtgtgacctctacgacacactgaccatcactcaggcggtcatcttctgcaacaccaaaagaaaggtggactggctgacggagaaaatgagggaagccaacttcactgtatcctcaatgcatggagacatgccccagaaagagcgggagtccatcatgaaggagttccggtcgggcgccagccgagtgcttatttctacagatgtctgggccagggggttggatgtccctcaggtgtccctcatcattaactatgatctccctaataacagagaattgtacatacacagaattgggagatcaggtcgatacggccggaagggtgtggccattaactttgtaaagaatgacgacatccgcatcctcagagatatcgagcagtactattccactcagattgatgagatgccgatgaacgttgctgatcttatctgaagcagcagatcagtgggatgagggagactgttcacctgctgtgtactcctgtttggaagtatttagatccagattctacttaatggggtttatatggactttcttctcataaatggcctgccgtctcccttcctttgaagaggatatggggattctgctctcttttcttatttacatgtaaataatacattgttctaagtctttttcattaaaaatttaaaacttttcccataaactctatacttctaaggtgccaccaccttctctagtaactta

SEQ ID NO: 485 - DNA, 2664 bp, Homo sapiens
  source 1..2664: mol_type = genomic DNA
cgagcgcgagccgggagccggggcgggcgcgggcagcggcgggccggccgggctgtgcggggcgagcggcggcggcggcgggggcgcttcggccggggcggcagctgggcgccggcgggagctagcagcgtctgcagccgcgccggccgccagcgccccggcgcgctccggctcggccatggagctgccagctgttggcgagcacgtcttcgcggtggagagcatcgagaagaagcggatccgcaagggcagagtggagtatctggtgaaatggagaggctggtcgcccaaatataacacgtgggaaccggaggagaacatcctggaccccaggctgctgatcgccttccagaacagggaacggcaggagcagctgatgggatatcggaagagagggccgaagcccaaaccgctagtggtgcaggtgcctacctttgcccgtcgttccaatgtcctgaccggcctccaggactcctccactgacaaccgtgccaagctggatttgggcgcgcaggggaagggccaggggcatcagtacgagctcaacagcaagaagcaccaccagtaccagccgcacagcaaggagcgggcgggcaagcccccgccgccgggcaagagcggcaagtactactaccagctcaacagcaagaagcaccacccctaccagcccgaccccaaaatgtacgacctgcagtaccagggcggccacaaggaggcgcccagccccacctgcccggacctgggggccaagagccacccgcccgacaagtgggcgcaaggtgcgggggccaaaggctacctgggggcggtgaagcccctggccggtgcggcgggtgctccaggcaaaggctccgagaagggcccccccaacggaatgatgccggcccccaaagaggctgtgacgggcaacgggattgggggcaagatgaagatagtcaagaacaagaacaagaacggacgcatcgtgatcgtgatgagcaaatacatggagaacggcatgcaggcggtgaagatcaagtccggcgaggtggcagagggggaggctcgctcccccagccacaagaagcgggcagccgacgagcgccaccctcctgccgacaggacttttaaaaaggcggcgggcgcagaggagaagaaggtggaggcgccgcccaagaggagggaggaggaggtgtccggggttagcgatccgcagccccaggatgccggctcccgcaagctgtccccgaccaaggaggcctttggagagcagcccctgcagctcaccaccaagcccgacctgcttgcctgggacccggcccggaacacgcacccgccctcacaccacccgcacccgcacccccatcaccaccaccaccaccaccaccaccaccaccacgccgtcggcctgaatctctcccacgtgcgcaagcgctgcctctccgagacccacggcgagcgcgagccctgcaagaagcggctgactgcgcgcagcatcagcacccccacctgcctggggggcagcccagccgctgagcgcccggccgacctgccaccagccgccgccctcccgcagcccgaggtcatcctgctagactcagacctggatgaacccatagacttgcgctgcgtcaagacgcgcagcgaggccggggagccgcccagctccctccaggtgaagcccgagacaccggcgtcggcggcggtggcggtggcggcggcagcggcacccaccacgacggcggagaagcctccagccgaggcccaggacgaacctgcagagtcgctgagcgagttcaagcccttctttgggaatataattatcaccgacgtcaccgcgaactgcctcaccgttactttcaaggagtacgtgacggtgtagccggagggcgtcggaaggggaagcgccattcccgcgggggggcggggagctgagcacctggggcctcggggcgggctcccctctcgccaacccgccaaccgcgagagacccaggctggcccccagggtgaggacgcccggagcggaggtaaccatgttccccctgcggcggctgtcagacctgggcggaggccccttccacgcggtgccggcggggctcgccctctcctgcccttccccgctggagatggacccccggaacggacagggcagctctgcgcccggcctcagagttctagtattatattttaaccgtgctaacttgtcaagtgctgactctactcccgtttgtacgtggtgttattattgaaatgtattgtttgagctcaaaaggcccgaccaccccccttcgggctgctatatatatatttatttgtaggtatttatatattgaaatataaaaacctagatttatggagtttcctctagatcatgttatattctatatcagacaaactattttcttttgacctttcttcccctccatccagtatttcggttgatttcattttctcccctctcttccccttccacgaactgcaataccagtaaccttggtatatattttttgatactgtacacatggatgtcttgtttctatgtgcaaaaaaaaaaaaaaaaaaaagtttgttaaaaggctacacgagctctctagaaactgctgctactagaaatgtctaaactataagcttccaactattacctgcttgaatgtaaatattaaatggagatgttgaaggtgca

SEQ ID NO: 486 - DNA, 1218 bp, Homo sapiens
  source 1..1218: mol_type = genomic DNA
atggactctcttgttacagcaaacaccaaattttgctttgatctttttcaagagataggcaaagatgatcgtcataaaaacatatttttctctcccctgagcctctcagctgcccttggtatggtacgcttgggtgctagaagtgacagtgcacatcagattgatgaggtactacacttcaacgaattttcccagaatgaaagcaaagaacctgacccttgtctgaaaagcaacaaacaaaaagctgggtccttaaacaatgagagcggactggtcagctgctactttgggcagcttctctccaaattagacaggatcaagactgattacacactgagtattgccaacaggctttatggagagcaggaattcccaatctgtcaggaatacttagatggtgtgattcaattttaccacacgacgattgaaagtgttgatttccaaaaaaaccctgaaaaatccagacaagagattaacttctgggttgaatgtcaatcccaaggtaaaatcaaggaactcttcagcaaggacgctattaatgctgagactgtgctggtactggtgaatgctgtttacttcaaggccaaatgggaaacatactttgaccatgaaaacacggtggatgcacctttctgtctaaatgcgaatgaaaacaagagtgtgaagatgatgacgcaaaaaggcctctacagaattggcttcatagaggaggtgaaggcacagatcctggaaatgaggtacaccaaggggaagctcagcatgttcgtgctgctgccatctcactctaaagataacctgaagggtctggaagagcttgaaaggaaaatcacctatgaaaaaatggtggcctggagcagctcagaaaacatgtcagaagaatcggtggtcctgtccttcccccggttcaccctggaagacagctatgatctcaattccattttacaagacatgggcattacggatatctttgatgaaacgagggctgatcttactggaatctctccaagtcccaatttgtacttgtcaaaaattatccacaaaacctttgtggaggtggatgaaaacggtacccaggcagctgcagccactggggctgttgtctcggaaaggtcactacgatcttgggtggagtttaatgccaaccacccttttctctttttcattagacacaacaaaacccaaaccattctcttttatggcagggtctgctctccttaa

SEQ ID NO: 487 - DNA, 5518 bp, Homo sapiens
  source 1..5518: mol_type = genomic DNA
atgctgaggatgaagctgccgctgaagccaacgcaccccgcggagccgccgcccgaggcggaggagcccgaggcggacgcgcggccgggcgcgaaggcgccttcgcgccgccgccgcgactgccgccccccgccgccgccgccgccgcccgcgggcccgtcgcggggccctctgccgccgccgccgccgccccggggactcgggccgcctgttgctggtggagcggcggcgggggcgggtatgccgggcggcggcggggggccctcggcggcgctgcgcgagcaggagcgggtatacgagtggttcgggctggtgctgggctcggcgcagcgcctggagttcatgtgcgggctgctggacctgtgcaacccgctggagctgcgcttccttggctcgtgcctggaggacctggcgcgcaaggactaccactacctgcgcgactcggaggccaaggccaacggcctctcggacccggggccgctggccgacttccgagagcccgcggtgcgctcgcgcctcatcgtctacctggcgctgctgggctcggagaaccgggaggccgctggccgtctgcaccgcctgctaccccaggtggactcggtgctcaaaagcctgcgcgcggcccggggcgagggctcgcggggcggcgcggaggacgagcgcggcgaggacggcgacggcgagcaggacgccgagaaggacggctcaggcccggaaggcggcattgtggagccccgggtcggcggcgggcttggctccagggcccaggaggaactgctgctgctcttcaccatggcctcgctgcacccggctttctccttccaccagcgggtcaccctgagggaacacttggagaggctccgcgccgcgctccgcgggggccccgaggacgcggaggtggaggtagagccgtgcaagtttgccggccccagggcccagaacaactctgctcatggtgattacatgcaaaataacgagagcagcttaatagagcaagctccaatacctcaggacggacttaccgtggcacctcacagagctcagcgagaagctgtacacattgagaagataatgttgaaaggagtccagagaaaaagagctgacaaatactgggagtacactttcaaagtaaattggtctgatctttcagtcacaacagtaacaaaaacccaccaagaactacaggaatttctactgaagcttccaaaggaactgtcttcagagacttttgacaagaccatcttaagagccctgaatcagggttccttgaaaagggaggaacggcgacatcctgacctagagcccatcctaaggcagctattttcaagttcatcacaagcttttctacaaagtcagaaagtacacagcttctttcagtccatatcatcagactccctacacagtatcaataacttacaatcctctctgaagacttctaagatattagaacacttaaaagaagacagctctgaagcttcaagtcaagaagaagatgtgttgcagcatgccataatccacaagaagcatactgggaaaagtcccattgtgaacaatattggtacaagttgttctccattggatgggcttaccatgcaatattctgaacagaatggaattgtggattggaggaagcaaagctgtaccaccattcaacacccagagcactgtgtgacctcggctgaccagcattctgctgaaaaacggagtttatcttcaataaataagaagaaaggaaagccacaaacagaaaaggagaaaattaagaaaactgacaacagattgaatagtagaataaatggtattagactctccactcctcagcatgcccatggtggtactgtgaaagatgtgaatttggacattggctctggacatgacacatgtggagaaacatcttcagagagttacagttctccatctagtccccgacatgatggaagagaaagttttgaaagtgaagaagagaaagacagagacacagacagcaattctgaggattctgggaatccatcaacaactaggtttacaggttacggttctgtcaaccagactgtcactgtcaagccacctgttcaaattgcttcactaggaaatgagaatggaaaccttttagaagatcccttaaactcacccaagtatcagcatatttcttttatgccaacgttacactgtgtcatgcacaatggtgcccagaagtctgaagttgtcgttcctgcacccaaacccgctgatggcaaaaccatagggatgcttgttcctagtcctgttgctatttctgcaataagggagtctgcaaattcaacccctgttggaatactagggccaacagcttgcactggagaatcggaaaagcaccttgagttactggcttcccctttacctattccatcaaccttccttccacacagtagtactcccgctttgcatcttacagttcagaggctaaagttgccaccaccacagggatcttctgagagctgcacagttaacatcccacaacaaccacccggaagcctgagcatcgcatcaccaaacactgcctttattcctatccataacccaggtagtttcccaggctctcctgttgctaccacggaccccatcacaaaatctgcatcccaagtggtaggactcaatcaaatggtgcctcaaattgagggaaacacagggacagtccctcagcctaccaatgtgaaggtagttcttccagcagctggcctctcagctgctcagccaccagcttcctaccccttaccaggctctccccttgctgccggcgtgttacccagccagaactccagtgtgctcagcacagcagcaacttctccccagccagcgagcgcaggtatcagccaggcccaggcaactgttcctcctgcagttcctacccacaccccaggccctgccccgagcccaagccctgccttgacacacagtaccgcgcagagtgacagcacctcttacatcagtgctgtggggaacacgaacgctaatgggacagtagtgccaccgcagcagatgggctcaggtccttgtggttcttgtgggcgaaggtgcagctgtgggaccaatggaaaccttcagctaaatagttactattatcctaatccaatgcctggaccaatgtaccgagtcccttcattctttactctgccatccatttgcaatggcagctacctcaaccaagcacatcagagcaatggaaaccaacttcctttttttctgcctcagactccatatgcaaatggactggtacatgacccagtcatggggagccaagccaactatggcatgcagcagatggcaggatttgggagattctatcctgtatatccagcacctaacgtagttgccaacaccagtggttcggggcccaagaagaatgggaatgtctcatgttacaattgtggtgtaagcggacactatgcacaggactgtaagcagtcgtccatggaggccaatcaacaaggcacttacagactgagatacgcacctcccctccccccttctaatgatacgttggattctgcagactgaaacgagtaaagcttgcctacttaatacactcaagtgtggggagtcatggggtgtggaggggaggaaaggaaaggtattttgtttctttgtctatacatttcctagatttctatgcagttgggatttttcatttctcttgtaccaatgtccaaaacaagaaagaatgcaatgcttttgagcctctggtctcctggttcaacaacaggcttatatgtatgatacatgtaatttaaaccttcagacaaacttaaatgttggtgcgtgcttttttttttttttttacactgaatacttgctgtgtgcaatgtttactgaatctttaaaactgtgtatttgaccttttttttacaacactggtgacagtcatatggttttgaaaaaaaaaagaaattttgcttcttcccagcttttctcactttcaccctaaacgacacttcctccccagccagcctcactctgtctccggcccgcagcaggagcagccagcagtgcattcaccccacttttgtaaactgctctgcatataaaccaagggcagaatgtttcaccctgatcttatgggaggaatcaaactcccaaaatagtgtgtatatatgtaataaacagcgtcacgtaaatacatatatgcagtgcttgttgtccaaatagaaatgaaaataagtggaagagagaggaagaagtcaaaccatatgaaactgaaaaaatatgacgtacgaaatggacaaaaagctttttctgaaaccaactttttacttccatcatccttttttagcctgttgcttcagagagacacaaagtgaacacactggtgtgaatgtcgctctctgtgtgcttgtgtttgtaatgaaagtctacagccaattttacttgtctaccaccgtgttgtgctcaaagagacactacttgagtgaagatttcttctttccctgtaccagctgttacagtgttacgttgtgtttaaaatgtgtatggtttattgcaatctgaacagagctatgggtttctaccataagtcaggttgtttgttccctaacctgtctctcatagcaaagtcacttttataacagtttaccactatgcttgattataatgtgaaaggcggaattctgagtgtgttaagatggtattaatcatgtcggtgtcatgtcactaagtttaatgctgctgtttttaaaaaaaaaaaaaagtttttttaaaaagccaatctatgtactaaattgcttccaggtaatttttgatttcctaaagtgcactgaggttatctggaagattgggtgtattttttggtgactgctgcattcatcagcaatgaacagtttccactgtatagtcctaggggtcagggggtgggggtttcattttccattcctcagcacagagcagaaatgatagatttttattgtttggagtaacgttggtatgcagcagaggaacgtaaacatttggtcttggttcagaagcctaacagattgctagacaagagaaaaaacttgaagaaaaaagaagcttaatttcatgcttcataagtagcatttatatttatagcaccaatgtacattttgaaactttctttcaggggtgggagttatggggaaggggtgggtgtgaaggggtagatgaaagctttaatttagaaagaaagttcaagtaaaggaaattattttgattaaatatattttatttgatctgggtatttttggaccacattattaaattaattgttaagctgcagttgagttgttcaagtgagagttttgataagccacttatgggccgcgttgtgaatcacttgccagttgtactttatggagcttattttatgatttaaaatactgtactgtacataggaggtatgttaccttctccttatttgtatgtttaccatatactttgatatttgaaatgttatgtactggaaaggccacttatatttctagaacagattggattttatgcaaccttttttccttgaattaacagc

SEQ ID NO: 488 - DNA, 1262 bp, Homo sapiens
  source 1..1262: mol_type = genomic DNA
cgtgtgtagttggcatctccgcgcgtccggacacccgatcccagcatccctgcctgcaggactgttcgtgttcagctcgcgtcctgcagctgtccgaggtgctccagttggaggctgaggttcccgggctctgtagctgagtgggcggcggcaccggcggagatgcctgggaagaaggcgcgcaagaacgctcaaccgagccccgcgcgggctccagcaggaccggcgggtacggcgggtacggcgagggaccaagccggatttgcgattgggatgcagctgcgtttcaccaggggcaaaaagctcctttcctcctctctttcctcctcgccacttgcccttccccggggccacgaggaacaagtgcaagtagctggaagtcgagtgtgctactcaactcaggagatttggagacaaactgaacttccggcagaaacttctgaatctgatatccaaactcttctgctcaggaacctgactgcatcaaaaacttgcatgaggggactccttcaaaagagttttctcaggaggtgcacgtttcatcaatttgaagaaagactgcattgtaattgagaggaatgtgaaggtgcattcatgggtgcccttggaaacggaagatggaatacatcaaagtgaatttctgttcaagttttcccagattatcattctttgggatgagagaacattataaaaccactttgtttattttaaagcaagaatggaagacccttgaaaataaagaagtaattattgacacatttcttttttacttagagaatcgttctagtgtttttgccgaagattaccgctggcctactgtgaagggagatgacctgtgattagactgggcggctggggagaaacagttcagtgcattgttgttgttgctgtttttggtgttttgcttttcagtgccaactcagcacattgtatatgattcggtttatacatattaccttgttataatgaaaaaactcattctgagaacactgaaatgttatactcagtgttgatttcttcggtcactacacaacgtaaaatcatttgtttcttttgactcaaattgtattgcttctgttcagatgatctttcattcaatgtgttcctgttgggcgttactagaaactatggaaaactggaaaataactttgaaaaaattggataaagtataggagggttacttggggccagtaaatcagtagactgaacattcaatataataaaagaacatggggattttgtataaccagggataataaaaa

SEQ ID NO: 489 - DNA, 1421 bp, Homo sapiens
  source 1..1421: mol_type = genomic DNA
aggcgggaggcgacgcctgcgcagtgcggtcgcggggctgtcgttgtcccgcgagccgccgaccaggcctcgaacgggatggcagaggaggtgagcaccctgatgaaggccacggtcctgatgcggcagcctgggcgggtgcaggagatcgtgggcgccctccgcaagggcggcggagaccggttacaggtgatttctgattttgacatgaccttgagcaggtttgcatataatggaaagcgatgcccttcttcttacaatattctggataatagcaagatcatcagtgaggagtgtcggaaagagctcacagcgctccttcaccactattacccaattgagatcgacccacaccggaccgtcaaggagaagctacctcatatggtggaatggtggaccaaagcacacaatctcctatgtcagcagaagattcagaagtttcagatagcccaggtggttagagagtccaatgcaatgctcagggagggatataagaccttcttcaacacactctaccataacaacattccccttttcatcttttctgcgggcattggtgatatcctggaagaaattatccgacagatgaaagtgttccaccccaacatccacatcgtgtctaactacatggattttaatgaagatggttttctccagggatttaagggccagctcatacacacatacaacaagaacagctctgcgtgtgagaactctggttacttccagcaacttgagggcaaaaccaatgtcatcctgctgggagactctatcggggacctcaccatggccgatggggttcctggtgtgcagaacattctcaaaattggcttcctgaatgacaaggtggaggagcggcgggagcgctacatggactcctatgacatcgtgctggagaaggacgagactctggatgtggtcaacgggctactgcagcacatcctgtgccagggggtccagctggagatgcaaggcccctgaaggcgcaggctccagcccggcctgcaggccgtggtgaggaggggcgcctccccagagtctgctcccccgtgaacacagagcagaggccagggtggccagcagtggctgggtccttccgcgcccctccgtcctcctttccctgagcaccttcatcaccagaggcttgaaggaaccccgccatgtggcagggcacaggcactgttcctggtgaaccttggaccacagcatgtcagtgctctagggattgtctactccagggattttcttcaaaatttttaaacatgggaagttcaaacaaatataatgtgtgaaacagatcaaaatttttaaaatgaaaaaaaagctgctctgattcaggggatgtgggtgggggtagaacctggacctcttggccctgggggcacatgggatgcttctaggaacacagtttgagaaccacc

SEQ ID NO: 490 - DNA, 3844 bp, Homo sapiens
  source 1..3844: mol_type = genomic DNA
agccattttgttccgcccgaggagaccctaagatggcggcgagggggacggtgaaggttgcctcccgcccgtccgggctctgatcctccgtctccccgtcccccggcggccggcccatggcctggcggaggcccgaaccatggacctccgcaccgccgtgtacaacgccgcccgtgatggcaagctgcagctgctccagaagctgctcagcggccggagccgggaggaactggacgagctgacgggcgaggtggccggcgggggaacgccgctactcatcgccgcccgctacggccacctggacgtggtggagtacctggtggaccggtgcggcgcgagcgtggaggccggtggctcggtgcacttcgatggcgagaccatcgagggcgcgccgccgctgtgggccgcctccgcagccggccacctggacgtggtgcggagcctgctgcgccgcggggcctcggtgaaccgcaccacgcgcaccaactccacgcctctccgcgccgcctgcttcgacggccacctggaggtggtgcgctacctggtcggcgagcaccaggccgacctggaggtggccaaccggcacggccacacgtgcctcatgatctcgtgctacaagggccaccgtgagatcgcccgctacctgctggagcagggcgcccaggtgaaccggcgcagcgccaagggcaacacggccctgcatgactgcgccgagtccggcagcctggagatcctgcagctgctgctggggtgcaaggcccgcatggaacgtgacggctacggcatgaccccgctgctcgcggccagcgtgacgggccacaccaacatcgtggagtacctcatccaggagcagcccggccaggagcaggtcgcagggggagaggctcagcctgggctgccccaagaagacccctccaccagccaggggtgtgcgcagcctcagggggctccgtgctgcagctcctccccagaggaaccactgaacggggaatcttacgaaagctgctgtcccaccagccgggaagctgccgtggaagccttggaattgctgggagctacgtatgtggataagaaacgagatctgcttggggcccttaaacactggaggcgggccatggagctgcgtcaccaggggggcgagtacctgcccaaaccggagcccccacagctggtcctggcctatgactattccagggaggtcaacaccaccgaggagctggaggcgctgatcaccgacccggatgagatgcgcatgcaggccctgttgatccgggagcgcatcctcggtccctcgcacccggacacttcctattacatccgttacaggggtgccgtgtacgccgactcgggcaatttcgagcgctgcatccgcttgtggaagtacgccctggacatgcaacagagcaacctggagcctctgagccccatgaccgccagcagcttcctctccttcgcggaactcttctcctacgtgcttcaggaccgggccgccaaaggcagcctgggcacccagatcggctttgcagacctcatgggggttctcaccaaaggggtccgggaagtggaacgggccctgcagctgcccagggagcccggagactcagcccagttcaccaaggcgctggccatcatcctccacctgctctacctgctggagaaagtggagtgcacccccagccaggagcacctgaagcaccagaccgtctaccgcctgctcaagtgcgcgcccaggggcaagaacggcttcacccctctgcacatggctgtggacaaggacaccacaaacgtgggccgctatcccgtgggcagattcccctccctgcacgtggtcaaagtgctgctcgactgcggggccgacccggacagcagggattttgacaacaacaccccgctacacatagcagcccagaacaactgcccggccatcatgaatgccctgatcgaagcaggggcccacatggacgccaccaatgccttcaagaagacggcctacgagctgctggacgagaagctgctggccaggggtaccatgcagcccttcaactacgtgaccctgcagtgccttgcggcccgggccctggataagaacaagatcccttacaagggcttcatcccggaagatctggaggcgttcatcgaactgcactgacctgcccagaacgcctgcaccctcacctctcccctctcctgctgagatgggggaaatccggctgcggcatagcagatgctcgttcttgcctccttcaggcaccaatcaggagaagggttctgcctcccatcccctctacctgcagacagggtcggaggtgttagcgagcctttggtgctagaagcctgcggggtcatgtgctaagaggacagtctttctccgggagcccgctcactcattctgagttaggaaaagacacaagaccttccccacatcctgtctgcctgggttagggaggcctttgccttgttacctagaggcggagggactgaagccattgcgttccttccctgctagaaacacaggaagaagttgaggactgtctgccttccctcgtccctttacctggccagataactccagccgctgaatacagtgttaggactgggggctcctgagatgagagtttgagattcagggaatgagaccacctctcatttcttccagcatgatcgcgccctgctcccgtgccaccgtagtccctggcagacaggcagggctctgcccagggcagcctgccacttgcatagctttcggttggtttggtgttctgtttatttaataagtgggcaggttgcaagcgttgcacagaaattctgagattttactgcctttttttttttttttaagaaagttgtttgttggactccataagtgaatttcaagcagtgaggattttgtggtgcctgagatggccgagggcacagggagtgagctgtatgtgtgaggaatttggtgagcgagataaaagtccacggtgtcaacccctaaaacatgggtgaccgtacatttttatacatctccactctacggccttttacaggctttccgattttacaggcctttccaagtttccattctccttagagagagaactgtgcttccaaacagaaatcaggagtgaccacaaagcctgaaaacactttgccacccagcaaagaactggcacaattggtttgggtctgcattgccatagtgcccgagttaaaactgcaggccactctgccttgcagtggcctctgatttcattgtgggtgcatccacaggtggcccgagctgttctttcagctgctccaaggattgagacccaagtcatcatgaaaaaggcccaagtacagtcttaatgcgataaatccactagctaagacgtcgagtgccaagaccagccttccagccgaggtttggacaaagtctcaggttcccgtgactcagggtaaggtgctggggctgccagaggacctgccccagcaagatttttgtcaagagcgagactccatcagcccaggcagacgggagcaggttcttggccagcgtagacagcagcaaacagcagcagggaagccattctcactgcatcctccctgcagtagccacggccaggcccttaggaggagcagtgaccgggggtgtccagaaatatcctgtccctggatggaaactaggtctcgtttggatttttttttttttttgccgtgttaggaaattatttattaatttacaagacaggttttaactcagccgaggtgggaaatggtgtccctgtccctcccaaagcacagagcacagaaatgaggccgtttacatggcgagtctccgtgctggtgtttaagtcattaaaaagatactcaaagagaa

SEQ ID NO: 491 - DNA, 852 bp, Homo sapiens
  source 1..852: mol_type = genomic DNA
gtgacagagcgctttacgacagttgctttgaggcagtaccggaggagaaagatggcggctaccttactagctgctcggggagccgggccagcaccggcttgggggccggaggcgttcactccagactgggaaagccgagaagtttccactgggaccactatcatggccgtgcagtttgacgggggcgtggttctgggggcggactccagaacaaccactgggtcctacatcgccaatcgagtgactgacaagctgacacctattcacgaccgcattttctgctgtcgctcaggctcagctgctgatacccaggcagtagctgatgctgtcacctaccagctcggtttccacagcattgaactgaatgagcctccactggtccacacagcagccagcctctttaaggagatgtgttaccgataccgggaagacctgatggcgggaatcatcatcgcaggctgggaccctcaagaaggagggcaggtgtactcagtgcctatggggggtatgatggtaaggcagtcctttgccattggaggctccgggagctcctacatctatggctatgttgatgctacctaccgggaaggcatgaccaaggaagagtgtctgcaattcactgccaatgctctcgctttggccatggagcgggatggctccagtggaggagtgatccgcctggcagccattgcagagtcaggggtagagcggcaagtacttttgggagaccagatacccaaattcgccgttgccactttaccacccgcctgaatcctgggattctagtatgcaataagagatgccctgtactgatgcaaaatttaataaagtttgtcacagagaatctttgta

SEQ ID NO: 492 - DNA, 1665 bp, Homo sapiens
  source 1..1665: mol_type = genomic DNA
gttgcagcctgctgcgcgcccaggggtcccgcgggttttcgggcgcagggtggcgcccgcggcaggcggcggccatgaacttctccgaggtattcaagctctccagcttactctgcaagttctccccggacggcaagtacctggcttcctgtgtccagtaccggttagtggtccgggatgtgaacacccttcagatccttcagctgtacacgtgcctagaccagatccagcacatcgagtggtcggcagactcgctcttcatcctgtgcgccatgtacaagcgagggctggtgcaggtctggtctttagagcagcccgaatggcactgcaaaatagacgagggctcagccgggctggtggcctcgtgctggagcccggacgggcgccacattctcaacaccacggaattccatctgcggataaccgtctggtccttgtgcacaaaatccgtgtcttacatcaaatacccgaaagcttgtctgcagggaatcaccttcaccagggacggccgctacatggcgctggcagaacggcgcgactgcaaagattacgtgagcatcttcgtctgcagtgattggcagctcctgcggcattttgatacggacacccaggatctcacagggattgagtgggccccaaacggctgtgtgctggcagtgtgggacacctgcttggagtacaagattctgctgtactcattggatggccggttgttgtccacgtacagcgcttacgagtggtccctgggcatcaagtctgtggcctggagccccagcagtcagttcctggcagttgggagctatgatggaaaggtgcgcatccttaatcacgtgacttggaaaatgatcacggagtttgggcatcctgcagccattaatgatcccaagatagtggtgtataaggaggccgagaagagcccacagctgggactgggctgcctctccttcccgccgccccgggccggggccggccctctcccgagctcagagagtaaatatgagatcgcctctgtcccagtctccttacagacactgaaacctgttaccgacagagcaaacccgaaaatcggcataggaatgctggcatttagtcctgacagctacttcctggcgacaaggaacgacaacattcccaatgccgtctgggtctgggacattcagaagctgaggctgttcgcggtgctcgagcagctgtccccagtgcgcgcatttcagtgggacccgcagcagccgcggctggccatctgcacgggaggcagcaggctctacctgtggtccccagcgggctgcatgtcggtgcaggtgcctggggaaggcgactttgcagtgctctctctgtgctggcatttaagcggagactcgatggccctcctcagcaaggatcacttctgcctctgcttcctggagacagaggcagtggtcggcacagcctgcagacagctgggcggccacacgtagcagcggtgcactaacgtgtgcagaaacagggctactctgtgtttccagtgtgggaaaaaacacagcttcaccaggaggttctccactgtggtggtctggattcagtgattgattctatttttctatagcaaagcatttttgtaaatatgtatggtataaaactgtagttttattatttaaaataaatacttgctgatttatacaacta

SEQ ID NO: 493 - DNA, 1655 bp, Homo sapiens
  source 1..1655: mol_type = genomic DNA
cctggaccagggggacatctgagaagcatgatgttgagtgccagacagctaggtctccaaagttgggctcgttgctggagtctgccccctcaaccgctgaattcttgctgggagtagtagcagtttgggaatgccatctgcagcatggagctggggttgagcttggaccaccccaagacctggggtggatcttaagggtcagcttgagcctaggctctcgagtcctgacatcatcctctaccgccacgctttccagctgtcagccttggtctccatctggttccttgagggtgtggcctctgcgtcctgctatcacccttccttgtctaaaccttcccacctgagtggagaggaacttgggggaaaatctctaagcatgggctcttcctgctgtcctatgcttcctatcccctagggttagtggtgcgtgttgggtggtggagcgagggatcccttggagcaaggttcttagagaactttgggtctgaaagcagctcaaaccttccaaagccccaagcttccctgtgctattagagcacctcctcctggagagagcggctctcgtggctggggagttggatgcaccaaacctgtgtgcggctggagagggaggcttctgccagaccctctcccgggcctgtcctgccacccaggcccctccccagtctcacactgagctccagatcagggaagggccgaaaaggacgatcagggcagccgcagaaggggcgccctgcgtgggacgggtccgttgcgcgcctggtaaccgagggggaagggaaggggcctctggcgtgcggggcggtgtcgcgcaggtcccaccccgcctgcccgcgccgcccattggtcccgagcgcgatgacttggcgggcggagcaggaaggaaaccgctcccgagcacggcggcggcgtcgtctcccggcagtgcagctgccgctaccgccgccctctgcccgccggcccgtctgtctacccccagcatgagcggcctgcgcgtctacagcacgtcggtcaccggctcccgcgaaatcaagtcccagcagagcgaggtgacccgaatcctggatgggaagcgcatccaataccagctagtggacatctcccaggacaacgccctgagggatgagatgcgagccttggcaggcaaccccaaggccaccccaccccagattgtcaacggggaccagtactgtggggactatgagctcttcgtggaggctgtggaacaaaacacgctgcaggagttcctgaagctggcttgagtcaagcctgtccagagttcccctgctggactccatcaccacactccccccagccttcacctggccatgaaggaccttttgaccaactccctgtcattcctaacctaaccttagagtccctcccccaatgcaggccacttctcctccctcctctctaaatgtagtcccctctcctccatctaaaggcaacattccttacccattagtctcagaaattgtcttaagcaacagccccaaatgctggctgcccccagccaagcattggggccgccatcctgcctggcactggctgatgggcacctctgttggttccatcagccagagctctgccaaaggccccgcagtccctctcccaggaggaccctagaggcaattaaatgatgtcctgttcca

SEQ ID NO: 494 - DNA, 5897 bp, Homo sapiens
  source 1..5897: mol_type = genomic DNA
gcccccgccgggcggctgagggggcggagcctcagccgctgtggatggggagtggaggcggaggggagcggagcccggagcgtcgtggaaagcattggacacatttccaccatgctaatggcattttaaatatatttggcaattttcccaattttttactgaagaaaactgtaagtttatacttgaggactgaagtgtgactctgccgattatcaggctttcaagatgaatctggaaaaactcagcaagcctgaactcctgacactatttagtattcttgaaggagagcttgaagcaagggaccttgttatagaagccttaaaggcccaacacagagatactttcattgaagaacgctatggaaaatataacatcagtgatcctttaatggctctacagagagattttgaaacactgaaggagaaaaatgatggcgaaaagcagccagtctgcacaaatccactctctattcttaaggttgtgatgaagcagtgcaagaacatgcaggagcgcatgctgtcccagctggctgctgctgagagcaggcaccgaaaggtgatcctagaccttgaggaagaaaggcagcggcatgcacaggatacggctgaaggagatgatgtcacctacatgctagagaaggaaagagagaggctgactcaacagttggaatttgaaaaatcccaagtgaaaaagtttgaaaaagaacagaagaagctctctagtcagctggaagaggagcgctcccgccacaagcagctctcatccatgctagtgcttgagtgcaagaaagccaccaacaaggcagccgaggaaggacagaaggcaggagagctgagcctgaaattggagaaggagaagagccgggtgagtaaactggaagaagagttggcagctgagagaaagagaggcttgcagactgaggcccaggtagagaagcagttatcagagtttgacatcgaaagggaacaactgagagcaaaactgaaccgagaagagaaccggaccaaaaccctgaaagaagaaatggaaagtttaaagaagatagtgaaggacctagaggcttcccaccagcacagtagccctaatgagcaattgaagaaaccagtaaccgtgtccaaaggcacagcaactgagcctctcatgctaatgtctgtgttttgccaaacagagagttttccagcagaaagaacccatgggagcaacatagccaagatgacaaacactgggctgcctggtcctgccactcctgcttactcatatgcaaaaaccaatggccattgtgacccagagatacaaactaccagggagctgactgcaggcaacaatgtagaaaaccaggtgcctccacgggaaaaatctgtggcattggcccaagagaaaccagtggagaatggtgggtgtcctgtggggattgagactccagtcccaatgcccagtcccctctcttccagtgggagctcactgtctcccagcagcactgcctcctcctctctaacatcctctccttgctcttcgccggtactcactaagcgtttattggggtcatcagctagcagccctggctaccagtcatcgtaccaagtagggatcaaccaacggttccatgcagctcgccacaaatttcagtcccaagcagatcaggaccaacaagccagtggcctacagagccctccatccagggatttatcccccaccctcatagacaactctgccgccaagcagctggcccgaaacacagtcactcaggtgctctccagattcactagccaacaagggccaatcaagccagtctctcccaacagctctccctttggcacagactatcgaaatctagccaacactgccaatccaagaggtgacacaagccattcacctactccagggaaagtgtccagtcccctgagccccctgtctccaggaatcaagtccccaaccatccccagagctgagagaggaaaccctccacccatcccacccaagaaacctggcctcaccccttctccatctgctaccactccattgaccaaaactcattcccaggcagcctctttgaccactgcagaagaccttgccagcagctgctcttccaatactgttgtagcaaatggtaaggatgttgagttacttttgcctaccagcagctagtccctaggagggagtctccacgtttgacattccatcagatttcgtccaaaagctcagtcagacttctgagtcagattatgttatttattttgatagtagctgaaaccatctgtataatacatttagtatatttcaccattttgtatttttttaagtagaaactgagtagtttggatttttatggctcacatctttttactgaagccagaaaggcacctcaaagatgtctcaagctcagcagtcaccgtcatgttgtgatgaagaaagcgaatcaccaggtggtgatttgctatctatttgagaactagaatcactcaacactcattttgaattatgcagaagtggttcatgcagatttttattccagatgaacatgttttaaaagtgcctgaaatatgactgccatatgaatgtgattctgcagcaaaaaacacaaaatagatcatttaattacagaaaatgagatcctctgtgaattctgaatgttaaaaaccaacactgcttttaatcctcttttaatgttttaatacaagctttgtgttctgaaacaaggctgcataagtagaatgggaatccttctaaaggtgggtgtgaactcaccacaagctgagctttatagagcccttgagaaaccctcctgagcactaagcagttggggtgctgattttcttgtacttttgaaaaattaagtcactcccagtttcctgcataagttcttgaacagaatgaaatcacatctccattcaaaaaatgtctcaagcatctactgttgtgtaaggaacttctgattctgattgctgttacttgaataggaaatggttactcattctgtataaaagttttgcaagagaatgaattttttattctgtaatcaaaaagcaataacttgaaattcactctgtaatattataggtcagtcagaattatacaagttttaccaaattgttacacttattctccaagctgccagaacctggtatctgtatctgtaaaaccaaattaacttttgcttaaatgggaagtatacatatatctgtatagatacattacccctttacatgtttaacatacacacacttaaacacataaatactagtgtgattatatctttggagtttgcaatatagcataaaggacaagtagaactgcacattaagattacctaccgaagcaactagatgtggctgggacacaatcaaaggaggaattttgtccacaggaaggtgaggaaattccaaatgaagcctagatcttcagtatcataaaaaggcagagctggccaggcacagtggctcatgcctgtaatcttatcactttgggaggctgagatgggaggatctcttgagaccaggtgttcaagaccagcctcatcaacatagtgagaccccatctctattaaaaaaataaataggcagagctaaactaaccccagtgtcacaaaactcaactggtcatataaatgagtgaaacaggcctctcacacaagcgatgtaaaacagctgggagcagtgggagctgtggcaaactaaagtgcccaagccgcatttaaaaagggcatctgttcagctccatctgcttgctgcggtgcaagaatgctaaaccaggattaccagttcttcacattttttgaaatccaaattttcatgagaaacattctcatttttaaatatcaagaagtgattttaaaatgtttaaatggtgctggttaaacaaacacgtctgcagctggatttagcttgcaagctgccaagttgcaacctctttcattctagaaacttctgtcattttcatcatagcaagtctatgcggacaaaagcctccaaactttccaactgtgtaggccagtacagctggcaaggttcatagaatataatggctatccccctctgccaaataagactatccacaacccagctcagacacagtggttatatgattttgtgtccatacaggagaggccttggtgtcttcacatacattctctgagccaacatctatccagcagccctgacctcctgctataatttaagtctatttccttttaatctaataagagttgatagtaaaaaggcaggtgatggaaatcagtgtataaatcacaatggagtatattggcaactccacagcttatagtttgataaaggcaaatacatgaaaaataaaaatgctactaatgccccaaggtgtctatcaaaatgatgtagggggtatcttaaactgtccaaggcaatcatgcattgaactttattcctatgcagagccaaaacgaatagtgttgataaaatagctaaactttctaaactggagaggaggctacagtgccagagagttattgtctcttttgctttaaatggtaatcttaaaagttgcattgtgctcttcctttgttttgggatagatatatatagagagagatactataaggaagtttatttcttaggaagtgcactgaataatgtatttcttttacagtgtaatatgggggtggggatatgcgaaagaaatgtgtatttttgctagttgcctaccttctgagataaataagcacaatcttgcaatggatccaataacccagttaggtattatagattagtatttaagtttgctgtagattgtgtgtgtgtgtgctaagtaaaagttccatgattcacaattttagtattaacccatgttgcaaaagctgttactggccaacagattgtaatgatgtgtaccatataacacaagcattaactaggcattaacgtttgtaaagccaaatataccatgcagaagtcttcatttttatagcagactgcattaaaacaagttaaatcttgctgtttggggggaaatagtcttgtttgtacaaagtgaaaaatggcacaatttgggcatattttgttgggaagagggggtggtgtagagggagcacttgactgtggctttgacaaaacaaatgaagtcaatgacccatccaggttagactccataaggaactaagacattgattttctttagagtcttagagctggaaaaagcctttacaataatccagtctgtgattttttaaaccttttggtggttctggacctttttgagaatcttagaaaagccatggagtttatccctagaaaaatgaatatgcctatatgcaaaatttgtttgatggcttcataggatccaaagaccctgaagccatccatggctcatgtatttctgcttaagaaagcataatcttgttctgctctctcattttacaaatgattaatgcatcccttttcaactactccagcgctgttgctgctgcaatgttagcaaatgcaagccagagagaagcacttgaaaatcctttgatgtctaaaaaatgttcaaatagtgtggatgtttacatatctgaagttttcagcatttaagcaaattaatgatcatttcaacaaatactagcatatccggtttcccttaatagcctgtcagcagtgctgccttgtcaatttgtgtgtgtgtgtgtgtatgtgtgtgtgtgtgtgaattcataaggagtgcttctgatgcttagtccttgaaatggaacttcaactgtctttcaaaacactggcttcaaaataggatgtgttttcctaatgaatcagaagtgggcaatgagcattgttccacaggaataatttttaatttaatttctataaaactagttgagaaatgagagcctgtccacccaccatttgtgtatcagtggccaattcattagtaaaaataaaggaggggaaaggaga

SEQ ID NO: 495 - DNA, 3471 bp, Homo sapiens
  source 1..3471: mol_type = genomic DNA
cagattacacttggttgactactccggagcagccactaagagggatgaacaggcctgcgtggaaattgaatgagattcttggaagctcgaagtctggctgtggccatgggagatacagtagtggagcctgcccccttgaagccaacttctgagcccacttctggcccaccagggaataatggggggtccctgctaagtgtcatcacggagggggtcggggaactatcagtgattgaccctgaggtggcccagaaggcctgccaggaggtgttggagaaagtcaagcttttgcatggaggcgtggcagtctctagcagaggcaccccactggagttggtcaatggggatggtgtggacagtgagatccgttgcctagatgatccacctgcccagatcagggaggaggaagatgagatgggggccgctgtggcctcaggcacagccaaaggagcaagaagacggcggcagaacaactcagctaaacagtcttggctgctgaggctgtttgagtcaaaactgtttgacatctccatggccatttcatacctgtataactccaaggagcctggagtacaagcctacattggcaaccggctcttctgctttcgcaacgaggacgtggacttctatctgccccagttgcttaacatgtacatccacatggatgaggatgtgggtgatgccattaagccctacatagtccaccgttgccgccagagcattaacttttccctccagtgtgccctgttgcttggggcctattcttcagacatgcacatttccactcaacgacactcccgtgggaccaagctacggaagctgatcctctcagatgagctaaagccagctcacaggaagagggagctgccctccttgagcccggcccctgacacagggctgtctccctccaaaaggactcaccagcgctctaagtcagatgccactgccagcataagtctcagcagcaacctgaaacgaacagccagcaaccctaaagtggagaatgaggatgaggagctctcctccagcaccgagagtattgataattcattcagttcccctgttcgactggctcctgagagagaattcatcaagtccctgatggcgatcggcaagcggctggccacgctccccaccaaagagcagaaaacacagaggctgatctcagagctctccctgctcaaccataagctccctgcccgagtctggctgcccactgctggctttgaccaccacgtggtccgtgtaccccacacacaggctgttgtcctcaactccaaggacaaggctccctacctgatttatgtggaagtccttgaatgtgaaaactttgacaccaccagtgtccctgcccggatccccgagaaccgaattcggagtacgaggtccgtagaaaacttgcccgaatgtggtattacccatgagcagcgagctggcagcttcagcactgtgcccaactatgacaacgatgatgaggcctggtcggtggatgacataggcgagctgcaagtggagctccccgaagtgcataccaacagctgtgacaacatctcccagttctctgtggacagcatcaccagccaggagagcaaggagcctgtgttcattgcagcaggggacatccgccggcgcctttcggaacagctggctcataccccgacagccttcaaacgagacccagaagatccttctgcagttgctctcaaagagccctggcaggagaaagtacggcggatcagagagggctccccctacggccatctccccaattggcggctcctgtcagtcattgtcaagtgtggggatgaccttcggcaagagcttctggcctttcaggtgttgaagcaactgcagtccatttgggaacaggagcgagtgcccctttggatcaagccatacaagattcttgtgatttcggctgatagtggcatgattgaaccagtggtcaatgctgtgtccatccatcaggtgaagaaacagtcacagctctccttgctcgattacttcctacaggagcacggcagttacaccactgaggcattcctcagtgcacagcgcaattttgtgcaaagttgtgctgggtactgcttggtctgctacctgctgcaagtcaaggacagacacaatgggaatatccttttggacgcagaaggccacatcatccacatcgactttggcttcatcctctccagctcaccccgaaatctgggctttgagacgtcagcctttaagctgaccacagagtttgtggatgtgatgggcggcctggatggcgacatgttcaactactataagatgctgatgctgcaagggctgattgccgctcggaaacacatggacaaggtggtgcagatcgtggagatcatgcagcaaggttctcagcttccttgcttccatggctccagcaccattcgaaacctcaaagagaggttccacatgagcatgactgaggagcagctgcagctgctggtggagcagatggtggatggcagtatgcggtctatcaccaccaaactctatgacggcttccagtacctcaccaacggcatcatgtgacacgctcctcagcccaggagtggtggggggtccagggcaccctccctagagggcccttgtctgagaaaccccaaaccaggaaaccccacctacccaaccatccacccaagggaaatggaaggcaagaaacacgaaggatcatgtggtaactgcgagagcttgctgaggggtgggagagccagctgtggggtccagacttgttggggcttccctgcccctcctggtctgtgtcagtattaccaccagactgactccaggactcactgccctccagaaaacagaggtgacaaatgtgagggacactggggcctttcttctccttgtaggggtctctcagaggttctttccacaggccatcctcttattccgttctggggcccaggaagtggggaagagtaggttctcggtacttaggacttgatcctgtggttggccactggccatgctgctgcccagctctacccctcccagggacctacccctcccagggaccgacccctggcccaagctccccttgctggcgggcgctgcgtgggccctgcacttgctgaggttccccatcatgggcaaggaagggaattcccacagccctccagtgtactgagggtactggcctagccatgtggaattccctaccctgactccttccccaaacccagggaaaagagctctcaattttttatttttaatttttgtttgaaataaagtccttagttagccacttgtgtcatttccaggttttctgggggagtgcagggggagatgggtgatgaggtatgaacggatgcctcagtgtccaagatacaaaaggcactacatagaagtttgctttttccctgcctgtcttggtcactaccacctcttccctgagaagggcgggccttccatgttctctcacccgcttcaactccacat

SEQ ID NO: 496 - DNA, 6626 bp, Homo sapiens
  source 1..6626: mol_type = genomic DNA
ggggggagtcggcgtctctctcccccgcgccagctcccgtacacggagccgcattccttggcccccccacccccctccctcggggcccccccgcccccctcgggaaaaaaatccaccccgaatcactcgaacccgagggaggcttcctttcacccttggggagacgagctttcaacggttacctcttcttcgtctccccccaagcccccgtcccctccccctgctcccacccccttctggcgccgggtgtaaggtccctttaaggcgacggcgccttcctcgggtcagactaccggcggcgacgaccacaggagcatggcggacaccgacctgttcatggaatgtgaggaggaggagttggagccatggcagaaaatcagtgatgtcattgaggactctgtagttgaagattataattcagtggataaaactaccacagtttctgtgagccagcagccagtctcggctccagtgcccatcgctgcccatgcttctgttgctgggcacctctctacatccaccaccgttagtagcagcggggcacagaacagcgacagtacaaagaagactcttgtcacactaattgccaacaacaatgctggcaatcctttggtccagcaaggtggacagccactcatcctgacccagaatccagccccaggtctgggcacaatggttactcaaccagtattgaggcctgttcaggtcatgcagaatgccaatcatgtgactagttcccctgtggcctcacaaccaatatttatcactacgcagggatttcctgtaaggaatgtccggcctgtacaaaatgcaatgaatcaggttgggattgtgctgaacgtacagcaaggccaaacggttagaccaattacactagttccagccccaggtacccagtttgttaagccgacagttggagttccacaagtgttctcccagatgacccctgtgaggccaggctccacaatgcctgtgaggcccaccaccaacaccttcaccaccgtcatcccggccactcttaccattcgaagcaccgtcccacagtcccagtcccagcagaccaagtccactcccagcacttctaccactcccactgccacacagccaacctcactggggcaactagctgttcagtctccaggccagtcaaaccagaccacgaatcccaagctagctccctccttcccctctccacctgcagtgagcattgccagctttgtcactgtgaagcgacctggtgttacaggcgaaaatagcaatgaagtggccaaattggtgaatacccttaacaccatcccttccctgggccagagtcctgggccagtggtggtgtccaacaacagctctgctcatggctctcaaagaaccagcggacctgagtcttcaatgaaagtgacctcttccatcccagtatttgacctccaggatggtggacggaaaatatgtccacgatgtaatgctcaatttcgtgttactgaagctttgagaggtcacatgtgttactgttgcccagaaatggttgaataccagaagaaaggaaagtccctggattcagaacccagtgtcccatcagcagcaaagcccccatcccctgagaaaacagctcctgttgcttccacaccctcttctacacctattcctgctctgtcaccgcctaccaaagtaccagaaccaaatgagaacgtgggcgatgccgtccagaccaaactcattatgcttgtagatgacttctactatggacgggatggtggcaaagtagcccagctcacaaatttccctaaggtcgccacatctttccgatgcccacattgtaccaaaaggctaaaaaacaatattcgattcatgaaccatatgaaacaccacgtagaactcgatcagcagaacggtgaggtagatggtcacactatctgccagcactgttaccgccagttttccactcccttccagcttcagtgccacttggaaaatgttcatagtccctatgaatctactaccaagtgcaagatctgtgaatgggcgtttgaaagtgagccactatttctccagcatatgaaggatactcataagcctggagagatgccttatgtttgccaggtgtgtcaatatcgctcctcactctactctgaggtagatgtccattttcggatgatccatgaggatacccggcatctgctctgcccttattgcctgaaggtcttcaaaaatggcaatgcattccaacagcattacatgaggcaccagaagagaaatgtttatcactgcaacaaatgccggctgcagtttctctttgccaaggacaaaattgaacacaagcttcaacaccataaaaccttccgtaaacccaagcagctggagggcttgaaaccaggcaccaaggtgacaatccgggcttcccgagggcagccacgaactgttcctgtatcctctaatgatacacctcccagcgccttgcaggaggcagcaccgctgacctcctcaatggaccctctgcctgtcttcctttatccccctgtccagcgcagcatccagaagagagctgttaggaaaatgagtgtcatgggccggcagacatgcctggagtgcagcttcgagatcccagacttccctaatcatttccctacttacgtacactgctctctgtgtcgctatagcacctgctgttctcgagcttatgccaaccacatgatcaacaatcatgttccacggaagagccccaagtatttggctttgtttaaaaattctgtgagtggaatcaagctggcctgcacttcatgtacctttgttacctctgtgggcgatgctatggccaagcatttggtattcaacccctctcacagatccagcagcatcctgccacggggactcacttggatagctcactcaaggcatggccagactcgtgaccgagtgcatgaccggaacgtgaagaatatgtaccctcctccttccttccccactaacaaagctgccactgtgaaatctgcgggggccaccccagctgagcctgaagagctactaactcccttagccccagcactcccatcaccagcctcaactgcaaccccaccaccaacccccactcacccgcaggctttagcccttccaccgctggctacagagggagccgaatgtctgaatgttgatgatcaggatgaagggagcccagtcacccaagaacctgagctagcatcaggtggtggtggtagtggtggagttggcaaaaaggagcagctgtctgtgaagaagcttcgagtagtactgtttgctctatgctgcaatacagaacaggcagctgaacacttccgaaatccccagcgacgtattcgccgttggcttcgacgtttccaggcctcccagggggagaatctagagggcaaatatctgagctttgaggcagaagagaaactggctgagtgggtgctaacccagcgcgaacaacagctacctgtaaatgaggagaccttgttccagaaggccaccaaaataggacgttctttggaaggggggtttaagatctcctatgagtgggctgtgcgtttcatgctgcggcaccacctgactccccatgcccggcgagctgtggcccacaccctacctaaggatgtagcagagaatgcaggactcttcattgattttgtacaacggcagattcacaaccaggacttacccttgtctatgattgtggctattgatgagatctctttgttcctggatacagaggtgctgagcagtgatgatcgaaaggagaatgccctgcagacagtgggcacaggggaaccttggtgtgatgtagtcctagccattctggcagatggcactgtccttcccaccctggttttctacagagggcagatggatcagcctgctaacatgccagactccatattgctagaggcaaaggagagtggctacagtgatgacgagatcatggagctgtggtcaactcgagtgtggcagaagcacacagcttgccagcgcagcaaaggcatgcttgtgatggactgtcatcgcactcacttgtcagaagaggtactggctatgcttagtgcctctagcactttgcctgcagtggtcccagcaggctgtagctccaaaattcagccattagatgtatgcatcaaaagaactgtcaagaacttcctgcataaaaaatggaaggaacaggctcgggaaatggcagatactgcatgtgattctgatgtcctgcttcagctggtgcttgtctggctgggtgaagtgctaggtgtcattggggactgtccagagctagttcagcgctccttcctggtggctagtgttctgcctggccccgatggcaacattaactcacctacaagaaatgctgacatgcaggaggagctaattgcctccctagaggagcaactgaagctgagtggggaacattctgagtcttccactccacgacccagatcatctcctgaagagacaattgagcctgaaagtcttcaccagctctttgagggtgaaagtgagaccgagtctttctatggctttgaagaagctgacctagatctgatggagatttgagtgttggggtcatgagggggtgtggagtgagggtgggaacatgtgagggagggtaaaggggcttagggaaaagggggcataccaggtggggtatttggtttctattttttaattttataccaccactcccccctgaagttgacttacacttccctgtggatttgtggattaattaggaaaaccaatagtaatcacgtctgagccaaggagctggcccattggtcattcacttctgctaaaaacaggtttttgtgactttttttttttttaaatttaaatcactgtgtttggtatttttctgacaaaattaagaaaaagaaaaaaaattatttgtgggcaaatgttaaatttttttgtttccccttttacctcaattgtatcatagtactgggtttttttgtttgttttattgtgtggccaatgtctttgggcatgatgctatctaatcattgttaatgtgagaacatttctgaagatgggaaagacaaattatgtagctcacaaactggtttattatatatatggataaaaaacttttttcattgtggtcttaacacttttatataaaaatgaaaatggaaaaaaagtcccactgaactctctcttccttctccttttctttccttccctctccagagatgttggtttctacagcaaccctagatataaaattgtggctttaaaaatgcatgaaaccacctttaattatccagaatgaatagatttgtcttttcctcaccaccttccctccaaaacatgacataaacaatattttttgcacttgtgatccttggcccctttccccattctcaacaccatccatccctctggacaaaggatcatacaggtgttattagcaagcaagagatactgaagcgatcaaacagttttagggtggaagccattcccagtttgagtcttcatcctgtaagcccccaggggcagtccctgctttactgaacttcatcctgttagatggagagcatgcctgtttaagggattactggtcctacagccaggagctaattgttcaagaagtgttgaactttaaaaagacaagaccacttgttgaaatccagcgtgctctgtggctttcccctatttctcttaatacttagggaagaatctgacaggaagaagcgcacaggggtgtgcacaaagaaaatgacatgaatctttatttttcactgccagcttcaaggaaagaaaattttttctacaatttgcatgagggatttttttaattgtatgtactcatggttgtaaaccaaaacgtactgtaccgtacagagaaaaggagcaaaaaaccaagtcttctgtttatcctgaggctttccacaatgttcccctcctgtgagccaaggaggcaaactgcacaagcttgtaaatggttcgtctttaaaatgtacataagtggaacatttaataaaatgaggggaaatggatttataaacttgttttttttctaggtgaccctgtttaataggctttcacagactggggaatgctcaagatgtgatgggcctggtggtacaggtgtgacatttgttaccacccatttctcccaccccaccctgcttttttgtttgtttgttttttcatcccccagcacactataatatagtgaactggaaaagtcccttccagaaacagcttggccagctttgtgaacctttgacatctgaaaacaaccaaggatccatctgggcttctcttccccagctttttgcctgatgccattttattgacagacaatggactttgaagtcagcctttgcctttgagaaagttcaagaactatggttggtcacgtctatctacaacctaatcctactctttggtagtctctgcagcagccacagccttagcagagctggggttcctgtcttctgcacacgattgactttcttgatgggtaattttttttaagattataccaacagtggatcagctgggttttggccaggaagttgtctttgtggactctgcctgcatggcttagtagtagaaggaaatttttttttggttttgttttttataattcagtttaatcaataaacatgtatttattgactgtt

SEQ ID NO: 497 - DNA, 1902 bp, Homo sapiens
  source 1..1902: mol_type = genomic DNA
actcctcacaccacttaacagccacttgtttcatcccacctgggcattaggttgacttcaaagatgcctcagttactgcaaaacattaatgggatcatcgaggccttcaggcgctatgcaaggacggagggcaactgcacagcgctcacccgaggggagctgaaaagactcttggagcaagagtttgccgatgtgattgtgaaaccccacgatccagcaactgtggatgaggtcctgcgtctgctggatgaagaccacacagggactgtggaattcaaggaattcctggtcttagtgtttaaagttgcccaggcctgtttcaagacactgagcgagagtgctgagggagcctgcggctctcaagagtctggaagcctccactctggggcctcgcaggagctgggcgaaggacagagaagtggcactgaagtgggaagggcggggaaagggcagcattatgaggggagcagccacagacagagccagcagggttccagagggcagaacaggcctggggttcagacccagggtcaggccactggctctgcgtgggtcagcagctatgacaggcaagctgagtcccagagccaggaaagaataagcccgcagatacaactctctgggcagacagagcagacccagaaagctggagaaggcaagaggaatcagacaacagagatgaggccagagagacagccacagaccagggaacaggacagagcccaccagacaggtgagactgtgactggatctggaactcagacccaggcaggtgccacccagactgtggagcaggacagcagccaccagacaggaagaaccagcaagcagacacaggaggccaccaatgaccagaacagagggactgagacccacggtcaaggcaggagccagaccagccaggctgtgacaggaggacatgctcagatacaggcagggacacacacccagacacccacccagaccgtggagcaggacagcagccaccagacaggaagcaccagcacccagacacaggagtccaccaatggccagaacagagggactgagatccacggtcaaggcaggagccagaccagccaggctgtgacaggaggacacactcagatacaggcagggtcacacaccgagactgtggagcaggacagaagccaaactgtaagccacggaggggctagagaacagggacagacccagacgcagccaggcagtggtcaaagatggatgcaagtgagcaaccctgaggcaggagagacagtaccgggaggacaggcccagactggggcaagcactgagtcaggaaggcaggagtggagcagcactcacccaaggcgctgtgtgacagaagggcagggagacagacagcccacagtggttggtgaggaatgggttgatgaccactcaagggagacagtgatcctcaggctggaccagggcaacttgcataccagtgtttcctcagcacagggccaggatgcagcccagtcagaagagaagcgaggcatcacagctagagagctgtattcctacttgagaagcaccaagccatgacttccccgactccaatgtccagtactggaagaagacagctggagagagtttggcttgtcctgcatggccaatccagtgggtgcatccctggacatcagctcttcattatgcagcttcccttttaggtctttctcaatgagataatttctgcaaggagctttctatcctgaactcttctttcttacctgctttgcggtgcagaccctctcaggagcaggaagactcagagcaagtcacccctttgtactgaattgtcctcatcttgtggggggtttcaggactatttttatctctgacatctctctattgccccatctaccctaatgcatcaataaaaccttaagccactgg

SEQ ID NO: 498 - DNA, 2123 bp, Homo sapiens
  source 1..2123: mol_type = genomic DNA
cctatccaggtgagaactggccactctaatttacccggaagcctttctgcaggagattcaaatatttgctaatgcttactgacaccttcactggttagatcgaggcattccccaccccatctgaaaaatgtttaccagaagaaataactcctcagtttgggtaatccaaaagcctgcaaagtgacaatggcccatctttcacagcaggcgtatcccaaaacctgtcctcagctttaagaatccaatatgaccttcactctgctggagaccacagtcctctggaaaggtgaaagggctaaccctactctaaagaagactccagctaaatcagaggcctgactgtctctaacacccatagcttattgtgggttagaactgctccaaagtaaaacgtataattgagtcctgttgagttcacatgtggaaggcctttcctaaccacagatctcctaatagatgaaaagactcatcaattacaaaaatatgtcatcaatctaggacaggtgcaaaggcactccgtgcatatggaaacaagagtcttcccctcccacatgggaggaaaattcagtttcagctcagctagggatttagtcttactaaagacgcgggaggaagttctccagcgagcagctttccccaacgtggaaaggaccacgcaaggacacctgagctttccaacagatgttcagcgccaggggatccacagttctgggaggtgatctctgatgaacatgccatcgactccgctggcacctaccacggggacagccacctgcagctggagcgcatcaacgtgtactacaacgaggccagcggtgagacccccgtccttcccccaccgccctcctgggaacgcggccctcccctcgctcatgccctcccgccccacgcaggtggcaggtcagtgtggggccggaaacaactgggccaagggacactacaccgaaggcgcggagctgatggagtcagtgatggacgttgtcagaaaggaggctgagagctgtgactgcctgcagggtttccagctgacccactccctgggtggggggactgggtctgggatgggtacccttctgctcagtaagatccgggaggagtacccagacaggatcataaacacattcagcatcctgccctcgcccaaggtgtcggacaccgtggtggagccctacaacgccaccctctcagtccaccagctcatagaaaacgcagatgagaccttttgcatagataacgaagctctgtatgacatatgttccaagaccctaaaactgcccacacccacctatggtgacctgaaccacctggtgtctgctaccatgagtggggtcaccacgtgcctgcgcttcccgggccagctgaatgctgacctgcggaagctggccgtgaacatggtcccgtttccccggctgcatttcttcatgcccggctttgccccactgaccagccggggcagccagcagtaccgggccttgactgtggctgagcttacccagcagatgtttgatgctaagaacatgatggctgcctgtgacccccgtcacggccgctacctaacggcggctgccattttcaggggtcgcatgcccatgagggaggtggatgaacaaatgttcaacattcaagataagaacagcagttactttgctgactggctccccaacaacgtaaaaacagccgtctgtgacatcccaccccgggggctaaaaatgtcagccaccttcattgggaataatacggccatccaggaactcttcaagcgtgtctcagagcagtttacagcaatgttcaggcgcaaggccttcctccactggtacacgggcgagggcatggatgagatggaattcaccgaggccgagagcaacatgaacgacctggtgtctgaatatcagcaatatcaggatgccacggccgaggaggaggaggatgaggagtatgccgaggaggaggtggcctagaactctccttttctaggtaaaggggggaagcagtgtggattctttactgtgttctgacagccatgtgtcactatacgcttgttaatttgtgtcttcacatctcctgctgcgttttaaagcatttttatagtatgcggttttgactaataaagtattctcacagca

SEQ ID NO: 499 - DNA, 5045 bp, Homo sapiens
  source 1..5045: mol_type = genomic DNA
attttctctggcttgtgtttctgacagtgttagggcctcctaaagcttcctaggcataggggtatgcctggcttgaattttaaccagggactcagtccagattatggggagacccgaggaaaagtgctgggtagaagaccaaaaaacaaagaccctcagagtgaaaagggcctctagacatcatcccttccaacatctcccagtgcctggagccctcctgcgccacgtgtgtcagatggccggagagcctctgctcgaatacctctttgatggggagctcaactttttaaaagccaccagttgcatcgtaagccaactcttgccattagaagatccttcttatgccagacggaaaaccgctctctggaactttctcccctggctcattctgacccctggagcaccagggcatacgtctgctctcttgcttacacggcagcccttcagacatttgtgacagctctgtgtcctgctaagatgtctcttctctgagctgaagatcccttgactctttgggcccactgggtgtgagctgggggtctcagtcctcagggcctgtcttttctctcccccatcaccgctcaaggtcgcacatgggcagtgcagcagacgtgcggttctccctgggcacaaccacacacgcacccccaggcgtgcatcgccgctactcggcattgagggaagagtctgccaaggactgggagacttctccactgcctgggatgctggccccggcagctggccctgcctttgacagtgaccctgagatctccgacgtggatgaggatgagccagggggtctggtgggctctgcggatgttgtctcccccagcggccactcagatgcccagaccctggccatgatgctgcaggagcagctggatgccatcaatgaggaaatcaggatgattcaggaagagaaggagtccacggagctccgcgcggaggagattgagacgcgtgtaaccagtggcagcatggaagccctaaacctgaagcagctgcgcaagcgtggttccatccccacctctctgacggccctgtccctggccagcgcgtccccaccactcagcggccgctccacacctaagctcacctcccgcagtgctgcccaggacctggaccgaatgggggtcatgaccctgcccagtgacttaagaaagcataggaggaagctgctgtcgccagtgtctcgggaagagaaccgagaggataaagccaccataaaatgtgagacttctcctccttcctcacccaggacgctgcggctagagaagcttggccacccagccctgagccaggaagaaggcaagagtgccttggaggatcagggcagcaaccccagcagcagcaacagcagccaggactccctgcacaagggcgccaagcgcaagggcatcaagtcgtccattggccgcctgtttgggaagaaggagaagggcaggctgatccagctgagtcgggatggagccacaggccatgttctgctaacagactccgaattcagtatgcaggagcctatggtgcctgccaagctggggacccaggcagagaaggaccggcggctaaagaagaaacaccagctgcttgaagatgcccgcaggaaaggaatgccctttgcccagtgggatggtcctactgtggtctcctggttggagctctgggtggggatgcctgcctggtatgtggcagcctgccgggccaacgtcaagagtggtgccatcatgtccgctctgtcggacacagagatccagcgggagatcggcatcagcaatgccctgcaccggctcaagctccgcctggccattcaggagatggtgtcattgaccagcccctctgccccacccacctccaggacttcttctgggaatgtctgggtcacccatgaagagatggaaactctggaaacatctactaaaacagacagtgaggagggcagctgggctcagaccctggcctatggggacatgaaccatgagtggattgggaatgaatggctacccagcctggggctcccgcagtaccgcagctacttcatggagtgcctggtggacgcccgcatgctggaccacctcaccaagaaggacctgcgggtccacctgaagatggtggacagcttccatcgaaccagtcttcagtatggcatcatgtgtctgaagaggctgaattatgaccggaaggagctggagaagaggcgagaggagagccagcatgagatcaaggatgtgttagtctggaccaacgaccaggtggttcattgggtccagtctattgggctccgggactacgcaggaaacctgcatgagagtggtgtgcatggagccttgctggccctggacgagaacttcgaccacaacacactggccctgatcctccagatccccacacagaacacccaggcacgccaagtgatggaaagagagttcaataacctgttggccttgggcacagaccggaagctggatgacggggatgacaaggtgtttcgccgcgcgccctcctggaggaagcgcttccggccgcgggagcaccacggtcgcggcggcatgctcagcgcttccgcggagaccctcccggcgggcttccgtgtgtccaccctggggaccctgcagcccccaccggccccgccaaagaagatcatgcctgaagctcactcccactatctctacggacacatgctctccgccttccgggactagccatggcccccagggctggcttcctccttctgggtttcacaggctcctctggccctgacccctcttgctcgttccccttccttccgcagctcctagtctcgtccgtgactttccggttgccctggatctcagaatatattcgtccaccccctcggcaccccattaccccgagtcccaccgtgtgtccgttgtaagtccggtggatgtggctggggtttcctggtattgtggaggcacccaggttgtccatgcttgggattctgggggaaggagagaagggcagctcagggtggatgtgaagccacccttcctcttctggacccagcctggtctgcactgcaacctccaccaggaccaggatcctgggccacaggctgggatggtccttccaagaaagggtcatttcagacgcagccctgcttgggctattcaatcttagggtgtctatccacgtctggctgtgccaaatggtctggcagctggttttggcatccccagcatcaccactctcccaacccatcaccgtgactgcagttcctgcccccattctcttggggtcagggaggggctgggaagggctactgaaggccccattctcccacaggatggtgaggctgggaggaggaagactgaggtagagattccaggccctggcataagctgaatcccaaatttgagtttgggaagaaccagagagaaatggatccctgagctctgagccaagggtgaggatggggaaactctaagctcccacctaataagaagcataggcagaccagccagagggagagccaatggcctctggtagccttaagcccaaagggcagtgggaatgtcccctgccccaaccatcgggtggagctcctgctgggctatggggaagggaggttgtgcggatcttgactctagggcagaacagatctaaccatgcattgctagctctgctcccagcatcccttccccttctctcctcctctgcctcacttctttagtaatcccaaccctataaaaatgaacctaatgggtggattgaatatacattgagcccaaagtcaagtttggggaaaaggcagactaaggcctcctttctctgacctcccaggaagaaaatagcttctcctacagtgattcatgtcccaggtccaggaaatccaatgttggtgaaggcagccactctcttgcttgtccccaaatcacctaaccctcatccagggctattttggtgggcagggactgcctcctcccggaattcctaagatccgcccagctgccaccattttcattgctttccccagcagcatgatgggaacccaagctgagggatacaggtcctgatttggtaggaatattattcccaagaaatacccgctcctcacctactccctcatcctaccaaggtgcctgaaaatgttcaagacttatgttcagggtgggatgatggaaccgagggcttcatcaaagtgagaggaaaggaaaagcatctggcatgtgtttcttggataggggccagtgcagtgccatcctacaggtggctggagcagctgctttgcaacctgatcaccttgagttctgagcagggactaggcttgcaggtgagataatgggccagggcacccagtccagaaggagcaatggcacctgggcagtgccagggcttaaagcccgctgctccttttcggtagaggagaggcccatcactggtgtggtggggtgggctctcccttaggcttgggcaaggcagccacctgcccttgctctcccttagtgttccctggcctccctgccatcaggttgctgggagtggagatggagggattattgagcagaaaatgagttggatggagataaacagctcccatccctgggtaatggatggtaagatgatggagattcctaagattggtggagttgggcaatgcatagccatctgactccttcagggtgctcttgatgggctggctgtaagggagactcagtcccagcctctcccctctacaactcctgccactgttggccatgtcgtaaggcagcagctgtgccaggatagctgggtccattcagagcaccttgagaagtgttgcagggaggtgttaagaagagaactctgtgcaaacagtgatggaaggctgttgtcttggtgtatcccttgcctcatagtcaatatattttttttttggcgagtcaccagtgacccgagccctccacaccagcctcctgtatctcatcaggtcccttctcagtactgtatttgctcagtgcatcaggaatgggtgtatgggtgtgtgtgggtgggtgtgagtgtgggtgtgtacgtaccaataaacaacctggttttaagacaatgta

SEQ ID NO: 500 - DNA, 2484 bp, Homo sapiens
  source 1..2484: mol_type = genomic DNA
gacgagccaaggaaaaaaagtacaagtgtggctgcaaagtttgcccctcttgttaccctcaggcaaatgattgatttagaaaggccccaggggctattttttgcaggaacggtcactccctaaatccaggcagggaaagggaggagtctgagccgagtcacgccccttctcctgtaaacttgggtcgcctctagcttagcgagcgctggagtttgaagagcgggcagtggctgcacacgccaaactttccctatggcttcggtgaccagggccgtgtttggagagctgccctcgggaggagggacagtggagaagttccagctgcagtcagacctcttgagagtggacatcatctcctggggctgcacgatcacagccctagaggtcaaagacaggcaggggagagcctcggacgtggtgcttggcttcgccgagttggaaggatacctccaaaagcagccatactttggagcagttattgggagggtggccaaccgaatcgccaaaggaaccttcaaggtggatgggaaggagtatcacctggccattaacaaggaacccaacagtctgcatggaggagtcagagggtttgataaagtgctctggacccctcgggtgctgtcaaatggcgtccagttctcgcgcatcagtccagatggtgaagaaggctaccccggagagttaaaagtctgggtgacatacaccctggatggcggagagctcatagtcaactacagagcacaagccagtcaggccacaccagtcaacctgaccaaccattcttacttcaacctggcaggccaggcttccccaaatataaatgaccatgaagtcaccatagaagcggatacttatttgcctgtggatgaaaccctgattcctacaggagaagttgccccagtgcaaggcactgcattcgacctgagaaagccagtggagcttggaaaacacctgcaggacttccatctcaatggttttgaccacaatttctgtctgaagggatctaaagaaaagcatttttgtgcaagggtgcatcatgctgcaagcgggcgggtactagaagtatacaccacccagcccggggtccagttttacacgggcaacttcctggatggcacattaaagggcaagaatggagctgtctatcccaagcactccggtttctgcctggagactcagaactggcctgatgcagtcaatcagccccgcttccctcctgtgctgctgaggcctggtgaggagtatgaccacaccacctggttcaagttttctgtggcttaaggaagtgtgaagatatgatccagtccagggctaggctcagccacctgtctcctgtccagaaaaaaggtgaagattaagaagctttcagaatgattctatggattaaaatcatacaaatggtggctgttctgagaatcagtctgggtattgatttccttttccagtgactggctccaggccatgtctaatgaccagctcgattccctgtgcagttcagagggcaagtgaacccaaccaacaatgtcgtcatctaagccctgaccctagccagggactcccatgctgctgttggctccatctctccacactgcctctttcttttcaactttttgcccttcctttctttaaagctattctcacattgcttttatttcctcctccttcacctccaaccactgtcagcagcactctggagttttcaaatgtcacattagcctcaccctgcatgctaggagatggacctgtctctatacagcagtagatgattgataagtgaggaaactgaggcttacagaggttgaagaccaacaagctaataaataaaaagttgaggccgggcacggtggctcacgcctgtaatcccagcactttggaaggccgaggcaggcggatcacgaggtcaggagatcgagaccatcctggctaacacggtgaaaccccgtctctacataaaaaattagctgggtgtggtagcacgcacctgtagtcccagctacttgggaggctgaagcaggagaatcgcttgaacctgggaggtggaggttgcagtgagccgagatcatgccactgcactgggcaacagagcaaaactcgatctcaaaaaaaaaaaaaaaaaaaaggaaaaaaaagcagctctctctctcgggagagggaggggacttccgagaggaaaaggcctgcaagagcctttgggttaactgagaaagcacagcccggccaacgcttgggaagaaagacaggcaagcactggaaacaggagctattagggtgaggagagagccttgcctttcacagcacagtgaggatgacattgcaccagggacagagattgtatgtgacaaggctggggctccttctttcctagacaatcaaagtatcagtgatgggttttggttggtgattttgaaaaaaaaaaaaaaaagtatgttatactagtgtatgctgtactgaattgaaataaaaccaaaatctgcatcttcagaa

SEQ ID NO: 501 - DNA, 5242 bp, Homo sapiens
  source 1..5242: mol_type = genomic DNA
aggcagagagagtcgggttacaagatggcggatctgtagtagttaccgcggcggcgggagagcaagcgagccctggggggcaaagagacgggagagtgggtgtatgcgcgggtgaagtgagaggtaacggggctccgggcggagaggcctcagtggctcttgtcaccccttctcgcggctgaacctttggagccatggtgaattcgggcctctccgaagccgccgccgccgccaccgccactactgcctttaccgtctcctaagagtgaggagcgcggacgaggtaagcgaggaggcggcggctagagcggtggagacagcagccaccatgtcggatacgcggcggcgagtgaaggtctataccctgaacgaagaccggcaatgggacgaccgaggcaccgggcacgtctcctccacttacgtggaggagctcaaggggatgtcgctgctggttcgggcagagtccgacggatcactactcttggaatcaaagataaatccaaatactgcatatcagaaacaacaggatacattaattgtttggtcagaagcagagaactatgatttggctctgagttttcaggagaaagctggctgtgatgagatctgggaaaaaatttgtcaggttcaaggtaaagacccatcagtggaagtcacacaggacctcattgatgaatctgaagaagaacgatttgaagaaatgcctgaaactagtcatctgattgacctgcccacatgtgaactcaataaacttgaagagattgctgacttagttacctcagtgctctcctcacctatccgtagggaaaagctggctctcgccttggaaaatgaaggctatattaaaaaactattgcagctgttccaagcttgcgagaacctagaaaacactgaaggcttacaccatttgtatgaaattattagaggaatcttattcctaaataaggcaactctttttgaggtaatgttttctgatgagtgtatcatggatgtcgtgggatgccttgaatatgaccctgctttggctcagccaaaaagacatagagaattcttgaccaaaactgcaaagttcaaggaagttataccaataacagactctgaactaaggcaaaaaatacatcagacttacagggtacagtacattcaggacatcattttgcccacaccatctgtttttgaagagaattttctttctactcttacgtcttttattttcttcaacaaagttgagatagtcagcatgttgcaggaagatgagaagtttttgtctgaagtttttgcacaattaacagatgaggctacagatgatgataaacggcgtgaattggttaattttttcaaggagttttgtgcattttctcagacattacaacctcaaaacagggatgcatttttcaaaacattggcaaaattgggaattcttcctgctcttgaaattgtaatgggcatggatgatttgcaagtcagatcagctgctacagatatattttcttatctagtagaatttagtccatctatggtccgagagtttgtaatgcaagaagctcagcagagtgatgacgatattcttcttattaatgtggtaattgaacaaatgatctgtgatactgatcctgagctaggaggcgctgttcagttaatgggacttcttcgtactctaattgatccagagaacatgctggctacaactaataaaaccgaaaaaagtgaatttctaaattttttctacaaccattgtatgcatgttctcacagcaccacttttgaccaatacttcagaagacaaatgtgaaaaggataatatagttggatcaaacaaaaacaacacaatttgtcccggtgcccttcgctttatgaggcggataattggacttaaagatgaattttataatcgttacatcaccaagggaaatctttttgagccagttataaatgcacttctggataatggaactcggtataatctgttgaattcagctgttattgagttgtttgaatttataagagtggaagatatcaagtctcttactgcccatatagttgaaaacttttataaagcacttgaatcgattgaatatgttcagacattcaaaggattgaagactaaatatgagcaagaaaaagacagacaaaatcagaaactgaacagtgtaccatctatattgcgtagtaacagatttcgcagagatgcaaaagccttggaagaggatgaagaaatgtggtttaatgaagatgaagaagaggaaggaaaagcagttgtggcaccagtggaaaaacctaagccagaagatgattttccagataattatgaaaagtttatggagactaaaaaagcaaaagaaagtgaagacaaggaaaaccttcccaaaaggacatctcctggtggcttcaaatttactttctcccactctgccagtgctgctaatggaacaaacagtaaatctgtagtggctcagataccaccagcaacttctaatggatcctcttccaaaaccacaaacttgcctacgtcagtaacagccaccaagggaagtttggttggcttagtggattatccagatgatgaagaggaagatgaagaagaagaatcgtcccccaggaaaagacctcgtcttggctcataaaatatttattaggggaccctcaacatgtggtcttacaatgctgcaactgttcagtgagctgaaaatctgaatcagaaagctttctcaattgaacttataaaatatacaaggagtagcaaaagacagtatatcagctaagagagtttagttctaataaaaatcaggcttcccaggaacttgattgcttgctagtaattaaggggtttgccttttaggctgtcaaaacaaacattagtaaccagaacctgggagacagcttctcagcaaggaaaagtcacaggtttggggacggtttaggggaggggaaaaggttgatataataatgcagggttgctcctcggggtgtcgatctagaaacaattttacagaacttcagttgtaaactcaataacattacttgtataatggtgctggccatgttgttgttttaatcagttgcctctttttaaaagaaatttttatggaaaacacattcaactatcattaaaaaaatgaagttaagctgttgggaccatttctttaagatttaacaaaagttcagccttttaggtagttgaagggaagtacaccccgtattcagcacatgttgagttttctacaccaggaattttcaatatgtatattgatgaaaacaagctcaattcaaactggacagttttaagataatgttaaaatcagcacttttagagacaacgaaggccaagaatcagtacagtagtattccaaaatgattttctctagaaatttgaaagtagatcgaacagaatgttgtcaaccgcctaccagtacaatcttttgtggaagatactttgaaatcactttctactttgttagtaaagttctgtctttccagagctgcaagttttaaagtgttacttatacagaccaaccaagaatagtgctgaattaagtggcatttagtatctagaagccattttgatccaagaagctacttaagtgtcaaagtcagcatgcagcacatgtagcttttctgtaaacaagggtgtgatatgaaagctgcttttttaagaagagtaaaagcacattccatatacgtaagtgaattttaaaaataaattgaggcaaacagttaagttttatttttagagcaacaagttaactgtaaatattttaatgttagtttgctcatctatgatctgagatcatgccgaagtgagaaaaatctccccaaaatacaatttaatgcattgggaaaaaaaaactttaacagtaattccagccacaatctttagatcacccttgtaatgtgttacgggtccatttttcctggaatcgtttaatctaaagcagtttcccctgttttggagattttgtagttaattttaattttggctattgtttggaaaagatgagctgtctgtgtagatatgaagtatagttttttccataaaacagatgtttattttgtattaaaaaataccactgtacttgttttacaccatttgtatacatgtggtgatattaatgctaaactgtaaaattcaggaattaaaatgtgaccctgtaattccataattgatgtttgtgtttggtttgttgtaaatataaattaactccattttgagatatgtcaattttacagtatcttttaaaagccaataaaattatccataaatatttattataaactgctagatcataccccaattttaatgaaataattctaaacaaatgcgggtcaatggcactttatcagtgactacttatagaaggtaagccttggggaaatcatagcatcacagtatggagcttttctcaccttttcaattaaaggtgtacatatagtaagaaagaaagaccttccacctcataaggcaggtgactcaggatattttaaactaagatcagtaaagttcccatccactttctttgaatcatcaaattttatcgagacccatctctcagcttttagtaaatttcttcttaaaataagcccacatgtaaaacactttcctagttactttttgtttgtttgtttgagtctcgctctgttgcccaggctggagtgtagttgcacgatttcggcttattgcaacatccgccacctgggttcaagcaattctctgcctcagcctgagtagctgggattacaggtgcccgtcaccatgccaggctaatttttgtattttcagtagagacggggtttcaccatcttggccaggctggtcttaaactcctgacctcacaatccacccgcctcagcctccctatctctgtatcttatgaagacttcctttttctttctgaagagctgccataagtcttaaacatttaaatcatcagaaccttttcttgtagcagaaatgtgaatgttttcttgaagtacaggttacggttttcatggtacaagtgcttacctacgacgataagagaacaaggcttaaaatatccctcaaaagaacaattgtgagaattccatgttagcggctgtctttaaacgactaccctcaggcagatctgggtttttatatctttatcttcattcagtgaagcaagccaaaagcccacatttgtatgccttaggtcttcttaaaatggtatctgtaaacatgtgtccaatataaaaactatttttaataaaaagttacatgaaacaga

SEQ ID NO: 502 - DNA, 625 bp, Homo sapiens
  source 1..625: mol_type = genomic DNA
caacaatccattggctaacgaggtcgatgacgccagacgcaagacgccgggcctacagcgggagcgtgaggaaagccgtgcgttgcgttccaaggcatctgtgagcccgcggagtatacaccatgagcaaagctcaccctcccgagttgaaaaaatttatggacaagaagttatcattgaaattaaatggtggcagacatgtccaaggaatattgcggggatttgatccctttatgaaccttgtgatagatgaatgtgtggagatggcgactagtggacaacagaacaatattggaatggtggtaatacgaggaaatagtatcatcatgttagaagccttggaacgagtataaataatggctgttcagcagagaaacccatgtcctctctccatagggcctgttttactatgatgtaaaaattaggtcatgtacattttcatattagactttttgttaaataaacttttgtaatagtcaaaaatgctttctcagatgttctgaatatagaatatcagctctcattccagttttttctaacatgaattttcctggttgacattgatttcaaagggttttatgcattaaagtgaaagaatcttattaaatgtgaaacatggcaagga

SEQ ID NO: 503 - DNA, 748 bp, Homo sapiens
  source 1..748: mol_type = genomic DNA
aagacggggattggccatcgcttccggaagttgtgagctttgtttcggagcgggagctcttccgagacgcactgggggccggatgtagaatcctgcttatctgtgaaatgcagttaacacatcagctggacctatttcccgaatgcagggtaacccttctgttatttaaagatgtaaaaaatgcgggagacttgagaagaaaggccatggaaggcaccatcgatggatcactgataaatcctacagtgattgttgatccatttcagatacttgtggcagcaaacaaagcagttcacctctacaaactgggaaaaatgaagacaagaactctatctactgaaattattttcaacctttccccaaataacaatatttcagaggctttgaaaaaatttggtatctcagcaaatgacacttcaattctaattgtttacattgaagagggagaaaaacaaataaatcaagaatacctaatatctcaagtagaaggtcatcaggtttctctgaaaaatcttcctgaaataatgaatattacagaagtcaaaaagatatataaactctcttcacaagaagaaagtattgggacattattggatgctatcatttgtagaatgtcaacaaaagatgttttatgaaatgtcagaaatattaacaaaaattctcagcattaaagaaaacattgattttcctttcctgactataaaactaattgtgcattatagaaaagtttaaatcacagaatggtatt

SEQ ID NO: 504 - DNA, 1860 bp, Homo sapiens
  source 1..1860: mol_type = genomic DNA
ctgcagctcactttctccctgtttgctggccagcagggtttgtggccgcctctgctgtgacgccacagcctggtgaggagggggctgcagttcctcaggaaactgccagtggacaaagtcataaacaagagttccagttccctggaacctgagtcgggaggcctgcaactcactttctccctgtttgctggcccagacaggcctgtgctagagggctggatagtgtggtagtgtggtggatagagtgctgcctctatccacaacgcagccatatgctgactgaagataactttgtgtctggaagagccctctgatttcttacactaatggccttacacgacatggaggattttacatttgatggaacaaagcgcttaagtgtcaactacgtgaagggaattcttcaaccgacagacacctgtgacatctgggataagatctggaacttccaagccaagcctgatgacctgcttatttctacctatcctaaagcaggaacaacatggactcaggagatagtggaattaatacaaaatgaaggtgatgtggagaaaagtaaacgggcaccgactcatcaacgatttcctttcctcgaaatgaaaatcccatccttaggatctggtttggaacaagctcatgcaatgccctcaccacggatcctgaaaacacatcttccctttcacttgctgccaccatccttgctagagaaaaactgtaagataatctatgtagcaagaaatcccaaggacaacatggtgtcctattaccatttccaaagaatgaataaagctcttcctgctccaggaacatgggaagagtattttgagacttttctggctgggaaagtgtgctggggctcctggcatgaacatgtgaaaggatggtgggaagccaaagacaaacaccgtattctctatctcttctatgaggacatgaagaagaacccaaagcatgaaattcagaagctggcagaatttattgggaagaaattagatgacaaagttctagataaaattgtccattacacttcgtttgatgtcatgaaacagaatccaatggcaaactattcatcgattcctgctgaaatcatggaccactccatttctccattcatgagaaaaggggcagtgggagactggaagaaacacttcaccgtggctcagaatgagagatttgatgaagattacaagaagaaaatgactgataccagactaactttccacttccagttctagtaaggaagaaaaactgaaaatgttttagtttattacccagtatatttgggtaataatgaaagtttaattctcataacaaatgatatcagattccagttatcagaatagtttactgtgtttgctcttattcactctactaaaaaattattttaaaaggctggaggcaaggtggtgacaggcagcagggtggcgacatggagagagggaagctcaataaatcactaggtacaatcctggtatcattgccaattatcatcatatttacattttctacaatcatgtgcttattaacatattggaaatgcttcagtcctcacatgataatacactaacattttcagattaagttttggttcaagttaatttttttttttttttttttgagacggagtctcgctctgtcgcccaggctggagtgcagtggcacgatctcggctcactgcaagctctgcttcctgggttcacgctattcccctgcctcagcctcccgagtagctgggactatgggcgcccaccaccactcccggctaatttttttttttgtattcttagtagagacgaggtttcaccgtgttagccaggatgttctcgatctcctgaccccatgatccacccgcttcggcct

SEQ ID NO: 505 - DNA, 5279 bp, Homo sapiens
  source 1..5279: mol_type = genomic DNA
gcgggcttggctggcctggggctcggacttggggccggagccgcgggagccggcggacgctggaccaggagccccgacgtgatcgcgtggcgggtggtcgggtctccgggtggccgggtgtcggccccgggatccggcggctcgctggcgggagtcggcggcctctgctgggcctgggtcccggctcccggcccggcccgctcccactgcggccgccatgtggtgcctgcactgcaactcggagaggacccagtcccttctggagctagagcttgacagcggcgtcgagggcgaggcccccagcagtgagactggcacatccctggacagcccctcagcctacccccagggccccttggtgcccggttccagcctgagcccggatcactacgagcacacgtcagtgggagcctatgggctgtactcggggccgccggggcaacagcagcgcacgcggaggcccaagctgcagcactcgacctccatcctgcgcaagcaggctgaggaggaggccatcaagcgctcacgctcactctccgagagctatgagctctcctcggacctgcaggacaagcaggtggagatgctagaacgaaagtatggggggcgcctggtaacccgccatgcggcccgcaccatccagacggcgtttcgccagtaccagatgaacaagaacttcgagcgcttgcgcagctccatgtcagagaaccgcatgtcacgccggattgtgctgtccaacatgaggatgcagttctcctttgaggggcctgagaaagtgcacagctcctacttcgaggggaagcaggtctcagtgactaacgacggctcccagctgggagccctggtgtcccctgagtgtggtgacctcagcgagcccaccaccctcaagtctccggccccctccagtgactttgcggacgccatcaccgagctggaggacgccttctctaggcaagtgaaatcactggccgagtccatcgacgatgccctcaactgccgcagcctgcacactgaggaggcaccggccctggatgcggcgcgggcccgggacaccgaaccccagacagccctgcacggcatggaccaccgcaaactggacgagatgacggcctcgtacagtgatgtcaccctgtacatcgatgaggaggagctgtcgccccctctgcccctctcgcaggcaggggaccggccgtccagcaccgagtcggacctgcggctacgggctgggggcgcagccccagactactgggccctggcccacaaagaggacaaggctgacacggacacgagctgccggagcacgccgtcgctggagcggcaggagcagcggctgcgggtggagcatctgccgctgctcaccatcgagccacccagcgacagctctgtggaccttagtgaccgctcggagcgggggtcactcaagaggcagagtgcttacgagcgcagccttggcgggcagcagggcagtcccaagcatggtccccacagcggcgcccccaagagcctcccccgggaggagcctgagttgcggccccggccccccaggcccctggacagccacttggccatcaatggctcagccaaccggcagagcaagtctgagtcggactactcagacggtgacaatgacagcatcaacagcacgtccaactccaacgataccatcaactgcagctccgagtcatcgtcccgtgacagcctgcgggagcagacgctcagcaagcagacctaccacaaggaggcccgcaacagctgggactcgcctgcctttagcaacgatgtcatccgcaagaggcactaccgcatcggcctgaacctcttcaacaagaagcctgagaagggagtccagtacctcatcgagcgtggctttgtgcccgacacgcccgtcggggtggcccacttcctgctgcagcgcaagggcctcagccggcagatgatcggcgagttcctgggcaaccggcagaagcagttcaaccgtgacgtgctcgactgcgtcgtggacgagatggacttctctaccatggagctggatgaggccctcaggaaattccaggcgcacatccgtgtccaaggggaggctcagaaagtggagcggctcatagaggcgttcagccagcgctactgcatctgcaaccctggggtggtgcggcaattccggaacccagacaccattttcatcctggccttcgccatcatcctgctgaacaccgacatgtacagccccaatgtcaagcccgagcggaaaatgaagctagaggacttcatcaagaacctccgaggtgtggacgatggtgaggacattccccgtgagatgctgatggggatctatgaacggatccgtaagcgagagctaaagaccaatgaggaccatgtgtcccaggtgcagaaggtggagaagctcattgtggggaaaaagccgatcggatccctgcatcccgggctcggctgtgtgctctctctgccccaccgtcggttggtctgctactgccggctctttgaggttccagacccaaacaagccccagaaactcggactacaccagcgagaaatcttcctgttcaacgacctcctggtggtcaccaagatcttccagaagaagaagaactcggtgacgtacagcttccgacagtccttctccttgtacggcatgcaggtcctgctcttcgagaaccagtactaccccaatggcatccggctcacctcgtctgtccccggagcagatatcaaagtgttaataaacttcaacgcccccaaccctcaagaccggaagaaattcaccgatgacctgcgggagtccattgcggaagtccaagagatggagaagcacaggatagagtcggagctcgagaagcagaaaggcgtcgtgcggcccagcatgtcccagtgctctagcctcaaaaaggagtcgggcaacggaacactgagccgggcctgcctggacgacagctatgccagcggtgagggcctcaagcgcagcgccctcagcagctccctgcgggacctctcggaagccgggaagcgagggcgtcgcagcagtgcgggatcgctagagagcaatgtggaatttcagcctttcgagccactgcagccgtcagtgctgtgctcctaagccatgggacccgaggactgccccccggcgcctgcccaggcggaggccctttcagaaagggcgaagctcacgcctgactctgcgggccgcggggccgcgttcccagtggacagcgtggtgagccgtggccggacggcaggaggagaggggagccccctctggctgtgtgtcaccttggctggctggctggccagggttttgccgatttccctcctcacatccctcccaccctcggtcatatcattgagatcaccgtaccagcaaatctgcaaaccaagcactttgttaatctccagagagagcaaatacagcaatctagagtttagcctttttaaaaatgtgactttaacccgcccacctgtgtcctcccattggcgtggcatttctttggtgtctgctcagaaagaaacagcatgggaccgtgtgattgggtccaggctgggctgtcagggaagcgccctggtgtctccgactcatcaattctcgggtcttttttaaaagccaggctccccaaagcactctgtctcgcaattttgaggaggctgttccgacctggaagcgttaaactgctgcatgtcatctggcgtcagctgtgaggctgcgctctgcgtgttgtgcgtttgcaaaatgtattggcgtgactgtaaacacatcgttgaagtaaagcgattacatattgagtatgtcagcttttctcaccctcttctgtgctgggaggagagtctaactgtaacctttaggttgttccagaaaagattcaggccgtttggcacagaattgctctttctgaagggtagcagtaatgaataggaacagacagaaaaccccaggaggggctttcaggaaactctccctctccatcgccatcctgcaagctccacagcctcgggctgccagcctgtggcactgtcctcggtgtgtcctggagctgtgctgggcagcagggcctcgcgtaaggaactgctggaacccactgagcccttcccggggtttcccgccgcactcagtgtgttccttcaggctagtgaggtttcattctgttttatttgcaagcttatcaaaagtttgtggaagatacattgttgggttccagaggctggagtcatgctgcccacatcttgtttgggaaagcaaaagctcccagtgagctggtgtccccgtgtgtctttcatgggactgtcccctttagagatcccacctgtcagagccacagcttcggggtcctgtcatcacatcccctgggaggggaggcaggaggaggccgagggccccaggatgtctgcctggtcccttctcactgtgaggacgcccttggcacacctttctcaagtcacacaaattactgcagttacatacagaattgctgacaggagcaggagacgctgagggaaacagctggcaatgtgacaaaagtcttttctgggacaacaatcaaatcatgtatttgtatttttttaagtttaccaatgaattgtacaacaatgtaaaaataaagttcatcctaatatgctgtgcacatcttgcttaaaaatgtcttcagcacccagtgcagtgatctttccctcacacactgcatgcagcaggagcctcttgtttttcttaatgagctgaaaagacagcagatgttcacagctgatgctgggtgttgactcagcgccacgggaagctctgtgcccgcaggtaagcacgcacagtcttacagttctccttgtaaaatatcatcacccttcctgcctgagaaacgagtacatttgtattttatgtaacaacaatagtcaaggcagcattgcaacactgagcagggtgaggtgggggtgctgagcacaggacaagagggaggaggcctgccctccattcagatgcatctgcatcgcccttctgtgtgcagtcacatcgagactgcacacagcatgcatctcctcttggaaaatatcttttgcctccgagttgttttaagcaattagaatcaggtcctgaatccccagactgttcagagacttcaagggacacctccctcacaagaagcctggcacccccactgtgtacctttgagaggaaaggagtgcgtttgttttcatctgcattctgtttgtcagtggcaacagactctatcaatgtaaaaccatggttgtgatcatgtggggaaatcaaataaatcctttgaaactct

SEQ ID NO: 506 - DNA, 3883 bp, Homo sapiens
  source 1..3883: mol_type = genomic DNA
aggcgttaacccagggaaggcagtggcaagatggcgtccctggatcgggtgaaggtactggtgttgggagactcaggtgttgggaaatcttcgttagtccatctcctatgccaaaatcaagtgctgggaaatccatcatggactgtgggctgctcagtggatgtcagagttcatgattacaaagaaggaaccccagaagagaagacctactacatagaattatgggatgttggaggctctgtgggcagtgccagcagcgtgaaaagcacaagagcagtattctacaactccgtaaatggtattattttcgtacacgacttaacaaataagaagtcctcccaaaacttgcgtcgttggtcattggaagctctcaacagggatttggtgccaactggagtcttggtgacaaatggggattatgatcaagaacagtttgctgataaccaaataccactgttggtaatagggactaaactggaccagattcatgaaacaaagcgccatgaagttttaactaggactgctttcctggctgaggatttcaatccagaagaaattaatttggactgcacaaatccacggtacttagctgcaggttcttccaatgctgtcaagctcagtaggttttttgataaggtcatagagaagagatactttttaagagaaggtaatcagattccaggctttcctgatcggaaaagatttggggcaggaacattaaagagccttcattatgactgaattacactcatcctttggaagagtgagcaagcagtggcagtttttcacagctcatcttgctgtgttcaattattaccatcacagccttttaacaaaatcatcttaaaatgctacccttcagccttaccctttaatggaaaaatgaaaggaagtgacaatacgggaggtccaaactttgtccctgttctctgtgttccttacctttctgtccctgtgtatagattatgtaaaagccttgtgtaaatatgagatgttgtcaaaatgatgcagtaaatgagcaatgacagtgtactgcagagaaaatttactcttgcctagaactggagggtttttatgggtctgtaattttcccacactcattgctgaaagcttaattaagtacttcaaaaacgtatctccattgttttaccttcttgaggggaacggtcttgttaaccagccctgagttgtctaccccaaacaatctctgtcattttcaaagatgcaaaatggtgttatttaattgtctccaccattgtcacacacaggaatgcctaataatagcaacccttgtctccctcttctctcctttgcaaatggctcagtgactggaagaggcggactaatagccagagttaaatataaatacaaattaataatacatagagaacagcaataccagaaaaaaagaattctggtaaaatgatgtgaaaaattgacagctccctcactcttaaggttgctgctatatacagtctaggttttctgtttggaaataggtagggtaaaatctaagacctgcacaagggcagtgagagacatttacagcctcctctctatttgtttttttaaggaaaagtcaactcctgaaatgtcccttagctataatcagaaaactaagaatattattctgtgtcaacaatgtatttatggagagaagtaaaaataagttccacagcaacacatttacatgaattatgaactaggattcttggatttcataatcactccaaagctttttggggatggtgtgtgtgtgtgtgtgtgtccgtaattgttcatcattactttttttaacctatctttttgcttgcttaatcttctctgccccagttcttcctgagtatatgaatttgatttctaaaaacaatttattcaacactctatcacccgtattctctctctggctctgctgcaggtctctgcactcctgattttgctccatacttttaaataacaataataaatatacagttttcatttctcatttaaaaaataggtggaaaacaccaaattcactttctgttccattttaattaggtttcagaagtatcttggaaatcaaggtatgctgcaagaggatattaaaataagaatgttagagagtccttttagaaaggcagtcttgggaatttggaaaaggatttttaaagcagctttcatcagctagactgttctccagcctttctttacttcctctttgaaaggacatagccctggtttctttttgacacaaaggaaagctatgcaaatcatgatctgtatgtagaattggtcacaagtatgttgttgcataggctgtacagttgggaagtagaaaccaaatgctacccagagacctaacccaattaagctctttgtatttctccttcaagaaataaatcttccttccttctttcttcctctttcttttaattttaaaaaaattcatcctgatttttttattttctatcttatttaaaaaataaaaataggccaggcgcggtggctcacacctttaatcccaacactttgggaggcgggtcgatcacttgatatcaggagtttgagaccagcctggccaacatagggaaaccctgtctctactaaaaatacaaaaattagccaggcctggtggcacgcgcctgtaatcccagctacttgggaggctgaggcaggagaatcacttgaacctgggaggtggaggttgcagtgagtcaagatcgtgtcactgcactccagcctaggtgacagagtgagactccaactaaaagaaaataaataaataaatatataaatatataaataaataataaaagtaaactattgctgatgactccagggtcaatctggaaaaattaacagtattcctcaactccattactttctgcagccaagcttgattccttgaattatagttttctaagaaaaaatagtttttaataatctaaggtaaatttgttgcaattattagcagcagcataataaggctttttgcgcaaatgaatgttattagctagagttattcaaaaaagaatgaagcacaatttttgctaggacttcttgagaactattcataaaaatgcttttagataataaacaagtataaatgtcaaaatatttttttaaaagtataattggccaggtgctggctcacgcctataatcccagcactctaggagactgaggcaggaggatcacttgagctcgggagtttgaggctgcagtgattcatgattgcaccactgccttccagcagcctgatgacagagtgggactccatctctttacatatgtatatcttactctcttgatgggacaagttggtagaaataaagattttttttttctgttgtgatttcggtgtctgaccaattttctgactcattgtgaaggtgaccagatatgaaggcatatatatgactactcctctgtcccttaggtgtataagacttagctggaatccaactaaagatttgggctggtctctccatcttaacgttgatgggattcaggacacataaccccaaaatattgcaccctgttatttgagaaaactgcagaagcaaggtttctcataccttccccttaccccttctcccctgaagcaggccataaaccctaagtgactgttccctgaagtagatcataaaaccttcattccataggtaccctttatcctcacagatacagagacaccaagaagaatctggacaaataggacttgctaagttctccacagtttattaccattagattatgtccttttgtcctctgattatacttctgcataagactgtacataaaaatacacaagttttcctatttcttttttgtcttcatttctgaagattcctgtcatgtaaaacttacagtaaataaatgtgtgtgcttttctcaataa

SEQ ID NO: 507 - DNA, 6955 bp, Homo sapiens
  source 1..6955: mol_type = genomic DNA
gagcagttcgactttccgcccaaactgggggatgctagaccgcgggcacctctgaatcttatgccttcagtgatataatcctccgtgtccttcgagtccctcctgctgcagacaggtcccctatacttcggtacacacgagcctttcgcgcccaccgcaacgcagcctcgggaggcaggacagacccctgcgagtgtagattgcagctgcatcccagctcccccctccctggcacgctcctccacctacagctgcgctgagctgccgcatctgaacgcaaagcaaacgctgcagtgacggttcctgcgtcaccttaactccaaagtaaatgctaacgtttcccgtgtctgtaccttctctcaatcggcactctcaaaacatctggcacggtgttcactaccctaataagacctcagcttccctcgggaggggagggagcactggcagttgctgggtaatttgaagacgacggtggagggtttggtatcaaccaacagccccaacgtctggtctaagtatggtggcttggagcggctttgcagggacatgcagagcatcctctatcacgggcttatccgtgaccaggcgtgccgccgccagacggattactggcagttcgtgaaagacatccggtggctcagtccccactcagcccttcacgtggagaagttcatcagcgtgcacgagaacgaccagagcagtgctgatggtgccagtgaacgtgctgttgccgagctgtggctgcagcacagcctgcagtaccactgcctctcagcccagctccggcccctgctcggggatagacagtatatcagaaaattctacacagatgctgccttcctgctaagtgacgctcatgtcacggccatgctgcagtgcctggaagcagtggaacagaacaacccccgcctcctggctcagatcgatgcgtccatgtttgccagaaagcacgagagcccgctcctggtgacaaagagccagagcctgacagccctgcccagttccacatacacccctccaaacagctatgctcagcattcctactttgggtccttctctagcctccaccaatccgtgcccaacaatggctcagagagaagatctacttcctttccactctctggccctccccggaaacctcaagaaagcagagggcacgtctcaccagcagaggatcaaaccatccaagcccccccagtttcagtctctgcactagccagggattcccctttgaccccaaatgaaatgagctccagtactctgaccagccccatagaggcatcctgggtcagcagccagaatgattccccaggtgatgccagtgaggggcctgagtacctggccattggcaacttggacccccgaggccggactgccagctgtcagagtcacagcagcaatgccgagagcagcagttccaatttgttctcctccagcagctcccagaagccagattctgctgcctcttccttaggggaccaggaaggaggtggggagagccagctgtccagtgtcctccgcaggtccagcttctcagaggggcagacactcactgtcaccagtggggcaaagaaaagccacattcgctcccattcggataccagcattgcctccaggggagctccaggaggccccaggaatatcaccattatagttgaagatcccattgcagaatcctgcaatgataaggcgaagttgagaggccctttgccctactctggtcaaagcagtgaagtcagcacacccagctctctgtacatggaatatgaaggtggtcggtacctgtgctcaggggaaggcatgttccgaagaccatcagaaggacagtccctcatcagctacctctctgagcaagacttcggcagctgtgccgacctggaaaaggagaatgcccacttcagcatctcagagtccttaattgctgccatcgagctaatgaagtgcaacatgatgagccagtgcctagaggaggaggaagtggaagaggaagacagtgatagagagatccaggagctgaagcagaagatccgccttcggcgccagcaaatccgcaccaagaacctgctccccatgtaccaggaggctgagcacggaagctttcgggtcacctccagcagctcccagttcagctcacgtgattcggcacagctctctgactctggctctgctgatgaggttgatgaatttgaaatccaagatgctgacatcagaaggaacacagcctcaagcagcaaatccttcgtttcctcccagtccttctcccactgcttcctgcactccacgtctgctgaggcggtggccatggggctcctgaagcagtttgaggggatgcagcttccagccgcctcggagctggagtggcttgtcccggagcatgatgcccctcagaagctcctgcccattcctgactcactgcccatctcaccggatgacgggcagcacgctgacatctacaagctgcggattcgtgttcgtggcaacttggagtgggccccgccccggcctcagataatttttaatgttcatccagccccaacgaggaaaattgccgtggccaagcagaattaccgctgtgcaggatgtggcatccggactgaccctgattacatcaagcgactgcggtactgtgagtacctgggcaagtacttctgccagtgctgccacgagaatgcccagatggccatccccagccgggttctgcgcaagtgggacttcagcaagtactacgtcagcaacttctccaaggacctgctcattaagatctggaatgatcctctcttcaacgtgcaggacataaacagtgccctctataggaaggtcaagctgctcaatcaagtccggctgctgcgggtccagctgtgtcacatgaagaacatgttcaagacttgccgactggccaaggagcttctggattcctttgacacagtcccaggccacctgacagaggacctccacctgtactcactgaatgacctgactgcgaccaggaagggggagctggggccccggcttgctgagctcaccagggcaggggctacccatgtggagagatgcatgctctgccaagccaaaggcttcatctgtgagttctgtcagaatgaggatgacatcatctttccctttgagctccataagtgccggacctgtgaagagtgtaaagcgtgttaccataaagcctgcttcaagtctggaagctgtccgcgctgcgagcggctgcaggcccggcgggaggcactggccaggcagagcctggagtcttacctgtcagactacgaggaggagcccgcggaagcgctggccctggaagccgccgtcctggaggccacctgaagaaagcacgtgcagccctccctccgggccgggtcacacctgttgcagaactgagccactctttgaaggactcgccccacctggggcttctttttttttttttttttttaattatcatcatctttttttttttttttactgacttgtctgacgtctgtgtgcagtcagccgtcggcaggttgatgggtccagagtctgtggtgacagataatttgtaaacaccaggtgtttccatcagaactgacatgcgggtccttcagtgaagcttctagtgcctctgtcagtggaagagacagcaagaccaagttcttccagcgtctgtggccttctcctctaggtttcacctgcatgtcaggtatcatttccaattttcctttgtttcagttctggagcttctgagccaggcctttctcaaccacctctcctgctgctgaaacggggatggcgttttccctctccctgtcctggactggggtcagactgtgccccgaggagaagcagcagagaataggactacgtcatgggcatttcgtccacttatttgggtattttgggggccacagaacaatcctgactatcctagactcctcagagacctcagaggcagctgtgaatgtccctatgttgccgggagttcctgtttgaaatatttgaagcatagaggatgccacaagctgactttcttcatctaccttggtgatcttgaagcaaagaacagaactgatgctcaggccaggctcacctgtagccttacgccgcaagcatacgtgaggcgccagctctgtcgctgaaggagcgcttactcagaggagcggtcggccccctcttggtgttaaggtctcttagttaacctggctttttggtgcaggtgtgatctttgaagctcaggcaggtccctgatgccatcctaaggtgaggacaggaacctcacccaccatcttcttagcgtgtccctgatgactctgtcctctgttagatggtcgttgtgcttctgagtaaaagtacaacccgactccgttctctccccttcctgcagcagagctgggtccttccctggtggccgagtctctcttgccttagcttctttggtcaaagttggagaaaagcttcctgctattagtgctgttacagaacttgacggtttgtggatgtgagtgtgaatgtccctgtgttcttgggataacaagagcctttatgccaattatgcacttaactctgtgtagcctggtaatgtttatctgttcatttgataatgctgattttagtgtgctgcccccctccccccgttaatgtgtgttgatggtgaagtccttttgataatgctgattttggtgtgctgcctcccccttcccccccgttaatgtgtgtgttgacagtgaagtccttgggtggggccatgtgtgtgtttgtgatgttccttaagttgatgcagcttctaacctctgtgaaaacactggtcagagtggcttctccaagagctggcagctctgtgaactaaagcctgcatcatttttgttctgggattgaattctgcccatgggcatgtcttctcatagttgcttgctggtaggaaagaaatgggcgtgggtgctgccctggaagctgagcggaaagttgcctgtggttggtggaagctgatgagagcttgagctggcggtaagaaggagtctcccagggaagtgggagaggcattaaggtgatggccagggctgaggctccaccagcgtgagagggaacatgtgggaactggcccctgcccttgattcctctgcctcaaagttgggatctgaaagccatgtagggctagaagaccctgaggctgttctcccttctgttcatagtgagactcaaaaagccaagtcccagaagttctgaagggctgtgactagaagtgcccaggtccttcagggagctttaagaatgaccccacagaactcaagtttaactaggggttaggtcccagattcagacccaggagtttataaaaatgagctctacttccagttttggtttaaattacacatccaggccaggcacagtggctcacacctgtaatcccagcactttgggaggccagtgcgggcggatcatgaggtcaggagtttgagaccagcctggccaatgtggtgaaaccctgtctcttccaaaaatacaaaaattagctgggcgtggtggcacacgcctgtaatcccagctacttgggaggctgaggcaggagaatcgcttgaacctgggaggcagaggttgcagtgagccgagattgcgccaccgcactccagcctgggtgacagagtgagactccgtctcaaaaaacaaaaaggtgacacatccagctctttctccaggtcactgcgctggaggacagatgtgccgtcttgtcctgcctgtttcacatcagcataggatcaaaggatgacaatgctgacagcttctgaagccgaactcaacagtctcataggctcctcacttgtcacttatttttccctagctccctcaaccgcaccccatccctttagatcgtgcgtctgttttagtgactctgacacgatgccgtcctcaccttccaaatacccagttatttattcaagaggggggaagtgggtagaggatgggatgttttggaagcactttgcaagttaccactatctgaaaatcccctgctgttgcggggagaagctttgaatgcactgaagagaattccttctaaatgaaggcaggtgatagtgttctttctgtaagtaaagggaaagaaaaaaaacatagtttgcttaccaggtggagacaagattcaagacatagcagaagagtggaagacaaatattttccacttaaatgaggctgtttttgacgttctctgccaaggatttagagctttcgttgaactaacataaaaggagtgcgagtcttagtagagatgttccgtgtgtgccgcccgtgctctgaactgcgtttccacctgctgtggtgcttgtgcagcctggcagttcattgtcatctttaataaactaaggaaataaaattctgtctttcgtcagcctgccttgactgtcaagaaatggcatgtgtccactgtaaagcaggtatatctgaacattgagaaggtttctgtgttataatgtaaagcaaactggaccacacacatcaaggaaagtgaggtggagtggctgtgtctctaacttgccatgagacctcgagcgaaccacttcacttctctgggtttctggtgcatggtgtaactgtcacttaaaatgaggtgtcttcctctccgcaacatctgacttgccttagatgcttcagttcccacttctgtgagcagctagcatctttctcttctgctcctggcccactggagctccagctctacgctgcaactctctcaacatttccccttaaatgtccccttgtcatctccaaccagtgtgtctaaaaccagcataaattccgtatttccaaaaacctaaccattagtcacccaggtttgaaaattaattgtcttcaacttcctctgtaagtggcacactgagctcatcacgcatcgtctcattcctactccctgtcatcaagttctgtggatgttttcctctaaaataaatctctcattacttttctgccactagcacacaaa

SEQ ID NO: 508 - DNA, 636 bp, Homo sapiens
  source 1..636: mol_type = genomic DNA
ggaaggaagccggggagacaggtggggtactcgggaagctggagcgggccggcggtgcagtcacgggggagcgaggcctgctgggcttggcaacgagggactcggcctcggaggcgacccagaccacacagacactgggtcaaggagtaagcagaggataaacaactggaaggagagcaagcacaaagtcatcatggcttcagcgtctgctcgtggaaaccaagataaagatgcccattttccaccaccaagcaagcagagcctgttgttttgtccaaaatcaaaactgcacatccacagagcagagatctcaaagattatgcgagaatgtcaggaagaaagtttctggaagagagctctgcctttttctcttgtaagcatgcttgtcacccagggactagtctaccaaggttatttggcagctaattctagatttggatcattgcccaaagttgcacgcactgcctccttacctgtgaggaatgcaaaataaagcatggattaagtgagaagggagactctcagccttcagcttcctaaattctgtgtctgtgactttcgaagttttttaaacctctgaatttgtacacatttaaaatttcaagtgtactttaaaataaaatacttctaatggaa

SEQ ID NO: 509 - DNA, 2025 bp, Homo sapiens
  source 1..2025: mol_type = genomic DNA
aagggccgccccttttcctgcccacgtggtctcgggctcctgccccgtcctgctcacgagttcagggctcctgggcggccgccttttccagttccaggtgtgcagaagtgtcctctccccacgcgcggcgggctgcacttggtcgctggctccgagatcgcgcggggccgccggaagcccaagacggtaccgggggccgcagccgcagccggcgccgccctccgccctccccaacagcaggccgagtcccgtagcatccggtagggaaatggtcgtgctttcggtccccgccgaagtcaccgtgatcctgttagatatcgaaggtaccacaaccccgattgctttcgtgaaggacattttatttccttacatcgaagaaaatgttaaagagtatctgcagacacattgggaagaagaggagtgccagcaggatgtcagtcttttgaggaaacaggctgaagaggacgcccacctggatggggctgttcctatccctgcagcatctgggaatggagtggatgatctgcaacagatgatccaggccgtggtagataatgtgtgctggcagatgtccctggatcgaaagaccactgcactcaaacagctgcagggccacatgtggagggcggcattcacagctgggcgcatgaaagcagagttctttgcagatgtagttccagcagtcaggaagtggagagaggccggaatgaaggtgtacatctattcctcagggagtgtggaggcacagaaactgttattcgggcattctacggagggagatattcttgagcttgttgatggtcactttgataccaagattggacacaaagtagagagtgaaagttaccgaaagattgcagacagcattgggtgctcaaccaacaacattttgtttctgacagatgttactcgagaggccagtgctgctgaggaagcagatgtgcacgtagctgtggtggtgagaccaggcaacgcaggattaacagatgatgagaagacttactacagcctcatcacatccttcagtgaactatacctgccttcctcaacctagagaagggttgttaaggcagaccgccctgttccccagagttgtccctgtagtgtctaggtttattctaatggtaaaagtaacttacttaaaaaacatatgtacacatatgtatgcaagtatgtatatatgtgtatgctcagattaacttccataggtacataagtgaaagaagtctcagttcagtgaacacaaaacttatttaaagatgctttatatgtagaaattgtttcaaatcatactctaacccttagtgagggcaaagtgtagttggtagaagaaattgctaaatacctatctaatgtgctatgtttatcaaatcgtgtactaaaatggaaagctagttttgagaaattattcagaagccttgttattttaaaaatgaaatatttcaaagactgaatattttcaaagaaaatgaataattcattgcccttgtgatttagaagattataacagctgtatttcatatttgcctccttatatatatcaaagaccaaggtatttccttctgcttcaaaagaacaaaattgggaaagaaaactcacttgagtcttgatcaaacaagtgtcttttacttaagaagaaacttggtaatcattgtggcacccacagcaagcagttgccttaccagtgaaaaaggtgcactgaggtaacatctaaaacagagatgtggttcttaatgtttaacagaacagttctaatcctgccacgtgttatcattatagattttatagttgcctttctaactacttagcacagtttgagaatacgttaattgctatttactatttaaaaagttttactgaaatcagtccataacattaagatgagccctaatatgtaagattttcctctggaatggatgtgagaaatgtaaattttataacagcagtatttatcctggtttaattctaatacgatgtcatgttaatttcatgttgtgattaataaaagcattttttcttcactca

SEQ ID NO: 510 - DNA, 1517 bp, Homo sapiens
  source 1..1517: mol_type = genomic DNA
agagataccactgagtccagaagcaagacctgtgagagtgcacagtgccacttcgccccatggctgaagatggtttgcccaaaatttattctcatcctccaacagaaagcagtaaaacaccaactgcagcaaccattttctttggggctgacaatgctattcccaaatcagaaacaactattacttcagaaggagaccacgtcacttcagtaaatgaatatatgctagaaagcgatttttcaacaactacagacaacaaactgacagctaaaaaggaaaaactcaaatcagaagatgatatggggaccgactttattaagtcaacaactcacctacagaaagaaattacctctctgactggcactacaaactccataacaagagactctattaccgaacatttcatgccagtgaaaattgggaatatttcatcaccagttactactgtttctttaatagatttttccactgacatagcaaaagaagatatcctcttagctaccattgacacaggagatgcagagatctcaataacctctgaagtctctggcacactaaaggacagcagtgctggtgttgctgacgctcctgcctttccacgtaaaaaggatgaagctgatatgagcaattataattcctccatcaaatccaatgtccctgctgatgaggctgtccaggtcactgattccactattcctgaggctgaaatccctcctgctcctgaagaaagcttcactactattccagacataactgcccttgaagaagagaaaataaccgaaattgacctaagtgttttagaagatgacaccagtgctgtggctacattaactgactctgatgagaagtttatcactgtgtttgaactcactacctctgctgaaaaagacaaagataaacgggaagatactctgctaactgatgaagaaactaccgagggagccagtatttggatggagagagatactgcaaatgaagcagagacccattctgttttgcttactgctgttgaatccagatatgacttcgttgtccctgcatcaatagctacaaacctagtggaagaatcatctacagaagaagatttgtctgaaactgataatacagagactgtacctaagatcactgagccattttctggaactacctctgtattagataccccagactataaggaagacacctccacaactgaaacggatatctttgaactactgaaagaagaacccgatgagttcatgatttaaaagcaacaaaagggataccatgtagaattgtgcaatagtctagccagctagccttaacatctaagaaatttttccaacaagcaaaaacctttagaaatgaaagaatgtgggcatttaaggtcttaaacactgaatatcacactcttcttatgactcttgttagcgattcaaggacataaatcttcattcttttctggcacagactacttaaatgggtctgttttcactttgctcatttttcttcaataaatctttttggcaagcaactga

SEQ ID NO: 511 - DNA, 1104 bp, Homo sapiens
  source 1..1104: mol_type = genomic DNA
agcacttgaagttcaggcagcgagagttgacatggggccagggctgcgcccctggggcgggttgaagacagggtgagtctcttgatattcaggaaatcatcgcgcacccagtcaccagcgttcgggagcctgtcgcagcgggaccgacggaatccggagcaggcgacagggcgcagaagcgggatgtacttctgttggggcgccgactccagggagctgcagcgccggaggacggcgggcagccccggggctgagctactgcaggcggccagcggggagcgccactctctgctgctgctgaccaaccacagggtcctctcgtgcggagacaacagcaggggtcagctgggccgcaggggcgcgcagcgcggggagctgccagaaccaattcaggcattggaaaccctaattgttgatctcgtgagctgcgggaaggagcactccctggctgtgtgccacaaaggaagggtcttcgcatggggagctggttctgaagggcagctggggattggagaattcaaggaaataagtttcacacctaagaaaataatgactctgaatgatataaaaataatacaagtttcctgtggacactaccactccctggcattatcaaaagatagccaagtgttttcgtggggaaagaacagccatgggcagctgggcttggggaaggagttcccctcccaagccagcccgcagagggtgaggtccctggaggggatcccactggctcaggtggctgccggaggggctcacagctttgccctgtctctctgtgggacttcgtttggctggggaagtaacagtgccgggcagctggccctcagtgggcgtaatgtcccagtgcaaagcaacaagcctctctcagtcggtgcactgaagaatctaggtgtggtttatatcagctgtggtgatgcacacactgcggtgcttacccaggacgggaaagtgttcacatttggagacaatcgctctggacagctgggatacagccccactcctgagaagagaggtccacaacttgtggaaagaattgatggcctagtttcgcagatagattgtggaagaaactctaagcatggatttatgactttcttttag

SEQ ID NO: 512 - DNA, 2902 bp, Homo sapiens
  source 1..2902: mol_type = genomic DNA
agggtgctcggctcgcggggactggcctccttcggcagctggaggcggtcactcacgctgggctaggagctgaggcgagaagggccatgcggacggcgagggagtccagagccttgagcccggtgctcctccctcgcgcagcggtggctctgcggccgctggagtaaacactgcctttgttccctagcgcctcgtctttcgtcgccccgtgccctcacgccgccgggctctggccggcccgccctcggtccttgaaccccatttcggctcgtgccgtgcggatgcagctgccgggcctgggtttgggcattgagcgggaggaggaggaggagcggcggcgcctgggcggcatgcgatggggaactgctgctggacgcagtgcttcggactgcttcgcaaggaagcggggcggctgcagcgagtaggcggcggcggaggatccaagtattttagaacatgctcaagaggtgagcacttaacaatagagtttgagaatctagtagaaagtgatgaaggggagagcccaggaagcagtcataggcctcttactgaggaagaaattgttgacctaagagaaaggcattatgattccattgccgaaaaacaaaaagatcttgataagaaaattcaaaaagagttagccttacaagaagagaagttaagactagaagaagaagctttatacgctgcacagcgtgaagcagccagggcagcaaagcagcgaaagctcttggagcaagaaaggcagagaattgtgcagcaatatcatccttccaacaatggagaatatcaaagttcaggaccagaagatgacttcgaatcttgtttgagaaatatgaagtcacagtatgaagtttttcgaagtagtagactctcatcagatgctacagttttgacaccaaatacagaaagcagttgtgatttaatgaccaaaactaaatcaactagtggaaatgacgacagcacatccttagatctagagtgggaagatgaagaaggaatgaatagaatgcttccaatgagagaacgttccaaaacagaggaagacattctacgggcagcacttaagtatagcaacaagaagactggaagtaatcctacatcagcctctgatgattccaatgggctggagtgggaaaatgattttgttagtgccgaaatggatgataatggaaattccgagtattctggatttgtaaatcctgtattagaactgtctgattctggcataaggcattctgacacagatcaacagactcgatagggtaaaattgtgtgaccttgtttatcagttatgaccaaatgttaaaaaccaactagaatgtataagtgattgtgcttagcctttttgtaagggagatgtgtaagaaaccatgttgtaaatgcttattttattacaaaggagtagggatgataggatctgaattgatacagaattaagtgcaatttcatcatctgccttctgcttttcaagaccaatttaatggtcctgtcatgttactgattaaatttactttgtcttgtctttatagcatttctgtttactatggtagatttccactttcaatttttaaaattaattttactttgaatgatttatgaagcctatttcattgtctaactatgaaaatattaagacttttttgttaattctcagccgatgtgaaggaagcatgaggagggatcgtcagattcagatttagaatagtgttcccgtttccagcattatttatttctatgacttctttggattttattatctaatagtaagtacagttgatgtgggtagatgactctaagaaatgctgaagtatcggcattacatgtgtttatttacatgtcctagtatgataatgttgattcaatctgaacaaaagataatataaaaataacccttcagagtttggacatttcaagttggtaataataaaaaataatatttaagaagatatatatatatatatatttagttttttccacttcattttacatgccactatattgactttaattgatatacagtattaagtttttaggtgccattatttttaaaaaattctatatttccaatgaacgatgttagattttacacagaacatattctctgcatgatttcagaaaagaaaatctaaaaaggtaatacgggtatttcaaataaaatcctttctggtatgaaaggctccattgattttattaagccttcctttaccttgtagtacaaggtgctttaatgggatagaactaagcatatcaatatctataactgcattttgtgctagacaattactgttcttttctctaaaatgtatatgtcaatttacaaggccagggatagaaaacactccataattgctttccttgattttgctgaggatttggtatgattttagtaagcaaactgttttttggtttttccttaatgtttttaattttttttcctcttgcaacaatgacggtgcatgttcttataaatataggaaggtccagatataaatagtaacctaaagttcttgctgtgcttaaaaaaaaaaatcatgtggccctttcaatatttgaactgctaagcaatgacatctgtagttttatctccttttttatgtcatagaaattaatatgatactttaaatatgtaaatataatacattaggtaatgctattatttatatctgtcttaacataatttaagttgtagctgtgtcttggaaatatttttaaggtaatctatattcacattgcctgtgttaatgctttttaaagtttgtatacatcagatgtatatttttggtttggcataagctacgattgtaatttttcttggctttttgttcataaagaattttttgaaggaatggtaacaaatggtaatttacaaatggttgtgaataaacacatttttacactt

SEQ ID NO: 513 - DNA, 1829 bp, Homo sapiens
  source 1..1829: mol_type = genomic DNA
tttctgtggcgcttcccctgcgaggatggctaccctggttgtaaacaagctcggagcgggagtagacagtggccggcagggcagccgggggacagctgtagtgaaggtgctagagtgtggagtttgtgaagatgtcttttctttgcaaggagacaaagttccccgtcttttgctttgtggccataccgtctgtcatgactgtctcactcgcctacctcttcatggaagagcaatccgttgcccatttgatcgacaagtaacagacctaggtgattcaggtgtctggggattgaaaaaaaattttgctttattggagcttttggaacgactgcagaatgggcctattggtcagtatggagctgcagaagaatccattgggatatctggagagagcatcattcgttgtgatgaagatgaagctcaccttgcctctgtatattgcactgtgtgtgcaactcatttgtgctctgagtgttctcaagttactcattctacaaagacattagcaaagcacaggcgagttcctctagctgataaacctcatgagaaaactatgtgctctcagcaccaggtgcatgccattgagtttgtttgcttggaagaaggttgtcaaactagcccactcatgtgctgtgtctgcaaagaatatggaaaacaccagggtcacaagcattcagtattggaaccagaagctaatcagatccgagcatcaattttagatatggctcactgcatacggaccttcacagaggaaatctcagattattccagaaaattagttggaattgtgcagcacattgaaggaggagaacaaatcgtggaagatggaattggaatggctcacacagaacatgtaccagggactgcagagaatgcccggtcatgtattcgagcttatttttatgatctacatgaaactctgtgtcgtcaagaagaaatggctctaagtgttgttgatgctcatgttcgtgaaaaattgatttggctcaggcagcaacaagaagatatgactattttgttgtcagaggtttctgcagcctgcctccactgtgaaaagactttgcagcaggatgattgtagagttgtcttggcaaaacaggaaattacaaggttactggaaacattgcagaaacagcagcagcagtttacagaagttgcagatcacattcagttggatgccagcatccctgtcacttttacaaaggataatcgagttcacattggaccaaaaatggaaattcgggtcgttacgttaggattggatggtgctggaaaaactactatcttgtttaagttaaaacaggatgaattcatgcagcccattccaacaattggttttaacgtggaaactgtagaatataaaaatctaaaattcactatttgggatgtaggtggaaaacacaaattaagaccattgtggaaacattattacctcaatactcaagctgttgtgtttgttgtagatagcagtcatagagacagaattagtgaagcacacagcgaacttgcaaagttgttaacggaaaaagaactccgagatgctctgctcctgatttttgctaacaaacaggatgttgctggagcactgtcagtagaagaaatcactgaactactcagtctccataaattatgctgtggccgtagctgtttttcagataatatgtgaccaatatactgggaaagaggtagtcacagagaaagggtaaaaggtcatgctgttacaggtgtagtttgtgtgcataaataatacttccgaattaaattatttaatatttgactgatttcaataactgtgaaaaataaaaaaggtgttgtattgcttgtgagaa

SEQ ID NO: 514 - DNA, 1469 bp, Homo sapiens
  source 1..1469: mol_type = genomic DNA
gcggccgccattggctgggttcggcgcagctaacagacggcggcagtgcgagaaagccgaagatggcggtccccgcggcgctgatcctacgggagagccccagcatgaagaaagcagtgtcactgataaatgcaatagatacaggaagatttccacggttgctcactcggattcttcaaaaacttcacctgaaggctgagagcagtttcagtgaagaagaggaagaaaaacttcaagcggcattttctctagagaaacaagatcttcacctagttcttgaaacaatatcatttattttagaacaggcagtgtatcacaatgtgaagccagcagctttgcagcagcaattagagaacattcatcttagacaagacaaagctgaagcatttgtcaatacgtggtcttctatgggtcaagaaacagttgaaaagttccggcagagaattctggctccctgtaagctagagaccgttggatggcagcttaaccttcagatggctcactctgctcaagcaaaactaaaatctcctcaagctgtgttacaactcggagtgaacaatgaagattcaaagagcctggagaaagttcttgtggaattcagtcacaaggagttgtttgatttctataacaagctagagactatacaagcacagctggattcccttacatgatgttttcgaagactgtttttttcatcacgctcctgccacctcattattttgcattgaagatacattgccaggttgtgttttctgaaggattcagtgacttgctttctgtaaattatatggcttatcacttcttagacaaataacaaccaatagagatcattgttaagaatactgaggttctaatatactttctttagttctgtgagccaacagtaattattaagaacactttccctttaaaggaaacaaaagtgaataccatattgtttttactgtcatagtgttgctttcttgcctgtcctgcttagtttttacttgctggatgataccataatgtatcaaggagcgtccatggatacaagataagatgtgtaccttagtagaatacagagctttggtaattacatgaataaaattaagaaaatagccatatacaatcaaatacactatggcatttttatttgaatatgatgagtatattttgcttcggaaataatataggaaggaaatgtaaaatagtgagtagtatggtatcagttaattccagtctgagcttctctgtcaacttcagtttctctctcagtttaatgatttaataatagtccaggtttttgtgtgtttttctttatactgcaaattaataatgattcactttatagtttgggagacagaatcaggtcttgaataaaataattgtaatgagtgctaaatgggcaccattattcgaatcagataccttttatattctctttccataaatacgttgatttctgtcaataaaatttttgtgtcttagga

SEQ ID NO: 515 - DNA, 2368 bp, Homo sapiens
  source 1..2368: mol_type = genomic DNA
acatgcgcagtagctgtaggagggggtgggcgctccattgggcgtttctcttggtttttcctttccgcgcggcttgggcggacgtctcgtgagacgtgggacttctcgcgggaactgcattcaaatatcccaggcgcttactcgagagctagctgagcgaatgggccggcgactgtggagttagcgtcctcaatgtggacgccctgagctcccattaggagccgctggctgcggcagcaggggactagcgtgagagttggctaaaaaaaagaaaagaacatggaggcagatataatcacaaatcttcgatgcaggctcaaagaggctgaagaagagcgactaaaagctgcacagtatggtttacaactagtagagagtcaaaatgaattacagaatcaattggataaatgtcgtaatgaaatgatgaccatgactgagagttatgaacaagaaaaatatacccttcaaagagaagttgaactcaagagtcgaatgttagaaagtttgagctgcgaatgtgaagctattaaacaacaacaaaaaatgcacctggagaaattggaagaacaactaagcagaagccatggacaggaagtgaatgaactaaaaactaagatagaaaaactgaaagtggaattagatgaagccaggcttagtgaaaagcagctgaagcaccaagtagatcatcagaaggaactcctctcttgtaaatcagaggaactgcgcgtaatgtctgaacgtgtgcaggaaagcatgtcttcagagatgctggctcttcaaattgagctgacagaaatggagagtatgaaggtcaagtatcagtcactaaagaagcaaaatgtatttaacagagaacagatgcagagaatgaagttacaaattgccacgttgctacagatgaaagggtctcaaactgaatttgagcagcaggaacggttgcttgccatgttggagcagaagaatggtgaaataaaacatcttttaggtgaaattagaaatctggagaaatttaagaatttatatgacagtatggaatctaagccttcagtcgactctggtactctggaagataacacctattatacagatttacttcagatgaagctggataacttaaacaaagaaattgaaagcactaaaggtgaattgtccatacagcgaatgaaagcattatttgagagccagcgggctctagatattgagcgaaaactttttgcaaatgaaagatgcctccagctttcagaaagtgaaaatatgaaactgagagctaaactagatgaattgaaactaaaatatgaacctgaagagacagttgaagtgcctgtactgaaaaagaggcgtgaggtgctccctgtggatataaccaccgctaaagatgcatgtgtcaacaacagtgctctcgggggagaagtttatcgattaccgcctcagaaagaggagacacagtcctgccctaacagtttagaagataacaacttgcaattagaaaaatcagtttctatatacacaccagtagtcagtctctctcctcacaaaaatctgcccgtggatatgcagctgaagaaggaaaagaaatgtgtgaaactcataggagttcccgctgacgctgaggccttaagtgaaagaagtggaaacacccctaactctcccaggttagctgctgaatcaaagcttcaaacagaagttaaagaaggaaaagaaacttcaagcaaattggaaaaagaaacttgtaagaaattacaccctattctatatgtgtcttctaaatctactccagagacccagtgccctcaacagtaaagacttgtctttaataagagtacggtgccacttgcctcaaaagttactatggtgcttaagattgtcttgatctgacatatatcaccttctgggttatttactcattgtgccaggacctggcattttcatgtgcctttgaccaagtgttcagaatttgcttgactctaacctggagagcttcttaagtgatgccccttcatggagcttctatgacagtgaataaactattaattgaaggaaaatgttataattaatgtatctatttgctgcattgtatatggattaaatgataaaaaacaagtaatctaccctcagagccatgtatttgagaatgcttcaatcatattttcctatgtacttttttttataaacttagttttagactatgttgtaaaaatgggaaggttgtaaactatgttgtaaaaataggaaatgtggcttaaaatatatacattatattgtttcaggattttgtcagtgtttaaagaaccaatgttcatctttgtatttatatacatgatttaaattttgtctaaaattttaaataaaactgcagtgatttatcctt

SEQ ID NO: 516 - DNA, 4599 bp, Homo sapiens
  source 1..4599: mol_type = genomic DNA
actttgccagagcggccgggtccccattcccattccttcaaatcccctttttcccggcagccgacctgtagacccaagggagacaggttgaagctagaaagagtcggggcagcagctctggtaggggagggagcatccaaaacctctggcttctgagcgcctctcctgccgcccatccacaaagccccccacagcctggcggctgccctcgaccccgcaaaacaaaggacttcagaggctggacctacagacccagatgagaaggcaaaagcgtagggaggagcggcaggagatgggaagggcgggccccgctcggagcagctgccgcttcctcccaaagtcccacgaggggcctgagtcacgggccaccgccctgggtcggcgagctgggggaagggatctggacacctggcgtgtccgggcgggaagctggtgagggcccctggggacagagcggaggaccagtggttggggcgagaagagggcagtcccgcagcgagtcccacgcggggtgggagggatctaggccccgccctctcctcggctccgccctgcgcccccttccctctcctcattgtccttagacaaagcggtcgccgcccccgcccggccccctggtctctgtctccgtccctcctcctttgctgcctctttccctcctcctctccctccctcctcccctccctccagtctccggatctccctcggtccctctctcctcctcttcctctctctggacgcccggctcctccgcaccccctcccccgggggtcccgcggcctgtgagttgactgaggggctcagacttggggagtgggtgtctcctcgcccctgtccttgctcccgtccctggcccggaccttggctgtctcctctttgtgccgagattgtcagtctgtgcggctacagcggggtggagacggccggctctgtcacggcttcatgagagcggggacggggcgcaggacttgcaggcgccggggagaagagacatggagccggcccttggcactctggggtcgcgtggggcagtcggtgggggaggcaggcggtggtgacaggacagggtgggggtggacgccagggttctgggaacgcgctggcagccctgacgcccgggttccgaaagtctcgggggtggctatttcccccgacccgcctcgggggcggagtgcggggcagaggggtgggggctggggagaggcgtggcccgagcggtgctggaagcggagccgggacctttggggcccgcgctgagacgcgcccggctgctgccgccgccctcctttcccctcttccctggtttcccttctcctctagacctgttcgctctccgcccctccttgcctccccaacaccccctcaggtcccgttgcctcctggtcctttcagggattcctggtccttccttcccacactagcctccctggggtatcgctgaggcagcctggcctgcacccaggttcccctcacccctgccacatttctctcttctccctcacgccaactttccttttcgcccttctctctctttctcacatcctagagacggtctttaatacgcattaaccctgtgctgccacatctggctcctgccctcattgcctccaatccggactcttcctctcacatcacccccaccacccccaacttgggctcacaacttctcttcactttttccatttccccagttctctgccttccgtctttccctctgtcctcatccttagcccctctgccctgctttgtgtcccacctctccccctccacttcctctcctcccaccctcagtctcacccccgggctgtctcactctctggagcctctccttcctgttctctgtccccagtgctccctaccctcacctcaagacgaccatggccaccatcccagactggaagctacagctgctagcccggcgccggcaggaggaggcgtccgttcgaggccgagagaaagcagaacgggagcgcctgtcccagatgccagcctggaaacgagggctcctggagcgccgccgggccaagcttgggctgtcccctggggagcctagccctgtgctagggactgtagaggctggacctccagacccggatgagtctgcggtccttctggaggccatcgggccagtgcaccagaaccgattcatccggcaggagcggcagcagcagcagcagcaacaacaacggagtgaagagctgctagcagagagaaagcctgggcctctggaggcccgggagcggagacccagccctggggagatgcgggatcagagccccaagggaagagagtcaagagaagagagactaagtccgagggagaccagagagaggaggctggggatagggggagcccaagagttgagcctgaggcctctggaggctcgggactggaggcaaagcccaggagaggtgggagacaggagctcccgactgtcagaggcatggaaatggaggctgagtcctggagaaactccagagcggagtctgagactagcagagtctcgagagcaaagccccaggagaaaagaggtggaaagtagactgagcccaggggaatctgcctaccagaagttgggcctgacagaggcccataaatggagacctgactccagagagtctcaggaacagagtttggtacaactggaggcaacagagtggaggctgaggtcaggagaagaaagacaagactactcggaagaatgtgggagaaaagaagagtggccagttccaggggtagctccaaaagagactgcagagctgtccgagaccctgacaagggaggcccaaggcaacagttccgcaggagtggaggcagcagagcagaggcctgtggaagatggcgagaggggcatgaagccaacagaagggtggaaatggaccctgaactccgggaaggctcgagaatggacacccagggacatagaggctcaaactcagaaaccagaacctccagagtcagcagagaagcttctggaatctcccggtgtggaggctggagaaggggaggctgagaaggaggaggcgggggctcagggcaggcctctgagagccctgcagaactgctgctctgtgccctcccccctcccaccagaggacgctgggactggaggcctgagacagcaggaagaggaagcagtggagctccagcccccaccaccagcccctctgtctcccccacccccagccccaactgccccccaacctcctggggatcccctcatgagccgcctgttctatggggtgaaggcagggccaggggtgggggccccccgccgcagtggacacaccttcaccgtcaacccccggcggtctgtgccccctgcgaccccagccaccccaacctctccagccacagttgatgctgcagtcccgggggctgggaagaagcggtacccaactgccgaggagatcttggttctggggggctacctccgtctcagccgcagctgccttgccaaggggtcccccgaaagacaccacaaacagcttaagatctccttcagcgagacagccctggagaccacgtaccaatacccctccgagagttcggtactggaggagctgggcccggagcctgaggtccccagtgcccccaaccctccagcagcccaacccgacgacgaagaggatgaggaagagctgctgctgctgcagccagagctccagggcgggctgcgcaccaaggccctgattgtggatgagtcctgccggcggtgaccatcttccaacatagggatatacctccctccttcttataactgaagatcctggagcccggaagattcagggcagacagaccctgataatgagcctggcagggaagggcaaccaacatcttgtaacttgctttccccaccctgtttctgggggcagagccaattgcccaatttctaccctaatccaaagtccctggtgtgggtggggttaaacgtgctggtgcatcctaggtcatccaagagtgagcgccaagtcctgagaaggggcacagaactccctggagggtggagatggagcacctgccccccatggcagggtacactctccccacagccttcctccccaccatcccgtggggactctcgggatttaagcactcgtctctctgggaggcccagaccccactccatttataggcacatctccttcatttcctaggtcactgcccctttgtttacagctcctgcctcctcccttgaccacagcctggtttacaaattccatcagctcccagccccacctgccaaagtcccaggtttacaagccacgcttacttgctgtgtctgcgtggaattctctcctctgtcccctccagtctcctcattggagtgacctgaaggtgtggcttcctccactttttctcagtattactttgccttagttttccccaagagggaaggctggaactcttaactctgtaccccttgatagttatttaattctgtttctcctagtggttcacaattgaactgaattgagatggtgtcgggtggctaaggagacacctcacctctccttccccattgtgccgcctttatcaattgcctgttttgttttgtttgttttttaactttccataataaaatggagttctcttcaa

SEQ ID NO: 517 - DNA, 800 bp, Homo sapiens
  source 1..800: mol_type = genomic DNA
gagctatgagctggacctgtccgcgttgccagcaacctgttttcttcgctgagaaggtgagctccctgggcaagaactggcaccgcttctgcctgaaatgtgagcgctgccacagcatcctgtcccctggcgggcatgcagagcacaatgggaggccatactgccacaagccatgctatggggctctctttggacccaggggggtgaacattggtggtgtaggctcctacttgtacaatccccccactcccagccctggctgcaccactcctctcagccccagcagcttcagccctcccaggccaaggactggcctcccccaaggcaagaaaagccctccccatatgaagacattcactggggagacctcgctgtgccctggctgtggggagcccgtctattttgctgagaaggtgatgtcattaggcagaaattggcaccgaccgtgtctgaggtgccagcgttgccacaagaccctgactgctgggagtcatgctgagcatgatggagtcccctactgccacgtcccctgctacggctacctgtttggccccaaaggtgggcagccccatcccagacactgggatggcatgtacatgcctgaagtatggcatgtacatggtctgtgggtatgtgtggacaacttcccctgtggttaagcataccctggcccccccaccaagttccctctaggcctgaaccctgcaccacagacccagggcctttggtgatagggctctctctctcaggtgtgaacattggcgatgtgggctgctacatctatgacccagtgaagataa

SEQ ID NO: 518 - DNA, 2540 bp, Homo sapiens
  source 1..2540: mol_type = genomic DNA
atgaatcaacgaaggagtgagtcaaggcccgggaaccacagactccaagcctacgcagagcccgggaagggggattccggaggggcggggcctctttccggaagcgcccgccgggggcggggagggggcggggccatccgcgtgaggcgaccctgttggtccggaggggcggggcgaggaggaggacccgcttgggcggttcggctgcccacagtaaccgctgggtggacctggccagcgctccgaaccttgtcctcgctgcgcgccggcccctcggagccccacagcccgggaaggaggccgccgcgggccgggcgcccgctctgccaagcggacccgcaacccggaaaggcggcgcggcggagcctggagccggatcctgctcagaccgggccccggccggccagagccgcgggcatgtcggaggcgcggaaggggccggacgaggcggaggagagccagtacgactctggcattgagtctctgcgctctctgcgctccctacccgagtccacctcggctccagcctccgggccctcggacggcagcccccagccctgcacccatcctccgggacccgtcaaggaaccacaggagaaggaagacgcggatggggagcgggctgattccacctatggctcctcctcgctcacctacaccctgtccttgctggggggccccgaggctgaggacccggccccacgcctgccactcccccacgtgggggcgctgagccctcagcagctggaagcactcacttacatctccgaggacggagacacgctggtccacctggcagtgattcatgaggccccagcggtgctgctctgttgcctggctttgctgccccaggaggtcctggacattcaaaataacctttaccagacagcactccatctggctgtacatctggaccaaccgggcgcagttcgggcactggtgctgaagggggccagccgggcactacaggaccggcatggtgacacagcccttcatgtggcctgccagcgccagcacttggcctgtgcccgctgcctgctggaagggcggccagagccaggcagaggaacatctcactctctggacctccagctgcaaaactggcaaggtctggcttgtctccacattgccacccttcagaagaaccaaccactcatggaattgctgcttcggaatggagctgacattgatgtgcaggagggcaccagtggtaagacagcgctgcacctggctgtggaaacccaagagcggggcctggtacagttcctgctccaggctggtgcccaggtagatgcccgcatgctgaacgggtgcacacccctgcacctggcagctggccggggtctcatgggcatctcatccactctgtgcaaggcgggtgctgactccctgctgcggaatgtggaggatgagacgccccaggacctgactgaggaatcccttgtccttttgccctttgatgacctgaagatctcagggaaactgctgctgtgtaccgactgaagccaggcagggtctgggatcctcagggctccacctctccatctggaagccggagccataactgctgcagtttgggcccaggctatgtgctcttctggtgccctagggactgctgtggccagagcctggggccagccagtacagtcctgagccgaggaggagggactgcaagtggaagagagccagtctggaaggaagagctttccaggtggacagggcttcttggaagacccccaaagccccaggtatcctgggtgaagcctgtttgcctctcttgaaaatggcaggtgctcttgttttacccatgttgggtcagcctgaaactgccaaccagtaggaagcatggactctcctgagtgagaagagactgaaataggagcaagcagaaccctgagaggtgtcccatcttattgctgttgaggaccctgaaacaccgttgtttaaagacttcacacagaaggctctgaactgagccactggggaagggaagtttcagtaacatgacactaaaatggcagagacgttaaaaaaagtttttcccttctagagctgttttgcgcgcatgcatgtctgtgtgcattggggctttttagacaggcctgccctgtgactttgtggtagaggcagagagaaggaaattgtcccctgagcacggtagggccttgctgggtggggtcagaggccagtagttccaggcctttctctgtgtccagcacagacccttgtccttgctgtggaaatgatgagggatggagggacaagaggaagaatgagaggacacacgccctggagccctcaccactgccctgggggttgccatctggaggagcctggggataagggtaacccagggaggctgggcacgagggagctgactccacgtttttccccccgttcctcaccttcgagggccctgctaggtcacccctatgctggcatgaagagcatggggcaataaaccagcacagtctctgaccacttggagcgtctcatccagtgagagagacagccgttaaaagcataaacatccaaataaa

SEQ ID NO: 519 - DNA, 2491 bp, Homo sapiens
  source 1..2491: mol_type = genomic DNA
acaatgtccctttgggtgaggaggttgaaagagtttttggtttgttctgggaacttaaggtatattaagcagtccccacagacatgctgcctgcactccacctgctgagctggctctgaggctcaggagacgtggccctctgtggtcccattgtctccacgtctgtggtaacccggtgcctttctagagcaggcaggctcccggcatgggtggaaacagagcagggggccagcttcccccaatcaccggtgctgctgtggaggaagagcttggtggcgctaggacgtccttgtgaatgtgacttggaagagcagtttgggatttttttcattgcctggggatgagagggagagacaacgtgtgtcttacacatctcccaacagccgacttagatgtgatccgttctcccagagggagcaggtttctttgaacttttcctttttatgtacagcatagtgctgagcagatcactgcactgtgcaggagttttaacgacagtcaggccaacggcatggaaggaccgcgggagaatcaggatcctcctccgaggtctctggcccgccacctgtctgatgcagaccgcctccgcaaagtcatccaggagcttgtggacacagagaagtcctacgtgaaggatttgagctgcctctttgaattatacttggagccacttcagaatgagacctttcttacccaagatgagatggagtcactttttggaagtttgccagagatgcttgagtttcagaaggtgtttctggagaccctggaggatgggatttcagcatcatctgactttaacaccctagaaaccccctcacagtttagaaaattactgttttcccttggaggctctttcctttattacgcggaccactttaaactgtacagtggattctgtgctaaccatatcaaagtacagaaggttctggagcgagctaaaactgacaaagccttcaaggcttttctggacgcccggaaccccaccaagcagcattcctccacgctggagtcctacctcatcaagccggttcagagagtgctcaagtacccgctgctgctcaaggagctggtgtccctgacggaccaggagagcgaggagcactaccacctgacggaagcactaaaggcaatggagaaagtagcgagccacatcaatgagatgcagaagatctatgaggattatgggaccgtgtttgaccagctagtagctgagcagagcggaacagagaaggaggtaacagaactttcgatgggagagcttctgatgcactctacggtttcctggttgaatccatttctgtctctaggaaaagctagaaaggaccttgagctcacagtatttgtttttaagagagccgtcatactggtttataaagaaaactgcaaactgaaaaagaaattgccctcgaattcccggcctgcacacaactctactgacttggacccatttaaattccgctggttgatccccatctccgcgcttcaagtcagactggggaatccagcagggacagaaaataattccatatgggaactgatccatacgaagtcagaaatagaaggacggccagaaaccatctttcagttgtgttgcagtgacagtgaaagcaaaaccaacattgttaaggtgattcgttctattctgagggagaacttcaggcgtcacataaagtgtgaattaccactggagaaaacgtgtaaggatcgcctggtacctcttaagaaccgagttcctgtttcggccaaattagcttcatccaggtctttaaaagtcctgaagaattcctccagcaacgagtggaccggtgagactggcaagggaaccttgctggactctgacgagggcagcttgagcagcggcacccagagcagcggctgccccacggctgagggcaggcaggactccaagagcacttctcccgggaaatacccacaccccggcttggcagattttgccgacaatctcatcaaagagagtgacatcctgagcgatgaagatgatgaccaccgtcagactgtgaagcagggcagccctactaaagacatcgaaattcagttccagagactgaggatttccgaggacccagacgttcaccccgaggctgagcagcagcctggcccggagtcgggtgagggtcagaaaggaggagagcagcccaaactggtccgggggcacttctgccccattaaacgaaaagccaacagcaccaagagggacagaggaactttgctcaaggcgcagatccgtcaccagtcccttgacagtcagtctgaaaatgccaccatcgacctaaattctgttctagagcgagaattcagtgtccagagtttaacatctgttgtcagtgaggagtgtttttatgaaacagagagccacggaaaatcatagtatgattcaatccagatatgggttaaattcctcattttacttttaaactggtggtaaagtggaaattgcaaaaaaaaaaaaaaaaaaaaactgttcatt

SEQ ID NO: 520 - DNA, 2719 bp, Homo sapiens
  source 1..2719: mol_type = genomic DNA
caaggccgaggcgcgaagggtgggaccgcaggagccgtgcagccgcggaccaatgagcgggcgccggacgacctgtggcccaatggcggcggcgcgcgggcacgctgggggccggccagacgggccgacttttccagaagacccggatagttcctcccggccacgccgcgccggctctgggcactcagcatcgtttccttttcctccgctggagcagctatggcggcggtgaagaccctgaaccccaaggccgaggtggcccgagcgcaggcggcgctggcggtcaacatcagcgcagcgcggggtctgcaggacgtgctaaggaccaacctggggcccaagggcaccatgaagatgctcgtttctggcgctggagacatcaaacttactaaagacggcaatgtgctgcttcacgaaatgcaaattcaacacccaacagcttccttaatagcaaaggtagcaacagcccaggatgatataactggtgatggtacgacttctaatgtcctaatcattggagagctgctgaaacaggcggatctctacatttctgaaggccttcatcctagaataatcactgaaggatttgaagctgcaaaggaaaaggcccttcagtttttggaagaagtcaaagtaagcagagagatggacagggaaacacttatagatgtggccagaacatctcttcgtactaaagttcatgctgaacttgcagatgtcttaacagaggctgtagtggactccattttggccattaaaaagcaagatgaacctattgatctcttcatgattgagatcatggagatgaaacataaatctgaaactgatacaagcttaatcagagggcttgttttggaccacggagcacggcatcctgatatgaagaaaagggtggaggatgcatacatcctcacttgtaacgtgtcattagagtatgagaaaacagaagtgaattctggctttttttacaagagtgcagaagagagagaaaaactcgtgaaagctgaaagaaaattcattgaagatagggttaaaaaaataatagaactgaaaaggaaagtctgtggcgattcagataaaggatttgttgttattaatcaaaagggaattgaccccttttccttagatgctctttcaaaagaaggcatagttgctctgcgcagagctaaaaggagaaatatggagaggctgactcttgcttgtggtggggtagccctgaattcttttgacgacctaagtcctgactgcttgggacatgcaggacttgtatatgagtatacattgggagaagagaagtttacctttattgagaaatgtaacaaccctcgttctgtcacattattgatcaaaggaccaaataagcacacactcactcagatcaaagatgcagtgagggacggcttgagggctgtcaaaaatgctattgatgatggctgtgtggttccaggtgctggtgccgtggaagtggcaatggcagaagccctgattaaacataagcccagtgtaaagggcagggcacagcttggagtccaagcatttgctgatgcattgctcattattcccaaggttcttgctcagaactctggttttgaccttcaggaaacattagttaaaattcaagcagaacattcagaatcaggtcagcttgtgggtgtggacctgaacacaggtgagccaatggtggcagcagaagtaggcgtatgggataactattgtgtaaagaaacagcttcttcactcctgcactgtgattgccaccaacattctcttggttgatgagatcatgcgagctggaatgtcttctctgaaaggttgaattgaagcttcctctgtatctgaatcttgaagactgcaaagtgatcctgaggattacagctgtggaatttttgtccaagcttcaaataattttgaaagaaattttcccatatgaaaaaaggagagaacactggcatctgttgaaatttggaagttctgaaattatagtatttttaaaaattgcactgaagtgtatacacataaagcaggtcttttatccagtgaacaggatgttttgctttagcagcagtgacataaaattccatgttagataagcatatgttacttaccttgttattaaatatttcttgaaaagcaaattttaatggtttaattttatgtggacgtatgttaaattatccaactaccctattgttaagcatttggttttaaaatttttatgctaatataaatgctcaagtaatttaaaatattgaaagcatccctgttggtataaatttctgagtaaatgcattggatcagttggactttgaacgcctttgaaatggctttgctaaaatgctcccgccacaaagttgtaggaaatgggaagaggagtcaactagaggcaagggagttgagagagctgcaactgtaaagggcaagaacaggcagaggtaaaaagatgatggaaggtgtggtgactaagggccacggttattgggtgaaatttgagattgtaggccaactgtattttcaagcttctgaacttaggcaaaatattcatcgcaaagtctctagcgtcatatttttctcacccaaattacgtttccacgagattatttatatatagttggtctatctctgcagtccttgaaggtgaagttgtgtgttactaggctgtgttttgggatgtcagcagtggcctgaagtgagttgtgcaataaatgttaagttgaaacctc

SEQ ID NO: 521 - DNA, 1071 bp, Homo sapiens
  source 1..1071: mol_type = genomic DNA
caggctgagcgttggaagccattttggctgcaacctacctgaagcgatgtctgcctttggtcacgacgaggcctggatggaggccggaggctttggtctggaggctgccgaaagaacggaataccagtctctgtgcaaatctaaactcttattcctgggagagcagagcgggaagacatccatcatcagccgcttcatgtacaacagcttcggctgcgcctgccaggcaactgttggaattgacttcttgtctaagaccatgtacttggaggaccaaatagttcagctgcagctatgggacacagctggccaggagcgctttcacagcctaattcctagctacattcgtgattcaactattgcagtggttgtctatgacattacaaacatcaattcttttaaggagacagataagtgggtagaacacgtgcgagcagaaagaggtgacgatgttgtcatcatgttgttgggtaacaagattgatttggataacaaaagacaagtcactgcagaacagggtgaagaaaaatccagaaacctcaatgtgatgtttattgagaccagtgccaaaaccggttacaacgtgaaaaagctgttccggcgtgtggcttctgcccttctttccacaaggacttcacctccaccaaaagaggggacggttgaaatcgaactggaatccttcgaggagtcaggcaacagaagctattgttgacagcttaggctttctctgcctcatttgatggatttcttacatttgggcttgccataccagttctcctccccacctcgttttatgatacatggccacttactctcttccaattcctaggcttggggtaaaaacagaacccctgaaagtgctatcattttttcctgaccgcatctcacagctactgggtggaagcttcttgcagcacctgggaattctaccttaccttctccgacagctaaaagacatctgtagagaatacagttctacagcagctgacatacttcaaaggccaatacaattcattctccactgtttgttgttgtttacctacaccctcaataaatggttctttaacctaa

SEQ ID NO: 522 - DNA, 6625 bp, Homo sapiens
  source 1..6625: mol_type = genomic DNA
gcagtgagtccacccgcccgccgaggtccgcccgcccgccgagacccgcccgccgccgctgccatggccgaagtgcgcaaattcaccaaacggctcagcaagcctggcacggcggctgagctccggcagagcgtgtctgaggccgtgcggggctccgtggtgctggaaaaggccaaagttgttgagcccctggactatgagaatgttattgcccaaagaaaaacccagatttacagcgaccccctccgagatctgcttatgttcccaatggaagatatatctatctcggtgataggtcgtcaacgcagaacggtgcagtctactgtaccagaagatgctgaaaagagggcccagagtttatttgttaaagagtgtattaaaacctatagcacagattggcacgtggtaaactacaagtatgaggacttctctggggactttcgaatgttgccatgtaaatctttgagaccagaaaagattcctaatcatgtatttgagatagatgaagactgtgagaaagatgaggactcatcttctttatgttctcagaagggtggtgtgataaaacaaggctggttgcataaagcaaatgtaaatagtaccatcacagtaaccatgaaggtattcaagagacgatatttttacttgacccaacttcctgacggttcatatattctcaattcctataaagatgagaaaaattcaaaagaatcgaaaggttgcatctacttggacgcctgcattgatgttgttcagtgccccaaaatgcgccgtcatgcttttgaactcaagatgttagataaatatagccattatctggctgctgaaactgagcaggaaatggaggaatggttgataactttgaaaaagattattcagatcaacaccgacagtttagttcaagaaaaaaaggagacggtagaaacagcacaagatgatgaaactagcagccaaggaaaagccgagaacatcatggcaagtttggaaaggagcatgcatccggaactgatgaagtatggaagagaaactgaacaactaaacaaactcagtagaggagatggaagacagaatctcttttcttttgattcagaagttcagaggttggacttttcaggaattgaacctgatataaagccatttgaagaaaaatgcaataaacgtttcctggtgaattgccatgatttaactttcaatatcttgggccaaattggagacaatgcaaaaggaccacccacaaatgttgagcccttttttatcaatcttgccttatttgatgtaaagaacaattgtaagatttcagcagactttcatgtagacctgaatcccccatctgtccgtgaaatgctgtggggctcttcaacccaactggccagtgacggtagcccaaagggctcttcacccgaatcttacattcatggaattgccgaatctcagttacgctacatacaacagggaattttctcagtgacgaatccacatcctgaaatttttctagttgccagaattgaaaaggtactacagggaaacattacacactgtgcagaaccctatatcaaaaattctgatccagtaaagacggcccagaaggtgcacaggacagctaaacaagtgtgtagccgccttggacaatacagaatgcccttcgcttgggctgccagacccattttcaaagatactcaaggctctcttgatctggatgggagattttctcctctgtataaacaagacagtagcaagctttcaagtgaagacattctcaagttgctctcagaatataagaagccagaaaagaccaaactgcagattattcctgggcagctaaacatcacagtagaatgtgttcctgtggatttatcaaattgtattacttcttcatatgtgcccttgaagccttttgaaaagaattgccaaaatattactgtggaggttgaagagtttgttccagaaatgacaaaatattgttatccatttactatttacaaaaaccatctgtatgtatatcccctgcaattaaaatacgatagccagaaaacatttgccaaggcaaggaacattgcagtctgtgtggaattccgggattcagatgaaagtgacgctagtgccctaaagtgtatttatggaaaacctgcagggtctgtttttaccacaaatgcttatgctgttgtctcgcatcacaaccaaaatccagagttctatgatgagattaaaattgagcttcccattcacctacatcaaaaacatcatttgcttttcactttttatcatgtaagttgtgaaattaacacaaagggaacaaccaaaaagcaagacacagttgaaactccagttgggtttgcctgggtacctttgctgaaagatggtagaatcatcacatttgagcagcagctgccagtttccgccaatcttcccccaggctacttgaatctgaatgatgcagaatcaagaaggcaatgtaacgtggatattaaatgggtagatggtgcaaagcctttgttgaagattaaaagccacttagaatctaccatttacactcaagatctgcatgtgcacaaattcttccatcattgccagctgattcagtcaggctcgaaagaagttccaggggagctcattaaatatttaaagtgtttgcatgccatggagatccaagtcatgatacagtttctacctgtaattcttatgcaactcttccgagttctcacaaatatgacccatgaagatgacgttcctatcaactgcaccatggttctcttacatattgtatcaaagtgccatgaagaaggcttggatagttatctaagatcattcataaagtatagcttccgacctgaaaaaccgagtgctcctcaggcccagctgatacatgaaaccctggctactacgatgatagcaatattgaaacagtctgcagattttttatcaataaacaaattgctaaagtactcatggtttttctttgaaataattgcaaagtcaatggccacatacttgttggaagagaataagattaagcttccccgaggccagagatttcccgagacatatcatcatgtcttacattcactgcttcttgcaataattccccatgtgactattcggtatgcggagattcccgatgagtccagaaatgtgaactatagtttggctagcttcctgaagcgctgtttgacactaatggatagaggatttattttcaatttaataaatgactatatatctggattcagccccaaagatcctaaggttctggctgaatacaagtttgaatttctgcaaacaatttgcaatcacgaacattacattcctctgaacttgccaatggcatttgcaaaacctaaactgcagcgggttcaagattcaaatcttgaatacagtttatcagatgagtattgcaagcatcacttcttggttggtctacttctgagggaaacttccattgctcttcaggacaattatgagatcagatatacagctatctctgttataaagaatcttttgataaaacatgcatttgacacaagataccagcacaagaaccaacaagccaaaatagcacaattgtacctcccctttgttggactacttttggaaaatatacagcgattagcaggtcgagataccttgtattcttgtgcagccatgcctaattctgcatccagagatgagtttccatgtggctttacttcacctgccaatagagggagtctgagcactgacaaagacaccgcttatgggtcttttcaaaatggacatggaattaagagagaagattcaagaggttccctcatcccagaaggagcaacaggatttccagatcagggcaacactggtgaaaatacccgacagagttctacaaggagtagtgtatcccagtataaccgcctggatcagtatgaaatcagaagcctcctgatgtgctacctgtatatagtaaaaatgatttcagaagatactctcttaacttactggaataaagtatcacctcaggagctcataaacattcttatacttttagaagtatgcttgtttcactttagatatatggggaaaagaaacatagcaagggtgcatgatgcctggctgtcaaaacacttcggaatagaccgaaaatcgcaaaccatgcctgctcttcgaaacagatcaggagtaatgcaggcccggcttcagcatcttagtagcctagaaagttcatttacacttaatcacagttctacaacaactgaagcagacattttccaccaggcacttcttgaaggcaatacagctactgaagtttccctaacagtactagacaccatatcatttttcactcagtgcttcaagacccaacttttaaataatgatggccataacccattaatgaaaaaagtgtttgatatacatcttgcttttcttaaaaatggacaatctgaagtgtcgctgaaacatgtatttgcctcactgagagctttcatcagtaagtttccttcagcatttttcaaaggaagagtaaacatgtgtgctgcattttgctatgaggttttaaagtgctgcacatcgaagattagctcaaccaggaatgaagcatctgcacttttgtatcttttgatgagaaacaactttgagtataccaaaaggaaaacctttttgaggacacatctacagataataattgctgtaagccaactgatagctgatgtagcactaagcggaggatcaagatttcaggagtctttattcattatcaataattttgcaaatagtgacagacctatgaaggcaactgcctttcccgcagaagtcaaagacttgaccaagagaatccgcactgttcttatggccactgcccaaatgaaggagcatgagaaagaccctgaaatgctaattgatctccagtatagcttagccaagtcctatgcaagcaccccagagctcaggaaaacctggcttgatagcatggccaagattcatgtaaaaaatggagatttttcagaggctgcgatgtgttatgtccatgtagcagctctagttgcagagtttcttcatcgaaaaaaattatttcctaacggatgttcagcgttcaagaaaattactcccaatatagatgaagaaggagcaatgaaagaagatgctgggatgatggatgtccattatagtgaagaggtcttgctggagttgctagaacaatgtgtggatggcttatggaaggcagaacgttatgaaataatttctgagatttccaagttgatcgttccaatttatgagaaacgtcgtgagtttgagaaacttactcaagtttatagaactcttcatggagcttacacaaaaattctggaagttatgcatacaaaaaagagacttttaggcactttcttcagagttgccttttatggccaatctttttttgaagaagaagatggaaaggagtacatctataaagaaccaaagctcactggcctctcagaaatttccttgagacttgttaaactttatggtgaaaagtttggtacggagaatgtcaaaataattcaggattcagacaaggtaaatgccaaagagcttgatccaaaatatgctcatatacaagttacttatgtgaagccttactttgatgacaaagaactcacagaaaggaagaccgagtttgaaagaaatcataatatcagcagatttgtttttgaggccccttacactttatcaggcaaaaaacagggctgtatagaagaacagtgcaaacgccgtacaatcttgacaacttcaaactcgtttccttacgtgaagaagaggattcctattaactgtgaacagcagattaatttaaaaccaattgatgttgccactgatgaaataaaagataaaactgcagagctgcaaaagctttgctcctctactgacgtggacatgattcagctccaacttaaattgcagggctgtgtttctgtgcaggtcaatgctggtccattagcatatgcaagagctttcttaaatgacagccaagctagcaagtatccacctaagaaagtgagtgagttgaaagacatgtttaggaaatttatacaagcatgcagcattgcacttgaactaaatgagcggctaattaaagaagatcaagttgagtaccatgaagggctaaagtcaaatttcagagacatggtaaaagaattatctgacattatccatgagcagatattacaagaagacacaatgcattctccctggatgagcaacacattacatgtattttgtgcaattagtggtacatcaagtgaccgaggttatggttccccaagatacgctgaagtgtgaggaaatgcagatgtacgtgacaatgagactgacctttctcaggaatatttggagctgtgcaaatgttaaaatttaaagatttgatatacatggagtgtttcttctcgacaccaaaattttcatgtgttccaacagggtgcttacatatttgtaaataagcaacttgaaagtgcctggaaaattgcaccactgtgcttggtttgtacttttttaggtaaatctatatgctgaaaagtagagctcaaaaacagtagttcaatttgcttaattattgcttaaaataatggtactatgtaaaattgtataatggaatacaataaaaggtaaaacttatttgtaa

SEQ ID NO: 523 - DNA, 3083 bp, Homo sapiens
  source 1..3083: mol_type = genomic DNA
atgctcgaggtgtccggtgaccgaaacactcttagctgggtgcagggtgcggctcagggcgtggtcaccgggggctacttagggccgccggtgcgggggacgacgcaaaggttaactgcgagctgccgggcactcagcgcgggtcatggcgtggatactggactgccttttcgcctcggcctttgagccccgcccccgccgtgcaaaaacaaccagaggctgctctgcttgagggtgaagccgcctcccagttttccctccccctctacccccacccccatagttctctccaccaggtccagtgacaattggatgatgcagccttgataatcatccgattccagaatgggtggctgcattccttttctgaaggcagcaagggcactgtgccccagaatcatgccccctttgctgttgttgtccgccttcatttttttagtgagtgtcttgggaggagccccaggacacaaccccgaccgcaggacgaagatggtatcgatacacagcctctctgagctggagcgtctgaagctgcaagagactgcttaccacgaactcgtggccagacatttcctctccgaattcaaacctgacagagctctgcctattgaccgtccgaacaccttggataagtggtttctgattttgagaggacagcagagggctgtatcacacaagacatttggcattagcctggaagaggtcctggtgaacgagtttacccgccgcaagcatcttgaactgacagccacgatgcaggttgaagaagccaccggtcaggctgcgggccgtcgtcggggaaacgtggtgcgaagggtgtttggccgcatccggcgctttttcagtcgcaggcggaatgagcccaccttgccccgggagttcactcgccgtgggcgtcgaggtgcagtgtctgtggatagtctggctgagctggaagacggagccctgctgctgcagaccctgcagctttcaaaaatttcctttccaattggccaacgacttctgggatccaaaaggaagatgagtctcaatccgattgcgaaacaaatcccccaggttgttgaggcttgctgccaattcattgaaaaacatggcttaagcgcagtggggatttttacccttgaatactccgtgcagcgagtgcgtcagctccgtgaagaatttgatcaaggtctggatgtagtgctggatgacaatcagaatgtgcatgatgtggctgcactcctcaaggagtttttccgtgacatgaaggattctctgctgccagatgatctgtacatgtcattcctcctgacagcaactttaaagccccaggatcagctttctgccctgcagttgctggtctacctgatgccaccctgccacagtgataccctggagcgtctgctgaaggccctgcataaaatcactgagaactgcgaggactcaattggcattgatggacagttggtcccaggcaaccgtatgacttccactaacttggccttggtgtttggatctgctctcctgaaaaaaggaaagtttggcaagagagagtccaggaaaacaaagctggggattgatcactatgttgcttctgtcaatgtggtccgtgccatgattgataactgggatgtcctcttccaggtgcctccccatattcagaggcaggttgctaagcgcgtgtggaagtccagcccggaagcacttgattttatcagacgcaggaacttgaggaagatccagagtgcacgcataaagatggaagaggatgcactactttctgatccagtggaaacctctgctgaagcccgggctgctgtccttgctcaaagcaagccttctgatgaaggttcctctgaggagccagctgtgccttccggcactgcccgttcccatgacgatgaggaaggagcgggtaaccctcccattccggagcaagaccgcccattgctccgtgtgccccgggagaaggaggccaaaactggcgtcagctacttctttccttagatgtttttccttctataaggtgccagacaggggaaaagggtgggggtacatctgggatgtcacaggaaacattaaggagagagttgaaggtaaagatctgaaggtaagaaggagttccacctgatgctcgggtcaggatgagaattccaaacacactgccagccccttcactggggatgcttggtctcttctgctggtaaaagcagagatgtttctgtgtcatgcccaagctccccggtgctaccttgcctttctcttttacccctgatcttggctttctctctctctctgcagactttcctttaattgatgtgacatttgtggtaaacacctttcccagggaacctcacaaatcttgagatgctttcccttccccagatgggattgcatgatttccctgactttcctaccctcctccagagagctcagttggaaaggccctcaagaggcatgctagaacgttaggtcagcctactgacagctgacaaacaattaatgcgaaatcatgtcacaccaacccatagccgtgtccacgcagcaactccaccaccttaggatttccccctccaaattattcagaccaatggcttgccaaatggcctctcccaaaattctgtacagttttgctcaggtcacgccaacagggaaacctcaagtgtaggtctaattagtgtttctgggatccaaagttagaggaaaatttagattttattgcctggatctgctttaaagacaattggtgtttacaccctcttgtcagcaaaacagctagttaggtaaggacatatagttccaagtaggtaaagtcacttgattacaaatgttcttaactatcgtctctgtaattcctttatacaggacagtacaaaattgtgggacatgctctggtaacacacagatatgggttgcatatgatccagaattacagctgatattatggatgacaactgctaaggtccataaaatgaagactgtattgtattgagggatagaaattgatcatttaatgggtaacaactgctgagctcaaagatttgtgattgttaaaacttctctggcatttaatcattaataaacatctgtattgtgacagc

SEQ ID NO: 524 - DNA, 10075 bp, Homo sapiens
  source 1..10075: mol_type = genomic DNA
tgtagcagccttagtcgccgccgccgcggggcgaggtcgccgccatggcccgctggatcccgaccaagaggcagaagtacggggttgcgatctataactacaatgcttctcaagatgtggagctctccttgcagatcggtgacacagttcacatcctggagatgtacgagggttggtacagaggatataccctccaaaataaatctaaaaagggcattttccctgaaacatatatccatttgaaagaggcaactgtggaagacctggggcagcatgaaaccgtgattcctggcgagctccccctggtgcaggagctcacgtccactctgcgagaatgggctgtcatctggcgaaagctctacgtgaacaacaagctcaccctcttccgccagctgcagcagatgacgtacagcctgatcgagtggcggtcccagatcctgtctgggacgctccccaaggatgaactggcagagctcaagaagaaagtcacagccaaaattgatcatgggaacagaatgctggggttagatctggtggtgcgagatgacaatgggaacatcctagaccctgacgaaaccagcaccattgccctcttcaaggcccatgaggtggcctccaaaaggattgaggaaaagatccaagaagagaagtcaatcctgcagaacctcgatttgcggggccagtccatcttcagtaccatccacacctatggcctctatgtgaacttcaagaactttgtctgcaacatcggggaagatgcagagttgtttatggccctctacgacccagaccagtccacttttatcagtgagaactatctaattcgttggggcagtaacgggatgcccaaggaaatagagaagctcaataacctccaagcagtgtttacagaccttagcagcatggacctcatccggccccgcgtcagccttgtgtgccagattgtccgcgtgggccatatggagctgaaggaaggcaagaagcacacctgtggactccgaagaccttttggagtggcagtgatggatattactgatatcatacatgggaaggtggatgatgaagaaaagcagcattttattccctttcagcaaattgcgatggaaacctacatccgccagaggcagctcatcatgtcgcctttgataacatcacacgtgattggggagaatgagccactcacttcagtcttgaataaagtgattgcagcaaaggaagtgaatcacaaagggcaaggcctttgggtatccttgaagctcttgcccggtgacctcacccaggttcagaagaatttttcacacttggttgatagatcaacagcaatagcccggaagatgggctttcctgaaatcatactgccaggagatgttcggaatgacatttatgtcaccctgatccacggtgagtttgacaaagggaagaagaagacgccaaagaatgtggaggtgacgatgtctgtgcacgatgaggagggcaagctcttggagaaagcaattcaccctggtgctggatatgaaggcatttcagaatacaaatcagtagtctattaccaagtcaagcagccctgttggtatgagactgtcaaggtatccattgctatagaagaagtcacacgctgtcatataagatttaccttccgacacaggtcatctcaggaaaccagagataaatcggagcgagcatttggggtggccttcgtgaagctgatgaacccggatggcaccactctgcaggatgggaggcacgatctggtggtttataagggtgacaacaaaaaaatggaagatgctaaattctacctgaccctgcctggaaccaagatggagatggaagaaaaagagcttcaagcatccaaaaacctggtcaccttcaccccaagcaaggatagcactaaagacagctttcagattgccaccctcatctgctccacaaagctcacccagaatgttgacctgttaggcttgttaaattggcgttccaactcccagaacattaaacacaacctaaagaagttaatggaagtggatggaggagagattgttaagtttttgcaagatacactagatgcactctttaacataatgatggaaatgtcagacagtgaaacctatgacttccttgtgtttgacgcactggtatttattatttcactgataggagacatcaagttccagcattttaatcctgtacttgaaacctacatttacaagcacttcagcgccactttggcatatgtgaaactctccaaggtactgaacttctatgtggctaatgcagatgactccagcaagactgaactgctttttgctgcgttgaaagccttgaagtacttgtttagattcatcatccaatcccgagtgctctacttgagattttatgggcagagcaaagatggagatgagtttaataattcaattcgccagttatttcttgctttcaatatgctgatggacaggcctctggaggaagccgtcaagatcaagggggcagctttgaagtaccttcctagcataattaatgatgtcaaacttgtatttgatcctgttgagctcagcgtgctcttctgcaaattcattcaaagcattcctgacaaccagctggttcggcagaaacttaactgcatgaccaagatagtagagagcactctttttcgacagtcagagtgcagagaagtgctgctgccactgctgacagaccagctcagcggccagttagatgacaactccaacaagcctgaccacgaggcaagctcgcagcttctgagcaacatcctggaggtgctggacaggaaggatgtgggtgccactgcggtgcacattcagcttataatggaacggctgctgagaaggatcaaccggacagtgattgggatgaaccggcagtctccccacatcgggagttttgtggcttgcatgattgccctgctgcagcaaatggacgacagccactatagccactacatcagcactttcaaaaccagacaagacatcatcgacttcctcatggaaacttttatcatgttcaaggacctgattggaaagaatgtctatgccaaagattggatggtgatgaatatgactcaaaacagggtttttctccgtgctataaatcagtttgctgaagttctcacaagattcttcatggatcaggcaagctttgaacttcagctctggaacaattacttccatttggcagttgcatttctcacccatgagtcccttcagcttgaaaccttctcacaagccaagcgcaacaaaattgttaaaaaatatggggacatgagaaaggaaatcggctttagaatccgggacatgtggtataacctgggtccccacaaaatcaaattcatcccatccatggtgggtcccattctggaggtcactctgacccctgaagtagagctccggaaagccacaatccccattttctttgatatgatgcagtgtgagttcaatttcagtggaaatggcaatttccatatgtttgagaatgagctgatcacaaagctggaccaggaggtagaagggggcagaggagacgaacaatacaaggttcttctggaaaaactgctcctagaacattgccggaaacacaaatacctctccagctctggggaggtcttcgccctcctggtcagcagcctcttagagaacctgctggactatagaaccatcatcatgcaagatgagagcaaggagaaccgtatgagctgcactgtgaacgtgctgaacttttataaagaaaagaagagagaggacatatacataagatatctgtacaagcttcgagatttgcaccgagactgtgagaactacacagaagctgcctacacgcttctcttgcacgctgagcttctgcagtggtctgacaagccctgtgtgcctcatttgcttcagaaggacagttactatgtttatacccagcaagagcttaaagagaagctgtatcaagaaatcatatcatatttcgacaaaggcaaaatgtgggagaaggccatcaagctgagcaaagagttggctgagacttacgaaagcaaagtatttgactacgagggccttggcaacctcctgaaaaaaagggcctcattttatgagaacatcattaaggcaatgaggcctcagcctgaatactttgctgttggatactatggacagggctttccttctttcctacggaataaaatcttcatctatcggggaaaggagtatgagaggcgagaggacttcagcctgaggttgttaacccagttccccaatgcggagaagatgaccagtaccacgcctcctggggaagacatcaagtcgtcccccaagcagtacatgcagtgcttcactgtaaagccagtgatgagcttgccgcccagctacaaggataaacctgttccagagcagatcttaaactactacagagccaatgaagtgcagcagttcagatactcccggccgttccggaaaggagaaaaggatccagacaatgaatttgctacgatgtggattgaacggaccacgtatacgactgcatatacctttcctgggattctcaagtggtttgaagtcaaacagatttcaacagaagagatcagtcctctggagaatgccatcgaaaccatggagctgaccaacgagaggatcagcaactgtgttcagcagcatgcctgggaccggtccctctctgtgcaccctctctccatgctgctcagtggcatcgtggacccggccgtcatggggggcttctccaactatgaaaaggctttttttacagaaaagtacttgcaggagcatcctgaagaccaggagaaggttgagctgctaaagcgactaatagcattacagatgcccctgctaacagaagggatccgcatccatggggagaaactcacagagcagctgaagccgctgcatgagcggttgtcttcttgcttccgggaactcaaggagaaagtagaaaagcactatggggttataacactgccacccaacttgacggagaggaagcaaagccgcacggggtctattgtgctcccctacatcatgtcttccactctgcggaggttgtccatcacctcagtcacttcctctgtggtttccacctcttcaaactcgtctgacaatgctccttccagaccgggatctgatggctcaatcttggagccacttttggagcgcagggcctcgtcaggtgccagagttgaagatctgtcccttagagaggagaacagcgagaaccggatcagcaagtttaagagaaaagactggagtctgagcaagtcccaggtcattgcagagaaagcaccagaacccgatttgatgagcccaaccagaaaagcacaaaggccaaagagtctccagttgatggataatcggctatcaccatttcacggttcttcacctcctcagtcaacacccttgagcccacctccactcactcccaaagccaccaggaccctaagctccccatcgttgcagacagatggaatcgcggccactcctgtcccacctccacctccccccaaaagcaagccctatgaaggcagccagaggaactccactgagctcgctcccccactgcctgtccgaagagaagccaaagcaccaccccctccacctccaaaggctcggaagtctggcatccctacttccgagcctggatcccagtaaggatcttgccctccctgcaacaccgagtgccttagacagctgctgcctgagaactggcctccagccggtgtcctcattccatggggctccctgctgactgcatttcctgatctgggatgatgtttaccagcccaaaaccagtcatgttcttccaaaagcttctctttgatagaattttgaggccatgccacctcccttccagtccacatggaattccagaatcagtcacagcctctgattttttccaagaagagattgccttcaccattgttaaatgtcagcctgtacggcagagacatggtggtctgcacaagcctggacaagttcttccatattgatggtggagcaacccctgtaatctactccttggaaggattttttgctttgcttatgaaaagctgtgcttgagacttaggtacttttctcacgtggacacactgatcccatcccatattgcatcttggaagagatggatatcaagtacactttggtagctgaaataatcatatctttctgatgtctattgtatctcctttgaggaaaagaacacacatttttaatggagattggctgctttcaggtatgtgtgtctatcattgaaagagcatggactcaaacatcagccctgagttcttgagtccacccaactcccatcttcttgtggcacaggaaagctgccctctccctctcccaccacactcctgactaatggccttcactgcgtcgcagtcactccttccctacggacttctttgaagctcttccttttgcacatacggctttttttttttttttttttttttgtcctattacctcctctgagcgcaaatcactggctacaagggacttaccagtctggattcagcagtttcttttctaaaacccatttgggtgactcagcagccgcatctgctacctgattttatcctggagaatacagtgcaatatttctctttgattatttattcctcttgattgtggaattaatttgattgcttgctaatggtactagtagtactcctttcagaagaaaaaatggagcgatttaggtgaccaaatattacatacataaatagccacatgaagttttagacgtttggacttgaagcctcaaagatcaaccaaccagtccccttatttagtaaataaggaaattgaggctacacacagaaaattgtgctacagattattactaataacccagcttgctaaattaggctatacctaggtaatctctagaagacaactctgacagactctttaatatttacccctggttggaacaatatttgaaatgtcccagatatttctatgctacttagatatttgtggcaaagcagaaagctttttgactgtgaaggcagaggtcagcactgggggaaacttgctggtggtctctcccacaaccttgcccagagtcctttccactaaggaggtgaagagaacagagaaagagatttccatttctgctgccagagctggtatttgcctgcctgattctctgtgtttcctgtttcaccgccaccctttcaggagagaactacaccagttcatcatgagggtcagggaagcaaaagctctcagatgtgtccagggcgttacttaagaaatgagtatgcagattctggaaggggtgtggaaaaggtgatcctttacccccacccaggaaaacctgcattgtgctagcatggaagaatcatgggctttggaattaaacccatttggtggaattaaacccatttggtttcaaatcccagttatgacatctgttaactttgcaaactcacaaaaattatttgaaattatctgagttttcattttctcaccttccagaatggggataatgcctcctgcatcggttgttgtgaggtttcaatgagatgaaatatgggaaagaagaggtactcacctgatggtccctgctttcctctgctaggcctgagtaggaactggaactctctaagagcattactcatactttttttttcttccaaggtagtttggaatgtgagtgcaagttagttctgcacatacagcccttctccaaatggtggtttcctttgaggtcttttacatgattatttatgactagagacaaacttaataagaactcaagaggattttaaatggagagaactcaagctgtagagaaaggaggaggcaacagacaggatatgtaggggcttacctagagcctggcacgacttctgagaagtcacccagcagaccggctagaggggatttgtgtgccacactctacttgccgggctgccattaaaatagaaagatataaaactgggtcaccaaaaaaaccaaacctcaaggctatccttccagagcagtagaaatgagtcccacagcctggtctttgagcagaggctgggaagataggatacatcactgtctggataccttctctttttaatagaatatattccgtatgattccctttccaccttaatggaaataatagctctctcctgcctgaacaaaagggattccaggtagtattgtggctaagagattacagcggacgatggaaggttcattttttagggaaggtgttgggtaggaagagtcacatttgacagaattcataaataatgtgtcctgaagtcagaggatgactgcaaagaaacacctcatgattccattaaatataaagagataaggagcaaggaggaaaaaagagaaagaattggtctttatttttcttgctaagaactctctggagtattgaaagacattgaaattatccctaaaattgtcacaacttttgtgaatactggtatacggttggaggtgtttttaaatctttatttcctctctttctttgttctagtgacttgtcttgctttaagattttttttaaaggattgttttattcaacatatatcaagttcttatggaatgccagtcatggtactagccccttgggatgtagtggttgagtgtgttcaatggaaacagccccagtatacaaagacagttcactctggtgtgctgtaggattggaaagggagtggtaccagatgaaaatgaaaccctaaagaagactgctgggccatgagttgcttcctcctcctccaccttaaccctctgattccagaattgcagtcattttcttctgccaaggaaatccattaaaaactgcagccacactgcaatttcctaatgtagaacaagatataaagcaggctttgagacaacaacctacctttgtttactctttccaagctggaagagtccttctcctctagttgcccctaggtcactggctaatttattttaaaatttagatggaactcatgtatagttaagtgcacaaatcttagccgtgcagatgggtaattttcacatagctatttgcccacatccgtgcctctaagatagagacatacactgttttcagcaccccagaaagttcccacatgcccatggtgccattttgtgaaaggtatttataaggcccttcaaatttgtggcttcctttctcatacttctcaggtataatgaaagggggagaaaaaccccaccatcaacacaaaacaaggctataaagactgtgcaccttttaacaagtcaatttgtagtcagtccctgggcctgtctttttttttttttaattttgaagctacctgaggtttagaattccttcagccctagctgcttttattctgctttttatttaaacaaaaagagggggaggatctgaaggaaactagttttctgtacaaaggctttgaggtccatggactatacttgtcccatttatcatcccaggtggtgctttgaccctgccataccctggctattaagataaaaagatttgtggacattaaaattatgaatatgtcagtaataatccagcacacattgaaatattgacacagattaccataatttgtgcaacatcttataaacaatgtcatttccatagtagtctaaggcttcaccagcctggcccactgtatctagactttaggttcattttaataattatgctttccttctctgtatcatttgggaagttgataaatatcacttccttagataccttcattcagtgatatatctggcttttacaattaaattggaaaaggtaagtttctctttggtgggttgagagttggaccatcaattctaatctacaaaaggaaattcatgatttcactctgacgcctaggatctagccaaggctggtctgcagtatcagatgtccaaactcatctactattagccatattttgtgagtcgtttgtctaaactttgtcaaaaatgcctttgccatgattttgttgctatctggatttcaaacatggacagttaggaagatgtgcattgaagtaggaaaattttgttcagatttgctgttatttattttttaaattaaaaatggaaatgtattttaaagttta

SEQ ID NO: 525 - DNA, 1960 bp, Homo sapiens
  source 1..1960: mol_type = genomic DNA
tcctgtcactggcttatatggacacgtcagcccaccgtcacgtgaccgcaggctgctaaaaacagctccagcacccactccaaaccagggcctgaaacaatgtcctccaccgagagaaacgtaaaggacacttgatcacacaatccctggaataatatccaggaaacacttgctggagccactcgcagcacccttccctggcagcacacttggggacagcgaggagatgagcgcatctctgaattacaaatctttttccaaagagcagcagaccatggataacttagagaagcaactcatctgtcccatctgcttagagatgttcacgaaacctgtggtgattctcccttgtcagcacaacctgtgtaggaaatgtgccagtgatattttccaggcctctaacccgtatttgcccacaagaggaggtaccaccatggcatcagggggccgattccgctgcccatcctgtagacatgaagtggttttggatagacatggggtatatggacttcagaggaacctgctggtggaaaatatcattgacatctacaagcaggagtccaccaggccagaaaagaaatccgaccagcccatgtgcgaggaacatgaagaggagcgcatcaacatctactgtctgaactgcgaagtacccacctgctctctgtgcaaggtgtttggtgcacacaaagactgccaggtggctcccctcactcatgtgttccagagacagaagtctgagctcagtgatggcatcgccatcctcgtgggcagcaacgatcgagtccagggagtgatcagccagctggaagacacctgcaaaactatcgaggaatgttgcagaaaacagaaacaagagctttgtgagaagtttgattacctgtatggcattttggaggagaggaagaatgaaatgacccaagtcattacccgaacccaagaggagaaactggaacatgtccgtgctctgatcaaaaagtattctgatcatttggagaacgtctcaaagttggttgagtcaggaattcagtttatggatgagccagaaatggcagtgtttctgcagaatgccaaaaccctgctaaaaaaaatctcggaagcatcaaaggcatttcagatggagaaaatagaacatggctatgagaacatgaaccacttcacagtcaacctcaatagagaagaaaagataatacgtgaaattgacttttacagagaagatgaagatgaagaagaagaagaaggcggagaaggagaaaaagaaggagaaggagaagtgggaggagaagcagtagaagtggaagaggtagaaaatgttcaaacagagtttccaggagaagatgaaaacccagaaaaagcttcagagctctctcaggtggagctgcaggctgcccctggggcacttccagtttcctctccagagccacctccagccctgccacctgctgcggatgcccctgtgacacagggggaggttgtacccactggctctgagcagaccacagagtctgaaactccagtccctgcagcagcagaaactgcggatcccttgttttaccctagttggtataaaggccaaacccggaaagccaccaccaacccaccttgcaccccagggagcgaaggtctggggcaaatagggcctccaggttctgaggattcgaatgtacggaaggcagaagtggcagcagccgcagcgagtgagagggcagctgtgagtggtaaggaaactagtgcacctgcagctacttctcaggagttagtaatctgcctagcgcttttggcttttcttattcttcactacatctggagtcagattcagtgcttgatttttactttaatggattggatttgaggctcctcccctccagggacaggctgcagctccagcgagtggcagtggagctgattctgagccagctcgccatatcttctccttttcctggttgaactccctaaatgaatg

SEQ ID NO: 526 - DNA, 4697 bp, Homo sapiens
  source 1..4697: mol_type = genomic DNA
cacgggtgccgtggagtccatcgtcatcctgcccagccagtctgcggcggtgggctgggccgggtgattggtgtggtgaggcgtcttccatatcagcactgttgcttctcccctcttgcagtgcggcaccttcccgtctgatgctggcgttgtgcgtatggtgccctgacgtctgtccacgtgggcgcggaagcaaacagcgatgtcccagacgcaggactacgagtgcaggagccataatgtcgacctgccggagtcgaggattccagggtcgaacactcggttggagtgggtggagatcatcgaaccgcgcacccgcgagcgcatgtacgccaacctggtcaccggtgagtgcgtgtgggacccgccggccggcgtccgcatcaagcgcaccagcgagaaccagtggtgggagctgttcgaccccaacacgtcccgcttctactactacaatgccagcacgcagcgcacggtgtggcaccggccgcagggctgcgacatcatcccgctggccaagctgcagacgctgaagcagaacacggagtccccgcgcgcctcggcggagagcagccccgggcgcggcagcagcgtcagccgtgagggcagcaccagctcctccctggagcccgagcccgacactgagaaagcgcaggagttgccagcgagggccgggcggcccgcggcgtttgggacagtgaaggaggacagcggcagctcttcaccaccaggagtgttccttgagaaggactatgagatttaccgggattacagtgcggacggccagcttcttcactacaggacctcctcgctgcggtggaactcgggcgccaaagagcgcatgctcatcaaggtcgctgatcgggagcccagcttcctcgccgcccagggcaatggctacgccccagacggcccacctggggtccgctcccgcagaccctccggcagccagcactcacccagcctgcagaccttcgccccggaggctgacggcaccatcttcttcccagagaggaggccgtcacccttcctgaagagggccgagctcccagggagcagctccccgctgctggcccagccccgaaagccctccggggactcgcagccctcctccccgcgctatggctatgaacccccgctctacgaggagcccccagtggagtaccaggcccccatctacgatgagccccccatggacgtgcaattcgaggctggcgggggctaccaggccggctctccccagcggtcgccgggccgtaagccccggccgttcctccagcccaacaagcagggccccccctcgccctgccagcagctggtgctcaccaagcagaagtgtcccgagcgcttcctgagcctggagtacagtcccgccggcaaggagtacgtgcggcagctggtctacgtggagcaggcgggctccagccccaagctgcgcgccggcccgcggcacaagtacgcgcccaaccccggcggtggttcgtactccttgcagcccagcccctgcctgctgagggaccagcgcctgggcgtcaagtccggagactacagcaccatggagggacctgagctgcggcacagccagccgcccacgccgctgccacaggcccaggaggatgccatgtcctggtccagccagcaggacaccctgtcctccacaggctactccccgggcacgcgcaagcggaagagcagaaagccctctttgtgccaagccaccagcgccacccccactgagggccccggggacctgcttgtggagcagcccctggccgaggaacagcccccgtgcgggaccagcctcgcccccgtgaagcgagcggaaggtgaggccgaaggggcgcggggcgcggccgagcccttcctggcgcaggctcggctggcctgggaggcgcagcaggcccacttccacatgaagcagaggagcagctgggactcccagcaggacggctctggctacgagagcgacggcgccctgccactgcccatgcccgggccggtggtgcgggccttcagcgaggacgaggcgctggcccagcaggagaacaggcactggaggaggggcaccttcgagaagctaggcttcccccagatcctgctggagaagagcgtctccgtgcagaccaacctggcctcaccagagccctacctccacccctcacagtctgaggacctcgctgcctgtgcccagttcgagagcagccggcagagccgcagcggcgttcccagctccagctgcgtcttccccactttcacgctgcgcaagccctcctcggagacggacatcgagaactgggcctccaagcacttcaacaagcacacgcagggcctcttccggcggaaggtgtccatcgccaacatgctggcctggagcagcgagtccatcaagaagcccatgatcgtgacaagcgaccggcacgtgaagaaggaggcctgcgagctcttcaagctgatccagatgtacatgggtgaccggcgggccaaggccgacccactgcacgtggccctggaggtggccaccaagggctggagcgtgcagggcctgcgggacgagctctacatccagctgtgccggcagaccaccgagaacttccgcctggagagcctggcccgcggctgggagctcatggccatctgcctggcctttttcccgcccacccccaagttccactcctacctggaaggctacatctaccggcacatggaccccgtcaatgacactaaaggggtggcgataagcacgtatgccaagtactgttaccacaagctacagaaggcagccctgaccggggccaagaaggggctgaagaagcccaacgtggaggagatccggcatgccaagaacgccgtgttcagcccgtccatgttcggcagcgcactgcaggaggtcatgggcatgcagagagagcgctaccccgagcgccagctgccctgggtgcagacacggctctctgaggaggtgctggcgctcaacggtgaccagacagagggcatcttcagggtccctggggacattgacgaggtgaatgccctgaagctgcaggtggaccagtggaaggtgcccacaggcctggaagacccccacgtccctgcgtccctgctgaagctgtggtaccgggagctggaggagcccctgatcccgcacgagttctacgagcagtgcatcgcgcactacgacagccccgaggcggcggtggccgtggtgcacgcgctgccccgcatcaaccgcatggtgctgtgctacctcatccgcttcctgcaggtcttcgtgcagccggccaacgtcgcggtcaccaagatggatgtcagcaacctggccatggtgatggcgcccaactgcttgcgctgccagtccgacgacccgcgcgtcatcttcgagaacacccgcaaggagatgtccttcctgcgggtgctcatccagcacctggacaccagcttcatggagggtgtgctgtagcgggggcgcccggggacaggagggatgtcctgccgcccccagccaggccgaactccgcactcgctctcccggcagaggggccagaatcgcccggcccagccctggagccccctccactcccccaggcccctggccccggcgctccccacgtcttctgcctggtctgagggtgcagccagggcacagcagcggcggggagggcgcctctggccccccacctcacggccagttcccgcgggcaccgcctcgccctccgctggccgcgggtcagctccgagaaagtgccttctgtgtcctggagccgagcgacgctgcctccttggggccgggctgcctccctgtggctcctgcgcgccctggcctgggccttgcccagccgccccggtctctccttccctttctcctgtcctcgtcctggcctgcagctcttcccagccccgagagagcttcccgacctgtccccgcctcctctccctccctcggcccgtggtccccagctggtgactgctcaggagtttgggggctccaggacagtgggcccggggcctggcaggctctcggtgggtggggtgggggcccccaaaccaaagtcctctggggtagggagcagggctgggcaggcattctgggggcagggtgggggaggggcgagagtatttttttcttcgtgtaactgtaaatccagaatctatcctgcatcgcagcccaccgtgtatagagatataaatagagggaaagatataagaactaaatttgctaatgacatagttttaacctaaatgctatttatctctgagccgtccccgtcctccgtgcagagcaagttgaggtcattccttcttttcttctccgatcttttttcttggcttctgaccaaaaaccaagctctaccccatccccatcccagacctgcaggagacgagcgagcgggaaggcgccgggcccgggactgtccgttctcggggccagagctgctgggggaccgagtttgtacattttccattttggaattttgagttccaattgttgtaaaacttaatttctccccagtttttatatatatattttttagagttccgtttttatttattaaaaacaaaagccccagccctgccgaggcctgggcggcgtcctcagtcgggtggtcccggggcctttgcggtcccgcccggctgagacgctcgccccgacgcatggacccgagaggcgacgacacgagtgaataaagtgcacatggaccctg

SEQ ID NO: 527 - DNA, 1614 bp, Homo sapiens
  source 1..1614: mol_type = genomic DNA
gcgcagaggggcacggccctcactgccccggccggggcgagagcggctccgcccctcgagcgccgggtaggccggggccggcggggcccggaaggcgacgggaaggagccgagcttgggttatggcggcgccgggcgcgctgctggtgatgggcactctcactctgtcgcccaggctggagtacagtggcgtgatctcggctcactgcaacctctgcctcctgagttcaagcgattgtcatgcctcagcctccggagtaactggggttacaggcgtgcaccaccacacccagctaagttttgtatttttagttgagacggggttttgccatgttggccgagctagtcccgaactcctggcctcaagtgatccgcctgcctcagcctcccaaagtgctgggattataggcgtgagccaagggctcaacctaacttggtcttaagtgtgatttctgctatgcacacttctggcttcaccagccatggagtttggccgggatggtctactcatccgtaggctgcatgtctccctgcgcagccttcaatagaatgaactaatgggaaaggtttcactgctctcgcaacctttggttacatccaggagcagatctcagtttggtacaactgtgtctaacacctctctgatagctttttagtgaaagaaagaggacctttgttaggcaacagtatccagctagaatttaatcacattgttctgttttcattatatacagcttttcaggtaccttctattcaagatccaccgtgggcgccctgctggcatctgagctgggatggaaattctatgatgctgatgattatcacccggaggaaaatcgaaggaagatgggaaaaggcataccgctcaatgaccaggaccggattccatggctctgtaacttgcatgacattttactaagagatgtagcctcgggacagcgtgtggttctagcctgttcagccctgaagaaaacgtacagagacatattaacacaaggaaaagatggtgtagctctgaagtgtgaggagtcgggaaaggaagcaaagcaggctgagatgcagctcctggtggtccatctgagcgggtcgtttgaggtcatctctggacgcttactcaaaagagagggacattttatgccccctgaattattgcagtcccagtttgagactctggagcccccagcagctccagaaaactttatccaaataagtgtggacaaaaatgtttcagagataattgctacaattatggaaaccctaaaaatgaaatgacaatgattttgtatcagtggtccaaacagaactaagcataaatcattgtgccatcccaaacctcgttccagccgccttgcccatactagattctaaatgtttctaaaggcaaaccccaatgtgtcaagacagacttgtttaggtgtaattttaggaattatgctggttcatcaggaagcagagggggagttttaaaagtcaagcttaaattgaagtttaaattcatctataaccaaatcaaatgatcagaggaaattctgtaatcaatgctggaaatcgttacattgtttagaacattcttgctcatgcctgtatttgcacaaataaatgaaacttcgctgtc

SEQ ID NO: 528 - DNA, 1966 bp, Homo sapiens
  source 1..1966: mol_type = genomic DNA
agtaaccccgagtctgcggaagtggtgacccgtgggacgcggctgagacaggagactgaaaggaaccataatttgtgacatcagttgttttctttgataagcagctatttatgattctggaagattaaggcagataggaaaccccatctgagattttaataaatccctcaaacaataaaccacatcatggacatacagctggaccctgccagagatgacctgcctctcatggccaacaccagccacatacttgtgaagcactatgtactggatttggatgtggattttgaaagtcaagtcattgaggggaccatagtgcttttcctcgaggatggaaacagattcaagaaacagaatagctctattgaggaagcctgccaatcagaatcaaacaaagcctgcaaatttgggatgcctgaaccctgccatattcccgtgacaaatgcaaggaccttctcatctgaaatggaatataatgattttgcaatctgtagtaaaggtgaaaaagatacttctgataaagatggtaaccatgacaaccaggaacatgcttctgggatttctagctcaaagtactgctgtgacacagggaatcatgggagtgaggattttttgctagtgttggactgctgtgatttatctgtgttaaaagtcgaggaggtggatgttgctgctgtgccaggtctggaaaaatttacaaggtctcctgagctcacggttgtttctgaggagttcaggaatcagattgtacgtgaacttgtgactttgcctgcaaatcgttggagggagcagttagactattacgctcgctgcagccaggctcctggctgtggggaactcctctttgacactgacacttggagcttgcagataaggaagacaggggctcagacagctactgactttcctcatgctatcaggatatggtacaaaactaaacctgaagggcgatcggttacatggacctcagaccagagtggcaggccatgtgtttatactgtgggatctcccataaacaacagggccctttttccatgccaggagccacccgttgccatgtcaacatggcaggctacagttcgagcagctgcatcttttgttgttttaatgagtggggaaaattctgccaaaccaacgcagctttgggaagagtgctcaagctggtattactatgtaactatgccaatgccagcctccaccttcacaattgcagtgggatgctggacagaaatgaagatggagacatggtcatcaaatgatttggcaacagagagacccttctcaccttctgaggccaacttcaggcatgttggtgtttgcagtcacatggaatacccctgccgcttccagaatgcttctgccaccacccaggagatcattcctcatcgggtctttgcccctgtgtgcctcacgggtgcctgccaagagacccttctgcggctgatccctccttgcctctcagcagcacattctgttctgggagcacacccgttctctcggctggatgttctcatcgtccctgccaactttccaagtctggggatggccagcccacacatcatgttcctctctcagagcatcttgacaggagggaaccatctctgtgggacccgcctctgccatgaaattgcccatgcctggtttggcctagccatcggggcccgagactggacggaggagtggctgagtgaaggcttcgccactcacttggaggatgtgttttgggccacagcacagcagctggccccctatgaggcccgggagcagcaggagctgagggcttgtctgcgctggcgtcgcctccaggacgagatgcaatgctcccccgaggagatgcaggtgttaaggtttccacatgttggcggatgcagtggaagcttctcttgagatctttgccacactgttcaacatgtttgaccactctgtcctaaaaacgctttcttcttaaagcactttctcctcctgg

SEQ ID NO: 529 - DNA, 2330 bp, Homo sapiens
  source 1..2330: mol_type = genomic DNA
cttccggcgggggcgcggcttggactgaggagcggacccggccgggcgcaggggctggactggcggagcaggtggggtccgcggccgccggagcgttccggtcggcgtctgggcatctcggcctcggcagaaagcgcgacggccctgctgcgcggggcccgcggcgatgccgttcctgcacggcttccggaggatcatcttcgagtaccagccgctggtggatgcgattctgggctccctggggatccaggaccccgagcggcaggagtctctggaccggcccagttatgtcgccagcgaggagagccgaatccttgttctcactgagctgctggagaggaaagcccactctcccttttaccaggaaggcgtgagcaacgccctgctcaagatggctgagctggggctgacgcgggcggccgacgttctcttgcggcatggggccaatctcaactttgaagacccagtcacctactacacggccttgcacatcgccgtcctgcggaaccagccggacatggtggagctgctggtgcatcacggggccgacgttaatcggagggaccggatccacgagagtagccccttggacctggccagcgaggagcctgagcgcctgccctgcctgcagcgcctcctggaccttggagctgatgtcaatgccgctgacaagcatggaaaaactgctctgctccatgctctggccagcagcgacggggtgcagatccacaatactgagaacattcgtctcttactggaaggaggggcagacgtcaaggccaccaccaaagatggggacacagtgttcacctgcatcatcttcctgcttggtgagaccgtgggaggggacaaagaggaggcccagatgatcaaccgcttctgcttccaagtcacacggctgctgctggcacacggggccgaccccagcgagtgcccagcccacgagtccctcacccacatctgcctgaagagctttaaactgcacttccctctcctgcgcttcctcctggagtccggagccgcctacaactgctccctgcacggtgcgtcctgctggtctggctttcacatcatctttgagaggctctgttcccacccaggctgcacggaagacgagagccatgcggacctcctgcgcaaagctgagactgtcctggatctcatggtgaccaactctcagaaactccagctgcccgaaaacttcgatatccaccctgtgggcagcctggcggaaaagatccaggccctccacttctccttgaggcagctggagagctatcccccgcccctcaagcacctgtgccgtgtggccatccggctctaccttcagccgtggcctgtggatgtgaaggtcaaagccctgcctctgcccgacaggctgaagtggtacctccttagcgagcacagtggctccgtggaagatgacatctgataggtctcaggctacaggaacgggggacacgggcagctcaggtcagcctgttggtagatgctgggacagcattagaagagggtctttttgatctgggagatgagacgggatccttcatgagaaaagccagccaggtagagcctgaagctgtgatcactccagtggtgaagggtgcagctctggttcttccagagagactgcccccttccctccagcggcactccaagtcccccccatgttggaaagaggaacagggcttggattgatgtttataccctctgaattggagggcagtgccagggcatttgcagaagctgggaaggaccaagcctcagcaccccagggctgcggggctcttgttggccgcacgtggcagtgcagctggagaggaagcctggggcacgtcctgtgcggtgccaccaaggccccacccctgccccttttccttccaggttctgttactcacagaagtgtttctggtgggctctgcgggagaagacactaagggccccacaggcttgtttcatggtgttgcaagccaagctggcccctgcctgttcctgtagctctggggccaggtcagccgtggccccacctaccagaactgtgctctgctggcagctgtgcttttgccaaacccagggcctcagcgaccatgacttctgctaaaaagcaatcatgagtgcgtggctggggacagacctctctgaagtgtctcctgttgtgaggggctcactttggagccactgaagagccgactgtgccacccacttgcgagcctcagtcccttccaagctgcactggtcattgggaattgtgtaaacacctctggggataagctgaggtgactaaatgatatatttatattataagattaaactgactttcttggccttaa

SEQ ID NO: 530 - DNA, 2180 bp, Homo sapiens
  source 1..2180: mol_type = genomic DNA
ccgggcgcaggggctggactggcggagcaggtggggtccgcggccgccggagcgttccggtcggcgtctgggcatctcggcctcggcagaaagcgcgacggccctgctgcgcggggcccgcggcgatgccgttcctgcacggcttccggaggatcatcttcgagtaccagccgctggtggatgcgattctgggctccctggggatccaggaccccgagcggcaggagtctctggaccggcccagttatgtcgccagcgaggagagccgaatccttgttctcactgagctgctggagaggaaagcccactctcccttttaccaggaaggcgtgagcaacgccctgctcaagatggctgagctggggctgacgcgggcggccgacgttctcttgcggcatggggccaatctcaactttgaagacccagtcacctactacacggccttgcacatcgccgtcctgcggaaccagccggacatggtggagctgctggtgcatcacggggccgacgttaatcggagggaccgggaaaaactgctctgctccatgctctggccagcagcgacggggtgcagatccacaatactgagaacattcgtctcttactggaaggaggggcagacgtcaaggccaccaccaaagatggggacacagtgttcacctgcatcatcttcctgcttggtgagaccgtgggaggggacaaagaggaggcccagatgatcaaccgcttctgcttccaagtcacacggctgctgctggcacacggggccgaccccagcgagtgcccagcccacgagtccctcacccacatctgcctgaagagctttaaactgcacttccctctcctgcgcttcctcctggagtccggagccgcctacaactgctccctgcacggtgcgtcctgctggtctggctttcacatcatctttgagaggctctgttcccacccaggctgcacggaagacgagagccatgcggacctcctgcgcaaagctgagactgtcctggatctcatggtgaccaactctcagaaactccagctgcccgaaaacttcgatatccaccctgtgggcagcctggcggaaaagatccaggccctccacttctccttgaggcagctggagagctatcccccgcccctcaagcacctgtgccgtgtggccatccggctctaccttcagccgtggcctgtggatgtgaaggtcaaagccctgcctctgcccgacaggctgaagtggtacctccttagcgagcacagtggctccgtggaagatgacatctgataggtctcaggctacaggaacgggggacacgggcagctcaggtcagcctgttggtagatgctgggacagcattagaagagggtctttttgatctgggagatgagacgggatccttcatgagaaaagccagccaggtagagcctgaagctgtgatcactccagtggtgaagggtgcagctctggttcttccagagagactgcccccttccctccagcggcactccaagtcccccccatgttggaaagaggaacagggcttggattgatgtttataccctctgaattggagggcagtgccagggcatttgcagaagctgggaaggaccaagcctcagcaccccagggctgcggggctcttgttggccgcacgtggcagtgcagctggagaggaagcctggggcacgtcctgtgcggtgccaccaaggccccacccctgccccttttccttccaggttctgttactcacagaagtgtttctggtgggctctgcgggagaagacactaagggccccacaggcttgtttcatggtgttgcaagccaagctggcccctgcctgttcctgtagctctggggccaggtcagccgtggccccacctaccagaactgtgctctgctggcagctgtgcttttgccaaacccagggcctcagcgaccatgacttctgctaaaaagcaatcatgagtgcgtggctggggacagacctctctgaagtgtctcctgttgtgaggggctcactttggagccactgaagagccgactgtgccacccacttgcgagcctcagtcccttccaagctgcactggtcattgggaattgtgtaaacacctctggggataagctgaggtgactaaatgatatatttatattataagattaaactgactttcttggccttaa

SEQ ID NO: 531 - DNA, 1359 bp, Homo sapiens
  source 1..1359: mol_type = genomic DNA
gagttccacatctgatacccaggagtctccagcttccaagagaggtcgggtcacagccagcagctatgtctgacataaatcttgactgggttgacaggcgtcagttgcagcgcttggaggaaatgctgattgttgtggatgagaatgataaggttattggtgccgacaccaagaggaattgccatctgaacgaaaacattgagaaagggctgctgcaccgagccttcagcgttgtcttgtttaacaccaagaatcgaatcctgatacagcagaggtcggacacgaaagtcacgtttcctgggtattttaccgactcctgtagtagccacccattatacaacccagcagaactggaagaaaaggatgccatcggagtgaggagggcagcccagaggcgtctgcaagcagagctgggaattcctggggagcagatttctccagaggacattgtgttcatgacaatctatcaccacaaggcaaaatcagacagaatttggggagagcatgaaatttgttaccttctgcttgtgaggaaaaacgtcactctgaacccggatcccagtgaaacgaaaagcatcctctacctgtcccaggaggagctgtgggagctgctggagagggaggcgaggggtgaagtcaaagtcaccccctggctaagaaccattgccgagaggtttctgtaccggtggtggcctcacctggatgacgtgaccccgtttgtggagcttcacaaaatacacagagtgtgagaggcagggaggtcgagtcagccatgtgtaatgccctcagtgcaggcagacgcaccattgaggcaatgatacaccctctccaaaaaacagggcaaaaggggcacttgattgcccatcatgtataaatcactatttcaaccttttcatcaactttgtcatatcttcattttcccttttccttatttccatatttctcatctgcctggttgcagggaggaaatttaacatttcctttgtcccaatttccattttataagcacttgtttgattaacagcagctgatcctgaaagtcttggggagatcttgagagtcctgaagcaggcggactagcctggctggaccatgaggctgtctccccacagctttatccaagcctccaaggtcaggatgggatctctgtatcatgtttttctttttaaatcacttatttcagagtgcaacacaaggctgcatttttaaaaaaaagacacattcaatcttgcatcctaatacaagcagtacggaagatgcgtatggtctcagccaagtgactcgacgtttatccacttctgttcatttgatcgtttcagtaatatgcttacaaataaagacatacttgctttaaaacat

SEQ ID NO: 532 - DNA, 1850 bp, Homo sapiens
  source 1..1850: mol_type = genomic DNA
cgcggcgcggcgccggaggaggaagtggtgaggttgttgctccttcagcgcctatcgctggctcttggggcgcagagaggggccgcagtctccgcggctgcgtcgagctcccttgcagtcccctccatgttccccggcgccactactccccttcctaaggccgccgcttaccccggggtctatggaagtaatggaaggacccctcaacctggctcatcaacagagcagacgagcagaccgtttattagctgcaggcaaatacgaagaggctatttcttgtcacaaaaaggctgcagcatatctttctgaagccatgaagctgacacagtcagagcaggctcatctttcactggaattgcaaagggatagccatatgaaacagctcctcctcatccaagagagatggaaaagggcccagcgtgaagaaagattgaaagcccagcagaacacagacaaggatgcagctgcccatcttcagacatctcacaaaccctctgcagaggatgcagagggccagagtcccctttctcagaagtacagcccttccacagagaaatgcctgcctgagattcaggggatctttgacagggatccagacacactactttatttacttcagcaaaagagtgagccagcagagccatgtattggaagcaaagccccaaaagatgataaaacaattatagaggagcaggcaaccaaaattgcagatttgaagaggcatgtggaattccttgtggctgagaatgaaagattaaggaaagaaaataaacaactaaaggctgaaaaggccagacttctaaaaggtccaatagaaaaggagctggatgtagatgctgattttgtagaaacgtcagagttatggagcttgccaccacatgcagaaactgctacagcctcctcaacctggcagaagttcgcagcaaatactgggaaagccaaggacattccaatccccaatcttcctcccttggattttccatctccagaacttcctcttatggagctctctgaggatattctgaaaggatttatgaataattaaaatggaaggccacagaaaaggggaaaagaggaaataatacagtaatcgttaatccagcaaaaagaaatgaaaagggaaaaccacatagaagggtaatcccggaaatgcttcatctggtggactgtgggagcagaggcattgccaggacttgggaaacagtcactgtgaaatgcgctgcgtatctcattcactcacttcagctaatgattccgacttggcagacgctaaactcatggaggttcggtttctcctgatacaaaccaaatggctacctggaagaatttctttcaagcaacagttatttttcttatcttcagggttaaaatgtataaaagttatgtgtaattaatctataatgccataaatgataatgcaaaacctaaataatatggtggccggaggggctgccttatatttgaaacatgctttctatcatgcattgactgtatgcattttgttaatgcacattctgtttgtttaaggtgtgtaagatacacacccttctagatgaaactatatgtgccacactttgcactactcataatgataacctcaagactatcagaagaaatatttaaatttccattttatgaagaaaggaaccaaattattatgctttttaaaacaaattaccagtttacataattaatcagggtgcattttaagttctaacttcgtttattgtataatgcatcatttgaaaataccaaggaggaaataccctttgtttttaatgatgcaagagtggacgtaatgctagttggcagtattttattgtaagaaatcaataaagtaattgtgtttt

SEQ ID NO: 533 - DNA, 4362 bp, Homo sapiens
  source 1..4362: mol_type = genomic DNA
gtggttagtagcgataaatgctctgaaggaaaaaacatacagtactgtgagaatgtagtattttgaaatgtttcatttgcaaaattgtacttgatactcagaatagtgtttttttttcctaaaatacttaatatgctgaacaggtcaatgtatcatctgcctagtatgcataaacaataacagtaaatgtttagtaatttgagcacagttgggtatgttcatgtattttttattccttactctgtttgcattgccagtgtttgattttgctatttcaaagaaatggcattttgttgagtttgaaaatttgaaggtgcattggatcctgctaatttgttggattctgctaaattgtagcagtacagctctcaggttttgtagttaagagcataacttcactaaataaaaatatttttaatacaataatatggaatcagagtaactctcctttttcctgctcaaactttgatttgctgaagctgcttcccgaaaatcatgtgtgtcgactctctggtcagaatttgctccggactctcttatggcagaatcagaaatattaaaagtttgtcagatatccagattgtacaggttgcttgtggttactatcattcacttgcactttctaaagcaagtgaagtcttctgttggggacagaataaatatggccaattgggtttaggtactgactgtaaaaagcaaacttcaccgcagctgcttaagtctttgcttggaatccctttcatgcaagttgcagcaggaggagcccatagttttgtactcaccctttctggagctatctttggatggggacgcaacaagtttggtcagctaggtcttaatgatgaaaatgataggtatgttcctaatttactaaagtcactaagatctcagaaaatagtttatatttgttgtggagaagatcatactgctgctctaaccaaggaaggtggagtgtttacttttggagctggagggtatggtcagttgggccataattctaccagtcatgaaataaacccaaggaaagtttttgaacttatgggaagcattgtcactgagattgcttgtggacggcagcacacttctgcttttgttccttcatcaggacgaatttactcttttgggcttggtggtaatgggcagctgggaaccggttcaacaagcaacaggaaaagcccctttactgtaaaaggaaattggtacccctataatgggcagtgtctaccagatattgattctgaagaatatttctgtgtaaaaagaattttctcagggggagatcaaagcttttcacattactctagtccccagaactgtgggccaccagatgacttcagatgtcccaatccgacaaagcagatctggacagtgaatgaagctctaattcagaaatggctgagctatccttctggaaggtttcctgtggagatagccaatgagatagatggaacgttttcttcctctggttgcctaaatggaagttttttagctgttagcaatgatgatcactatagaacaggtaccagattttcaggggttgatatgaatgctgctaggcttttattccacaaacttatacaacctgatcatccgcagatatctcagcaggtggcagctagtttggaaaagaatcttattcctaaactgactagctccttacctgatgttgaagcattgaggttttatcttactctaccagaatgtcccctgatgagtgattccaacaatttcacaacaatagcaattccctttggtacagctcttgtgaacctagaaaaggcaccactgaaagtacttgaaaactggtggtcagtacttgaacctccactattcctcaagatagtagaactttttaaggaagttgtggtacatcttttgaaactctacaagatcggtattcccccttctgaaagaagaattttcaacagttttcttcatactgcattaaaggttttagaaatactacatagggtaaatgagaaaatgggacagattatacagtatgataaattttatatacatgaagtacaagaattgatagacataagaaatgattatatcaactgggtccaacagcaggcctatggaatggatgtcaaccatggattaactgagttggcagatatccctgttacaatctgtacatatccatttgtatttgatgcccaagcaaaaactactctgttacagaccgatgcagtcttacagatgcagatggctattgatcaggcccacaggcagaatgtctcctctctttttctcccagtgattgaatctgtgaatccctgcttaattctagtggtgcgtagagaaaatattgtaggagatgcaatggaagtccttaggaaaacaaagaacatagattacaagaagccactcaaggttatatttgttggagaagatgctgtggatgcaggaggggtgcgcaaagaatttttcttgctcatcatgagggaattattggatcctaaatacggcatgtttaggtattatgaagattccaggctcatttggttttctgataagacatttgaagacagtgatttgttccatttgattggtgttatctgtggcttagcaatttataattgtaccattgtggacctccattttcctttggctttatataagaaactactgaaaaagaagccatccttggatgatttgaaagaactaatgcctgatgttgggagaagcatgcaacagttactggattatccagaagatgacatagaggaaacattttgtcttaattttacgatcacagttgaaaactttggtgcaacagaagtgaaagagctggttctaaatggtgcagacacagctgttaacaaacaaaatcggcaagagtttgtcgatgcttatgtggattacatattcaataaatcagtggcttccttatttgatgcttttcatgcgggctttcataaggtctgtggaggaaaagtccttctgctctttcagcctaatgaactacaagcaatggtcattggaaatacaaattatgattggaaggaactggaaaagaatacagaatacaaaggggaatattgggcagaacatcctacgataaaaattttttgggaagtatttcacgaattaccattggaaaagaagaaacagtttctgttatttttgacaggtagtgatcgcattcctattcttggtatgaagagtctgaaactagtcatccagtccacaggaggtggtgaggagtatctcccagtttcccatacttgttttaatcttctggatcttccaaaatatacagaaaaagaaactctacgctctaaactgatccaagctattgatcacaatgaaggcttcagtttaatataactttggagttataactattcagtttagtgcaaaagcattaaactatttgtgtttttcttgtggtgatgaattcagcaaggtgacagaggtactattataattcttacttgcagaatgttcaatctacgagtgttcatggaagccaaaaaatattaaaggaaaatgaacaaactgttaatattattgtacagaaccatggattttttttgaccatcttctaataaacatagcaagtattatgaatacattaaagttttactaacatgaattttaagagtttgcatatttcagaaatgatctggtgtgagtgcatggaaatattgcttaatttttcttcaatcattgagtgaaaaacctttaactttggcctgcaatagtcatttgattattttttcattttgtaaataatgttaagttttgtaataaaatagttatgttctgataccagtacagtttctatggttgtaattgaacttgaacagacttttaaaggttaaaaattatgatttaaatcttactctgagactctataaaaagaaaaaaaaggtagcatggtggaaacactatcttttcttttttgctagaataagtgtctttgtgcaaacctaaatcacagatagggaatatactacataacctgcagttcttttctttgtgaatcctgacacactgatagatgggggattgtcgatcagagaacttattaatatttagtactggaagaactctgtctccacagttgccagtaataaaaagaaacattggctactatgagcaccaatcactgggttatagctttcaaaattattgatgctgcagtgctttagagctatttccttgaatttaagaaacaaatcttaacagttttatggtgctgatgcttagttgtctcatgccattaaattgtaaaagtgagttgatgcaatacatgtgactttctgctataatgcaaatatttattttttaaatttattttaaaatgccgtgaaaactgtttaataaagatttattgttttaatattt

SEQ ID NO: 534 - DNA, 2623 bp, Homo sapiens
  source 1..2623: mol_type = genomic DNA
atgccaagatgcctgccttccttggtctaaagtgtctggggaaattgtgcagctctgagaaaagcaaagtcacctcatctgagagaaccagtgccaggggctcgaacagaaagagactgattgttgaggaccggagggtctctgggacctccttcaccgctcataggcgtgccactatcactcatttgctgtatctctgtcccaaggactactgcccacgtgggcgtgtatgtaacagcgttgatccttttgtggcccaccctcaggaccctcaccacccatcagagaagcctgtcattcactgccataaatgtggggagccttgcaagggtgaagtgcttcgggtccagaccaaacatttccacatcaagtgtttcacctgcaaagtgtgtggctgtgacctggcacaagggggcttcttcataaagaacggagagtatctctgcaccctggactaccagcggatgtacgggacacgctgccatggctgtggggagttcgtggagggcgaagtggtgactgctctgggcaagacctaccatcccaattgctttgcttgtactatctgcaagcgcccgtttccacccggagaccgagtcacattcaatgggagagactgcctttgtcaactctgtgcacagccgatgtcgtccagtccgaaagaaaccaccttctccagcaattgtgccggctgcggaagagatatcaagaatgggcaggcgctgctggcgctggataagcagtggcacttggggtgctttaaatgcaagtcctgcgggaaggtcctcaccggggagtacatcagcaaggatggtgctccgtactgtgaaaaggactaccagggactctttggggtgaaatgtgaggcgtgtcaccagtttatcacagggaaagtcctggaggcaggtgacaaacattaccaccccagctgtgcacgatgcagcagatgcaaccagatgttcacagaaggagaggaaatgtatcttcaaggctccaccgtttggcatcccgactgtaagcaatctacgaagaccgaggaaaagctgcggctgccaaacattcggcgttcttcatccgatttcttttattccaaaagtctgattcgacgcacaggacggtctccgtctctgcagcctaccaggacatcctcggaaagtatttattctaggccaggctccagtattcctggctcaccaggtcatactatctatgcaaaagtagacaatgagatcctggattacaaggatttagcagccattccgaaggtcaaggcaatttatgacattgaacgtccagatcttattacctatgagcctttctacacttcgggctatgatgacaaacaggagagacagagccttggagagtctccgaggactttgtctcctactccatcagcagaagggtaccaggatgttcgggatcggatgatccatcggtccacgagccagggctccatcaactcccctgtgtacagccgccacagctacactccaaccacgtcccgctctccccagcatttccacagacctgagcttttgtctcctggtgtgcagaggttgtcgtacctgcgcaccagcagcctcagccccacccacagcgactcccgccccaacccccctttccgacaccacttcattccccatatcaaaggcaatgagccgtccagcggccggaactcccctctcccttaccggccagacagccgccctctaactccaacttacgctcaggcccctaaacatttccatgttccagatcaaggaatcaacatttaccgaaagccacccatctacaaacagcatgctgccttggcagcccagagcaagtcctcagaagatatcatcaagttttccaagttcccagcagcccaggcaccagaccccagcgagacaccaaagattgagacggaccactggcctggtcccccctcatttgctgtcgtaggacctgacatgaaacgcagatctagtggcagagaggaagatgatgaggaacttctgagacgtcggcagcttcaagaagagcaattaatgaagcttaactcaggcctgggacagttgatcttgaaagaagagatggagaaagagagccgggaaaggtcatctctgttagccagtcgctacgattctcccatcaactcagcttcacatattccatcatctaaaactgcatctctccctggctatggaagaaatgggcttcaccggcctgtttctaccgacttcgctcagtataacagctatggggatgtcagcgggggagtgcgagattaccagacactcccagatggccacatgcctgcaatgagaatggaccgaggagtgtctatgcccaacatgttggaaccaaagatatttccatatgaaatgctcatggtgaccaacagagggcgaaacaaaatcctcagagaggtggacagaaccaggctggagcgccacttagcccctgaagtgtttcgggaaatctttggaatgtccatacaggagtttgacaggttacctctttggagacgcaacgacatgaagaaaaaagcaaaactcttctaagtcccactcgtgaatggcaattagagaaaggactgacagtggcggtgccccataggatgtcatattgaggccca

SEQ ID NO: 535 - DNA, 1109 bp, Homo sapiens
  source 1..1109: mol_type = genomic DNA
aagccccggaagtacttgttgcctgagcagtgggctgcttaggaagagaaggtcagagttcgcgggggcagaggcattcttgccgctggcccagtcactatgtagtggaggggcagacaccctcccgcaaattctggaaggttcttagtctcgactagggcagtagccccaggactcctagtcgccggcttcaggtcactgccggctgaacggagctgccgtcgccatgtttggctgcttggtggcggggaggctggtgcaaacagctgcacagcaagtggcagaggataaatttgtttttgacttacctgattatgaaagtatcaaccatgttgtggtttttatgctgggaacaatcccatttcctgagggaatgggaggatctgtctacttttcttatcctgattcaaatggaatgccagtatggcaactcctaggatttgtcacgaatgggaagccaagtgccatcttcaaaatttcaggtcttaaatctggagaaggaagccaacatccttttggagccatgaatattgtccgaactccatctgttgctcagattggaatttcagtggaattattagacagtatggctcagcagactcctgtaggtaatgctgctgtatcctcagttgactcattcactcagttcacacaaaagatgttggacaatttctacaattttgcttcatcatttgctgtctctcaggcccagatgacaccaagcccatctgaaatgttcattccggcaaatgtggttctgaaatggtatgaaaactttcaaagacgactagcacagaaccctctcttttggaaaacataatttgaataaaataatttttaatggattctgaaatttgtcatgttttgaagataactgactccatctaaaagtatgaggtcaaaggatcacgaaacctaagtttaaaaactgcttagagactgaagcttaattaaaaatctttattaaaaattaaaaacattgaaaaatgaaaatatgttcatcattaaagacttttttccccttaagcttaaaataccattcaaaggcaagacattttgttttggctatgattcattttttttacttaaaaataaaacctataccaaac

SEQ ID NO: 536 - DNA, 2955 bp, Homo sapiens
  source 1..2955: mol_type = genomic DNA
atacaatgccgcaaagcgcagggctgatctccgtctccgcccccagctgctttctccgagaggaggtggctgagtcgggggcgggctgggagggctgtcggtgggccagtctgcgtagcgacggcccgtcccctgcgcacggacgccgggaagaagggggtggggccacgtttgcgtccgcgccatcaggcccgagatagcggcgaggtccgctttcagtgtatggttttccctgccaaacggttctgcttggtgccatccatggagggcgtgcgctgggccttttcctgcggcacttggctgccgagccgagccgaatggctgctggcagtgcgatcgattcagcccgaggagaaggagcgcattggccagttcgtctttgcccgggacgctaaggcagccatggctggtcgtctgatgataaggaaattagttgcagagaaattgaatatcccttggaatcatattcgtttgcaaagaactgcaaaaggaaaaccagttcttgcaaaggactcatcgaatccttacccgaatttcaactttaacatctctcatcaaggagactatgcagtgcttgctgctgaacctgagctgcaagttggaattgatataatgaagactagttttccaggtcgtggttcaattccagaattctttcatattatgaaaagaaagtttaccaacaaagaatgggaaacaatcagaagctttaaggatgagtggactcagctggatatgttttataggaattgggcacttaaggaaagcttcataaaagccattggtgttggactaggatttgaattgcagcggcttgaatttgatctatctccattaaacttggatataggccaagtttataaagaaacacgtttattcctggatggagaggaagaaaaagaatgggcatttgaggaaagcaaaatagatgagcaccattttgttgcagttgctcttaggaaacccgatggatctagacatcaggatgttccatctcaggatgattccaaaccaacccagaggcaatttactattctcaactttaatgatttaatgtcatctgccgttcccatgacacctgaagatccttcattttgggactgtttttgcttcacagaagaaattccaatacgaaatggtacaaagtcatgatgattccctgagtaacaaagggaaatgaaaactgtttgtgatcttccgtattcactgaaaaataaatgcttgtttagtatcaaattttatttcacgaaagtttttttaaagaacagaaacttttccaattaaaaaaaaaaagcagacttctggttcaagatagctcactggaatacatgtttacctctttctttcctaaattgcattgaattgataggaaggatggcggaatcttaaagtgatacatgctaactgtagaaaaaaatagaaaatgcacataagcaaaaggaaacatttaaatgctatctttcaaagataactactcttaaaaccttgagtatcttttcagacctttttcttggcaaatgaatccatattgacatatttgatttttttaaaaacatggaaacgtactgttttgtaaattctttttaactgcacatctactgttcataaatatacctctgtaacataactttttgtggttctaatgtactctgttgtatagctaatacaagttaggatgcttttggccagaggtaacagtgtccaaatataattggcctaagtaacctaggaaattgtttgacataacacagggttcaggggtgtcattaaagacacactttttttgccttgacctcagttggtttgttttgccttaggctattccacctctcgatcacaagagctgctgctataacttccagttttacatctttgtaaaattgtatctcaaaggcagaaaaggccatttcgtctctcatttgttttatccatgaggaagatttttaacaaaagcctccagaagatttcccctcagtttccattgacttagatcaggttacagagaaaggcaatgtctgacatttttggtctctgttagaagtagactctgttgaaaagaaagaagctaagctaggtgtgaagaatggaattggaagcccactgccttcccataagaaaggtttaccataatttactcacttttttctgtgttagacattttgattatctgcagtttattactacaagcagtggcagagtgaatgtccttgtacattttgagttacatgcttaattatgtccttgagaaagtttctaaaagtggaatgattggtttgactggttcatagggctttaattatacaatttacccctctaattagtactatatgtatgtgacttccctccccctgccagaatactccttggtcaattgtaggtattctttttggtttaatttttgccaatgtaattaaaaaatggtatgtcatttttaaaatttgtatttctttcattacaaataagattgttatgtcagtattgttattggcttttcgtattcctcttaacgtgaaccgtctgttcattgtttttacctgttttcgttttagcaagtagtacttaatttaaagtgtgaacttaatatataagatgccaggaccatcatattgatgacaaaaatctattatgtggttgtagtgcatgtcttggagttaaactcttaagtatcaagaagtaaaataatttcattgtttctgttactaacattaaaagtgtgcaaattgtataaaattaggtacttcgattagtaaaagaaaaaaatttgaatgttttttttttttattttattaagcatgcccagttatgccaagcatagtaaataaaggtcaagtagcatttataatagaggaagtattgttatccctagcatgagtgtaatggtgatatgaaaaactttgtcttgtcattataataataaaaaaatgaacatttattatggaatttctatgagcctga

SEQ ID NO: 537 - DNA, 2164 bp, Homo sapiens
  source 1..2164: mol_type = genomic DNA
gccgggccggagcggggtgggtaggggacgcgaggcggagcggggccccacacaggccgcggcggctggctcgggcccctacggtcccggcggcggctggaggaggaagccaggcggctggcggaggaggagagacggaggaggccgagaccggagcgccgctcgccgcagacttacttccccggctcagcagggaaaggttcctagaaggtgagcgcggacggtatgcaaagttgtgaatccagtggtgacagtgcggatgaccctctcagtcgcggcctacggagaaggggacagcctcgtgtggtggtgatcggcgccggcttggctggcctggctgcagccaaagcacttcttgagcagggtttcacggatgtcactgtgcttgaggcttccagccacatcggaggccgtgtgcagagtgtgaaacttggacacgccacctttgagctgggagccacctggatccatggctcccatgggaaccctatctatcatctagcagaagccaacggcctcctggaagagacaaccgatggggaacgcagcgtgggccgcatcagcctctattccaagaatggcgtggcctgctaccttaccaaccacggccgcaggatccccaaggacgtggttgaggaattcagcgatttatacaacgaggtctataacttgacccaggagttcttccggcacgataaaccagtcaatgctgaaagtcaaaatagcgtgggggtgttcacccgagaggaggtgcgtaaccgcatcaggaatgaccctgacgacccagaggctaccaagcgcctgaagctcgccatgatccagcagtacctgaaggtggagagctgtgagagcagctcacacagcatggacgaggtgtccctgagcgccttcggggagtggaccgagatccccggcgctcaccacatcatcccctcgggcttcatgcgggttgtggagctgctggcggagggcatccctgcccacgtcatccagctagggaaacctgtccgctgcattcactgggaccaggcctcagcccgccccagaggccctgagattgagccccggggtgtgctaaagaggcagtacaccagtttcttccggccaggcctgcccacagagaaggtggctgccatccaccgcctgggcattggcaccaccgacaagatctttctggaattcgaggagcccttctggggccctgagtgcaacagcctacagtttgtgtgggaggacgaagcagagagccacaccctcacctacccacctgagctctggtaccgcaagatctgcggctttgatgtcctctacccgcctgagcgctacggccatgtgctgagcggctggatctgcggggaggaggccctcgtcatggagaagtgtgatgacgaggcagtggccgagatctgcacggagatgctgcgtcagttcacagggaaccccaacattccaaaacctcggcgaatcttgcgctcggcctggggcagcaacccttacttccgcggctcctattcatacacgcaggtgggctccagcggggcggatgtggagaagctggccaagcccctgccgtacacagagagctcaaagacagcgcatggaagctccacaaagcagcagcctggtcaccttttctcttccaagtgcccagaacagcccctggatgctaacaggggcgccgtaaagcccatgcaggtgctgttttccggtgaggccacccaccgcaagtactattccaccacccacggtgctctgctgtccggccagcgtgaggctgcccgcctcattgagatgtaccgagacctcttccagcaggggacctgagggctgtcctcgctgctgagaagagccactaactcgtgacctccagcctgccccttgctgccgtgtgctcctgccttcctgatcctctgtagaaaggatttttatcttctgtagagctagccgccctgactgccttcagacctggccctgtagcttttctttttctccaggctgggccgtgagcaggtgggccgttgagttacctctgtgctggatcccgtgcccccacttgcctaccctctgtcctgccttgttattgtaagtgccttcaatactttgcattttgggataataaaaaaggctccctcccctgcccctcagcttctctctggttttctca

SEQ ID NO: 538 - DNA, 3927 bp, Homo sapiens
  source 1..3927: mol_type = genomic DNA
gaggggtcgagcctgggcagtacaggcggcggtgcgcactctgcggcggcctctgcgcctcgggcgggcgggagagagaggccgcggccgccagcgtggggatgtctaggagctcgaaggtggtgctgggcctctcggtgctgctgacggcggccacagtggccggcgtacatgtgaagcagcagtgggaccagcagaggcttcgtgacggagttatcagagacattgagaggcaaattcggaaaaaagaaaacattcgtcttttgggagaacagattattttgactgagcaacttgaagcagaaagagagaagatgttattggcaaaaggatctcaaaaatcatgacttgaatgtgaaatatctgttggacagacaacacgagtttgtgtgtgtgtgttgatggagagtagcttagtagtatcttcatctttttttttggtcactgtccttttaaacttgatcaaataaaggacagtgggtcatataagttactgctttcagggtcccttatatctgaataaaggagtgtgggcagacactttttggaagagtctgtctgggtgatcctggtagaagccccattagggtcactgtccagtgcttagggttgttactgagaagcactgccgagcttgtgagaaggaagggatggatagtagcatccacctgagtagtctgatcagtcggcatgatgacgaagccacgagaacatcgacctcagaaggactggaggaaggtgaagtggagggagagacgctcctgatcgtcgaatccgaggatcaggcatcagtggacttatcgcacgaccagagtggggattccctcaacagtgatgaaggagacgtgtcttggatggaggagcagctgtcctacttctgtgacaagtgccaaaaatggataccagccagtcagctgagggaacagctcagttaccttaagggtgataatttttttaggtttacttgttcggattgctcagcagatggcaaggagcagtatgaaaggctgaagctgacatggcagcaagtcgtcatgttggcaatgtacaacttgtctctggaaggaagtggacgtcaaggttatttcaggtggaaagaagatatctgtgcttttattgagaaacattggacttttttactagggaataggaaaaagacgtctacctggtggagcaccgtggcaggttgcctcagcgtgggaagtcccatgtacttccgttcaggtgctcaggaatttggagagccaggatggtggaaacttgttcataacaagcccccaacgatgaaacctgaaggagagaagttgtctgcctctactttgaaaataaaagcagcctcaaaaccaactttagatcccatcattactgttgagggacttagaaaacgagcaagtcggaatcctgtggaatctgccatggaattaaaagagaaaaggtctcgaactcaggaagcaaaagacattagaagagcccagaaggaggccgctggctttcttgacaggagcacatcttctacccctgtaaaattcataagccgaggccgcaggccagatgtgattctggaaaaaggcgaagtgattgacttttcctccttgagctcctctgaccgcaccccgctgacaagcccatctccttctccttctctggatttctctgcccctggtacacctgcctctcattctgccacacctagcttgctttcagaagcagatctgattccagatgtgatgcccccacaagccttgtttcatgatgacgatgagatggaaggcgatggagtcatagacccagggatggagtacgtcccaccccctgctgggtcagtagcttctgggccagtggttggggtcagaaagaaggtcagaggccctgaacagataaagcaggaggtagagagtgaggaggaaaaacccgacaggatggatattgacagtgaagacacagattcaaacacatctttgcaaacaagggctagagaaaagaggaagcctcagctggagaaggacacaaagccgaaagagcccaggtatactcccgtgagcatctacgaggaaaagctgctgctcaagaggctggaagcttgtcccggtgctgttgccatgactccggaagctcggagactgaaacgcaaactgattgtcagacaagcgaaaagggataggggattaccactttttgacttggatcaagttgttaatgctgctcttttgttagttgacgggatttatggagccaaagaaggaggaatttccagacttccagctggacaagccacgtacagaaccacctgtcaggacttcagaatccttgaccgataccagacttccttgccgtccaggaagggatttcgacaccagaccaccaagtttttgtatcgcttggtaggatcagaagatatggctgtggaccagagtattgtcagcccttatacctctcggatcttgaaaccttatatcaggcgtgattatgaaacaaagccacccaaactgcagctcctgtcacagattcgttcccacctgcacaggagcgaccctcactggacgccggagcccgacgcacctctcgattactgttatgtgcggccaaatcacatcccaacgatcaactccatgtgtcaggagtttttttggcctggcattgacctgtctgagtgtctgcagtacccagacttcagtgttgttgttctttataaaaaagtcatcattgcctttggcttcatggttcctgatgtgaaatacaatgaagcttacatttcatttctgttcgtccaccctgaatggagaagagcagggattgcaactttcatgatctatcatctgattcagacctgcatgggcaaggacgtaacccttcacgtctcagcaagcaaccctgctatgctactgtaccagaagtttggattcaagactgaagaatatgtattagatttctatgataaatattacccattggagagtacagagtgtaaacacgcattctttctgaggctccggcgctgatgcgaatacagctcacagagaaacgcatgtgctattggagaacaggtctttgtggagatctaaaggcagtgattgatttcacagggagctctaatctctgtgattacatggtccttcaaactcccaaccaaagtgagaaaagcggcatgcagtgaaatgagcagtgagcagccctttagcaaaatcgccctccagtccttcctggagatgccttcagccagcatcccagactccacagttatttatgaatgatgtcgtgattctccctccacctgacagtttgtaagagtgaaagagcatctaacctgatgctcttggagagagataacctgtctgtcataacttaaaggatgagaaaatgtggtgtagctattaaagattcatgcagtcccaaaaggcactgtcctgggatgatgagagattataaggtgatttcataaaaggaatccaaccctgtgcccggccattgatgtgttgtcattgaatccaggaggatttctagggcactgaagttttgttgtttcttttgctgactttggttacagtcagaaaaaataaactagatgtttgtgtctacatgttctacctgttgtacctattagcatcttcctgcagggacttgggcccatggcctgggaggttggtttgggattggggttgttgggcagcctgccattcacctggcctatcctggcccttctcatgcccaagacagttgtttcacaggagtggaagtgtgggtgatgcaagtagaaccctctagatgtaccctgtgtggtctgcaggactggactgtttgctgtgtttgtggatgttggcgatagactgtcaattaggttgtttgtgatccaacaagaacatttccaaaagtatctaggtgttctcaaataaaaagctttctttgcacaacccatggccagagcgtcaa

SEQ ID NO: 539 - DNA, 3698 bp, Homo sapiens
  source 1..3698: mol_type = genomic DNA
agttttgaaaatcatagttttcgcccgcgctgcgccgcctggttgctcctcccgtgcggtgagtcccgaaggcccggagccaagtgggtctgggcaagcggggccttacctagggataccaccggacttggatcggagcagccttcaggggacgtggcgcagtcgaacagagccaccatggggacgacggccccagggcccattcacctgctggagctatgtgaccagaagctcatggagtttctctgcaacatggataataaggacttggtgtggcttgaggaaatccaagaggaggccgagcgcatgttcaccagagaattcagcaaagagccagagctgatgcccaaaacaccttctcagaagaaccgacggaagaagagacggatttcttatgttcaggatgaaaacagagatcccatcaggagaaggttatcccgcagaaagtctcggagcagccagctgagctcccgacgcctccgcagcaaggacagtgtagagaagctggctacagtggtcggggagaacggctccgtcctgcggcgtgtgacccgtgctgcggctgcagctgccgcggctaccatggcattggctgcaccttcttcacccacccctgagtctcccacgatgctgactaagaagcccgaggataaccacacccagtgccagctggtgcctgtggtggagatcggcatcagtgagcgccagaatgctgagcagcatgtcacccagctcatgtccaccgagcctctgccccgcactctgtccccgactccagcttcagccacagctccaacctcccagggcatcccgacatcagatgaggaatcaacacctaagaagtcgaaggccaggatactggagtccatcacagtgagctccctgatggctacaccccaggaccccaagggtcaaggggtcgggacggggcggtctgcgtctaagctcaggattgcgcaggtctcccctggcccacgggactcgccagcctttccagattctccatggcgggagcgggtgctggctcccatcctgccggataacttctccacgcccacgggctctcgcacggactctcaatcggtgcggcacagcccgatcgccccgtcttccccgagtccccaagtcttagcccagaagtactctctggtggccaaacaggaaagtgttgtccgcagggcgagcagaaggcttgccaagaagactgccgaagagccagctgcctctggccgcatcatctgtcacagttacctggagaggctcctgaatgttgaggtgccccagaaagttggttctgagcagaaggaaccccccgaggaggctgagcctgtggcggcagctgagccagaggtccctgagaacaatggaaataactcgtggccccacaatgacacggagattgccaacagcacacccaacccgaagcctgcagccagcagcccggaaacaccctctgcagggcagcaagaggccaagacggaccaagcagatggacccagagagccaccgcagagtgccaggaggaagcgcagctacaagcaggccgtgagtgagctggacgaggagcagcacctggaggatgaggagctgcagccccccaggagcaagaccccttcctcaccctgcccagccagcaaggtggtacggcccctccggacctttctgcacacagtgcagaggaaccagatgctcatgaccccgacctcagccccacgcagcgtcatgaagtcctttattaagcgcaacactcccctgcgcatggaccccaaggagaaggagcggcagcgcctggagaatctgcggcggaaggaggaggccgagcagctgcgcaggcagaaggtggaggaggacaagcggcggcggctggaggaggtgaagctgaagcgtgaggaacgcctccgcaaggtgctgcaggcccgcgagcgggtggagcagatgaaggaggagaagaagaagcagattgagcagaagtttgctcagatcgacgagaagactgagaaggccaaggaggagcggctggcagaggagaaggccaagaaaaaggcggcggccaagaagatggaggaggtggaagcacgcaggaagcaggaagaggaggcacgtaggctcaggtggctgcagcaggaggaggaagagcggcggcaccaagagctgctgcagaagaagaaggaagaggagcaggagcggctgcggaaggcggccgaggctaagcggctggcagagcagcgggagcaggagcggcgggagcaggagcggcgcgagcaggagcggcgcgagcaggagcggcgggagcaggagcggcgcgagcaggagcgacagctggcagagcaggagcgtcggcgggagcaggagcggctccaggccgagagggagctgcaggagcgggagaaggccctgcggctgcagaaggagcagctgcagagggaactggaggagaagaagaagaaggaagagcagcagcgtctggctgagcggcagctgcaggaggagcaagagaagaaagccaaggaggcagcaggggccagcaaggccctgaatgtgactgtggacgtgcagtctccagcttgtacctcatatcagatgactccgcaagggcacagggcccctcccaagatcaacccagataactacgggatggatctgaatagcgacgactccaccgatgatgaggcccatccccggaagcccatccccacctgggcccgaggcaccccgctcagccaggctatcattcaccagtactaccacccaccgaaccttctggagctctttggaaccattctcccactggacttggaggatatcttcaagaagagcaagccccgctatcacaagcgcaccagctctgctgtctggaactcaccgcccctgcagggcgccagggtccccagcagcctggcctacagcctgaagaagcactgaggctggcctgcggccttcttggcagcctcgcctcctgtccatgtctatctgtctgtctgtcggtctctgtcttggtctgttgccctccttcttggcatgccattgtggagggcttggccaggtgtatataaacgtcctctgtgctgggtgtttctgctgcaggtggcaggtggccccaggcctgtttggaggatgggctgggtgggtgggtggggaagaaatgggcccagccccacatggcctgcagacagtgctctgtaaatagttgttttaatttagctgaatgttagcattttagtctttggcattttagcgtttgggaggtagattaataaagtatattccttcaagcctgctgttgataccatgaagactgggcgcctcagtcccagccctgtagctgtgtgtcttgggccaccagtggcctgcaggacgaaggtactgttccatcacctgcggtgtgcctcaggatcaccaggtgcaggcccccaccctcggagatgctgctgcagtgagtggttccactgcctggataacccttgaggaacacgtcagttactgtcacgatggggcaggtggagctccttcctattttttggggtgctccctgtttgtaaaggggagtttgttcattgggaaagacctgggtcttgacacggccctgccacttagtcccctaccctctccattccccaggctccacccgtgctgctcaggtgcaaatggacttgagagcatctatgtgctggtgaagcatgaggtctgagtagaaaagg

SEQ ID NO: 540 - DNA, 4969 bp, Homo sapiens
  source 1..4969: mol_type = genomic DNA
gcggtacgggggtggtgccgcgctcctggccccgcgcgggcggacggcggaggcgcctcccagcctgctatgggatggatgaagaagagaaccactatgtctcgcagctcagggaagtctacagcagctgcgacaccacggggactggctttctggaccgccaggagctgacccagctctgccttaagcttcacctggagcagcagctgcccgtcctcctgcagacgcttctcggaaacgaccatttcgccagggttaactttgaggaatttaaggaaggttttgtggctgtgttgtcttcaaatgctggtgttcgcccctcagatgaagacagtagttctttggaatcagctgcctccagtgccatccctccaaagtatgtgaatggttctaagtggtatggccgtcggagccggcctgagctatgtgacgctgccacagaagccagacgcgtgccggagcagcaaacccaggccagcctgaaaagtcacctctggcgctcagcgtctctggagagcgtggagagtcccaagtcagatgaagaggccgagagcactaaagaagctcagaatgaattatttgaagcacaaggacagctgcagacctgggattctgaggactttgggagcccccagaagtcctgcagcccctcctttgacaccccagagagccagatccggggcgtgtgggaagagctgggggtgggcagcagcggacacctgagcgagcaggagctggctgtggtctgccagagcgtcgggctccagggactcgagaaagaggaactcgaagacctgtttaacaaactggatcaagacggagacggcaaagtgagtcttgaggaattccagcttggcctcttcagtcatgagcccgcgctacttctagagtcttccactcgggttaaaccgagcaaggcttggtctcattaccaggtcccagaggagagcggctgccacaccaccacaacctcatccctcgtgtccctgtgctccagcctgcgcctcttctccagcattgacgatggttctggcttcgcttttcctgatcaggtcctggccatgtggacccaggaggggattcagaatggcagggagatcttgcagagcctggacttcagcgtggacgagaaggtgaaccttctggagctgacctgggcccttgacaacgagctcatgacagtggacagtgccgtccagcaggcagccctggcctgctaccaccaggagctgagctaccagcaagggcaggtggagcagctggcaagggagcgtgacaaggcaaggcaggacctggagagggccgagaagaggaacctggagtttgtgaaagagatggacgactgccactccaccctggagcagctcacggagaagaaaatcaagcatctggagcaggggtaccgggaaaggctgagcctcctgcggtctgaggtggaggcggagcgagagctgttctgggagcaggcccacaggcagagggccgcgctggagtgggacgtggggcgcctgcaggctgaggaggctggcctccgcgagaagctgaccctggccctgaaggaaaacagtcgcctacagaaggagattgtggaagtggtggaaaagctttcggattcggagaggctggccctgaagctgcagaaggacctggagtttgtgctgaaggacaagctggagccacagagtgcagagctcctggcccaggaggagcggttcgcagcagtcctgaaggaatacgagctcaagtgccgggacctgcaggaccgcaacgatgagctgcaagctgagctggaaggcctgtgggcgcggctgcccaagaaccggcacagcccctcatggagcccggatgggcgcagacggcagctccctggactcggcccagcaggcatttcattcctgggtaattctgctccagtgagtatagaaacggagctgatgatggagcaggtaaaggagcattaccaagacctcaggacccagctggagaccaaggtaaattactacgaaagggaaattgcggcactgaaaaggaactttgagaaggagaggaaggacatggagcaggctcgcaggcgcgaggtcagcgtgctggagggtcagaaggccgacctggaggagctccacgagaagtctcaggaggtcatctggggcctgcaggagcagctgcaggacacagcccgcggccccgagcctgagcagatgggcctggcaccctgctgcacccaggcactgtgtggcctggccctgcggcatcacagccacctgcagcagatcaggagagaggctgaggcggagctgagtggagagctgtcggggctgggagccctgcccgctcgcagagacctgaccttggagctggaggagccgccgcagggacccctgccacgcgggagccagaggtcggagcagctggagctggagagggcactgaagctgcagccctgtgcgagcgagaagcgcgcccagatgtgcgtatcgttggccctcgaggaggaggagttggagcttgcccgcgggaagcgagtggacgggccctccctggaagcagagatgcaggccctgccgaaagatgggctggtggcaggaagtggccaggagggcacacgtggcctcctaccactgcgtccgggctgtggggagcggccactggcctggctggccccaggtgatggcagagagtctgaggaggcggcaggagccgggcctcgccgcaggcaagcccaggacacagaagctacgcagagcccggcccccgcccctgccccggcatcccacggcccctcagagaggtggtcacgcatgcagccctgtggagtggatggggatattgtcccaaaggagccagagcctttcggcgcgagcgcagcggggctggagcagcctggagcccgggagctgcctctgctgggaacagagagagacgcctcgcaaacccagccacggatgtgggagccacccctgaggccggccgcttcgtgcaggggacaggctgagaggctacaggccattcaggaagagcgagcacgaagctggagcaggggcacccaggagcaggcctcggagcagcaggcccgggccgagggcgccctggagcctgggtgtcacaagcacagtgtggaggttgccaggagagggtccttgccatcccacctccagctcgcagacccgcagggttcctggcaggagcagcttgctgccccagaagagggggagaccaaaatagcgctggagagagagaaggatgacatggaaaccaaacttctacatctggaagacgtcgtccgggctctggagaaacatgtagatttgagagagaacgacagactggagttccatagactttctgaagaaaacactttgttgaaaaacgatctgggaagggttcggcaagagcttgaagctgcagaaagtactcacgatgcacagaggaaggaaattgaggttttaaagaaagacaaggaaaaggcctgctctgagatggaggtgctcaacagacagaatcagaactacaaggatcaattatcccagctcaatgtcagggttcttcaactgggacaggaggcttctacccaccaggcccaaaacgaggagcatcgtgtgaccattcagatgttaacacagagcctggaggaggtggttcgcagtgggcagcagcagagtgaccaaatccaaaaacttagagttgaacttgaatgcctgaatcaggaacatcagagcctgcagctgccatggtcagagctgacccagacccttgaggaaagtcaagaccaggtgcagggagctcacctgaggctgaggcaggcccaggcccagcacttgcaggaggtccggctggtgccccaggaccgtgtggccgagctgcatcgcctgctcagccttcagggagagcaggccaggaggcgcctggatgcacagcgggaagaacatgagaaacagctgaaagccacagaagagcgggtggaagaggcggagatgattctgaagaatatggaaatgctcctccaagagaaagtggataagctgaaggagcagtttgaaaagaacacgaagtccgacctgctgctgaaggagctgtacgtggagaacgcccacctggtgagagcacttcaggccaccgaggagaagcagcgaggcgccgagaaacaaagccgcctcttggaagaaaaagttcgcgctctcaacaaactcgtcagtaggattgcccccgcagccctctctgtgtaaagacagattattttctaggattcattcgaaagcacatcttttaaattaagccactgtgctgccttagattccgtgggtcatgagccatgagtcctgggacatctgaggattgggattctttgttcaccccgcagatagttaatgaatggtctgccctgggcaagatggaggtgggggctgggggaatatgcatgttgcagaagccggcgtttttattagcggtcctgagtaatttcccttggcaaaattcccagttttgccactctctggagccagatcctgggagctgtcagcaaggagcaggtaagtgagcagttatggacagcactttccatgtggtgcttccgaccctggctgtcagagtgaaatgtaaagtcagggctctgtacagttttgccatttcactgttctgctttaagcttagcttattagaactcttggtggagggtgcgtacacacattccagaaaaggcttcactcgctgggaacgtcaacccagcgagaaaggaggggaagccccttctccggggaccttatctgtggactcaggaatgatggtgtttattgcaaatgcacaatctttttcccattgaaatgtcatcacactggaaattgtactatatgtaaaaaaaaaaaaaagtatagttttatatttgaaatgtatgcaaattatggccatatggctgattggaatgtactactgtaatataaaaagtcactgtatttgcaataaattcttttctatt

SEQ ID NO: 541 - DNA, 5630 bp, Homo sapiens
  source 1..5630: mol_type = genomic DNA
ttgcgcgctgcagggcaacaccccggcgtccctggaagctgggggagcgggagaaataactttatttggactgagagctggagaatgagaataggacctgagagtatattgggctaaggaggagaggtgtttgagcccagatgagtcatggctggacgacccctccgcataggagatcagctggttctggaagaagattatgatgagacctacattcctagtgagcaagaaattcttgaatttgcccgggagattggtattgatcccatcaaggaaccagaactgatgtggctggcgcgagagggcatcgtggccccactgcctggagagtggaaaccatgccaggacatcacaggtgacatttactatttcaacttcgccaacgggcagtctatgtgggaccatccatgtgacgaacactatcggagcttggtgatccaagagcgggcaaagctgtcaacttctggggccattaagaagaagaaaaaaaaaaaggaaaagaaagacaagaaggacagagacccccccaaaagttcgctggccttgggttcctcattagccccagttcatgttcctcttgggggcctggctcctttacgaggtcttgtggataccccaccctctgctcttcgtggatctcaaagcgtgagcctggggagctcagtggagtctggacgtcagcttggagaactcatgctgccttcacagggtctcaagacctctgcttatacaaagggtctcttgggctccatatatgaggacaagactgctctcagcctcttgggtttaggagaagaaaccaatgaggaggatgaggaggaaagtgacaaccagagtgtccacagctcaagtgagcctcttaggaacctacacctggacattggggcactggggggtgactttgagtatgaggagtctctgagaacaagccagccagaggagaagaaggatgtttctctggattcagatgctgccggtccccctactccctgcaagccctccagcccaggtgcagacagcagtctgagcagtgctgttggcaaagggcgacagggaagtggagcaagacctggtcttccagaaaaagaggaaaatgagaagagtgaacctaagatttgcaggaatctggtgacccccaaggcagaccctacaggcagtgagcctgccaaagcctctgaaaaggaagcaccagaggacacagtagatgcaggagaggagggttccaggagggaagaggcagccaaggagccaaagaagaaggcttctgctctggaagagggcagttcagacgccagccaagaactggaaattagtgaacacatgaaggaaccacagctctcagactccatagcttctgaccccaagtccttccatggcctggacttcggttttcgcagccggatctcggagcacctgctggatgttgatgtgctttccccagtcctgggtggagcttgtcggcaggcccagcaaccactgggaatagaagacaaggatgacagccagtccagccaagatgagctgcagagcaagcagtccaaaggcctggaggagaggttatctcctccacttccacacgaggagcgggcccagagtccccctcgcagcctggccactgaagaagagcctccccagggccccgaggggcagcccgagtggaaggaggcagaggagcttggggaggactctgcagccagcctcagcctgcagctgtccctccagagggagcaggccccaagcccacctgctgcctgtgagaagggcaaggagcagcattcccaggccgaggagctgggccctgggcaggaagaggcagaggatcctgaggagaaggtggcggtcagccccaccccgccagtctctccagaggtgcgatccacagagcctgtggctcccccagagcagctctcagaggctgcactaaaggccatggaagaggcagtggcccaagtactcgagcaagaccagaggcacctgctggaatccaagcaagagaagatgcagcaactgcgggagaagctgtgccaagaggaggaagaggagatcctccggcttcaccagcagaaagagcaatctctcagttccttgagggagcggctgcagaaagccattgaggaggaggaggcccggatgagagaggaggaaagccagaggctatcctggctccgagctcaggtccagtccagcacacaagcagatgaggaccaaatcagggctgagcaagaggcttccctgcagaaactgagagaagagttggagtctcaacagaaggctgagagggccagcttggaacagaaaaataggcaaatgctggagcagctcaaggaagagatagaggcttcggagaagagcgagcaggctgccctgaatgctgcaaaggagaaggctctgcagcagctgagggagcagctggaaggggagaggaaagaagctgtggcaacgctggagaaggagcacagtgctgagctggagcggctctgctcctcattggaggccaagcaccgggaggtggtctccagcctccagaagaagatacaggaagctcaacagaaagaggaggcccagctgcagaagtgccttgggcaagtggagcacagagttcaccagaagtcttatcacgtggctgggtatgagcacgagctcagcagtctcctgcgagagaagcgccaggaagtggaaggggagcatgagaggaggttggacaagatgaaggaggagcaccagcaagtgatggctaaggccagagagcagtatgaagctgaggagaggaagcagcgggctgagcttctggggcacctgaccggagagctggagcgcctgcagagggcccatgaacgagaactggagactgtgaggcaggagcaacacaagcgtcttgaggacttgcggcgccggcacagggagcaggaaaggaagctccaggatttagagttggaccttgaaaccagagctaaagatgtcaaggccagattggctctgctggaggtccaggaggagaccgcccggagggagaagcagcagctgcttgatgtgcagaggcaggttgctctgaagagtgaggaagccacagccacccatcagcagctggaggaggcacagaaggagcacacccacctgttgcagtcaaaccagcagctccgagaaattcttgatgagctgcaggcccgcaagctgaagctggagtcccaagtggatctgctgcaggctcagagccagcaactgcagaaacacttcagcagcctggaggctgaagctcaaaagaagcagcacctgttgagagaagtgacagttgaggaaaataatgcttccccacattttgagccagatctccatattgaggacctgaggaaatcccttggaacaaaccagaccaaagaggtgtcttcttctctctcccagagcaaggaggacttatacttggacagcctgtcctcccacaatgtctggcacctcctctctgctgagggggtagccctccgtagtgccaaggagttccttgtgcagcagacacgctccatgcggaggcggcagacagctctgaaagctgcccagcagcattggcgccatgagctggccagtgcgcaggaggtggccaaagacccaccaggcatcaaggccctggaagatatgcgcaagaacctggagaaggagaccaggcacctggatgagatgaagtcggccatgcggaaaggccacaacctgctgaagaagaaagaggagaagctgaatcagttggagtcctctctttgggaagaggcctcagatgagggcactctgggaggatcccccaccaagaaggcagtaaccttcgacctcagtgacatggacagcctgagcagtgaaagttctgaatctttttccccgcctcaccgtgagtggtggcggcagcagaggatcgactcaaccccgagtctcacctcccgcaagatccacgggcttagccactccctccggcagatcagcagccagctgagcagtgtcctcagcatcctggacagcctcaaccctcagtcgccgccgccgctcctcgcctccatgccagcccagctccctccccgggaccctaagagcacccccacccccacctactatggctccctggccaggttctcagccttatcatctgctacacccacgtccacccaatgggcctgggattcagggcaggggcccaggctcccctcctctgtggctcaaacggtggacgacttcctgttggagaagtggcgcaagtattttccatctggcatcccgctgctcagcaacagccccaccccgctggagagcaggctgggttacatgtctgccagtgagcagctccggctcctacagcactcccattcgcaagtccctgaggcgggcagcaccacctttcagggcataattgaggccaaccggaggtggctggaacgtgtcaagaatgaccccaggttacctctcttctcgtcaacacccaagccaaaagctactttgagcctcctgcagctgggccttgatgagcacaacagagtgaaggtgtatcgcttctgaggccctgagcaggggcttggggcagcccagcctctcctccacccagaccaagtgcctgaggagctgcctgccttcttccatctgagaaagcaccctccttccccctttgacttgcaggagccaccagggaccagggggttgagtggaacagtaaagccacacattctgtgactatataacctatctcaggctaaaatgtgtggactcgtacgagctcttgtcattgacatggcaagctgatggcgtgcggtggctgcggggtatcagggccgggagccctttgggaggaagggaggcgttagaggagctgccttcggaggctcagggagtccctttggagctggttgtttccttggccctgcagcgcactgctcggggctcccaaggaggttgtgtgtatggttcttaattcatcaggacaaagacccccagcatgtgtgtaccctgggacccgatttctctgggcccacatctatctccaatacctcagcctcagatcagaccctttcttttttgtctttcttctcttaatttttaaatgcctcttttcttgagcattccatctctctttttgaccctctcaggactgggcttagctgtccagagccctgccggagggtgctgggggctgtccctctgcaggcactgtgttttcctcaggggctgtcctcagaacacccctcctgctccctggggctcctcagggagccatttcagctggagtctcaggtctcaaaaacaacttctccaggaggccaaaaaaagactgggttggcttctggtcctcatgatggcttttatcctcctgggacactttgggtatattcatgggcattgtttccatctgtcttttctacctgtgccacccctgccctgattccacggctgcctcaggcaggcaggcaaggagctaggccggtgcccggccctggcagcaaggggtctttgtgcagttggagatgctgccgttgtggcagagcgtcctgcagccccgcttccatcagcaggctctggggtgggggctttgcaggggatgctctctgatgtttgttccgttgtttaaataaaatgcacttatttttgtttttttttttgcaagc

SEQ ID NO: 542 - DNA, 2791 bp, Homo sapiens
  source 1..2791: mol_type = genomic DNA
agtctcgcgggaagctccgttgtgggcgccccggctggtggctgagctcaggccttcaggcagaggggaggcgagggcggggcggtcacgtgagagcactgccgcggtgggttgtgggggtgctgcggcgccgtttgctttgccaaaccgacaaaagagagatgatggccaacgacgccaagcccgacgtgaagaccgtgcaggtgctgcgggacacagccaaccgcctgcggatccattccatcagggccacgtgtgcctctggttctggccagctcacgtcgtgctgcagtgcagcggaggtcgtgtctgtcctcttcttccacacgatgaagtataaacagacagacccagaacacccggacaacgaccggttcatcctctccaggggacatgctgctcctatcctctatgctgcttgggtggaggtgggtgacatcagtgaatctgacttgctgaacctgaggaaacttcacagcgacttggagagacaccctaccccccgattgccgtttgttgacgtggcaacagggtccctaggtcagggattaggtactgcatgtggaatggcttatactggcaagtaccttgacaaggccagctaccgggtgttctgccttatgggagatggcgaatcctcagaaggctctgtgtgggaggcttttgcttttgcctcccactacaacttggacaatctcgtggcggtcttcgacgtgaaccgcttgggacaaagtggccctgcaccccttgagcatggcgcagacatctaccagaattgctgtgaagcctttggatggaatacttacttagtggatggccatgatgtggaggccttgtgccaagcattttggcaagcaagtcaagtgaagaacaagcctactgctatagttgccaagaccttcaaaggtcggggtattccaaatattgaggatgcagaaaattggcatggaaagccagtgccaaaagaaagagcagatgcaattgtcaaattaattgagagtcagatacagaccaatgagaatctcataccaaaatcgcctgtggaagactcacctcaaataagcatcacagatataaaaatgacctccccacctgcttacaaagttggtgacaagatagctactcagaaaacatatggtttggctctggctaaactgggccgtgcaaatgaaagagttattgttctgagtggtgacacgatgaactccaccttttctgagatattcaggaaagaacaccctgagcgtttcatagagtgtattattgctgaacaaaacatggtaagtgtggcactaggctgtgctacacgtggtcgaaccattgcttttgctggtgcttttgctgccttttttactagagcattcgatcagctccgaatgggagccatttctcaagccaatatcaaccttattggttcccactgtggggtatccactggagaagatggagtctcccagatggccctggaggatctagccatgttccgaagcattcccaattgtactgttttctatccaagtgatgccatctcgacagagcatgctatttatctagccgccaataccaagggaatgtgcttcattcgaaccagccaaccagaaactgcagttatttataccccacaagaaaattttgagattggccaggccaaggtggtccgccacggtgtcaatgataaagtcacagtaattggagctggagttactctccatgaagccttagaagctgctgaccatctttctcaacaaggtatttctgtccgtgtcatcgacccatttaccattaaacccctggatgccgccaccatcatctccagtgcaaaagccacaggcggccgagttatcacagtggaggatcactacagggaaggtggcattggagaagctgtttgtgcagctgtctccagggagcctgatatccttgttcatcaactggcagtgtcaggagtgcctcaacgtgggaaaactagtgaattgctggatatgtttggaatcagtaccagacacattatagcagccgtaacacttactttaatgaagtaaactaggcttatttctaaaaagtcaagtctattggctttggcccaaaagcactggtatctttgtattaaattcatgtttattgtcacaaaaccattatttatacctatacagttgtactgtttcttttaaagcaaagccatttaacatctttcttcattcctaatttggaaattaaagtttacctttctgttaatctatgtataaatgttactctgagttattaatgtggattttaaaattgtaagcaatagaataggaaataaaacaactacctaatacaaatatttctgataagactacaaatatctgactgagctggggattaaagtagaggtaactgtatcttaaatgagtatgatttccttgtaagttaaaaaaattgaaatttaattgtagacttcaatagtccaagttttgaaggatgtttgagcttttgtataatgccatttatacctgcagttttacagataatgtttgactgcagttgccttggaaattcctccaaagtttgccttcatctctcctctacagtttggaggtgatggtgcagcagtggaacatctcttgatgcaccacactacttgtgttctgtgaagtgatgaaagtataactggttctagtttgcacactacacacatagttttgtgaagcttcagaaatgttttttcttttccttgtggccaaaccagtttgttaatctgattatattcatctgctaatgatactaaagttaatgtaataaagcattt

SEQ ID NO: 543 - DNA, 2526 bp, Homo sapiens
  source 1..2526: mol_type = genomic DNA
acacctgccaagcatcacacctgccaagcatcacacctgccaagcatcacacctgcgatgcctgcacgagctgggtgcggtccgcgcagctgcagtaagggggcgacccggcgtctgttagtcggcggttcatctccttcgtgcctcgatgagctttaacgccattttcctccattctctttcttcacctcttgagtgagtggccatgagctgggctgcaagagtcctggggagcagccagagagcgggcgccgcgggagcgaattgtttttgcccaaggatggttctgtgtctccgccaggcggcatgtgacctgctcgggcgcgggtggcccttcacccctgtgagtgtggccagaagtacctctcacctggacctgcggaccccgggcgcagtcctggagctgagaactggaggttgggggaacagcagggtaaaggggagagaaaagggggtcagctgcgggacggagtgccgtcccagctgtagtttcatgtttggtggagcaacccctgttcctttcctctctctctctcttaattcctcttaactgtactcacgcttccttctccttcccctggtccgcttcatggatgctgagctgcctggccagaacctacccagcttctttgctggtcagatttgtcggtcttttgtgtgtctgcagcacctccttccacacgggcccaggagttctctatacgcgctctcaccgcaggtcttggaattccaagccatttccaattccaggtcttggaaatggctgtgcaatttgtcttcactgttaggtttccaagatggcaactatcaagagtgaacttattaagaatttcgcggaagaggaggccattcatcacaataagatctccattgtaggaactggatcggttggtgtggcttgtgctatcagcatcttattaaaaggtttgagtgatgaacttgtccttgtggatgttgatgaaggcaaactgaagggtgagacaatggatcttcaacatggcagcccttttatgaaaatgccaaatattgtctccagcaaagattacctggtcactgcaaactccaatctagtgattatcacagcaggtgcacgccagaaaaaaggagaaacacgccttgatttagtccagcgaaatgtatccatctttaaattaatgattcccaatattacccagtacagtcctcactgcaaactgcttattgttactaatccagtggatatcttaacttatgtagcctggaagttgagtggatttcccaaaaaccgtgttattggaagtggttgtaatctggactctgctcgttttcgttactttattgggcaaaggcttggcatccactctgaaagctgtcatgggctgatccttggagagcatggcgactcaagtgttcctgtgtggagtggtgtgaacattgctggcgtccctctgaaggatctgaacccagatataggaactgataaagatcctgagcagtgggaaaatgtccacaaaaaagtgatttccagtggctatgagatggtcaaaatgaaaggttatacttcttggggcattagcctatctgtagctgatttaacagaaagtattttgaagaatcttaggagagtgcatccagtttctaccctaagtaagggcctctatggaataaatgaagacatattccttagtgtcccatgtatcctgggagagaatggtatcacagacctcataaaagtaaaactgactcttgaagaggaggcctgcttgcaaaagagtgcagaaacactttgggaaattcagaaggagctcaagctttaaagttgcttaaagctaattctgtagattgaagatgaaatagtagttatggaattgtatatgtcaaacttttgaataaatttgaatttctaaaagttggaaaaatagaggaaagagtgacctatttagtatagccttccagcttttttttttttcttttttgggagggtctcattctgtcacccaggctggagtgcagtggcacaatcatggctcactgcaaccttgacctcccgagctcaggtgagcctcccacttcagcctccagagtaggtgggaccacatgcgtgtgcctccatgcctgcctaatttttgtatctttttgtagagatggggttttgccatgtcatccaagctggttttgaactcccaaagtgctgagattacaggggtgagccactgtgcctggccttagctttgatttagtatccagatgatagatgacacttttttttttttttttttaaagtgacggcatcaaagatgtttttggtacttctcagtacttgccttgtatgtatacgtaattgccatctggtccacaagaatgtgtttactgtgttacacaaatcctgattcttttcatcaggtgcatagtaattcttctctatggcttaatacctatgttcatttacatgctatctctacaatgtaaaaataaaagtgtatatatatacacacacacacagagagtaatctaaatgttcctaacactagataaaacattgatttg

SEQ ID NO: 544 - DNA, 2226 bp, Homo sapiens
  source 1..2226: mol_type = genomic DNA
gcaaatagacccaggcttgactggcaattaaacatgaaacttctcattgggtattttcgagactactacggggaatcagctaccagcttactgccatgtggagaactgcacgagattccgggattggaatcaaaatgctaatttaaaaggtcaagtgaagctgctcctcacgttttggcgtgcctgcgctctctgcaggcagaagcgaacaaagacccagcaagagaaggcagaggctaagacccatcccgtatctgctctcctgaaataattctggagtcatgcctgaaatgccagaggacatggagcaggaggaagttaacatccctaataggagggttctggttactggtgccactgggcttcttggcagagctgtacacaaagaatttcagcagaataattggcatgcagttggctgtggtttcagaagagcaagaccaaaatttgaacaggttaatctgttggattctaatgcagttcatcacatcattcatgattttcagccccatgttatagtacattgtgcagcagagagaagaccagatgttgtagaaaatcagccagatgctgcctctcaacttaatgtggatgcttctgggaatttagcaaaggaagcagctgctgttggagcatttctcatctacattagctcagattatgtatttgatggaacaaatccaccttacagagaggaagacataccagctcccctaaatttgtatggcaaaacaaaattagatggagaaaaggctgtcctggagaacaatctaggagctgctgttttgaggattcctattctgtatggggaagttgaaaagctcgaagaaagtgctgtgactgttatgtttgataaagtgcagttcagcaacaagtcagcaaacatggatcactggcagcagaggttccccacacatgtcaaagatgtggccactgtgtgccggcagctagcagagaagagaatgctggatccatcaattaagggaacctttcactggtctggcaatgaacagatgactaagtatgaaatggcatgtgcaattgcagatgccttcaacctccccagcagtcacttaagacctattactgacagccctgtcctaggagcacaacgtccgagaaatgctcagcttgactgctccaaattggagaccttgggcattggccaacgaacaccatttcgaattggaatcaaagaatcactttggcctttcctcattgacaagagatggagacaaacggtctttcattagtttatttgtgttgggttcttttttttttttaaatgaaaagtatagtatgtggcactttttaaagaacaaaggaaatagttttgtatgagtactttaattgtgactcttaggatctttcaggtaaatgatgctcttgcactagtgaaattgtctaaagaaactaaagggcagtcatgccctgtttgcagtaatttttctttttatcattttgtttgtcctggctaaacttggagtttgagtatagtaaattatgatccttaaatatttgagagtcaggatgaagcagatctgctgtagacttttcagatgaaattgttcattctcgtaacctccatattttcaggatttttgaagctgttgaccttttcatgttgattattttaaattgtgtgaaatagtataaaaatcattggtgttcattatttgctttgcctgagctcagatcaaaatgtttgaagaaaggaactttatttttgcaagttacgtacagtttttatgcttgagatatttcaacatgttatgtatattggaacttctacagcttgatgcctcctgcttttatagcagtttatggggagcacttgaaagagcgtgtgtacatgtattttttttctaggcaaacattgaatgcaaacgtgtatttttttaatataaatatataactgtccttttcatcccatgttgccgctaagtgatatttcatatgtgtggttatactcataataatgggccttgtaagtcttttcaccattcatgaataataataaatatgtactgctggcatgtaatgcttagttttcttgtatttacttctttttttaaatgtaaggaccaaacttctaaactaattgttcttttgttgctttaatttttaaaaattacattcttctgatgtaacatgtgatacatacaaaagaatatagtttaatatgtattgaaataaaacacaataaaattaacacttgatccagaa

SEQ ID NO: 545 - DNA, 4461 bp, Homo sapiens
  source 1..4461: mol_type = genomic DNA
gtggtttggggaaagtgtaggggcaaccaaagatcatcggcttgactaggccctttgccctgaacctcatgaagaaatgataggaggcagacatatgtgcctaaaaagagcgttgagctcagagaagagcaactcggagttttgggggtgtgctttgatttgtgtacatcaatggcagaatcatccagcgaatcagatcacttccgctgtcgtgaccgattgagtccatgggctgccagatcaacgcacaggggaactcgaagtcttcctacagtagaagttaccgagaaggtcaacactataacaagtactttacaggataccagtcggaacctgcgacaagtggaccagatgcttggacgataccgagaatacagtaatggacaggcgggtgcgatagaacatttaaaagaaagcttggaacaatcaatcgaccaactccggagtcaacgtttattgagaaactcaggagggagaagtatttctgttacaagtttgagtgcaagtgaccttgatggtggcactgggtcagagctccatcattttccacctacctcacctctcaaggactatggggatccacagggtattaaacgaatgagatcaagaactggtgtccggtttgttcaagagactgatgatatgactcagcttcatggttttcatcagtctcttcgagacctcagcagtgaacaaattcgccttggagatgatttcaacagggagctttccagaaggagccggtcagatgccgaaacaaaaagggctttggaagaattgactgaaaaacttaatgaagcccagaaacaagaagtggtttcagatcgggtggagcggcggcttcaggaactggagagagagatgcgcacagaaagggagctggtggaaagacgccaggatcaactgggactcatgtccctgcagctacaggaggcactaaagaaacaagaagctaaagcagatgagcatgagggggcaataaaaaataagctaagacaaactgaaactgagaagaatcaacttgaacaggaattggagctatctcgaaggttattgaatcaatcagaaggcagccgagaaacacttttgcatcaggtagaagaactgcgtacacaacttacgaaagcagaaggtgatcgaaagggtttacagcatcaagtatctcagatttccaagcaacagtcaaactatcaggatgaacaaggggaggactggagatttaggagaggggttgagcgggaaaaacaggacctggagaagcaaatgtcagatttgagagtgcagctgaacttcagcgcaatggcatctgagttagaggaagtgaaacggtgcatggagagaaaagacaaggagaaagcacatttggcatcacaagtagagaatttaacacgtgaactggagaatggggaaaaacagcaactgcagatgttggatcgacttaaggagatccagaatcactttgacacatgtgaggccgagcgtaagcatgctgaccttcagatctcagagctgactcgccatgcggaggatgcaaccaagcaggctgagcggtacctcagtgagctccagcagtcagaggctctgaaagaggaggcggagaagaggagggaagacctgaaactgaaagctcaagaatccattaggcagtggaagcttaagcataagaagttagaacgagcgttggagaaacaatctgaaactgttgatgaactgacaggcaagaataatcagattttaaaagaaaaggatgaattgaaaacccagctgtatgcagcattacaacaaatagagaatcttcgaaaggaattgaatgatgtcctaacaaagcgtgcccttcaggaggaggagcttcactccaaggaggagaaattacgtgatattaagtctcatcaagctgaccttgaattggaagttaagaattccctggataccatccatagactggagagcgaattgaaaaagcagagtaagatccaaagccagatgaaagttgagaaagctcacttggaggaagaaattgcagagctcaagaagagccaggcccaggacaaagctaaacttcttgagatgcaagagtccatcaaggacctgagtgccatccgagcagatcttgctaataaattggctgaggaagagagagccaagaaagcagtgcttaaggacctttctgacctcactgcacaggcaaaatccagggatgaagaaacagctacaatcatcacacagttaaagctggaacgagatgtgcaccagagggagctgaaagatctcacatcatcattgcagagtgtgaaaacaaaacacgaacagaatatccaggagcttatgaagcactttaagaaagaaaagagtgaggctgagaatcatatcaggactctgaaggctgaaagtttagaagagaagaatatggctaaaattcatcgtggtcagctggagaagttgaaatcacagtgtgacagactgacagaggaattaacccagaatgaaaatgagaacaaaaaactgaagctaaaatatcaatgtttgaaggatcaactagaagaaagggaaaaacatataagcattgaagaggagcacttaaggaggatggaagaggccagattgcagctcaaggatcaacttctttgcttggagactgaacaggaatccattcttggtgtgataggaaaggaaattgatgcagcttgtaaaacattctccaaggactcagtggagaaattaaaagttttttcatctggtcctgatatacattatgacccacatcgctggttagcagaaagcaagactaaacttcagtggctctgtgaggaactgaaagagagagaaaacagagagaaaaatctgcgacaccagctgatgctctgcagacaacaactcaggaatttgactgaaaacaaggaatctgagttgcagtgtctctttcaacagatagaaaggcaggagcagcttctggatgaaatacatcgtgagaagagagatctactggaagagacccaaagaaaagatgaagaaatgggatctctgcaggaccgtgtaattgcattagaaacgagtacccaagtggccttggaccatctggagtctgtgcctgagaaactgagcctactagaagatttcaaagacttcagagattcctgcagttcatctgagagaactgatggaagatattccaaatacagggttcgcagaaattctcttcagcatcaccaagatgacaccaagtacagaaccaaaagtttcaaaggtgacagaacctttctggaaggttcccacactcgtgggttagatcactcatcctcttggcaggatcacagtcgcttcctgtctagtccaagattttcatacgtgaactcatttaccaaaagaactgttgctccagattcagcttcaaacaaggaagatgccacaatgaatggaacaagttcacaacccaaaaaagaggaatatgggagctaaaaaagcaaatgtaatttgttattttacatgagtatgttacaaataataacatctctattcttacagcaatttggcccagattatctaacagacatacctgcagctttggctctttggtattgccaaacattgacaaaagtgacaatactgttggtccttgtgaatggtaaaccaatccaaataatatcagatcatgaatgatgtgcagctaatttatttgcaacttatactagcacagaaagaatgatattttttcactttgtattttcctttttcaagtgtggtcagtcacattttcccaaccaaaatttggatttctaattgaggccttttaaaaattactggctaaaaagaaggaaaatgagtttcccttgaggcaaaagttgccagcactttagattcagggagcatttatatacaactgattttttgaaaaattttctccctaataaattatcatgtgttataacatgtggagatgtgcatatataacattagacagtccactttataaatgctcaggacttttatatctatcatcttaacagtccacaactgcataccgtagctgaaaattatttccaatcatccatttttaatagcaataaagaattcataaatgatatctgaactgtagagcactgtaaagaattcatagcacaatttatttatttgtctttttgtggccaaatatcctactgtgatcacttcagtcatatcctggaccgtctttggtttactgtgactaaaatcatagcaccaaactcctttgtccatgagatttatatataatcttgtataatttggtcctatctgcttctaccatcccaacttttttcatcaaagtgtctaagaacgtattccctttacacgctgatctcctagtggagaaggatttatattaaatgctaagtaatagtaaactttcaggaactgaatcctattgggtcatggattctgcatagacaagggcaataaagcaatacctttgtaatatgcattaca

SEQ ID NO: 546 - DNA, 1542 bp, Homo sapiens
  source 1..1542: mol_type = genomic DNA
tgcgtttagggcgaagacggagttgtaaacttcttaaaattcctctctcgacacttcggtaattcctctttcgagactaaagctctttttgtatgcgtgtgtgtcaagcgtatgccccgggattctcctccgcttccttttctcggtcttccttcttgctttagggaccggaagagtccttgaaccaaaatagctcggcgggcacttccggggccggcgcccagagttccgggagggtgcaggcaggagagggaaaggcagcagcggcggcagctggaggatgaagaaggagcatgtgcttcactgccagttctccgcgtggtacccgttcttccgaggcgttaccatcaagagtgtcattcttccacttcctcagaatgtgaaggattatttactcgatgatggaactctggtggtttcaggaagggatgatccaccaacacattctcagccagacagtgatgatgaagcagaagaaatacagtggtctgatgatgagaacacagccacgcttacggcaccagaatttcctgagtttgccactaaagtccaggaagctatcaattccctcgggggcagtgtctttcctaagcttaattggagtgccccaagggatgcgtattggatagcaatgaatagttctctgaaatgtaaaaccctcagcgacatctttctgcttttcaagagttccgatttcatcactcgtgacttcactcagccgtttattcattgtactgatgattctccagatccatgtatagaatatgagctcgttctccgaaaatggtgtgaattgattcctggggctgagtttcgatgttttgtcaaggaaaacaagcttattggtatttctcaaagagactacacacaatactatgatcatatttctaaacaaaaggaagaaattcgcagatgcatacaagactttttcaagaaacacatacagtacaaattcttagatgaagactttgtgttcgatatatacagagacagtagggggaaggtgtggctcattgactttaatccatttggtgaagtcacagattcactgctgttcacctgggaagaactgatatctgagaacaacttaaacggcgattttagtgaagttgacgctcaagagcaggattccccagctttccgttgcacaaacagtgaagtgacagtccagcccagcccctatttgagttaccggctacccaaggactttgtagacctctctactggggaggacgctcacaagctaatagacttccttaagctgaagagaaatcagcaggaggacgactgatgagcgtactggaactggagaagaggaggccccgccccaccgctccgggagctgctcatcagccgcaacttcctgccgaccctgatgcgggtgggccgagcagtgtggacatcagccactttttatattcatgtacattcacctggggaaaaaaacggagggactttgctacttgtaaaaataacataataaatagatcttaaacataggaaaaccatactgttctgataataaaatgctttctatgaaat

SEQ ID NO: 547 - DNA, 4023 bp, Homo sapiens
  source 1..4023: mol_type = genomic DNA
agtactccctgattggctctgcactggaggcagtgattttggggcagagaattttgcaacacgtggtagtgaactgtgaggagtttgaggggtctgaagactgaaagagtcgaatggtttgttggcagggtgtcctggtggattggtttctgtaagttcagattctcataaatcgtgtgagcgtcgccgacacctctgagataaaagggcccctttcgactagcctctgctgaaaggacctagaagaatcccttaggatgaagctgagtcttaccaaggtagttaatggctgtcgcctaggaaaaataaaaaacctgggcaaaacaggggaccacaccatggatattccaggctgccttctgtataccaagactggctccgccccacacctcacccatcacacgctgcataatatccacggggttcctgccatggctcagcttacgctgtcatccctagcagaacatcatgaagtcttgacagaatataaagaaggagttggaaagtttataggcatgccagaatcactcttgtactgctccctgcacgatccagtcagcccctgcccggctggttatgtaacaaacaagtctgtgtctgtgtggagtgttgcaggacgagtggaaatgactgtttccaagttcatggcaattcagaaggcccttcagccagactggttccagtgcctctccgatggagaagtatcttgtaaggaagcaacttccataaaaagggtcagaaagtctgttgaccgatcacttcttttcttggataactgtctgcggctgcaggaagagtcagaggttcttcagaagagtgtgatcattggagtgattgaaggtggagatgtgatggaagagaggctgaggtcagcacgagagacagccaagcggcctgtgggtggcttccttctggatggttttcaaggaaatccaacaaccctggaggctagactacgcttgctgtcatcagtcactgcagagctgccggaggacaagccaaggctcatatctggtgttagtcggccagatgaggtgctcgagtgtattgaaagaggagtggacttatttgagagttttttcccttatcaagtaacagagcggggatgtgccctgactttcagttttgattaccagccgaatcctgaagagacactactacaacaaaatggaacacaagaagaaataaaatgtatggatcaaataaagaaaattgaaacaactggttgcaaccaagaaataacatcatttgaaattaatctgaaggaaaaaaagtaccaggaggactttaacccgctggtgagaggatgttcctgttactgctgtaagaatcacactcgggcatacatccaccatctgctggtgaccaatgagctgctggccggagtcctgcttatgatgcacaactttgaacactactttgggtttttccattacatccgggaagcactaaaaagtgacaaactggcacagttgaaagagctcatccacaggcaagcatcttgagatcttgcaaatacaagtctcactcttcacactgagcctgtaccactgttgtaacatgggaagacgtgaagaagaaataatctgagctttaattatttatatttggatataaggtctgcttaaataaagaatctttgtaccaaactgcccacatgagggtgaagagatttcctcaaaagacttaaatgacctggattgatcagagagaattgaactgtgacctttaagacttctagactaattcttttagttgatagagattcatttagtcaaagacaaaagctttaactgtgagggcacagccttgaagtgggagtgatgagattctgagggacccatgaattggattgaggcttgaggggaaatggtgtgagacgaatgggctctggacatatgcctgttgatttgagaagaaatctggctggtttgagggtttcctttagttcaccctcatactctcaggagactcttctggatacttttgtcttccaccctgccctggcagtgcagccaatcagaaatggctcttgtgacttaactgggcttggatatccctggaatgtggggcttgaacattgctcctgtgatgatcatctgtcccaggtcacactccttcatttgaccacatggcctatttgcaacttctttttagagccaatgtaattgcctgttaggagccagaagtttgcccagctgctttcttctggttgtacagatccattgtggtctgccttccaggctcattaatagtctaactacgtaataactgaagacctatctcttgtgaagattcattctcaatgtgttcacttggacagagccctgcctggcctaacgattagagggttagtctccatcctgctcagatatgactcctgggcaattcacttaacttctccatggctgcttcctgctgaataaatagggacaggcataatggataggaatgaatgaacttttaagatactgtctagctctaaaattggaagaacaaaaagttttagattagagtcatagccttaatagccctagttgtcatcctgggagacaggcaacagtagagatatttgagagcctaaagagaggtttggcctgtgggtttttaagtggttattgaattggtatcaggagatcctgaggctggtaggggaaggtaattctttctaagttacctctgtatttttcaagttttctataaggaatacacatacacccacatgcacacaccatagtttttatacaaacagcaataacaaaaccaaaaagatgcccctttttttgtagggataagaaatacatttgttttatacttctatgctatattttgctattcaaaatttagtgggcattacttaacattgtttctaattattttgtggctgctgtatgttttatgtgttgggagcccattgtattaggccgttcttggattgctataaagaaatacctgagactgggtaatttggttttttggttttttggggttttttttgagacggagccttgctctgtcgcccaggctggagtgcagtggcgcgatctcggctctatgcaacctccacctcctgggttcatgccattctcctgcctcagcctcccgagtagctgggactacaggcgcccgccaccatgcctggctaattttttatatttttagtagagatggggtttcaccgtatgagccaggatggtctcgatctcctgacctcatgatccacaagactgggtaatctgtaaagaaaagaggtttaattggctcatggctctgcaggctttacaggaagcatggtactggcatctgcttggtttctggggaggcctccggaagcttatagtcatgacagaaggtgaagggggagcaggcacatcacatgacaaaagcaggaacaagactcagagcaagaagtcacttatcaccaaggggatggcccaggccattcatgagggatccacctttgtgctccaaacacctcccaccaggccccacctccagtattggggattacatttcaacttgaggtttgggcgggaacaaatagtcaaattatattacccatctacatggttttctttttcttagtatgggagtgtccatgaataaattcatgggcatcctcataactcttccatgaatggcaaggggtacttatggaaaacagttttccaaagatctgattgttttgaaatgtgttagattggacttgttcaaatgttcatatttttgttctatgctaaatgcatcgttaggggagtagtggtaaatattccagaatccatatgaaattcatgagtttatttatgtctaaaacactgaaaactgtgtccaatatcgttcagtttcctgggtctttttcttattagcacatttgagaaaaatattcctttcctttattgtagtaaatctattaaaggcaatagccaataaaacatttttaattttaaaaatttactgtgtttggctttctgtaaatgtagtaggtctgttaaacaaaatattaaatttccatagtaccagaaa

SEQ ID NO: 548 - DNA, 3369 bp, Homo sapiens
  source 1..3369: mol_type = genomic DNA
acattacaatgcctgacaaatcctagccagttctatcaaattatatctttcttacaggcttttaagctattagtctcataaagatacatttaatcagcgaggtaatggcatgatgagtgtttttaggttaaaaagagaacaggaactgttgccagcagaatggcgatattcaagacaacacgcacaagaagaggcgggtcctacgcgcttcgctagggaagcccgggtcagctcgctgcgcaggcgcagtgagttcgacacaccatgccgactgtcagcgtgaagcgtgatctgctcttccaagccctgggccgcacctacactgacgaagaatttgatgaactatgttttgaatttggtctggagcttgatgaaattacatctgagaaggaaataataagtaaagaacaaggtaatgtaaaggcagcaggagcctctgatgttgttctttacaaaattgacgtccctgccaatagatatgatctcctgtgtctggaaggattggttcgaggacttcaggtcttcaaagaaaggataaaggctccagtgtataaacgggtaatgcctgatggaaaaatccagaaattgattatcacagaagagacagctaagatacgtccttttgcggtagcagcagttctccgtaatataaagtttactaaagatcgatatgacagcttcattgaacttcaggagaaattacatcagaatatttgcaggaaaagagcactggttgccattggtacccatgatttggacactttgtcgggcccatttacttatactgcaaagcgtccttcagatatcaaattcaagcctctaaataagaccaaggagtatacagcctgtgaactgatgaacatatacaagactgacaatcacctgaaacattatttacatatcattgaaaacaaacccctgtatccagttatctatgatagcaatggtgtcgtcctttcaatgcctcccatcatcaatggggatcattccagaataacagtaaatactagaaatatttttattgaatgcacgggaactgactttactaaggcaaaaatagttcttgatattattgtcaccatgttcagtgaatattgtgagaatcaatttacggtcgaagctgctgaagtggtttttcctaatggaaaatcacatacctttccagaattagcttaccgaaaggagatggtgagagctgacctaattaacaaaaaagttggaatcagagaaactccagaaaatcttgccaaacttctgaccaggatgtatttaaaatcagaagtcataggtgatgggaatcagattgagattgaaatccctccaaccagagctgacattatccatgcatgtgatattgtagaagatgcagctattgcttatggatataacaacattcagatgactctcccgaaaacttacaccatagctaatcaatttcctcttaataagctcactgaacttctccgacatgacatggcagccgctggcttcactgaagcacttacctttgccctgtgctcccaagaagatattgctgataaactaggtgtggatatctctgcaacaaaggcagtccacataagtaatcctaaaacagctgaatttcaggtggcacgcactacccttcttcctggcctcctgaagaccatagcagcaaatcgtaagatgccccttccactgaaactgtttgaaatctctgacattgtaataaaagattctaatacagatgtaggtgcaaaaaactacagacatctctgtgctgtttattacaacaagaatcctgggtttgagatcattcatgggctgctggacagaattatgcagttgctcgatgtgcctcctggtgaagacaaggggggatatgtgatcaaagcatcagaagggcctgctttcttccccgggcgatgtgcagagatctttgccaggggtcaaagcgtcgggaagcttggggtccttcatcctgacgttatcaccaaatttgagctgaccatgccctgctcctccctagaaatcaatgttggaccctttttgtgaagattggtctctgtggtgtgattctcttcccaggtgtccctttctcctcccctagtgtccttaagtcctcctccacagggaacatctatttgggctttgatgtttaataaagtagaaagcactgtctggctgtgtgggtagagaccatcctttccctgcatattaggccagcttgtgccatataccagtgtggtgtctgtgtgtgaagctgcattgttgggtaaaagccccgtggagtgctggagaaatgcactagcagagtgcaggatctgttctgaaaggcagacgtgctcctcagacatcagaacatcacattggaacggattactcctgcataacaagatcccatttctttccttattgataaaacaagataatcgatgagaattcatgttgcatgagttcgagataactgaggggtttagctttgattttctacatttgacatgtattcatcattgagaaacactaaaataacaatatttttagaaaacgtttaagaatcaattatggtccaacaattatagcttctgaggtcagtttaaagtgaaagaaaaatctgtaatacaaggattcaaaatatgtgagggtgcataggtattttttactctatctgtgatactctaagatagagtacatgcaacaaagatctgttctgctgtaagagttaaaatggacaagtattgatatcaatgcagtatgaacattaggaaacaatgagaagcttatttttgccataggccatacatgttactgtaatcagtcagttataaaatcatggttttaaatacttaattgagctactagtttctctattgtcccagggagatattagacctctctttttctgaagctaagcttcagccaatcctccttgttttatatcctaatttcctttcttacttcaatctagaattctccagtaggtaccatctctggaaaaaagctgggtctcatgtttgagacaagttcccaggtactattgaagtaataagaaatatgataaaatataatactttaaagtcccagtagaaatagctaacaaaggctgggtgcgctgtggctcatgcctgtaatcctagcactttgggaggctgaggtgggcagatcacttgaggccaatagttcgagatcagcctgaccaacatggtgaaatgccatctccactaaaaatataaaaattagccaggcatggtggtgtgggcctgcagtcccagctacctgggaggctgagtcaggaaaatctcttgaaccaggaggtggacgttgcagtgatcccagattgtgccactgccctccagcctgggtgacagagtgagattctgtctacaaaaa

SEQ ID NO: 549 - DNA, 933 bp, Homo sapiens
  source 1..933: mol_type = genomic DNA
tttcttgaaagaggcatttaccgagcgcccaatgtatgcctggcactgggctgggtgctgccacctaagcgagcacgaccaatgcagtctatcagggaggcccagatcgccaagcagcggacccctgcggtccgccatgccactcccggctcctagagcgccgctcagcacaccgtgagcgcccaataactgttgggcttcaatgacgccgcggaggcggccccgtccccgcgctcccgcccctcccgccagggcagcccgggaggccagacgttgacgctgcagggagagggtggtgggcgcagccgctagggggcgcggcggggcggagcgcacctttccgcgggccgcggggatggcggcgcagggcgtagggcctgggccggggtcggcggcgcccccggggctggaggcggcccggcagaagctggcgctgcggcggaagaaggtgctgagcaccgaggagatggagctgtacgagctggcgcaggcggcgggcggcgctatcgaccccgacgtgttcaagatcctggtggacctgctgaagctgaacgtggcccccctcgccgtcttccagatgctcaagtccatgtgtgccgggcagaggctagcgagcgagccccaggaccctgcggccgtgtctctgcccacgtcgagcgtgcccgagacccgagggagaaacaaaggcagcgctgccctcgggggagcattggccctggcggaacgcagcagccgcgaaggatccagccagaggatgccacgccagcccagcgctaccaggctgcccaaggggggcgggcctgggaagagccctacacggggcagcacctaggatggggcagagacttgttgcatctttgtccccagcaaaggctacatgttacctccttcaattgataataaacctttctgagatgcagagggtccaggtca

SEQ ID NO: 550 - DNA, 1354 bp, Homo sapiens
  source 1..1354: mol_type = genomic DNA
aagtgcactaggtttgaaatcggaaagttggcggggctgcgggagctgagcctagagtccggctgttggctagagtgggcgcggatctggtgtggggaaggcggcgggactcaggcctgcctgcgaagcattgtcctacataatggtagaggacgaactggcacttttcgataaaagcataaatgaattttggaataaattcaaaagtacggacacctcctgtcagatggcgggactaagagatacctacaaggattccatcaaagcatttgcagaaaagctgtctgtgaaattaaaggaagaagaacgaatggttgagatgtttctggaatatcaaaatcagatcagcaggcaaaataagctcattcaagaaaaaaaggataacttgttaaaattgattgctgaagtaaaaggcaaaaagcaggaattggaagtactgactgcaaatatccaggatcttaaggaagaatattctaggaagaaggaaactatttctactgctaataaagcgaatgcagagaggttgaaaaggctgcagaaatctgcagacttgtataaagatcgacttggactagaaattcgaaaaatttatggtgagaaattgcagtttattttcactaatattgaccctaagaatcctgagagcccatttatgttttccttacatctcaatgaagcaagggactatgaagtgtcagatagtgcccctcatcttgagggcctagcagaatttcaagagaatgtaaggaagaccaacaatttttcagcttttcttgccaatgttcggaaagcttttactgccacggtttataattaacatacaaatagtgtatataaaaacggtttatttttcttctctattacatatctctttttttcttgtttttattattattatactttaagttttagggtacatgtgcacaatgtgcaggtttgttacatatgtatacatgtgccatattggtgtgctgcacccattaactcgtcatttcattaggtatatctcctaatgctatccctcccccctcccccaacccacaacagtccccgttgtgtgatgttccccttcctgtgtccatgtgttctcattgttcaattcccacctaggagtgagaatatgtggtgtttggttttttgtcctttcgatagtttgctgagaatgatggtttccagcttcatccatgttcctacaaaggacatgaactcatccttttttatggctgcatagtattccatggtgtatatgtgccacattttcttaatccagtctatcattgttggacatttgggttggttccaagtctttgctattgtgaatagtgccgaaataaacatacgtgtgcatgtgtct

SEQ ID NO: 551 - DNA, 4544 bp, Homo sapiens
  source 1..4544: mol_type = genomic DNA
atgaaactgactgattcgactaaaggatggatagtttgggcagcgttggacagctctatgaggggaatgtcgttgtctgctgggtcttcccctcttcattcccccaagattactccacatacttctcctgctcccagaagaagaagtcacactccaaatccagcaagttacatggtgccttctagtgcctctacatctgttaataatcctgtttctcagactccgtcttctggtcaggtgatccaaaaggaaactgttggtgggacgacttacttctatacagacacaactccagcacctttgactggaatggtgtttccaaactatcatatttatcctccaactgcacctcacgttgcttatatgcaaccgaaagcaaacgcaccttccttcttcatggctgatgaactccgacaggagctgatcaacagacatttaataacaatggctcaaattgatcaagcagatatgccagcagttcctacagaggttgacagctaccatagcctattccctctagaaccactgccacctcccaaccggatacagaaatcaagtaattttggatatattacatcttgctacaaagctgtaaacagcaaagatgatctgccatattgccttcggaggatacatggttttcgtcttgttaacacaaagtgcatggtgttggtcgacatgtggaagaaaattcaacactcaaatatcgtaactttgcgtgaagtatttaccactaaagcatttgctgagccctctcttgtgtttgcatatgatttccatgctggaggagaaactatgatgagcagacactttaatgaccctaatgctgatgcctacttcaccaagagaaagtggggtcagcacgagggaccattgcccaggcagcatgctggattattgccagaatctcttatttgggcatatattgtccaactaagttctgcattgcgtaccattcatacagcaggtttggcatgtcgagttatggatccaacaaagattctgataactggcaaaacaaggttgcgagtaaattgtgttggagtttttgatgttttaacatttgataacagtcaaaataataatccattggcattaatggcccagtaccagcaagcagatctgatatcattaggaaaagttgtgttggctttggcttgcaactctttggcaggaattcagcgagagaatttacagaaagccatggaactggtgacaatcaactattcctctgacctgaagaatctgattttgtatttgttgactgaccaaaacaggatgcgaagtgtaaatgacatcatgcccatgattggtgctcgattttatactcaattggatgctgctcaaatgagaaatgatgtcatagaggaagaccttgcaaaggaggttcaaaatggaagactgtttaggctcctagcaaaattgggaacaatcaatgagaggccggagtttcagaaggatcccacttggtcagagactggagaccgttatctgttgaaactctttagggatcatctttttcatcaggtgacagaagcaggtgctccctggattgacctcagtcatataatttcttgtcttaacaagctagatgctggtgtgccagaaaaaataagcctgatttccagagatgagaagagtgtacttgtggtgacctacagtgacttaaagcgctgctttgaaaatacttttcaagaactgattgcagctgcaaatggtcagttgtagtatttgctaaaaaagcacgcaggacatggctaaagaccttaaccaatagcaaattgcactacagctgaacttttcatcatctcattcacatttgggaaacgaacaggagatgagcaaagctgcttgcacttcagtcaggtacactgttacttgaaaggaagaatgtttcacttacccaagagctatggctgccattggaggctgttatctgtgaagaatttattttagatttaggagcaccatcaggtgaatgatgttcctgcttttgttttttccacttgtatatgcactaattttaattttttaaagactttttctgatctttgaacttttgccacattgtatacttataatgggaaactttgcaaggacatttttgggaagcaatgctgggcagcgtttttgccattgagggttgcagaatttgctctttttgggatgggttgccctgaataacattacggaccaggtaaataatttcatagaagttcagtatagtacgtaattcttgtaagagtatcgtatgcaagctctctgtatgccacccactgttagttcaaattgagatttttgttttgttttgttcttaagaacataccaagaaaataccagtgaattgttggatatgaattccctgttagttgatttaaatcctttctgaataaagatcagataaacagtaactgaaggagcatgtatagctctttccttcaaattcaactagagcctttttaaaaagacatttgcctgctagtcagatacatttacatttatgcaaattttttaaataggagaaaattaagaaattgtgttaaaggcctaaagttcaggagtgtattactttaggttctttccagtttgctggtttttttttttttttttttttttttttttgggcgggggggaggtttatgaagttttgctctttgaaccacagctttattatggtcctttacactggagacagacacagagacactgttcagaagatgaactaaactcagcagtggtctggtatcaagagctttctgatgttttacagcctgaatttggagggataacgatctgctgtgcctttgcagtcactgcttagcccaaagtaatagtacttttgataataactcactctgtgcgatattcctgaataagtccatctcaaaagtttgggattttcctcctcttaactttcttaatatttggacatgcagttgtcgccaaacttgggtattcatggaatttctagtaaatgaaatacctatactttgatactgaagactgccaaatacataggaattttctttcttaaaaaacagtaatgaagactatatctcctttcccagcactgaatgttttactagcactgggtgctcaccatgcaactgaagaaaatgtggaaactcaaaaggtcaggacagacttccaagcacttgcaactgatgttactgtcttcaattttaataattacacatatttgtatatttcagagaagtttttaatatttctctgtccactttttataagctttaaaatgattttctctgccttgagatttgcatcaagaaaaagcacctctcttcacctgaaagctttgaagactagagacacgctttacacgttttaacaagtatattgagtccacgtttggtagcatcagttgttgagttaaaaagaaaattattgcatttgatctggatggattttaaaagaatataatgttcaatattaaaaggataattcacatttgccaccataatgttcttttttatgtaaaaagaagaacttggagacattaacatgaaaaagtcttttatcattagctcatgtatttgaggaagagcagctgtctttttatatgttttttgacaaatcatattgtattcttttgtacaaaaaagaactacttgtattctagaagaaatatgaaatgcttaatttataagcgggctggagattttttccaatattgttttctttgaaaatgaaaggggatcatctattttagttttggggtctgggaactttttgaaaatttaatttgtggaccaatgttttgtgaaagctaaagagggcaggggttaaaatagggcttgaatttctcattctgtatagaccagcaaacttccctgtgcaaggcaagtttacatcacaaatccaagaatgtttgcatcctaaatgctagtttgcttcagcccctagttaacctcaggacttggtttgcatataaaaggtagacagctgatatgttttcatgaataaatattgtcagccagaaaaggttggtgtcaggtaatgcatatttttttaagctttgttttatatttatttttcatttagtttttattgggaatggttttcaaagaactctcagttctgcctaggtgtttttgggggagccctgttttccatagtgtaattccatttaagaggttgtctaaaagtctttttaattaatagaaagattttaatatccaagagtagtcaaattaaggatataaactttccacaccttcctgtcgtgacagataaaagcacagaaaggacaacccttgaaatcatgtaacgttggtcatttcaatattttgtacctgttttaaattctgttagtgtatttacttcattgtaaatatttttgagggtacctttgtattttgcttttgaccttggttctgtgatttggatgtcaacaacttccctaaaaagcaccagtgtgttaggttctaatgtcatgacccaatttgtgttattcatctttaatcctgttttcagtctctatgtgtacagcagtatttttaataaagaattacagagataaattt

SEQ ID NO: 552 - DNA, 2135 bp, Homo sapiens
  source 1..2135: mol_type = genomic DNA
tttgatatgacgattagagcataacccgagtgacacgttgaattcgccataatcaaggaaaccttttccgggtggggatctctgaaattactcagataacagtgctgtgccaaaaacctgtggattttctctacaaaaattattgagcaaccctaattaacctgattttttgctgataatcactctcaatggaatcaaatcacaaatccggggatggattgagcggcactcagaaggaagcagccctccgcgcactggtccagcgcacaggatatagcttggtccaggaaaatggacaaagaaaatatggtggccctccacctggttgggatgctgcaccccctgaaaggggctgtgaaatttttattggaaaacttccccgagacctttttgaggatgagcttataccattatgtgaaaaaatcggtaaaatttatgaaatgagaatgatgatggattttaatggcaacaatagaggatatgcatttgtaacattttcaaataaagtggaagccaagaatgcaatcaagcaacttaataattatgaaattagaaatgggcgcctcttaggggtttgtgccagtgtggacaactgccgattatttgttgggggcatcccaaaaaccaaaaagagagaagaaatcttatcggagatgaaaaaggttactgaaggtgttgtcgatgtcatcgtctacccaagcgctgcagataaaaccaaaaaccgaggctttgccttcgtggagtatgagagtcatcgagcagctgccatggcgaggaggaaactgctaccaggaagaattcagttatggggacatggtattgcagtagactgggcagagccagaagtagaagttgatgaagatacaatgtcttcagtgaaaatcctatatgtaagaaatcttatgctgtctacctctgaagagatgattgaaaaggaattcaacaatatcaaaccaggtgctgtggagagggtgaagaaaattcgagactatgcttttgtgcacttcagtaaccgagaagatgcagttgaggctatgaaagctttaaatggcaaggtgctggatggttcccccattgaagtcaccctagcaaaaccagtggacaaggacagttatgttaggtatacccgaggcacaggtggaaggggcaccatgctgcaaggagagtatacctactctttgggccaagtttatgatcccaccacaacctaccttggagctcctgtcttctatgccccccagacctatgcagcaattcccagtcttcatttcccagccaccaaaggacatctcagcaacagagccattatccgagccccttctgttagagaaatttacatgaatgtacctgtaggggctgcgggagtgagaggactgggcggccgtggctatttggcatacacaggcctgggtcgaggataccaggtcaaaggagacaaaagagaagacaaactctatgacattttacctgggatggagctcaccccaatgaatcctgtcacattaaaaccccaaggaattaaactcgctccccagatattagaagagatttgtcagaaaaataactggggacagccagtgtaccagctgcactctgctattggacaagaccaaagacagctattcttgtacaaaataactattcctgctctagccagccagaatcctgcaatccaccctttcacacctccaaagctgagtgcctttgtggatgaagcaaagacgtatgcagccgaatacaccctgcagaccctgggcatccccactgatggaggcgatggcaccatggctactgctgctgctgctgctactgctttcccaggatatgctgtccctaatgcaactgcacccgtgtctgcagcccagctcaagcaagcggtaacccttggacaagacttagcagcatatacaacctatgaggtctacccaacttttgcagtgactgcccgaggggatggatatggcaccttctgaagatgcttttttaaatttaagaataagacacacaaaactctattaaaaaaaaaaaagaaataaacctctaactcggtccccaatgatcataaataatatgtttcctaaagaaatgcctttccagagactgtatagcttataccaattatagaatcatgaagt

SEQ ID NO: 553 - DNA, 1718 bp, Homo sapiens
  source 1..1718: mol_type = genomic DNA
aagctgcttccagtgaatgctacacacctgcaccatggtttgtccgacatccttagccaagatcaggattggctatgttggtacttacatatcctcatgagaattgtggttctggtactagtttggtaaagaaattattaaacctagctgatgcttgaaggtagttggattaacagaagagaagacaaacttggagtatattctttagtacatttttccccaaagatgttgggttcagttgccacaacactgccattgtcatcttcaaattccagtggaatgcctcttggttactatctgtctagtcctcagattagtagagtaactatatcaacaactggacaattgacttctaaagctactgtaggtagctgttccagagtggaaaacagcttggatgccagccccttctcagttccgaagaaacaggatgaatcacccatgattggggatggagaagattatttcctttctttgtttggtgattcaaagaaacttacagcacactcaaactacactcagaaaactttaaaatacttttctatgattcttgaagaagttggccaatttacctccagttctcttggagatgttgaaatagctgaagtgaatgtcaagggtttgttcgtgaagctcattaactcttcccttgacaaagaaatggcaattggagatcatattctccagcaaaatgtgaatggacaaaccatttctttgtaccgattccttccaaacatcgtaatgcaggcaaattccacagtaacagtgtgggcagcagcatctgaagcaaagcatcaacctccatcagattttctttggaaggaacaagacaagtttagagcaagtcctgattgtataacaatcctgtgcaaaccgaacggtcaagccattgcgtggtacacccctatccactggaagcaagcgtgggaaaaattagatgctgacgttgaatttaacagatgttcagtagtatctccaacattccgaaagcgtgtgtttcagtggacagcatctacagctacaataactaaagaaaaacaagatcaacctaagaaagatatctcaaattatcaggtggaacaagctcaagttcttcttaagagagagaaggaaatcccaccaaccgttttccctaatcgcagcccttggtgccagaatccctatgtctctgcacatccttactgtcctctgattgaaccacacaatacatccaccgctggaggcagattggatagacagcccaggactcggtcaaccagacctaatcgagcctcagggtctaagaaaaagaagacatctgagtcacaaaagcaataagcagtcaactcaacctttaaagtaatctagtccaccctcaaccagctactagaaaagcaaaagagaactcaaatccctgaggcctgctctgcaacctccctgctattccatgagagggtgaagacatcacatttctatatggaaaaaggatccaaaatttgtattgctgtagaattggtgaattatagatgcttgatgaaatcacaagtcctaccactcctgccttccaaatccctgcagaaaacaagcagatggttagtattattcaatggataaaattgctatttgccttagatttctctttttgtaaacaaagttattttgggtacagaactcacaaaagaagagcacgtgcaattgtttaaccattttacattgactgataaatctcttttttccat

SEQ ID NO: 554 - DNA, 1389 bp, Homo sapiens
  source 1..1389: mol_type = genomic DNA
tttcccggcgtccatttagtggcgggaaaagcgaccttttctgagcgcgtttgcctgttgagtggtagcctttcccctcaaccagcaatggaggagcagccccagatgcaagacgccgacgagcccgcggactccggaggggaaggccgggcaggcgggccaccgcaggtcgccggcgcccaggcggcgtgcagcgaggaccgcatgaccctgctcctcaggctgagagcacagacaaaacaacaactcttagaatataaatcaatggttgatgcaagtgaagaaaaaactccagaacaaattatgcaagaaaagcaaatcgaagctaaaattgaagacctggaaaatgaaattgaagaggtaaaagttgcttttgagataaaaaagcttgcattagacaggatgagactttcaactgcacttaaaaaaaacctggagaaaattagcagacagtctagtgtgctcatggataacatgaaacacctattagagctaaataaattaataatgaaatcacagcaggaatcttgggatttagaggaaaaactgcttgatattagaaagaagagattgcaattaaaacaagcttcagaaagtaagcttttagaaatacagactgaaaagaacaaacagaagattgatttggacagtatggaaaactcagagaggataaagatcatacgacaaaacctacagatggagataaaaattactactgttattcaacatgtgttccagaaccttattttggggagtaaagtcaattgggcagaggatcctgcccttaaggaaattgttctgcagcttgagaagaatgttgacatgatgtaataagaattcatttctgacatattttacatttctggcaatctcaactcttatttggaatacttctgtgcatttgtctgtccaccgtaattttagaaaagcatatccataacgtttacagttgtagtacagttgtggttagttatttgtagtgggattgaaagtaatttttttctttttatatttctatatttagtttgtttttttgttgttgttgttttttgagatggagtctcgctttgttgcccagactggagggcagtggcgcgatctcggctcactgcaacctctgcctcccgggttcaagcagttctgcctcagcctcccaagtagctgtgactaaaggtgcacgccgccatgcccagctaattttttgtattttagtagagacggggtttcaccgtgttgcccaggctgctctcagaactcctgagctcaggcagtccaccgcctcggcctaccgaagtgctaggattacagacgtaagccaccgagcctggtctagtttgcattttttttctatcagttttataagttaagaaataaaaggaattaatgtta

SEQ ID NO: 555 - DNA, 1612 bp, Homo sapiens
  source 1..1612: mol_type = genomic DNA
actttcacctttcctggtgatgcctttggctccttgagctgagttttgcccgagtggggctcatgagggaggatggagtttcttgggactactcagaccgccagttactgtggtcccaagaaatgctgtggcttgacctcactgccagctgtacaggcgccagtgatccaggaatgctatcagccctactacctgcccgggtaccgctacctcaattcatggaggcctagcctcttctacaagatagccaacgtccagacctgcccggacgagagcaccagtaccctgcggccgcccaccatcctgcccacactgcgctccgcactcttctctcgctatagcccccacgactgggaccagtccaaccagctgcaggtgcgtggggccgaggcctcccggctgtgggccagccggctgacggatgactccatgaggctcttgcaggacaaggaccagctgacgcaccagatgcaggagggcacctgccggaacctgggccagaggctgtcggacattggcttctggaagtcagagctgagctatgagctggacaggcttctgactgagaaccagaacttggagacggtcaagaggcggctggagtgcgcggccaatgaggtgaactgcccattgcaggtggccttggagtgtctgtaccatcgagagaagaggattgggattgatttggtccatgacaacgtggagaaaaaccttatccgggaagtggatttgctaaaatgttgccaagaacagatgagaaaattagctcaaagaattgatatccagatgcgggataaccgggatgctcagcacgtgctggagagggacctcgaagacaaaagctcggcccagtgtatcgatgagaagtgctttaacctgagaaatacgtcagactgcatcagcttcttccacggcatggagaaaattgacggcacgatctccgtacctgagacctgggccaagttcagtaacgacaacatcaaacactctcagaacatgcgggccaactccatccagctgcgggaggaggcggagcacctctttgagaccttgtcggatcagatgtggaggcagttcacagacaccaacctggccttcaacgcccgcatctctgaggtgacggatgtgaagaataagctgcagacgcagctggcgaagacgctgcaggagatcttccaggccgagaacaccatcatgctgctggaaaggtccatcatggccaaggagggcccgctgaaggtggcccagacaaggctggagtgccggacccggcgccccaacatggagctgtgcagggacatcccgcagttgaagctggtgaacgaggtgttcaccatcgacgacaccctgcagaccctcaagctgcggctgcgggagacacaggacacgctgcagctgctggtcatgaccaagtgccggctggagcacgagctcgccatcaaggccaacaccctctgcatcgacaaggagaagtgcatgggcatgcgtaagaccttcccctgcaccccgcgcctggtgggccacacctgagcaccgccctggcgcctcattccgcgctggcgtaaaattggaaaaggctgagaaacaaagtaaaacagtattttgtttgaaa

SEQ ID NO: 556 - DNA, 1198 bp, Homo sapiens
  source 1..1198: mol_type = genomic DNA
acagttttcacaaaggtctcttgatatcaaaacttctttccttgcatgcttctctgatcctgtggagatgaaaattgacatccatagtcatattctaccaaaagaatggccagatctaaaaaagaggtttggctacggaggctgggtgcagctccaacaccacagcaagggagaagcaaagttgttgaaagatgggaaagtcttcagagtggtgcgagagaattgctgggatccagaagttcgtattagagaaatggaccaaaaaggccaaacctgaggacactttaaacctgtgccagcttttaaacaacgaccttgccagcaccgttgtgagctaccccaggaggttcgtgggtctggggacgttgcccatgcaggcccctgagctggcggtcaaggagatggagcgctgtgtgaaagagctgggctttcccggggtccaaattggcacccacgtcaacgagtgggacctgaacgcgcaggagctctttcctgtctatgcggcagccgaaaggctgaagtgttccctgttcgtgcatccctgggacatgcagatggatggacgaatggccaaatactggctcccttggcttgtaggaatgccagcagagaccaccatagccatttgctccatgatcatgggtggagtatttgagaagtttcccaaactgaaagtgtgtttcgcacatggtggtggtgccttccccttcacagtgggaagaatctcccatggattcagcatgcgcccagatctgtgtgcccaggacaaccccatgaacccgaagaaataccttggttccttttacacagatgctttggttcatgatcctctgtccctcaagctgttaacagatgtcataggaaaggataaagtcattttgggaaccgattacccctttccactaggtgagctggaacctgggaaactaatagagtccatggaagaatttgatgaagaaacaaagaataaactcaaagccggcaatgccctggcatttttgggtcttgagagaaaacaatttgaatgactgaatttactacaaaggcaaactttcaaaaggatatctcatttttgtttctaaatatgtatcaacaggtatcaacaaaatcctattttgaactattttactcagaaatgaatgtcccaaatatcctaaattattcataataaaaatgatttgtaagtgttttcattctg

SEQ ID NO: 557 - DNA, 3704 bp, Homo sapiens
  source 1..3704: mol_type = genomic DNA
cgccgttcgacaccaggcggatccgctctgcagcacgaacccatctccagccgcagccgcagccgccgcccgggccgaggagcagccgcagcagccgccaccagtggccgagtgagcggagccgagtttgaggcagcgcctagcggtgaatcggggccctcaccatgagttcctcgcctgttaatgtaaaaaagctgaaggtgtcggagctgaaagaggagctcaagaagcgacgcctttctgacaagggtctcaaggccgagctcatggagcgactccaggctgcgctggacgacgaggaggccgggggccgccccgccatggagcccgggaacggcagcctagacctgggcggggattccgctgggcgctcgggagcaggcctcgagcaggaggccgcggccggcggcgatgaagaggaggaggaagaggaagaggaggaggaaggaatctccgctctggacggcgaccagatggagctaggagaggagaacggggccgcgggggcggccgactcgggcccgatggaggaggaggaggccgcctcggaagacgagaacggcgacgatcagggtttccaggaaggggaagatgagctcggggacgaagaggaaggcgcgggcgacgagaacgggcacggggagcagcagcctcaaccgccggcgacgcagcagcaacagccccaacagcagcgcggggccgccaaggaggccgcggggaagagcagcggccccacctcgctgttcgcggtgacggtggcgccgcccggggcgaggcagggccagcagcaggcgggaggtaagaagaaggcggaaggcggcggaggcggcggtcgccccggggctccggcggcgggggacggcaaaacagaacagaaaggcggagataaaaagaggggtgttaaaagaccacgagaagatcatggccgtggatattttgagtacattgaagagaacaagtatagcagagccaaatctcctcagccacctgttgaagaagaagatgaacacttcgatgacacagtggtttgtcttgatacttataattgtgatctacattttaaaatatcaagagatcgtctcagtgcttcttcccttacaatggagagttttgcttttctttgggctggaggaagagcatcctatggtgtgtcaaaaggcaaagtgtgttttgagatgaaggttacagagaagatcccagtaaggcatttatatacaaaagatattgacatacatgaagttcgtattggctggtcactaactacaagtggaatgttacttggtgaagaagaattttcttatgggtattctctaaaaggaataaaaacatgcaactgtgagactgaagattatggagaaaagtttgatgaaaatgatgtgattacatgttttgctaactttgaaagtgatgaagtagaactctcgtatgctaagaatggacaagatcttggcgttgccttcaaaatcagtaaggaagttcttgctggacggccactgttcccgcatgttctctgccacaactgtgcagttgaatttaattttggtcagaaggaaaagccatattttccaatacctgaagagtatactttcatccagaacgtccccttagaggatcgagttagaggaccaaaggggcctgaagagaagaaagattgtgaagttgtgatgatgattggcttgccaggagctggaaaaactacctgggttactaaacatgcagcagaaaatccagggaaatataacattcttggcacaaatactattatggataagatgatggtggcaggttttaagaagcaaatggcagatactggaaaactgaacacactgttgcagagagccccccagtgtcttgggaaatttattgagattgctgcccgaaagaagcgaaattttattctggatcagacaaatgtgtctgctgctgcccagaggagaaaaatgtgcctgtttgcaggcttccagcgaaaagctgttgtagtttgcccaaaagatgaagactataagcaaagaacacagaagaaagcagaagtagaggggaaagacctaccagaacatgcggtcctcaaaatgaaaggaaactttaccctcccagaggtagctgagtgctttgatgaaataacctatgttgaacttcagaaggaagaagcccaaaaactcttggagcaatataaggaagaaagcaaaaaggctcttccaccagaaaagaaacagaacactggctcaaagaaaagcaataaaaataagagtggcaagaaccagtttaacagaggtggtggccatagaggacgtggaggattcaatatgcgtggtggaaatttcagaggaggagcccctgggaatcgtggcggatataataggaggggcaacatgccacagagaggtggtggcggtggaggaagtggtggaatcggctatccataccctcgtgcccctgtttttcctggccgtggtagttactcaaacagagggaactacaacagaggtggaatgcccaacagagggaactacaaccagaacttcagaggacgaggaaacaatcgtggctacaaaaatcaatctcagggctacaaccagtggcagcagggtcaattctggggtcagaagccatggagtcagcattatcaccaaggatattattgaatacccaaataaaacgaactgatacatatttctccaaaaccttcacaagaagtcgactgttttctttagtaggctaactttttaaacattccacaagaggaagtgcctgcgggttccttttttagaagctttgtgggttgattttttttcttttcttttttgtacatttttaattgcagtttaaaagtgaatcgtaagagaacctcagcattgtgcacgataagagaatgtgtcagtatttcagggttctacattttatctgtaaaatgtgacttttttttttttttatcacaacagaagtaaaatgttgctttgtacctggtgtcttttattaagaatttactccccccatttctcacagagaataacagtcgggagtcattgtcacaatataatagaaatgttagcaaccagattcatgtaaggactaagtggtcctcatgaattgcattaagactctgtactgctcatattacactccatcctctctgtagtttgctgggtagtggagggggtaagctaaatcatagtttctgacaataactgggaaggttttttcttaaaataacaatggaattggtataattgggattgaaaactaaaacttggaactaagatagagaagatggagtgtatgtagaagggctgttaaaaatgtaaaacttggttgcattatttgtggaggctcaaacttgtgaaggttaataccataatttttccatttgttctgcattttgattctgaaaagaaagctggctttgcccatttcttattaaaaaaacttgttgtaaatccagttgtctaatgggatctatatgaagttagccatgtctgtatgcccttctcccacaaaatactgtataactagtgtgcttgtagtagttaactccaccatctttgtaagctaatgaaattgtgagtcacccatttatatcttaatttttaatcatgtcagttcttgaatgggtatctccttagcctgctgatttctttttctttctaaagaaagtgggtggagaaattaatttagacgtttgtttgcaataaaaagaattcatttta

SEQ ID NO: 558 - DNA, 1570 bp, Homo sapiens
  source 1..1570: mol_type = genomic DNA
tagtgtcacgtgaggccccggtggcggcgcagctacggcaagagagtgagaaggaagggaagccggaaggggcgcgagtgaagcaaagcgaggacagacagctcgcagagggcgaggggtgcgtgtgcgtccgcttctcacctcaggtctcccttcggccccgctgccctccctcgcggctgggtgacagctgggtccggtccgtcgcgggctgcctggggtgcgaggatcgcgcaccccgtcttcgcgcgctgtgcctgccgccccgccccctcgtcccgcccgtcccgtcgcgtcgcgtcccgtcccctcgggtgctgccagccgggtgctgatgcgagtcggtggcagcgaggacattttctgactccctggcccctgacacggctgcactttccatcccgtcgcggggccggccgctactccggccccaggatgcagaatgtgattaatactgtgaagggaaaggcactggaagtggctgagtacctgaccccggtcctcaaggaatcaaagtttaaggaaacaggtgtaattaccccagaagagtttgtggcagctggagatcacctagtccaccactgtccaacatggcaatgggctacaggggaagaattgaaagtgaaggcatacctaccaacaggcaaacaatttttggtaaccaaaaatgtgccgtgctataagcggtgcaaacagatggaatattcagatgaattggaagctatcattgaagaagatgatggtgatggcggatgggtagatacatatcacaacacaggtattacaggaataacggaagccgttaaagagatcacactggaaaataaggacaatataaggcttcaagattgctcagcactatgtgaagaggaagaagatgaagatgaaggagaagctgcagatatggaagaatatgaagagagtggattgttggaaacagatgaggctaccctagatacaaggaaaatagtagaagcttgtaaagccaaaactgatgctggcggtgaagatgctattttgcaaaccagaacttatgacctttacatcacttatgataaatattaccagactccacgattatggttgtttggctatgatgagcaacggcagcctttaacagttgagcacatgtatgaagacatcagtcaggatcatgtgaagaaaacagtgaccattgaaaatcaccctcatctgccaccacctcccatgtgttcagttcacccatgcaggcatgctgaggtgatgaagaaaatcattgagactgttgcagaaggagggggagaacttggagttcatatgtatcttcttattttcttgaaatttgtacaagctgtcattccaacaatagaatatgactacacaagacacttcacaatgtaatgaagagagcataaaatctatcctaattattggttctgatttttaaagaattaacccatagatgtgaccattgaccatattcatcaatatatacagtttctctaataagggacttatatgtttatgcattaaataaaaatatgttccactaccagccttacttgtttaataaaaatcagtgcaaagagag

SEQ ID NO: 559 - DNA, 1362 bp, Homo sapiens
  source 1..1362: mol_type = genomic DNA
taagactcatggacatagctttaattatctttgcctgacgcccaatacctgaaaattaagatgttcatgcaagataaagaggtaatttttctcctcctcccagtcatcacccgtagcatccggttaagaggctctccacctcgctcattttggtctaactggatttacacaaactcactgtgcacgtgcctggggcgggcaaacccggaaacgacgccgagtcccgcgggatccaggaggagccaactgcgccggaggaggggtttcggccgacacgtcgggattggcggctgcagccaggggtcctccgacgctgggcttccgtgagcggcgctctgccagatctctggaccggattcgtcccattctcgtcctcatggtggacaagaaactggtggtggttttcggaggcacaggtgcccagggtggctccgtggcccgcacactcctggaagatgggacattcaaggttcgagtggtgacccgaaaccctaggaagaaggcagcaaaggagctgaggctgcaaggtgcagaagtagtgcagggagaccaagatgaccaggtcatcatggagctggccctgaatggggcttacgccaccttcatcgtgaccaattactgggagagctgcagccaggagcaggaggtcaagcaggggaagctgctcgctgatctggccaggcgcctgggcctccactatgtggtctacagcggcctggagaacatcaagaagctgacggcagggagattggccgccgcgcactttgacggcaaaggggaggtggaggaatatttccgggacattggcgttcccatgaccagtgtgcggctgccctgctattttgagaacctcctctcccacttcttgccccagaaagccccagacggaaagagctacttgctgagcttgcccacaggtgacgttcccatggatggcatgtccgtgtctgacctgggtcctgtggtgctcagccttttgaagatgccagaaaaatacgtcggccagaacatcgggctgagcacttgcaggcacacggccgaggagtacgctgccctgctcaccaagcacacccgcaaggtcgtgcacgatgccaagatgactcctgaggactacgaaaagcttggctttcccggtgcccgggacctggccaacatgttccgtttctatgccctgagacccgaccgtgacatcgagctgaccctgagactcaaccccaaggccctgacgctggaccagtggctggaacagcacaaaggggacttcaacctgctgtgacctgcccgcctcgcggccccttgtggggatcgggggcaccagaggggcagaggcaccaacatctgaataaagccattgttctccca

SEQ ID NO: 560 - DNA, 2970 bp, Homo sapiens
  source 1..2970: mol_type = genomic DNA
gagggcgggaagggccctctgtggggctgccattttggctgggacctaaatgcagtaaaggagcagctacgggaatatagagagtggggcttccaggcagagaagcctgcagtgcaaaggtctgcagacaacgacctgggcgtcttcaagggacacaaggaatcatattgccagaacacattgtacaggtagccaggtgtcggtctccagcctgagaactctggctgttgttccttgtgtcgtcccatattcctgcctggcctgcgatggacatcagcaagggcctcccaggcatgcagggaggcctccacatatggatctctgagaaccggaagatggtgccggtacccgagggggcttacgggaacttttttgaggaacactgctatgtcatcctccacgtcccccagagcccgaaggccacgcagggggcgtccagcgacctgcactactgggtcgggaagcaggcgggtgcggaagcgcagggcgctgcggaggccttccagcagcgcctacaggacgagctggggggccagaccgtgctgcaccgcgaggcgcagggccacgagtccgactgcttctgcagctacttccgcccgggaatcatctacaggaagggaggcctagcatctgacctcaagcatgtggagaccaacttgttcaacatccagcgactgctgcacatcaaagggaggaagcacgtgtctgccactgaggtggagctctcctggaacagctttaataagggtgacatcttcctgctggacctaggcaagatgatgattcagtggaatgggcccaagaccagcatttctgagaaggctcgggggctggctttgacctacagcctccgggacagggaacgtggtggtggtcgtgcacagattggtgtggtggatgatgaggccaaagccccggacctcatgcagatcatggaggctgtgctgggccgcagggtgggcagcctgcgtgccgccacgcccagcaaggatatcaaccagctgcagaaggccaatgttcgcctgtaccatgtctatgagaagggcaaagacctggtggtcctggagttggcgacccccccactgacccaggacctgctgcaggaggaggacttctacatcctggaccagggtggcttcaagatctatgtgtggcagggacgcatgtctagcctccaggagagaaaggctgccttcagccgggctgtgggcttcatccaggccaagggctacccgacctacaccaacgtggaggtggtgaacgacggcgccgagtcggccgcgttcaagcagctcttccggacttggtctgagaagcggcgcaggaaccagaagctcggcgggagggataaatcgattcatgtaaagctggacgtgggcaagctgcacacccagcctaagttagcggcccagctcaggatggtggacgacggctctgggaaggtggaggtgtggtgcatccaggacttacacaggcagcccgtggaccccaagcgtcatggacagctgtgtgcaggcaactgctaccttgtgctctacacataccagaggctgggccgtgtccagtacatcctgtacctatggcagggccaccaggccactgcggatgagattgaggccctgaacagcaacgctgaggaactagatgtcatgtatggtggcgtcctagtacaggagcatgtgaccatgggcagcgagcccccccacttcctcgccatcttccagggccagctggtgatcttccaggagagagctgggcaccatggaaaggggcagtcagcatccaccacaaggcttttccaagtgcaaggcactgacagccacaacaccaggaccatggaggtgccagcccgtgcctcatccctcaactccagtgacatcttcttgctggtcacagccagcgtctgctacctctggtttgggaagggctgtaatggtgatcagcgtgagatggcacgggtggtggtcactgtcatttccaggaagaatgaggaaacggtgctggagggtcaggagcctccccacttctgggaggccctgggaggccgggccccctaccccagcaacaagaggctccctgaggaggtccccagcttccagccacgactgtttgagtgctccagccacatgggctgcctggtcctcgcagaagtggggttcttcagccaggaggacctggacaagtatgacatcatgttactggacacctggcaggagatcttcctgtggcttggggaagctgcaagtgagtggaaggaggcggtggcctggggccaggagtacctgaagactcacccagcagggaggagcccggccacacccatcgtgctggtcaagcagggccatgagcctcccaccttcattggatggttcttcacttgggacccctacaagtggactagccacccgtcccacaaggaagtggtggatggcagcccggcagcagcatcaaccatctctgagataacagcagaagtcaacaacttgcggctatccagatggccgggcaatggcagggcaggtgccgtggccctgcaggccctcaagggctcccaggacagctcagagaatgatctggtgcgaagccccaagtcggctggcagcagaaccagcagctccgtcagcagcaccagcgccacgatcaacgggggcctgcgccgggaacaactgatgcaccaggctgttgaggacctgccagagggcgtggaccctgcccgcagggagttctatctctcagactctgacttccaagatatctttgggaaatccaaggaggaattctacagcatggccacgtggaggcagcggcaggagaaaaagcagctgggcttcttctgaacccaagccctctcgactgcccctatcccctggaccccaacatacctacaatgctggggaggccctgcttccactcccctcagaggcttttggtcatcctctgcgtgtcagtaaaagcaggcagcccatacga

SEQ ID NO: 561 - DNA, 1581 bp, Homo sapiens
  source 1..1581: mol_type = genomic DNA
ctcgccgctgccccggctccgccgctcgcagagagattcggaggagcccgggcgggggggaggaggagggggaggagggagcggagatctcggggctcggagccggccgccgctccgctccgatcgctgtggggcttggttttttgggggtgggggggcgggggggctcagatatggaggcaaatgggagccaaggcacctcgggcagcgccaacgactcccagcacgaccccggtaaaatgtttatcggtggactgagctggcagacctcaccagatagccttagagactattttagcaaatttggagaaattagagaatgtatggtcatgagagatcccactacgaaacgctccagaggcttcggtttcgtcacgttcgcagacccagcaagtgtagataaagtattaggtcagccccaccatgagttagattccaagacgattgaccccaaagttgcatttcctcgtcgagcgcaacccaagatggtcacaagaacaaagaaaatatttgtaggcgggttatctgcgaacacagtagtggaagatgtaaagcaatatttcgagcagtttggcaaggtggaagatgcaatgctgatgtttgataaaactaccaacaggcacagagggtttggctttgtcacttttgagaatgaagatgttgtggagaaagtctgtgagattcatttccatgaaatcaataataaaatggtagaatgtaagaaagctcagccgaaagaagtcatgttcccacctgggacaagaggccgggcccggggactgccttacaccatggacgcgttcatgcttggcatggggatgctgggatatcccaacttcgtggcgacctatggccgtggctaccccggatttgctccaagctatggctatcagttcccaggcttcccagcagcggcttatggaccagtggcagcagcggcggtggcggcagcaagaggatcaggctccaacccggcgcggcccggaggcttcccgggggccaacagcccaggacctgtcgccgatctctacggccctgccagccaggactccggagtggggaattacataagtgcggccagcccacagccgggctcgggcttcggccacggcatagctggacctttgattgcaacggcctttacaaatggataccattgagcaggtgctttcgttgccatctcactctgagagcatacctggatgtccaggcaagactgggcgaagtttctgagtggccctttgtttaggtgatgtcctcagacctggacccccaccagcctcactccccatcccaaccagagatggctcacttcggatcgagggttgactacatctcatcatctcacgaatctgctgtaatataagacaacagcttttaaatgtgtatataacccatgatttcggttttgttttgttttgtttttcttgatggtttccctctccctccctctcttcccattctccttttaaatctctttgaatcacatttggtagtgattttgacttagtccagtagtcacatagctttaatatctagttcaaagctaaccatagtataattgttatattaaggagttat

SEQ ID NO: 562 - DNA, 2129 bp, Homo sapiens
  source 1..2129: mol_type = genomic DNA
gggacagagctggctcacaagccctccctgctctgtgacatgtctgtttcctgtttctcccccatcaggagcagtttcagtctcaacttcaaaagaacaaacgcgcactcaaaacaaaggaagaccgtcctcgactgcagaggaagcaggaagctgtcggcccagctctgagcccagctgctggagccccgagcagcggcatggagtccgtggccctgtacagctttcaggctacagagagcgacgagctggccttcaacaagggagacacactcaagatcctgaacatggaggatgaccagaactggtacaaggccgagctccggggtgtcgagggatttattcccaagaactacatccgcgtcaagccccatccgtggtactcgggcaggatttcccggcagctggccgaagagattctgatgaagcggaaccatctgggagccttcctgatccgggagagtgagagctccccaggggagttctctgtgtctgtgaactatggagaccaggtgcagcacttcaaggtgctgcgtgaggcctcggggaagtacttcctgtgggaggagaagttcaactccctcaacgagctggtcgacttctaccgcaccaccaccatcgccaagaagcggcagatcttcctgcgcgacgaggagcccttgctcaagtcacctggggcctgctttgcccaggcccagtttgacttctcagcccaggacccctcgcagctcagcttccgccgtggcgacatcattgaggtcctggagcgcccagacccccactggtggcggggccggtcctgcgggcgcgttggcttcttcccacggagttacgtgcagcccgtgcacctgtgagcagcccggcggccgatctggccaacgggcctttttacaggaactgaggtccagagaggacatggacacccccagctctgtcagagtcacacggggctcagtggacggccttggactgaacgtgggctcctaactgcctccggccgctctgcacaaactgggatggcccaggtcccccagcaagggtacccagcaagggtagctccggggcttcctggctggttgctttccattggctgccagctgtgtgacaccacagggcggagtctgtggaggccccgcccacctcctcttgtcaatggccccatctgccaggaaggttgaggactcccaggtttcacccactggaggctcaacctaaggaaccctggccatggtgggtgggttcaccttgggctgaccacccactgggcctgcctgcccctccctcaaaaggcccctggagttgttcaggctgttgggaggtggctcagcctcgaaggacagactgcacacctgttgacctaaactcactggacagactccaggtggacaccaactcctcaacagccccatgacttcagctccacctggggcacccagcaccccaccacagggctagaggccctaagaccctgaaaaaggggcgggcagtagggaaggtggaggcacactcctcttctgttggacaggtgagctctgagggcaagccctgggcccagccacgcagagaccctggctgccctggctcttgtttgtttaggcccaggttctgcccagaccggggcccagcagagctctcaggaggctgagaaacctccagggcagacagaaagttggggccagagctaggttttagagatcctacaggatcccacatgggacggctacctaggtggggcacggcccctacccgagaacaggagggtcctccagagaatgtgccatgatcagggatatgagcagggcctgcccagagcctgggcacctttgggagagggaaaagtgaggtgggacttggaaaggctttgaacgccaggctgatggttgagggatggtgggcagggagggagggcgaagaggctccctctggcatttgggagccggtgggtggagggaggagcccttggaggtggctgcagtcccttaatggggggccttgctctgggcatgtggggctcttcctccatccagagctggcccaagacccttagaaccctgagtgctggcaaatctcactgctcctgacccagcctgtgtattcaaaacgaaaacagtaaaaccaacatcaggatg

SEQ ID NO: 563 - DNA, 898 bp, Homo sapiens
  source 1..898: mol_type = genomic DNA
cccgagcgccggccgggccatgacccccgctgctctgtcttgcaggctcgtcgccgcggccccccgagcccgaccgccgccgccaccaccaccagcgcccgggcgggcctcgcgcgcctcgggcgcggctccgcagtgagcccaccaagaaggaagcggcctgcagaggtgccgacatggggcttaagatgtcctgcctgaaaggctttcaaatgtgtgtcagcagcagcagcagcagccacgacgaggcccccgtcctgaacgacaagcacctggacgtgcccgacatcatcatcacgccccccacccccacgggcatgatgctgccgagggacttggggagcacagtctggctggatgagacagggtcgtgcccagatgatggagaaatcgacccagaagcctgaggaggtgtcctgggtttggctggctggctcctgctccagcggcccggcttcaggtgtccgggggcgtggctgcctggagcaggtgtgctgaataccctggatgggaactgagcgaacccgggcctccgctcagagagacgtggcaggaccagcgaggaatccagcctgtccacttccagaacagtgtttcccaggccccgctgagtggaccggacctctgacacctccaggttcttgctgactccggcctggtgaaagggagcgccatggtcctggctgttggggtcccagggagaggctctcttctggacaaacacaccctcccagcccccagggctgtgcaaacacatgcccctgccataagcaccaacaagaacttcttgcaggtggagtggctgttttttataagttgttttacagatacggaaacagtccaaaatgggatttataatttcttttttgcattataaataaagatcctctgtaacaaa

SEQ ID NO: 564 - DNA, 20432 bp, Homo sapiens
  source 1..20432: mol_type = genomic DNA
tgcctcccagcctgtgcccccagcctgcgtgctgcccagagcccccatagagagaggtccccgccgccaccctcatggatcagccacagttcagcggggcgccccgctttctcacccggcccaaggccttcgtggtgtcggtgggcaaggacgccaccctcagctgccagatcgtgggtaatcccacgccacaggtgagctgggagaaggaccagcagccggtggcggccggcgcgcgcttccgtctggcccaggacggcgacctctaccgcctcactatcctggacctggcgctgggcgacagtgggcaatacgtgtgccgcgcgcgcaatgccataggcgaggccttcgctgctgtgggcctgcaggtggacgcggaggccgcgtgcgccgagcaggcgccgcacttcctgctgcggcccacgtccatccgcgtgcgcgagggctcagaggccaccttccgctgccgcgtgggtggctccccgaggccggcagtgagctggtccaaggacgggcggcgcctgggtgagcccgacggcccccgcgtgcgcgtggaggagctcggcgaggcaagtgcgctgcgcattcgggcggcgcggccgcgcgacggcggcacttacgaggtccgcgccgagaacccgctgggcgctgccagcgccgccgcggcgctagtggtggactcggacgccgcggacacggccagccggcccgggacctccacggccgcgctcctggcgcacctgcagcggcggcgcgaggctatgcgcgccgagggcgcccccgcctcaccgcccagcaccggcacgcgcacctgcacggtgactgaaggcaagcacgcgcgcctcagctgctacgtgaccggcgagcccaagcccgagacggtgtggaagaaggacggccagctggtgaccgagggccggcgccacgtggtgtacgaggacgcgcaggagaacttcgtgctcaagatcctcttctgcaagcagtcggaccgcggcctctacacctgcacggcgtccaacctcgtgggccagacctacagctctgtgctggtcgtagtgcgcgagcccgcggttcccttcaaaaagcggctgcaagatctggaggtgcgggagaaggagtcggccacgttcctatgtgaggtgccccagccgtccactgaggccgcgtggttcaaggaggagacgcggttgtgggcgagcgccaagtacggcatcgaggaggagggcaccgagcgccgcctgaccgtgcgcaatgtctcggccgacgacgacgcggtgtacatctgcgagacgccagagggcagccgcacggtggcggagctcgcagtccaaggaaacctcctccgaaagctccctcggaagacggcggtgcgcgtgggcgacacggctatgttttgcgtggagctggcggtcccggtgggccccgtccactggctgcggaaccaggaggaagtggtggcggggggccgcgtggccatctccgcggagggcacgcgccacacactaaccatctcccagtgctgcctggaggatgtgggccaggtggcctttatggctggcgactgccagacgtccacccagttctgcgtgtcggcccccaggaagcctcccctgcaaccccctgtggatcctgtggtaaaggccaggatggagagttccgtgattctcagctggtccccaccaccccatggggaacgccctgtcactatcgacggctacctggtagagaagaagaagcttggcacctacacctggatcaggtgccacgaggctgaatgggtggctacacctgagctgaccgtggctgatgtggcggaggaggggaacttccagttccgagtgtccgctctcaacagctttggtcagagtccctacctcgagttcccggggactgtccacctggcccccaagctggccgtgaggacaccgctgaaggcggtgcaggcggtagagggtggcgaggtcactttctccgtggacctcacggtggcctcagcgggtgagtggttcctggatgggcaggccctgaaggccagcagtgtgtatgagatccactgtgatcgcacccggcacacgctcaccatccgggaggtgcccgccagcctgcacggggcgcagctgaagttcgtggccaacggcattgagagcagcatccggatggaggtccgggcggccccagggctgactgccaacaagccgccagccgcagctgcccgggaggtgctggctcggctgcacgaggaggcgcagctgctggctgagctgtcagatcaggctgcggctgtgacgtggctgaaggatggtcgcacactgtccccaggccccaagtatgaggtgcaggcatcggccgggcggcgggtgctccttgtgcgagatgtggcccgggacgatgcaggcctctacgagtgcgtcagccgcgggggccgcatcgcctaccagctctccgtgcaaggcctcgcgcgctttctgcacaaggacatggcgggcagctgtgtggatgccgtggctgggggcccggcgcagtttgagtgtgagacctccgaagcccacgtccacgtgcactggtacaaggatggcatggagctgggccactccggtgagcgcttcttgcaggaggatgtggggacgcggcaccggctggtggcagccacagtcaccaggcaggatgaaggcacctactcctgccgcgtgggcgaggactctgtggacttccggctccgcgtctctgagcccaaggtggtgtttgctaaggagcagctggcacgcaggaagctgcaggcagaggcaggagccagtgccacactgagctgcgaggtggcccaggcccagacggaggtgacgtggtacaaggatgggaagaagctgagctccagctcgaaagtgtgcatggaggccacaggctgcacgcgcaggctggttgtgcagcaggcaggccaggcggatgccggggagtatagctgcgaggctgggggccagcggctctccttccatctggatgtcaaagagcccaaggtggtgtttgccaaggaccaggtggcacacagtgaggtgcaggctgaggcaggggccagtgccacgctgagctgcgaggtggcccaggcccagacggaggtgatgtggtacaaagatgggaagaagctgagctccagcttgaaagtgcatgtagaggccaagggctgcagacggaggctggtggtgcagcaggcaggcaagacagatgccggggactacagctgcgaggccaggggccagagggtctccttccgcctgcacatcacagagcccaagatgatgtttgcaaaggagcagtcagtgcataatgaggtgcaggctgaggcgggggccagtgccatgctgagctgtgaggtggcccaggcccagacggaggtgacgtggtacaaggatgggaagaagctgagctccagctcaaaagtgggcatggaggtcaaagggtgcacacggaggctggtgctgccacaggcgggcaaagcagatgctggggagtacagctgtgaggctgggggccagagagtctccttccacctgcacatcacagagcccaagggggtgtttgcgaaggagcagtcagtgcataatgaggtgcaggctgaggcggggaccactgccatgctgagctgtgaggtggcccagccccagacagaggtgacgtggtacaaggacgggaagaagctgagctccagctcaaaagtacgcatggaggtcaagggctgcacacgaaggctggtagtgcagcaggtgggcaaagcagatgctggggagtacagctgcgaggctgggggccagagagtctcctttcaactgcacatcacagagcccaaggcagtgtttgccaaggagcagttggtgcataatgaggtgcggactgaggcaggggccagtgccacactgagctgtgaggtggcccaggcccagacagaggtgacgtggtacaaggatgggaagaagctgagctccagttcgaaagtgcgcatagaggctgcgggctgcatgcggcagctggtggtgcagcaggcaggccaggcagatgctggggagtacacctgtgaggctgggggccagcggctctccttccacctggatgtttcagagcccaaggcggtgtttgcaaaggagcagctggcacacaggaaggtgcaggccgaggcgggggccattgccacgctgagctgcgaggtggcccaggcccagacagaggtgacgtggtacaaggacgggaagaagctgagctccagctcgaaagttcgaatggaggctgtgggctgcacacggaggctggtggtgcagcaggcatgccaggcggacaccggggagtatagctgcgaggccgggggccagcggctctccttcagcctggacgtggcagagcccaaggtggtgtttgccaaggagcagccagtgcacagggaggtgcaggcccaggcgggggccagcaccacactcagctgcgaggtggctcaggcccagacggaggtgatgtggtacaaggacgggaagaagctgagcttcagctcgaaagtgcgcatggaggctgtgggctgcacacggaggctggtggtgcagcaggcgggccaggcggtcgccggggagtacagctgcgaggcggggagccagcggctctccttccacctgcacgtggcagagcccaaggcggtgtttgccaaggagcagccagcgagcagggaggtgcaggctgaggcggggaccagtgccacgctgagctgcgaggtggcccaggcccagacagaggtgacgtggtacaaggacgggaagaaactgagctccagctcgaaagtgcgaatggaggccgtgggctgcacacggaggctggtggtgcaggaggcaggccaggcggacgccggggagtacagctgcaaggccggggatcagcggctgtccttccacctgcacgtggcagagcccaaggtggtgtttgccaaggagcagccagcacacagggaggtgcaggctgaggcgggggccagtgccacgctgagctgcgaggtggcccaggcccagacagaggtgacgtggtacaaggatgggaagaagctgagttccagctcgaaagtgcgcgtggaggccgtgggctgcacacggaggctggtggtgcagcaggcgggccaggcagaggccggggagtacagctgcgaggcagggggtcagcagctctccttccgcctgcaggtggcagagctggagccccaaatttcagagagaccctgccgcagggagcctctggtggtcaaggagcatgaagacatcatcctgaccgccacactggccacaccctctgcggccacggtgacctggctcaaggatggtgtggagattcgccgcagcaagcggcatgagacagccagccagggggacacccacaccctgaccgtgcatggcgcccaggttctggacagcgccatctacagctgccgtgtgggcgcagaggggcaggacttcccagtgcaggtggaagaggtggccgccaagttctgccggctgctggagcctgtgtgcggcgagctgggtggcacggtgacactggcctgcgagctaagcccagcgtgtgcagaggtggtgtggcgctgcggcaacacgcagcttcgggtgggcaagcgcttccagatggtggccgaggggcccgtgcgctcactcactgtgttggggctgcgcgcagaggacgcaggggagtacgtgtgtgagagccgtgatgaccacaccagtgcgcagctcaccgtcagtgtgccccgagtggtgaagtttatgtctgggctgagcaccgtggtcgcagaggagggcggcgaggccaccttccagtgcgtggtgtcccccagtgatgtggcagtcgtgtggttccgggacggtgccctgcttcagcccagcgagaagtttgccatatcacagagtggcgccagccacagcctgaccatctcagacctggtgctggaggacgcgggccagatcaccgtggaggctgagggcgcctcatcctctgctgccctgagggtccgagaggcgcctgtgctgttcaaaaagaagctggagccgcagacggtggaggagcggagctcggtgaccctggaggtggagctgacgcggccgtggccggagctgaggtggacacggaacgcgacggccctggcgccgggaaagaacgtggagatccacgccgagggcgcccgccaccgcctggttctgcacaacgtaggttttgccgaccgtggcttctttggctgcgagacgccggatgacaagacacaggccaaactcaccgtggagatgcgccaggtacggctcgtacggggcctgcaggcagtggaggcacgggagcagggcacggctaccatggaggtgcagctgtcgcatgcggacgtggatggcagctggactcgtgacggtctgcggttccagcaggggcccacgtgccacctggctgtgcggggccccatgcacaccctcacactctcggggctgcggccagaggatagtggccttatggtcttcaaggccgaaggagtgcacacgtcggcgcggctcgtggtcaccgagcttcccgtgagcttcagccgcccgctgcaggacgtggtgaccactgagaaggagaaggttaccctggagtgcgagctgtcgcgtcctaatgtggatgtgcgctggctgaaggacggtgtggagctgcgggcaggcaagacgatggccatcgcagcccagggcgcctgcaggagcctcaccatttaccggtgcgagttcgcggatcagggagtgtatgtgtgtgatgcccatgatgcccagagctctgcctccgtgaaggtacaaggaaggacatacactctcatctaccggagagtcctggcggaagatgcaggagagatccaatttgtagccgaaaatgcagaatcgcgagcccagctccgagtgaaggagctgccagtgaccctcgtgcgcccgctgcgggacaagattgccatggagaagcaccgcggtgtgctggagtgtcaggtgtcccgggccagcgcccaggtgcggtggttcaagggcagtcaggagctgcagcccgggcccaagtacgagctggtcagtgatggcctctaccgcaagctgatcatcagtgatgtccacgcagaggacgaggacacctacacctgtgacgccggtgatgtcaagaccagtgcacagttcttcgtggaagagcaatccatcaccattgtgcggggtctgcaggacgtgacagtgatggagcccgctcctgcctggtttgagtgtgagacctccatcccctcagtgcggccacctaagtggctcctggggaagacggtgttgcaggctggggggaacgtgggcctggagcaggagggcacggtgcaccggctgatgctgcggcggacctgctccaccatgaccgggcccgtgcacttcaccgttggcaagtcgcgctcctctgcccgcctggtggtctcagacatccccgtagtcctcacacggccgttggagcccaagacagggcgtgagctgcagtcagtggtcctgtcctgcgacttccggccagcccccaaggctgtgcagtggtacaaggatgacacgcccctgtctccctctgagaagtttaagatgagcctggagggtcagatggctgagctgcgcatcctccggctcatgcctgctgatgctggtgtctaccggtgccaggcgggcagtgcccacagcagcactgaggtcactgtggaagcgcgggaggtgacagtgacagggccgctacaggatgcagaggccacggaggagggctgggccagcttctcctgtgagctgtcccacgaggatgaggaggtcgagtggtcgctcaacgggatgcccctgtacaacgacagcttccatgagatctcacacaagggccggcgccacacgctggtactgaagagcatccagcgggctgatgcgggcatagtacgcgcctcctccctgaaggtgtcgacctctgcccgcctggaggtccgagtgaagccggtggtgttcctgaaggcgctggatgacctgtccgcagaggagcgcggcaccctggccctgcagtgtgaagtctctgaccccgaggcccatgtggtgtggcgcaaagatggcgtgcagctgggccccagtgacaagtatgacttcctgcacacggcgggcacgcgggggctcgtggtgcatgacgtgagccctgaagacgccggcctgtacacctgccacgtgggctccgaggagacccgggcccgggtccgcgtgcacgatctgcacgtgggcatcaccaagaggctgaagacaatggaggtgctggaaggggaaagctgcagctttgagtgcgtcctgtcccacgagagtgccagcgacccggccatgtggacagtcggtgggaagacagtgggcagctccagccgcttccaggccacacgtcagggccgaaaatacatcctggtggtccgggaggctgcaccaagtgatgccggggaggtggtcttctctgtgcggggcctcacctccaaggcctcactcattgtcagagagaggccggccgccatcatcaagcccctggaagaccagtgggtggcgccaggggaggacgtggagctgcgctgtgagctgtcacgggcgggaacgcccgtgcactggctgaaggacaggaaggccatccgcaagagccagaagtatgatgtggtctgcgagggcacgatggccatgctggtcatccgcggggcctcgctcaaggacgcgggcgagtacacgtgtgaggtggaggcttccaagagcacagccagcctccatgtggaagaaaaagcaaactgcttcacagaggagctgaccaatctgcaggtggaggagaaaggcacagctgtgttcacgtgcaagacggagcaccccgcggccacagtgacctggcgcaagggcctcttggagctacgggcctcagggaagcaccagcccagccaggagggcctgaccctgcggctcaccatcagtgccctggagaaggcagacagcgacacctatacctgcgacattggccaggcccagtcccgggcccagctcctagtgcaaggccggagagtgcacatcatcgaggacctggaggatgtggatgtgcaggagggctcctcggccaccttccgttgccggatctccccggccaactacgagcctgtgcactggttcctggacaagacacccctgcatgccaacgagctcaatgagatcgatgcccagcccgggggctaccacgtgctgaccctgcggcagctggcgctcaaggactcgggcaccatctactttgaggcgggtgaccagcgggcctcggccgccctgcgggtcactgagaagccaagcgtcttctcccgggagctcacagatgccaccatcacagagggtgaggacttgaccctggtgtgcgagaccagcacctgcgacattcctgtgtgctggaccaaggatgggaagaccctgcgggggtctgcccggtgccagctgagccatgagggccaccgggcccagctgctcatcactggggccaccctgcaggacagtggacgctacaagtgtgaggctgggggcgcctgcagcagctccattgtcagggtgcatgcgcggccagtgcggttccaggaggccctgaaggacctggaggtgctggagggtggtgctgccacactgcgctgtgtgctgtcatctgtggctgcgcccgtgaagtggtgctatggaaacaacgtcctgaggccaggtgacaaatacagcctacgccaggagggtgccatgctggagctggtggtccggaacctccggccgcaggacagcgggcggtactcatgctccttcggggaccagactacttctgccaccctcacagtgactgccctgcctgcccagttcatcgggaaactgagaaacaaggaggccacagaaggggccacggccacgctgcggtgtgagctgagcaaggcagcccctgtggagtggagaaaggggtccgagaccctcagagatggggacagatactgtctgaggcaggacggggccatgtgtgagctgcagatccgtggcctggccatggtggatgccgcggagtactcgtgtgtgtgtggagaggagaggacctcagcctcactcaccatcaggcccatgcctgcccacttcataggaagactgagacaccaagagagcatagaaggggccacagccacgctgcggtgtgagctgagcaaggcggcccccgtggagtggaggaaggggcgtgagagcctcagagatggggacagacatagcctgaggcaggacggggctgtgtgcgagctgcagatctgtggcctggctgtggcagatgctggggagtactcctgtgtgtgtggggaggagaggacctctgccactctcaccgtgaaggccctgccagccaagttcacagagggtctgaggaatgaagaggccgtggaaggggccacagccatgttgtggtgtgaactgagcaaggtggcccctgtggagtggaggaaggggcccgagaacctcagagatggggacagatacatcctgaggcaggaggggaccaggtgtgagctgcagatctgtggcctggccatggcggacgccggggagtacttgtgtgtgtgcgggcaggagaggacctcagccacgctcaccatcagggctctgcctgccaggttcatagaagatgtgaaaaaccaggaggccagagaaggggccacagctgtgctgcagtgtgagctgaacagtgcagcccctgtggagtggagaaaggggtctgagacccttagagatggggacagatacagcctgaggcaggacgggactaaatgtgagctgcagattcgtggcctggccatggcagacactggggagtactcgtgcgtgtgcgggcaggagaggacctcggctatgctcaccgtcagggctctacccatcaagttcacagagggtctgaggaacgaagaggccacagaaggggcaacagccgtgctgcggtgtgagctgagcaagatggcccccgtggagtggtggaaggggcatgagaccctcagagatggagacagacacagcctgaggcaggacggggccaggtgtgagctgcagatccgcggcctcgtggcagaggacgctggggagtacctgtgcatgtgcgggaaggagaggacctcagccatgctcaccgtcagggccatgccttccaagttcatagagggtctgaggaatgaagaggccacagaaggggacacggccacgctgtggtgtgagctgagcaaggcggcaccggtggagtggaggaaggggcatgagaccctcagagatggggacagacacagcctgaggcaggacgggtccaggtgtgagctgcagatccgtggcctggctgtggtggatgccggggagtactcgtgtgtgtgcgggcaggagaggacctcagccacactcactgtcagggccctgcctgccagattcatagaagatgtgaaaaaccaggaggccagagaaggggccacggccgtgctgcaatgtgagctgagcaaggcggcccccgtggagtggaggaaggggtctgagaccctcagaggtggggacagatacagcctgaggcaggatgggaccagatgtgagctgcagattcatggcctgtctgtggcagacactggggagtactcgtgtgtgtgcgggcaggagaggacctcggccacactcaccgtcagggccccacagccagtgttccgggagccgctgcagagtctgcaggcggaggagggctccacggccaccctgcagtgtgagctgtctgagcccactgctacagtggtctggagcaagggtggcctgcagctgcaggccaatgggcgccgggagccacggcttcagggctgcaccgcggagctggtgttacaggacctacaacgtgaagacactggcgaatacacttgcacctgtggctcccaggccaccagtgccaccctcactgtcacagctgcgcctgtgcggttcctccgagagctgcagcaccaggaggtggatgagggaggcaccgcacacttatgctgcgagctgagccgggcgggtgcgagcgtggagtggcgcaagggctccctacagctcttcccttgtgccaagtaccagatggtgcaggatggtgcagctgcagagctgctggtacgcggagtggagcaggaggatgcgggtgactacacgtgtgacacgggccacacgcagagcatggccagcctctctgtccgtgtccccaggcccaagttcaagacccggcttcagagtctggagcaggagacaggtgacatagcccggctgtgctgtcagctgagtgatgcagagtcgggggccgtggtgcaatggctcaaggagggcgtggagctgcatgcgggccccaagtacgagatgcggagccagggggccacgcgggagctgctgatccaccaactggaggccaaggacacgggcgagtatgcctgtgtgacaggcggccagaaaaccgctgcctccctcagggtcacagagcctgaggtgaccattgtacgggggctggttgatgcggaggtgacggccgatgaggatgttgagttcagctgtgaggtgtccagggctggagccacaggcgtgcagtggtgcctacagggcctgccactgcaaagcaatgaggtgacagaggtggctgtgcgggatggccgcatccacaccctgcggctgaagggcgtgacgcccgaggacgctggcactgtctccttccatttgggaaaccatgcttcctctgcccagctcaccgtcagagctcctgaggtgaccatcctggagcccctgcaggacgtgcagctcagtgagggccaggatgccagcttccagtgccggctatccagagcttcaggccaggaggcccgctgggctttaggaggggtgcccctgcaggccaacgagatgaatgacatcactgtggagcagggcacactccacctgctcaccctgcacaaggtgacccttgaggatgctggaactgtcagtttccacgtgggcacgtgtagctctgaggcccagctgaaagtcacagccaagaacacggtggtgcgggggctggagaatgtggaggcgctggagggcggcgaggcgctgttcgagtgccagctgtcccagcccgaggtggccgcccacacctggctgctggacgacgaacccgtgcacacctcggagaacgccgaggtggtcttcttcgagaacggcctgcgccacctgctgctgctcaaaaacttgcggccacaagacagctgccgggtgaccttcctggctggggatatggtgacgtccgcattcctcacggtccgaggctggcgcctggagatcctggagcctctgaaaaacgcggcggtccgggccggcgcacaggcatgcttcacctgcacgctcagcgaggcggtgcccgtgggagaggcgtcctggtacatcaatggcgcggcagtgcagccggatgacagcgactggactgtcaccgccgacggcagtcaccacgccctactgctgcgcagcgcccagccccaccacgccggggaggtcaccttcgcttgccgcgacgccgtggcctctgcgcggctcaccgtgctgggcctccctgatcccccagaggatgctgaggtggtggctcgcagcagccacactgtgacactgtcttgggcagctcccatgagtgatggaggcggtggtctctgtggctaccgcgtggaggtgaaggagggggccacaggccagtggcggctgtgccacgagctggtgcctggacccgagtgtgtggtggatggcctggcccccggggagacctaccgcttccgtgtggcagctgtgggccctgtgggtgctggggaaccggttcacctgccccagacagtgcggcttgcagagccaccgaagcctgtgcctccccagccctcagcccctgagagccggcaggtggcagctggtgaagatgtctctctggagcttgaggtggtggctgaggctggtgaggtcatctggcacaagggaatggagcgcatccagcccggtgggcggttcgaggtggtctcccagggtcggcaacagatgctggtgatcaagggcttcacggcagaagaccagggcgagtaccactgtggcctggctcagggctccatctgccctgcggctgccaccttccaggtggcactgagcccagcctctgtggatgaggcccctcagcccagcttgccccccgaggcagcccaggagggtgacctgcacctactgtgggaggccctggctcggaaacgtcgcatgagccgtgagcccacgctggactccattagcgagctgccagaggaggacggccgctcgcagcgcctgccacaggaggcagaggaggtggcacctgatctctctgaaggctactccacggccgatgagctggcccgcactggagatgctgacctctcacacaccagctctgatgatgagtcccgggcaggcaccccttccctggtcacctacctcaagaaggctgggaggccaggcacctcaccactggccagcaaggttggggccccagcagccccctctgtgaagccacagcagcagcaggagccactggctgctgtgcgcccaccactgggagacctgagcaccaaagacctgggtgatccctcaatggacaaggcagctgtgaagatccaggctgcctttaagggctacaaggtccggaaggagatgaagcagcaggaagggcccatgttctcccacacatttggggacaccgaggcacaggtgggggatgccctgcggctggagtgtgtcgtggccagcaaggcagatgtgcgagcccgctggctgaaggatggtgtggagctgaccgatgggcggcaccatcacatcgaccagcttggggatggcacctgctctctgctgatcactggcctggaccgtgctgatgctggctgctacacctgtcaggtgagcaacaagtttggccaggtgacccacagtgcctgtgtggtggtcagtgggtcagagagtgaagccgagagctcctctgggggtgagctggacgatgccttccgccgggctgcccgtcggctgcaccggctcttccgcaccaaaagtccggctgaagtttcagatgaggagctcttcctgagtgcagacgagggccctgcagagccagaggagcccgcggactggcagacataccgcgaagatgagcatttcatctgcatccgttttgaggcgctcactgaggcccgccaggcggtaactcgcttccaggagatgtttgccacactgggcattggggtggagatcaagctggtggaacaggggcctcggagggtagagatgtgcatcagcaaagagactcctgcccctgtggtgcctccagagccattgcccagcctactgacttctgacgctgccccagtgttcctgactgagttgcagaaccaagaagtgcaggatgggtatcctgtgagctttgactgcgtggtgacaggtcagcccatgcccagtgtgcgctggttcaaggatgggaagttgttggaggaggatgatcactacatgattaatgaagaccaacagggtggccatcagctcatcatcacagccgtggtgccagcagacatgggcgtctaccgctgcctggccgagaacagcatgggtgtctcctccaccaaggctgagctccgtgtggacttgacaagcacagactatgacactgcagcagatgccacggagtcctcatcctacttcagtgcccaaggctacctgtccagccgggagcaggagggaacagagtccaccactgatgagggccagctgccccaggtggtggaggagctgagagacctccaggtggcccctggcacacgcctggccaagttccagctcaaggtgaaaggctaccctgctcccagattatactggttcaaagatggccagcccctgaccgcatctgcccacatccgcatgactgacaagaagatcctgcacaccctggagatcatctccgtcacccgggaggactctggccagtatgcagcctatatcagcaatgccatgggtgctgcctactcgtctgcccggctgctggttcgaggccctgatgagccagaagagaagcctgcatcagatgtgcatgagcagctggtgccgccccgaatgctggagaggttcacccccaagaaagtgaagaaaggctccagcatcaccttctctgtgaaggtagaaggacgcccggtgcccaccgtgcactggctcagggaggaggctgagagaggcgtgctgtggattggccctgacacaccgggctacaccgtggccagctctgcgcagcagcacagcctggtcctgctggacgtgggccggcagcaccagggcacctacacatgcattgccagcaacgctgccggccaggccctctgctccgccagcctgcacgtctcgggcctgcctaaggtggaggagcaggagaaagtgaaggaagcgctgatttccactttcctgcaggggaccacacaagccatctcagcacaggggttggaaactgcgagttttgctgaccttggtgggcagaggaaagaagagcctctggctgccaaggaggccctcggccacctgtccctcgctgaggtgggcacagaggagttcctgcagaaactgacctcccagatcactgagatggtatcggccaagatcacgcaggccaagctgcaggtgcccggaggtgacagtgatgaggactccaagacaccatctgcatccccccgccatggccgatcacggccatcctccagcatccaggagtcttcctcagagtcagaggacggcgatgcccgaggcgagatctttgacatctacgtggtcaccgctgactacctgcccctaggggctgagcaggatgccatcacgctgcgggaaggccagtatgtggaggtcctggatgcagcccacccactgcgctggcttgtccgcaccaagcccaccaagtccagcccctcacggcagggctgggtgtcaccagcctacctggacaggaggctcaagctgtcacctgagtggggggccgctgaggcccctgagttccctggggaggctgtgtctgaagacgaatacaaggcaaggctgagctctgtgatccaggagctgctgagttctgagcaggccttcgtggaggagctgcagttcctgcagagccaccacctgcagcacctggagcgctgcccccacgtgcccatagctgtggccggccagaaggcagtcatcttccgcaatgtgcgggacatcggccgcttccacagcagcttcctgcaggagttgcagcagtgcgacacggacgacgacgtggccatgtgcttcatcaagaaccaggcggcctttgagcagtacctggagttcctggtggggcgtgtgcaggctgagtcggtggtcgtcagcacggccatccaggagttctacaagaaatacgcggaggaggccctgttggcaggggacccctctcagcccccgccaccacctctgcagcactacctggagcagccagtggagcgggtgcagcgctaccaggccttgctgaaggagctgatccgcaacaaggcgcggaacagacagaactgcgcgctgctggagcaggcctatgccgtggtgtctgccctgccacagcgcgctgagaacaagctgcacgtgtccctcatggagaactacccaggcaccctgcaggccctgggcgagcccatccgccagggccacttcatcgtgtgggagggtgcaccgggggcccgcatgccctggaagggccacaaccgtcacgtgttcctcttccgcaaccacctggtaatctgcaagccccggcgagactcccgcaccgataccgtcagctacgtgttccggaacatgatgaagctgagcagcatcgacctgaacgaccaggtggagggggatgaccgcgccttcgaggtgtggcaggagcgggaggactcggtgcgcaagtacctgctgcaggcacggacagccattatcaagagctcgtgggtgaaggagatctgtggcatccagcagcgtctggccctgcctgtgtggcggcccccggactttgaagaggagctggccgactgcacagccgagctgggtgagacagtcaagctggcctgccgcgtgacgggcacacccaagcctgtcatcagctggtacaaagatgggaaagcagtgcaggtggacccccaccacatcctcattgaagaccctgatggctcgtgtgcactcatcctggacagcctgaccggtgtggactctggccagtacatgtgcttcgcggccagcgccgctggcaactgcagtaccctgggcaagatcctggtgcaagtcccaccacggttcgtgaacaaggtccgggcctcaccctttgtggagggagaggacgcccagttcacctgcaccatcgaaggcgccccgtacccgcagatcaggtggtacaaggacggggccctgctgaccactggcaacaagttccagacactgagtgagcctcgcagcggcctgctagtgctggtgatccgggcggccagcaaggaggacctggggctctacgagtgtgagctggtgaaccggctgggctccgcgcgggctagtgcggagctgcgcattcagagccccatgctgcaggcccaggagcagtgtcacagggagcagctcgtggctgcagtggaagtcactgagcaagagactaaagtccccaagaaaaccgtcatcatagaagagaccatcaccactgtggtgaagagcccacgtggccaacgacggtcccccagcaagtccccctcccgctcaccttcccgctgctctgccagcccgctgaggccaggcctactggcccccgacctgctgtacctgccaggtgctggccagccccgcaggccggaggcagaaccaggccagaagcccgtggtgcccacactgtatgtgacggaggccgaggcccactctccagctctgcccggactctcggggccccagcccaagtgggtggaggtggaggagaccattgaagtccgggtgaagaagatgggcccgcagggtgtgtctcccaccacagaggtgcccaggagctcatcggggcatctcttcacactgcccggtgcgacccccggaggggaccccaattccaacaactccaacaacaagctgctggcccaggaggcctgggcccagggcacagccatggtcggcgtcagagagccccttgtcttccgcgtggatgccagaggcagtgtggactgggctgcttctggcatgggcagcctggaggaggagggcaccatggaggaggcgggagaggaagagggggaagacggagacgcctttgtgacggaggagtcccaggacacacacagccttggggatcgtgaccccaagatcctcacgcacaacggccgcatgctgacactggctgacctggaagattacgtgcctggggaaggggagaccttccactgtggtggccctgggcctggcgcccctgatgaccctccctgcgaggtctcggtgatccagagagagatcggggagcccacggtggggcagcctgtgctgctcagcgtggggcatgcactgggtccccgaggccctctcggcctctttaggcctgagccccgtggggcgtcaccaccgggaccccaggtccgtagccttgagggcacctccttcctcttgcgggaggccccggctcggcctgtgggcagtgctccctggacgcagtctttctgcacccgcatccggcgttctgcggacagtggccagagcagcttcaccacagagctttccacccagaccgtcaacttcgggacagtgggggagacggtcacccttcacatctgcccagacagggatggggatgaggcggcacagccctgatgctgctgccatggtggcttggggcagcggggagaaaggagtgtccttgaggcctaggacgctgcccggcctcagcagcagccctgggagcctcctgagggccctccctgtccctggccacgggcccttcttacctcactcaacttcagccaggaggactgggtggtgcttgcaatgttggaatgaccggctcaaagacctcagctctgggctgtttcctgtcagcctggcaggagcctcaggactgtggacgaaggatgtggccttgggcatttgtcctgttcccacatgggcctggtccctccctcctggccccagccacagctgccaggcctgacatggccttgcctctcctgcagtcttggtgactgagacccttgggtggcgcttcccagctctgcaggccctcctggccttttctgcagggtggacacagggtctgtgtgtgggcagcagcccctgtctctcagcaagaataaagcagcttcctgtgca

SEQ ID NO: 565 - DNA, 2715 bp, Homo sapiens
  source 1..2715: mol_type = genomic DNA
cttccgcctcggctcctcttcctgccggcatccgggatccctacgtcccgcgtcccccgagcgctcggagcctacgcgcccagcgctaccgaaacccagagtcctgcgccctggagtccccgcgccccggagcccgagcacccgggagtcccgagcctcgcgccccggagtgcccgagcctgcgccgccgcacccggataccccgcgtccccgcgagctgccgaggccgcccgccgccgccccgcggacagtaccgccttcctcccctctgtccgcgccatggccgcccccgacctgtccaccaacctccaggaggaggccacctgcgccatctgcctcgactacttcacggatccggtgatgaccgactgcggccacaacttctgccgcgagtgcatccggcgctgctggggccagcccgagggcccgtacgcgtgccccgagtgccgcgagctgtccccgcagaggaacctgcggcccaaccgcccgcttgctaagatggccgagatggcgcggcgcctgcacccgccgtcgccggtcccgcagggcgtgtgccccgcgcaccgcgagccactggccgccttctgtggcgacgagctgcgcctcctgtgtgcggcctgcgagcgctctggggagcactgggcgcaccgcgtgcggccgctgcaggacgcggccgaagacctcaaggcgaagctggagaagtcactggagcatctccggaagcagatgcaggatgcgttgctgttccaagcccaggcggatgagacctgcgtcttgtggcagaagatggtggagagccagcggcagaacgtgctgggtgagttcgagcgtcttcgccgtttgctggcagaggaggagcagcagctgctgcagaggctggaggaggaggagctggaggtgctgccccggctgcgggagggcgcagcccacctaggccagcagagcgcccacctagctgagctcatcgccgagctcgagggccgctgccagctgcctgctctggggctgctgcaggacatcaaggacgccctgcgcagggtccaggatgtgaagctgcagcccccagaagttgtgcctatggagctgaggaccgtgtgcagggtcccgggactggtagagacactgcggaggtttcgaggggacgtgaccttggacccggacaccgccaaccctgagctgatcctgtctgaagacaggcggagcgtgcagcggggggacctacggcaggccctgccggacagcccagagcgctttgaccccggcccctgcgtgctgggccaggagcgcttcacctcaggccgccactactgggaggtggaggttggggaccgcaccagctgggccctgggggtgtgcagggagaacgtgaacaggaaggagaagggcgagctgtccgcgggcaacggcttctggatcctggtcttcctggggagctattacaattcctcggaacgggccttggctccactccgggacccacccaggcgcgtggggatctttctggactacgaggctggacatctctctttctacagtgccaccgatgggtcactgctattcatctttcccgagatccccttctcggggacgctgcggcccctcttctcacccctgtccagcagcccgaccccgatgactatctgccggccgaaaggtgggtccggggacaccctggctccccagtgactcgggccctcctggaggagtcctgttgcctctcctgcccctccaggccactgagtgttttggccacttggaggacctgggaggagggagtgtgtcctttgagcaagaggaggaactcctggtgcctttctgagcctgcgtgggagaaccccaattctagcactccaggaaactgtgggagagtgtggggcaggctccgtcctccctgggagacccctccagccaccgggtgccacttaatgccaacagcccttaccaaagctgggagccccattgccccggcagctctggcctgtggttccagaagctgagaaaactccactggggcttgcagaatccagggttcacctaagctgcacagttcctgcagctttgccagccccctgaaagtcttgtgtaccccacctctgaagatgctgggggaggcagctgggatgggagccagccccatgcctgtctgtgaccccacagtgggtgagagcccgtcacagtcctgggtgtggctgctctggaagaattaggaggcagccataataagagtcttcagagagatgatgggaggggccagtgaggacaggaacagagagtagatgtcctataataaaggggcttctgggaggtgcctgggcacagatgtctgttcagcaggtgtgtgggcctagaggagagagcagagcccagaaatgtcttttgcaggcccacgttctgacttgaagctttcgtgggcatgttgccattgggttttgcccttgcaaaggcttcctaggtctccagtggcccctcaggacccagggtcccagctgctgcttggggatgtgcactgctggccgccggccttgcagtctctctaccctggggaggaacagtggcttctcagagcctggggcatacagaagaaggcaggagttgatttttgtgttgggtttggggtttctttgtcctcaaggtactgttctgtttctctttacccctctgctttatttattgtaagcattcccacgttaaataaactttggctgttgtctacaa

SEQ ID NO: 566 - DNA, 5157 bp, Homo sapiens
  source 1..5157: mol_type = genomic DNA
gagctgcgctttagctgctgcgccacgcgcgcctcgggcctgggcgcagaggatcggccgggcgcggcgggaaggaggctgcgggcagcgaggagcggctggcgctcgaggcggcggacggcaccatgtccccggggagcggggtgaagagcgagtacatgaagcgctaccaggagccgcgctgggaggagtacgggccgtgctaccgcgagctgctgcactaccgcctaggccgccggctgctggagcaggcgcacgcgccctggctctgggacgactggggcccggccggctcctcggaggactcggcgtcgtcagagtcgtcgggcgccgggggccccgcaccccggtgcgccccgccctcgcccccgccgcccgtagagccggcgacccaggaggaggcggaacggcgggcgcgcggggccccggaggagcaggacgcggaggccggggacgcggaggccgaggacgcggaggacgcggctctgccagcactgccagtgaaagatgtagaagataaacctgaacaacaaaccagaacaagagagactgacaaatcacccaccagtactgagcctcgacagcaaccaagtgccttatttgctagaggaaacaggaaagcggtcaaaagtccccaaagatcatcgagtaaaataaaagaaaacaagcatccatttgctctttatggctggggagaaaaacagaccgatacaggaagccagaagactcacaacgtctgtgcgtccgctcctgtgcacgagattcatgaatcagcattacgagccaagaacagaagacaggtggaaaaaaggaaactggttgctcaaaggcagcgagctcactctgtggatgtggagaagaacagaaagatgaaggcttcctcctcagagaacccgtggatgacagaatacatgaggtgctattcggcaagagcttaaagaaacacttgcgtggacagcctcttttaaaaagtgtaaatgactgaaaggaaaaacaaaacaaaaaccatcaaaagaaacggacacaggtttaagaaaccaactgattatgcaaggttttttttagggaatttgtaaaagattgttttattttgatgaatattggtcacctacctcggcagtagggcagacagttgaagccatagacatttggttatttatgaagataattccctaaatctttgatattcttataaggtttttgttttaaagcatcttaatcttttaagatactgacaccaaatgcctttaaatggcaacagatgcttacagttcagtattcttttcataagcttaggtagagcctattatcatcttgttctaaataactttccagattccatagctataagatcattccatcctacagcataagactcgttttccttatatgccgttttgtttgtgaaagaatatcaagtcaaaaatgagtgtcagcactactactgattccatgtataatgaaagtagaactttgctagttcctgaaaatttttaacttatttgtatttcagttcagcagcatctttatgtagattgtgatatttaagaattatctgggctgggcgagggtctctttttctctttcagtgatcatctaggcagttattatttaatagtttaatagctcaagtacattccaatagacgaagtgcacacaacacaatatgtgtgtacagtagtagtaaagtttcttttgagtagtcaaagactcactttttttattgcctttttttttttttttaaagaatacatactgtggattcagtcccttgtcacacttgaccttttggcatacacccactgtggacttttgcctcttctgtaatggctggcaatgacatttcaaacttacaatctggaattgcacttggtacattggcattgcttgttccactgggatggggaccagtgtgaagatgcctgttagatagactgcccacccctactttctctttttctttatagcacttaacaataacaaagtcttgatgatgtacagtattcaaactttaggttgaaatacgttactctttgattcctagccagtagatcttatctacactttaatgggagagaatggtggtgtgtgggtaggcacaaatttatgtaaatagtgctccttctctttagtatgtttgctttgggggtagaaaaatggttttaacaaacactggtttccatcaaatgaatgatgtcttctccatcctgtggagacaagaatctgctagaaggatatgtgctaagttccttataagagataatggtgctctgcctatgccagcttggcacccgaagatgtgtgagtggacgtgaggctgagtattaccttagtatttttctctgggtctttggaaaaccatagtcaatttttagaacatattgctttcattccccataaactcttcacacatgataactgtttaagctttgaaaacacatactgaagtattgtgagcttaaaaaaactttttaaatatttgcatagttttgaggtgaatttgtttccttacagatctctcctaatcattgagatgtatatttcaaaagaggaaattttacatgttgtccaaaacagccttgctagtaactggtgaattttggtattaactattattaaagtctttaaacgacacaggtacctaaagatcaccttaatgtggcaatttgtgatggtgtagctagctgattgtgaaaactgttcctttaaagtcgcttcttgcatgttcggtgttagtcatccagctcaggcttgtgttgcagctgacaatctaggaaagacggccttagagagtggtgcaggccccacactgacggactgccttagaaacccgacttcctctagactttgaaccgccagacttttctcttgtttagaaaacaaacttatatttaatgtacttactacttaaaactccagacagagatataatgtagaaggcaaatattggccaattttttcctctttttaagtggaagacaaatgaacgggatttttaaagtgcttttaaagtgcatgaatggttaataaatcagtatgaattgtaagccttcatcttacatccaagtccttagttggttagggtttcttttctttcttttttaaagagtgtcaattaccttttgaacctgtgaaaatttgatagttgttaacagtctgatggtcctaattctttcttttcattctagaaatgaatgtggttgtaatcatgttcctaattcttgggacaacctgcaagacagtgagacagtttaaaaattacctttcatgttgaaaaagtctgaaacagagaacccaatgatatttaaaataaatgctacataaaactctttttaaaattttgattttaacttaattaaaacaatgtcataaatatgctttttgattttgttactgcttttaatattaaagtaatagaatattgaagcaatattgtctagcactctgctggacattaagtccgcgggaggagaagtgaacaggaatcgattctttgtcttttaactgcccttagttaggagatgttaaaatacttggcacctctggttatatgtatgttatgtgtgttctcccccctaaaatttctaagcacatttattcacttttaaaatgaatctttaaaagattatagttagtagttatagttaatattctatttacttggaaaaatgtgaataaatggatcttcaaaagattcattttaaaaatgaataaatgtataataggctataggtgatcttacttgcgtattaggtaggaggcacatatttataccatttcatatgtaatatctttgtcattgtgtttcatcgaagatcaattgctagcaacttgaagggtatttatacttgggtcacttgaactcagctgactaaattgtaagaacgagagcaagcaagatggctgttattggaagccataacttccagaagataattctgcacaattcgtaagttaaaaaaaatctgtagggtcttccactatcctttttcaggttgataatgctgttctgggcacacactttgtaaatggaatgttatggtacagtcgcctctcagtatccatggggcattggttccaggcctcccttaggatgccaaactccatggatactcaaaccccttctataaaatggtgtagtatttgcatatatcctagacacatcctcctgtatgctttaaatcatctctagattacttaaaatacctaatacaatgtaaatgctctgtaaatagttgttatactatattgtttagggaataatgacaaggaaaaaaaagcctgtacatgttcagcacaagtgaaaccatcctttttgcccccaaatattttcaatttgtatttggttgaatccatggatgcagaactcacggatacagagggccgactgtactttctttaaagtgttcaaaagtattactagcaaagaggaggaggagcaaagcatatatcagaagtaaaacaatttttcttgttgactgctttggtaaaaaacagtttgatggatagttttacatttcactggactagataaaaaatggtgctaatatttatgtagcttgatgctatagttgctttggtatcaaacttaatacctaacccatataagatccttattatataattttgtgatcagtaaaatgatattttaaagagtgatcttaaaaatatgacctggtcattgcacaacgtttgcatttgaaatgaatttgtgtactatagggtggatatggagttattcagtgcaagtgtgtgcttaatatcaaaccctatgcaaggagctatgtctagatttttggtccaaatttgcctccttcaagcctactagtgtgagatggaaaaaaatcgattgctcttttaatattatttccattttgaaattctcgacacttgaatgaaggcagtagaggcctctttttggatttctcttctaataacaaaactttatttagggaaggtttccctgtgctatcgtaagtttgttttgagcactgcattcactttaaaattctggaggaacaaaggctgggcacataatcacaaagcccaggccacacaataattcggggttgtattttctaagaactatgtattgtttttagcttatagttaatattgtatttacttggaaaaatgtgaataaagttaattaacatt

SEQ ID NO: 567 - DNA, 5272 bp, Homo sapiens
  source 1..5272: mol_type = genomic DNA
cgccccgggcgccggctgcgtcccggcctcctcctcctcttcctccgccctccttggctgggaaagtgggaggcggcggcggcggcgtggtgtgtgtgcgcgcgtgaggggggcagcagagaggagtctcccggtgccgccgcggcgtcagagacactgcgagcggcgagcgcggtggggccgcatctgcatcagccgccgcagccgctgcggggccgcgaacaaagaggaggagccgaggcgcgagagcaaagtctgaaatggatgttacatgagtcattttaagggatgcacacaactatgaacatttctgaagattttttctcagtaaagtagataaagatggatgaatcagccttgttggatcttttggagtgtccggtgtgtctagagcgccttgatgcttctgcgaaggtcttgccttgccagcatacgttttgcaagcgatgtttgctggggatcgtaggttctcgaaatgaactcagatgtcccgagtgcaggactcttgttggctcgggtgtcgaggagcttcccagtaacatcttgctggtcagacttctggatggcatcaaacagaggccttggaaacctggtcctggtgggggaagtgggaccaactgcacaaatgcattaaggtctcagagcagcactgtggctaattgtagctcaaaagatctgcagagctcccagggcggacagcagcctcgggtgcaatcctggagccccccagtgaggggtatacctcagttaccatgtgccaaagcattatacaactatgaaggaaaagagcctggagaccttaaattcagcaaaggtgacatcatcattttgcgaagacaagtggatgaaaattggtaccatggggaagtcaatggaatccatggctttttccccaccaactttgtgcagattattaaaccgttacctcagcccccacctcagtgcaaagcactttatgactttgaagtgaaagacaaggaagcagacaaagattgccttccatttgcaaaggatgatgttctgactgtgatccgaagagtggatgaaaactgggctgaaggaatgctggcagacaaaataggaatatttccaatttcatatgttgagtttaactcggctgctaagcagctgatagaatgggataagcctcctgtgccaggagttgatgctggagaatgttcctcggcagcagcccagagcagcactgccccaaagcactccgacaccaagaagaacaccaaaaagcggcactccttcacttccctcactatggccaacaagtcctcccaggcatcccagaaccgccactccatggagatcagcccccctgtcctcatcagctccagcaaccccactgctgctgcacggatcagcgagctgtctgggctctcctgcagtgccccttctcaggttcatataagtaccaccgggttaattgtgaccccgcccccaagcagcccagtgacaactggcccctcgtttactttcccatcagatgttccctaccaagctgcccttggaactttgaatcctcctcttccaccaccccctctcctggctgccactgtccttgcctccacaccaccaggcgccaccgccgctgctgctgctgctggaatgggaccgaggcccatggcaggatccactgaccagattgcacatttacggccgcagactcgccccagtgtgtatgttgctatatatccatacactcctcggaaagaggatgaactagagctgagaaaaggggagatgtttttagtgtttgagcgctgccaggatggctggttcaaagggacatccatgcataccagcaagataggggttttccctggcaattatgtggcaccagtcacaagggcggtgacaaatgcttcccaagctaaagtccctatgtctacagctggccagacaagtcggggagtgaccatggtcagtccttccacggcaggagggcctgcccagaagctccagggaaatggcgtggctgggagtcccagtgttgtccccgcagctgtggtatcagcagctcacatccagacaagtcctcaggctaaggtcttgttgcacatgacggggcaaatgacagtcaaccaggcccgcaatgctgtgaggacagttgcagcgcacaaccaggaacgccccacggcagcagtgacacccatccaggtacagaatgccgccggcctcagccctgcatctgtgggcctgtcccatcactcgctggcctccccacaacctgcgcctctgatgccaggctcagccacgcacactgctgccatcagtatcagtcgagccagtgcccctctggcctgtgcagcagctgctccactgacttccccaagcatcaccagtgcttctctggaggctgagcccagtggccggatagtgaccgttctccctggactccccacatctcctgacagtgcttcatcagcttgtgggaacagttcagcaaccaaaccagacaaggatagcaaaaaagaaaaaaagggtttgttgaagttgctttctggcgcctccactaaacggaagccccgcgtgtctcctccagcatcgcccaccctagaagtggagctgggcagtgcagagcttcctctccagggagcggtggggcccgaactgccaccaggaggtggccatggcagggcaggctcctgccctgtggacggggacggaccggtcacgactgcagtggcaggagcagccctggcccaggatgcttttcataggaaggcaagttccctggactccgcagttcccatcgctccacctcctcgccaggcctgttcctccctgggtcctgtcttgaatgagtctagacctgtcgtttgtgaaaggcacagggtggtggtttcctatcctcctcagagtgaggcagaacttgaacttaaagaaggagatattgtgtttgttcataaaaaacgagaggatggctggttcaaaggcacattacaacgtaatgggaaaactggccttttcccaggaagctttgtggaaaacatatgaggagactgacactgaagaagcttaaaatcacttcacacaacaaagtagcacaaagcagtttaacagaaagagcacatttgtggacttccagatggtcaggagatgagcaaaggattggtatgtgactctgatgccccagcacagttaccccagcgagcagaatgaagaagatgtttgtgtgggttttgttagtctggattcggatgtataaggtgtgccttgtactgtctgatttactacacagagaaacttttttttttttttaagatatatgactaaaatggacaattgtttacaaggcttaactaatttatttgcttttttaaacttgaacttttcgtataatagatacgttctttggattatgattttaagaaattattaatttatgaaatgataggtaaggagaagctggattatctcctgttgagagcaagagattcgttttgacatagagtgaatgcattttcccctctcctcctccctgctaccattatattttggggttatgttttgcttctttaagatagaaatcccagttctctaatttggttttcttctttgggaaaccaaacatacaaatgaatcagtatcaattagggcctggggtagagagacagaaacttgagagaagagaagttagtgattccctctctttctagtttggtaggaatcaccctgaagacctagtcctcaatttaattgtgtgggtttttaattttcctagaatgaagtgactgaaacaatgagaaagaatacagcacaacccttgaacaaaatgtatttagaaatatatttagttttatagcagaagcagctcaattgtttggttggaaagtaggggaaattgaagttgtagtcactgtctgagaatggctatgaagcgtcatttcacattttaccccaactgacctgcatgcccaggacacaagtaaaacatttgtgagatagtggtggtaagtgatgcactcgtgttaagtcaaaggctataagaaacactgtgaaaagttcatattcatccattgtgattctttccccacgtcttgcatgtattactggattcccacagtaatatagactgtgcatggtgtgtatatttcattgcgatttcctgttaagatgagtttgtactcagaattgaccaattcaggaggtgtaaaaataaacagtgttctcttctctaccccaaagccactactgaccaaggtctcttcagtgcactcgctccctctctggctaaggcatgcattagccactacacaagtcattagtgaaagtggtcttttatgtcctcccagcagacagacatcaaggatgagttaaccaggagactactcctgtgactgtggagctctggaaggcttggtgggagtgaatttgcccacaccttacaattgtggcaggatccagaagagcctgtctttttatatccattccttgatgtcattggcctctcccaccgatttcattacggtgccacgcagtcatggatctgggtagtccggaaaacaaaaggagggaagacagcctggtaatgaataagatccttaccacagttttctcatgggaaatacataataaaccctttcatctttttttttttcctttaagaattaaaactgggaaatagaaacatgaactgaaaagtcttgcaatgacaagaggtttcatggtcttaaaaagatactttatgtggttgaagatgaaatcattcctaaattaaccttttttttaaaaaaaaacaatgtatattatgttcctgtgtgttgaatttaaaaaaaaaatactttacttggatattcatgtaatatataaaggtttggtgaaatgaactttagttaggaaaaagctggcatcagctttcatctgtgtaagttgacaccaatgtgtcataatattctttattttgggaaattagtgtattttataaaaattttaaaaagaaaaaagactactacaggttaagataatttttttacctgtcttttctccatattttaagctatgtgattgaagtacctctgttcatagtttcctggtataaagttggttaaaatttcatctgttaatagatcattaggtaatataatgtatgggttttctattggttttttgcagacagtagagggagattttgtaacaagggcttgttacacagtgatatggtaatgataaaattgcgatttatcactccttttcatgttaataatttgaggactggataaaaggtttcaagattaaaatttgatgttcaaacctttgt

SEQ ID NO: 568 - DNA, 1888 bp, Homo sapiens
  source 1..1888: mol_type = genomic DNA
gccgcccggcgcggagtggctgccctgcgcggggacacttagagcccggtgggcgggaggaaggcggcatgccccagacggtgatcctcccgggccctgcgccctggggcttcaggctctcagggggcatagacttcaaccagcctttggtcatcaccaggattacaccaggaagcaaggcggcagctgccaacctgtgtcctggagatgtcatcctggctattgacggctttgggacagagtccatgactcatgctgatgcgcaggacaggattaaagcagcagctcaccagctgtgtctcaaaattgacaggggagaaactcacttatggtctccacaagtatctgaagatgggaaagcccatcctttcaaaatcaacttagaatcagaaccacaggaattcaaacccattggtaccgcgcacaacagaagggcccagccttttgttgcagctgcaaacattgatgacaaaagacaggtagtgagcgcttcctataactcgccaattgggctctattcaactagcaatatacaagatgcgcttcacggacagctgcggggtctcattcctagctcacctcaaaagacgggaactactttgaacacaagcataatattcggcccaaacctttcgtgatcccgggccgaagcagtggatgcagcactccctccgggattgactgtggcagtggacgcagcaccccttcttctgtcagtactgttagtaccatttgcccaggtgacttgaaagttgcggctaagctggcccctaacattcctttggaaatggaacttcctggtgtgaagattgtacatgctcagtttaatacacctatgcagttgtactcagatgacaatattatggaaacactccagggtcaggtttcaacagccctaggggaaacacctttgatgagcgagcccacagcctcggtgccccccgagtcggacgtgtaccggatgctccacgacaatcggaatgagcccacacagcctcgccagtcgggctccttcagagtgctccagggaatggtggacgatggctctgatgaccgtccggctggaacgcggagtgtgagagctccggtgacgaaagtccatggcggttcaggcggggcacagaggatgccgctctgtgacaaatgtgggagtggcatagtcggtgctgtggtgaaggcgcgggataagtaccggcaccctgagtgcttcgtgtgtgccgactgcaacctcaacctcaagcaaaagggctacttcttcatagaaggggagctgtactgcgaaacccacgcaagagcccgcacaaagcccccagagggctatgacacggtcactctgtatcccaaagcttaagtctctgcaggcgtggcacgcacgcacgcacccacccacgcgcacttacacgagaagacattcatggctttgggcagaaggattgtgcagattgtcaactccaaatctaaagtcaaggctttagacctttatcctattgtttattgaggaaaaggaatgggaggcaaatgcctgctatgtgaaaaaaacatacacttagctatgttttgcaactctttttggggctagcaataatgatatttaaagcaataattttttgtatgtcatactccacaatttacatgtatattacagccatcaaacacataaacatcaagatatttgaaggactctaattgtctttccttgacaagttgattttgcaattgtggtaaatagcaaataacaatcttgtattctaacataatctgcagttgtctgtatgtgttttaactattacagtgcatgttagggagaaattccctgaatttctttagttttgtattcaaacaattatgccactcgatgcaacaaacataataaatacataaaagattt

SEQ ID NO: 569 - DNA, 1714 bp, Homo sapiens
  source 1..1714: mol_type = genomic DNA
caggacgccgcccggcgcggagtggctgccctgcgcggggacacttagagcccggtgggcgggaggaaggcggcatgccccagacggtgatcctcccgggccctgcgccctggggcttcaggctctcagggggcatagacttcaaccagcctttggtcatcaccaggattacaccaggaagcaaggcggcagctgccaacctgtgtcctggagatgtcatcctggctattgacggctttgggacagagtccatgactcatgctgatgcgcaggacaggattaaagcagcagctcaccagctgtgtctcaaaattgacaggggagaaactcacttatggtctccacaagtatctgaagatgggaaagcccatcctttcaaaatcaacttagaatcagaaccacaggacgggaactactttgaacacaagcataatattcggcccaaacctttcgtgatcccgggccgaagcagtggatgcagcactccctccgggattgactgtggcagtggacgcagcaccccttcttctgtcagtactgttagtaccatttgcccaggtgacttgaaagttgcggctaagctggcccctaacattcctttggaaatggaacttcctggtgtgaagattgtacatgctcagtttaatacacctatgcagttgtactcagatgacaatattatggaaacactccagggtcaggtttcaacagccctaggggaaacacctttgatgagcgagcccacagcctcggtgccccccgagtcggacgtgtaccggatgctccacgacaatcggaatgagcccacacagcctcgccagtcgggctccttcagagtgctccagggaatggtggacgatggctctgatgaccgtccggctggaacgcggagtgtgagagctccggtgacgaaagtccatggcggttcaggcggggcacagaggatgccgctctgtgacaaatgtgggagtggcatagtcggtgctgtggtgaaggcgcgggataagtaccggcaccctgagtgcttcgtgtgtgccgactgcaacctcaacctcaagcaaaagggctacttcttcatagaaggggagctgtactgcgaaacccacgcaagagcccgcacaaagcccccagagggctatgacacggtcactctgtatcccaaagcttaagtctctgcaggcgtggcacgcacgcacgcacccacccacgcgcacttacacgagaagacattcatggctttgggcagaaggattgtgcagattgtcaactccaaatctaaagtcaaggctttagacctttatcctattgtttattgaggaaaaggaatgggaggcaaatgcctgctatgtgaaaaaaacatacacttagctatgttttgcaactctttttggggctagcaataatgatatttaaagcaataattttttgtatgtcatactccacaatttacatgtatattacagccatcaaacacataaacatcaagatatttgaaggactctaattgtctttccttgacaagttgattttgcaattgtggtaaatagcaaataacaatcttgtattctaacataatctgcagttgtctgtatgtgttttaactattacagtgcatgttagggagaaattccctgaatttctttagttttgtattcaaacaattatgccactcgatgcaacaaacataataaatacataaaagatttaaaaaata

SEQ ID NO: 570 - DNA, 1672 bp, Homo sapiens
  source 1..1672: mol_type = genomic DNA
cgcttccaaagttggagctctccggggtgggagggggcggggaggacggcggggcggtgacgtcacccccagcggggataaagcgcccccgcccgggtcggggccaggacgccgcccggcgcggagtggctgccctgcgcggggacacttagagcccggtgggcgggaggaaggcggcatgccccagacggtgatcctcccgggccctgcgccctggggcttcaggctctcagggggcatagacttcaaccagcctttggtcatcaccaggattacaccaggaagcaaggcggcagctgccaacctgtgtcctggagatgtcatcctggctattgacggctttgggacagagtccatgactcatgctgatgcgcaggacaggattaaagcagcagctcaccagctgtgtctcaaaattgacaggggagaaactcacttatggtctccacaagtatctgaagatgggaaagcccatcctttcaaaatcaacttagaatcagaaccacaggaattcaaacccattggtaccgcgcacaacagaagggcccagccttttgttgcagctgcaaacattgatgacaaaagacaggtagtgagcgcttcctataactcgccaattgggctctattcaactagcaatatacaagatgcgcttcacggacagctgcggggtctcattcctagctcacctcaaaacgagcccacagcctcggtgccccccgagtcggacgtgtaccggatgctccacgacaatcggaatgagcccacacagcctcgccagtcgggctccttcagagtgctccagggaatggtggacgatggctctgatgaccgtccggctggaacgcggagtgtgagagctccggtgacgaaagtccatggcggttcaggcggggcacagaggatgccgctctgtgacaaatgtgggagtggcatagtcggtgctgtggtgaaggcgcgggataagtaccggcaccctgagtgcttcgtgtgtgccgactgcaacctcaacctcaagcaaaagggctacttcttcatagaaggggagctgtactgcgaaacccacgcaagagcccgcacaaagcccccagagggctatgacacggtcactctgtatcccaaagcttaagtctctgcaggcgtggcacgcacgcacgcacccacccacgcgcacttacacgagaagacattcatggctttgggcagaaggattgtgcagattgtcaactccaaatctaaagtcaaggctttagacctttatcctattgtttattgaggaaaaggaatgggaggcaaatgcctgctatgtgaaaaaaacatacacttagctatgttttgcaactctttttggggctagcaataatgatatttaaagcaataattttttgtatgtcatactccacaatttacatgtatattacagccatcaaacacataaacatcaagatatttgaaggactctaattgtctttccttgacaagttgattttgcaattgtggtaaatagcaaataacaatcttgtattctaacataatctgcagttgtctgtatgtgttttaactattacagtgcatgttagggagaaattccctgaatttctttagttttgtattcaaacaattatgccactcgatgcaacaaacataataaatacataaaagatttaaaaaa

SEQ ID NO: 571 - DNA, 5996 bp, Homo sapiens
  source 1..5996: mol_type = genomic DNA
tccttttattgtggatgaacaccacgtacatgccgtaaatgctccctaggctggctgcggctacaaggcagacccgggagctgagaatagaggaatacctgcccaagcaactcattctgcacagcagccgacaagacagcgattttcctgtgctggaatgtgcccatccaaagacacttggattggacttaatcttaaacctctggagttcaagaccttttaaaaagggctaaataaacaatctctacatgtaaaaggccactgactcctacttcctctgtatagagcaactgttgaactcagctgcctgtagggcgtgattctcagtcaccagactcagcttggagatcttacaatgatggcaatcaggagacactgaacggagatgctacatattcctctcttgcagcaaaaggttttagaagcgttcgaccaaacctacaagataaaagatcaccaactcagagccagataacagtgaatggaaactcaggaggtgccgtgagtcccatgagttactatcagaggccgttttccccctcggcatattctctcccagcctcactcaactccagcattgtcatgcagcacggcacatccctcgattccacagacacatatccccagcatgcgcagtctctggatggcaccaccagcagctctatccccctgtaccgatcctcagaggaagagaagagagtgacagtcatcaaagccccgcattacccagggatcgggcccgtggatgaatccggaatccccacagcaattagaacgacagtcgaccggcccaaggactggtacaagacgatgtttaagcaaattcacatggtgcacaagccggatgatgacacagacatgtataatactccttatacatacaatgcaggtctgtacaacccaccctacagtgctcagtcacaccctgctgcaaagacccaaacctacagacctctttccaaaagccactccgacaacagccccaatgcctttaaggatgcgtcctccccagtgcctcccccacatgttccacctccagtcccgccgcttcgaccaagagatcggtcttcaacagaaaagcatgactgggatcctccagacagaaaagtggacacaagaaaatttcggtctgagccaaggagtatttttgaatatgaacctggcaagtcatcaattcttcagcatgaaagaccagcctccttgtatcagtcctctatagacagaagcctggaaagacccatgagttctgcaagcatggccagtgacttcaggaagcggaggaagagcgagcctgcagtgggtccaccacggggcttgggagatcaaagtgcgagcaggactagcccaggccgagtggacctcccaggatcaagcaccactcttacaaagtctttcactagctcttctccttcttccccatcaagagcaaaaggtggggatgatagcaaaatatgtccatccctttgcagttactcagggctcaacggcaacccctccagtgagttagattactgtagcacttacagacagcacttggatgtccctcgggactcaccaagagccattagtttcaagaacggctggcaaatggcccggcaaaacgcagaaatctggagcagcacggaagaaaccgtctctcccaaaatcaaatcccggagctgtgacgatctcctaaacgacgactgcgatagcttcccggacccgaaagtcaagtcggaaagcatgggctccctgttatgtgaggaggactccaaggagagctgccccatggcgtgggggtccccctacgtcccggaggttcgcagtaacggcagatcaaggatcagacacaggtcagcccgcaacgccccggggttcctgaagatgtacaagaaaatgcaccgcatcaaccgcaaggacctgatgaactccgaggtgatctgctccgtgaagtccaggattctgcagtacgagagcgagcagcagcacaaggacctgctgcgcgcctggagccagtgctccacggaggaggtgccccgggacatggtgcccacacgcatctccgaattcgaaaagctgatccagaagtccaaatccatgccaaatttaggggatgacatgctgtctcccgtaaccctagaaccaccgcaaaatggcctatgtcccaagaggcggttttccattgagtatttgctggaggaagaaaatcaaagcggcccccccgctcggggccggcgaggctgccagtctaacgccctggtgcccattcacattgaagtcaccagcgatgagcagccccgagcacacgtggagttttccgacagcgaccaggacggggttgtgtccgaccacagtgactacattcacctagaggggtcatccttctgcagtgaaagtgactttgatcacttttccttcacatcctccgaaagcttttacggatccagccaccaccaccaccatcaccaccaccaccaccaccgccacctcatcagctcctgcaaaggcaggtgcccggcctcctacactcgatttaccacaatgttaaaacacgaaagagccagacacgaaaacaccgaggagcccagaaggcaagaaatggaccctggcctttctaaacttgcttttctagtcagtcctgtgcctttccggaggaaaaaaaattcggctcctaagaaacagactgaaaaggcaaaatgtaaagcatctgtgtttgaggctctggactctgcccttaaagacatctgtgaccaaattaaagctgaaaagaaaagggggagcttgccggacaacagcatcctgcaccgcctcatcagtgagctgctgccagatgttcccgagaggaactcatccctgagagcgctgaggaggagccccctgcaccagcctctccacccactgcctcccgatggtgctattcattgtccaccctaccagaatgactgcgggagaatgccccgcagtgcctctttccaagacgtggacacagccaacagcagctgccaccaccaagaccgtggcggtgcactccaagaccgtgagtcccctagaagttactcatccactttgactgacatggggagaagtgcaccaagggaaagaagaggaactccagaaaaagagaaattgcctgcaaaagctgtttatgattttaaggctcagacatctaaggagttgtcatttaagaaaggagatactgtctacatcctcaggaaaattgatcaaaattggtatgagggagaacaccacgggagagtgggcatcttcccgatctcatacgtagagaaactcacacctcctgagaaagcacagcctgcaagaccacctccgccagcccagcccggagaaatcggagaagctatagccaaatacaacttcaacgcagacacaaatgtggagctgtcactgagaaagggagatagagttattcttcttaaaagagttgatcaaaactggtatgaaggtaaaatcccaggaaccaacagacaaggcatcttccctgtttcctatgtggaggtcgtcaagaagaacacaaaaggtgctgaggactaccctgaccctccaataccccacagctattctagtgataggattcacagcttgagctcaaataagccacagcgtcctgtgtttactcatgaaaatattcaaggtgggggggaaccgtttcaggctctgtataactatactcccaggaatgaagatgagctggagctcagagaaagtgatgtcattgatgtcatggaaaagtgtgatgacggctggtttgtggggacctcaagaagaaccaaattctttggtactttccccggaaactacgtcaagaggctgtgaattgcgctccctccttctgtagaggccgcctgccagccatgcacctgcgtcaacgcgcctgaaacaccccgcgggcctcccgttgtcatgccttacggtttccaatgcgccgtcaccatctccacctgccaccaaaccaccagcagagtagccgccgctgctgtgagcctggggacgacatggcaggctggtccccctccgtgaaagtgtggattcctacttcctgctctaagctttgacacgtcaaaatgtgggatcagaaagaaaaaaatcatgatatttaaaaatggtcaaatatttgaggcaaaaaaaaaaaaaaaaagtgtctccaggaggctgtccagcctcgtggctccatttcaacatctccccccaggcgatgttctcccccaagacgaccagaaaattgtttattggggaatgctgtggtttgcattttcatattcttcgcttggcagtgtgtattcttttcacaagtttgcctagtgtcttggtttacacaatatgacaactgtaactgtactttagctattgtttgcctgcacatacatgttgtaatatgcacagtgattacaacctttaaagcaagaggaggcgagttaatttggatgagtgtgattttgctgattgaatgtgagttttcaaataggagtctttttctgcaatttgtttgcattttttagaagtgcaaacagtaagtaaataaaagccttcggtaataatcatgacaatacaagaggctgagctaggctacaggggaaaactattgtgttgtaaagttgcatcgctattttatattaaaatgtaatgatcagcatcatgaacaatgagctcttagtgttttatttatctgaaaaaatgtaagtaaaagcagtgttagtgagaggtgcaaagaattattctaacagacacctgaaagtatctgtaagcaatactagtaggtaagatttcactgtgtgtacacatacacatttgagattgtatgagaacatataatccatatgatatgttgtacattttatggaaatgtaatagaatctcacacattattttatagaaatagagtacagaagcatcacaagtattaaagttggttttagcaaggattaggattactacaattatttttactataataattatttttcttctatggaactcagaatcctggctacatttgaggacaggaatatgttgagcctgattttcctggtgtgtgtaaaatatttcctaggaataaattaggcactttttagaagcaatgttaaatcattcaggttttattttctgccctgaagcagaaatttaaaaaatgatattgggacctggaaggtttaatatggttcacagtgcctgaattacacctgctccgaaaactagctttgtatttcttatgactttgcataagaactgttcatctttggatcttgagcaccttacagataaaactttttatggcatctctttcatggacagtgatattgatcttttcacaatgtacgtagcctctagaattttgtacatatgtttgctctttttttgtacagactagttgttgagaaaacaggggcgtttcctaatttggtctttatcctgcgacaacactttcagcagactagcctctccttatctcacagatcacaagcacccctagatagtgtgattctgtcagatagcatttatgcaaaaatctatgaagttaaaagatcgtagaagccaaatgaaatgtacatatctactgactgatgacaagggaatttcattaggaagaaggtaaagaaacatcgttgagtagcctaccttgatttctgtcaagttcataaccagcttcatattttaaaggcttcaggtttgaaattaagtcaactgcatgcagctttgctgataaatgaataattctctttgatgccatttatgagaaaagacttcaatatctgttgcctgtcatatttaagaaaaattactgtttctactctctgtatctgattttaaaagaaaaaactattcatacctggcttccaggtaattgactttgaattcttacaagcaaaggtcattgtgtttttcttgaatagacatctaataaattttgcttggaagtatacttcagtttttcttcttgacatttatctttataaaaattgtgtattttattccaacttgttaaactaagagaaaatgca

SEQ ID NO: 572 - DNA, 5720 bp, Homo sapiens
  source 1..5720: mol_type = genomic DNA
caaaaccacctgtcgctcccaagccaaagactaccagtccactgacgccagtgaccgcgcccaaattcccttcctcagccaggcccgagagtcttcacagtccaaactccatgttcaggggtccgaagccccccattgcccccaagcccaggctgactgccccaaacgagtggagagccagtgtgtacctgaatgacagcttgaacaaatgcagcaacgggcggctgccctgtgtagacagggggcttgatgaggggccccggtccatcccaaagtgctctgagtcggagaccgacgaggattacatcgtggtccccagggttccgctgagggaggatgaacccaaggacgagggcagtgtggggaacaaagccctggtgtctcccgagtcctctgcggaagaggaagaggagcgtgaagagggaggcgaggcatgtggcctggagggtacaggagctggtgaggattcagtggcccctgctgctccgggtgcaggagcgctgagcagggagggtgaggaaggcacagaccttgctcttgaggatgaaggggagggctgcgctgatgagccagggacactggagcaggtgtccagaagtgaggaggaagagaagctagtgcagccacacagggagtgcagcctggaggacagtgggccttgggctggagagggggtcttccagagcgacctcctcctgcctcacatccatggagaggaccaggagccccccgacacccccggggaggcagaggaggatgatgaggaaggctgtgccagcacagacccagcaggggcagatgagggttcgggtcctgacaggcccacggaggacatgggacaggatgctgaggacaccagtgaggagccccctgagaaggaggagctggccggggtccaggaggcagagacagccacagactgccctgaagttcttgaggagggatgtgaagaggccacgggtgtcacaggtggggaacaggttgacctcagtgaaccacctgaccacgagaagaaaaccaaccaagaagtggcagccgccaccctggaggaccatgcacaggatgagtccgccgaggagagctgccagattgtcccttttgagaatgactgcatggaggacttcgtgacttccctcacaggaagcccctatgagttcttcccaactgagagcacctctttttgcagcgagagctgttctcctctttctgaatcagcgaaaggtttagaatcagagcaggcaccaaagctggggctgcgtgcggaggagaaccccatggtgggggctttgtgtggccagtgtggctccctacagggtggagcggccgagggtcccgcagcccctgatgtggtggtcgtgctggaggaggaggccttggatgatgcactggccaacccctatgtgatgggagtgggcctgcccggtcaggcggcccctggagaaggagggcaggctgcatcggacgccctgggtggttatggctcgaaagaagaattgaactgtgaggcagagggtggcctggttcccgcggacaggaagaacaccagcacgagggtccggccccactctgggaaggtggccggctatgtcccagaaaccgtccctgaagaaaccggacctgaggcgggctcgtcagcccctggcattggaggtgccgcagaggaggtgggaaagacgcttttgtcattggaggggaagcccttggaagccagcagggccttgccagcaaagcccagggcctttactttataccctcggtcgttctccgtggaaggccgagagattccagtgtccgtgtaccaggagcctgaggggtcagggttggatgaccacaggataaagaggaaagaggacaatctctctctgtcgtgtgtaattggctcctctgggagtttctcccagagaaaccaccttccgtccagcggcacctccacgccttcttccatggtcgacatcccacctcctttcgacctggcctgcatcaccaagaagcccatcacaaagagctctccctcactcctgatcgagagcgactccccggacaagtacaagaagaagaagtcatcctttaagcgcttcctggcactgacgtttaagaagaagacggagaacaaattgcatgtggatgtgaacgtgtcttcctctaggtcctcttcagagtccagctaccacgggccttccaggattctggaagttgaccggagaagcctcagcaactcccctcagcttaagtctcggactgggaagctccgggcttctgaatccccctcctccctcatcttttatagagatggcaagaggaaaggtgtccccttcagcaggacggtgtccagagtggagtcctttgaagaccgctcccggccgcccttcctgcccttgccactgaccaagccacggtccatctccttccccagcgctgacacttcagactatgagaacattccagccatgaactcggactatgagaatatccagattccaccccggagacctgccagggctggcgcgttcacgaagctgtttgaagatcagagcagagccctgtccacagcaaacgaaaatgatggctacgtggacatgagcagcttcaacgcctttgagagcaaacagcagagtgcagaccaggacgcagaaagcgcctacacagagccctacaaagtctgtcccatctcgtcggcagcccccaaagaggaccttacgtcggatgaagagcagagaagctcggaggaggaggacagtgcttcaagagaccccagtgtcacccacaaggtggaaggacagtccagagcccttgtcatcgcacaggaactgctatcttcagagaaagcatacgtggagatgctccagcacttaaatctggatttccatggagctgtcatgagggccttggatgacatggaccatgaaggcagagacacattggcccgggaggagctgaggcagggcctgagtgaactcccagccatccacgaccttcatcaaggcatcctggaggagctggaggaaaggctgtcaaattgggagagccagcagaaggtagctgacgtcttcctggcccgggagcaggggtttgatcaccacgccactcacatcctgcagttcgacaggtacctaggtctgctcagtgagaattgcctccactctccccggctggcagctgctgtccgtgaatttgagcagagtgtacaaggaggcagccagactgcgaagcatcggctgctgcgggtggttcaacgcctcttccagtaccaagtgctcctcacagactatttaaacaacctttgtccggactccgccgagtacgacaacacacagggtgcactgagcctcatctccaaagtcacagaccgtgccaacgacagcatggagcaaggggaaaacctgcagaagctggtccacattgagcacagcgtccggggccaaggggatctcctccagccaggaagggagtttctgaaggaagggacgctgatgaaagtaacagggaaaaacagacggccccggcacctatttctgatgaacgatgtgctcctgtacacctatccccagaaggatgggaagtaccggctgaagaacacattggctgtggccaacatgaaggtcagccgccctgtgatggagaaagtgccctacgctctaaagattgagacttccgagtcctgcctgatgctgtctgcgagctcctgtgcagagagggacgagtggtatggctgtctgagcagagccctccctgaggactacaaggcccaggcgctggctgcattccaccatagcgtggagatacgagagaggctgggggttagccttggggagaggccccccaccctggtgcctgtcacacacgtcatgatgtgcatgaactgcggctgcgacttctccctcaccctgcggcgtcatcactgtcacgcctgtggcaagatcgtgtgccggaactgttcgcggaacaagtacccgctgaagtacctgaaggacaggatggccaaggtctgcgacggctgcttcggggagctgaagaagcggggcagggctgtcccgggcctgatgagagagcggcctgtgagcatgagcttcccgctgtcttcaccccgcttctcgggcagtgccttttcatccgtcttccagagcattaacccctcgaccttcaagaagcagaagaaagtcccttcagccctgacagaggtggctgcctctggagagggctctgccatcagtggctatctcagccggtgtaagaggggcaagcggcactggaagaagctctggtttgtcatcaaaggcaaagttctctacacctacatggccagtgaggacaaagtggccttggagagtatgcctctgctaggcttcaccattgctccagaaaaggaagagggcagcagtgaagtaggacctatttttcacctttaccacaagaaaaccctattttatagcttcaaagcagaagataccaattcagctcagaggtggatcgaggccatggaagatgcgagtgtgttatagcagttatcaagcatgtggacttgtaacaaattcttaggtcaatatgtgaatgcttttagaagctaagctgtggctcaactcatccggacacacacctggattcagcaatgaggcctgaccttttttgctataaccgccccaccactcccctgcccttgccaacatcttcatgaatggaatccttaagggatatttatggacctctccttttctgtgttttccacccctacccccacccgccacccagtaataaactatttccttaccccgcagtgagttaaaatttagtaagatgaagatgtggaaaccaatgaaaagtacatttagaaatgcaggctttttagtagaaagaagctcttacagtttttactcatgataaatcttatcacctttcaaaaattgattgtggtgcctcaggtgaaatgagaagctatcagtaacagctactctcatcgaaagcactttattattttacggagctgcaacctccaattttgtgttttctaagtgatttacttaagtcaataacagatggaatcctgtggactaatgtgccaccagttttctaacaagggtgtacataaaatggatttgtgcagacctggctgtggcttgctggtgtgcaagcacacatcactttagaggggctgcgccccaccagataggaaggggaggattttctcctccagtcgaccttgtgacctgtatactaacataacttattaaaggaggggtccctcctcccccagagcagtcctcaacactatgtcagtgctggaaatgcagccactggcagatctggccccccagacgtcaccgcagggcctctgaagagtcaaggtctgctttaatttattgtgtgcctttctgtgtttacctcactcaagctgacaacattgtttatgggaatctatccttcttttagacacacggtaatccttgggctgtattactgaaggctttttattttttgagaggtgaaaaaaagagaaaacaagttagactccaaaggtgaattcctggtcttggcagatggctctgggaacagcgagggagcacagaagtcgtggcctgaggctgttctatgggcacttggggctaaatcgcctcctgagggtgactgttgcttattctgctggacaggtttttacataaagcaaagggcatgtgaggggtgggattccttgttactcttactgcaataaaaatcaattgtttgat

SEQ ID NO: 573 - DNA, 2905 bp, Homo sapiens
  source 1..2905: mol_type = genomic DNA
gatgacgcaaaccgggaacagcggctgagcctgcgcttcggaagcatggatgtgcgcctgcgctgcgctagggcgcggcgggcggtttgaattttgcttacagagtcccgtctcaccatcctgggcttccaacggagactgcggtatccgcagctggagacccagcggcgagtagccttttgctcccggacggacttgagaggcttaaaggatggcctcgtcagatctggaacaattatgctctcatgttaatgaaaagattggcaatattaagaaaaccttatcattaagaaactgtggccaggaacctaccttgaaaactgtattaaataaaataggagatgagatcattgtaataaatgaacttctaaataaattggaattggaaattcagtatcaagaacaaaccaacaattcactcaaggaactctgtgaatctcttgaagaagattacaaagacatagaacatcttaaagaaaacgttccttcccatttgcctcaagtaacagtaacccagagctgtgttaagggatcagatcttgatcctgaagaaccaatcaaagttgaagaacctgaacccgtaaagaagcctcccaaagagcaaagaagtattaaggaaatgccatttataacttgtgatgagttcaatggtgttccttcgtacatgaaatcccgcttaacctataatcaaattaatgatgttattaaagaaatcaacaaggcagtaattagtaaatataaaatcctacatcagccaaaaaagtctatgaattctgtgaccagaaatctctatcacagatttattgatgaagaaacgaaggataccaaaggtcgttattttatagtggaagctgacataaaggagttcacaactttgaaagctgacaagaagtttcacgtgttactgaatattttacgacactgccggaggctatcagaggtccgagggggaggacttactcgttatgttataacctgagtcccttgtgaacttttgaacataccaacagggtatagagtatagaggctatttctataattttcttatatataatttttttaacttttaatcttttttgtttccttttttttttttttgagacaggatcttgctttgtcacccaggggcttgctttgtcacgcaggctagagtgcagtggcgcaaacatggctcactgcagcctcaacctcccaggctcaagtgatcctcccacctcagccccctgaatggctgggactacaagcgtgcgccaccatgcctggctaatttttgtattttttggagagatggggtttcaccatgttgcctaggctggtcttgagctcctgagctcaaacaatccaccctcctcagcctcccaaagtgctgggattacaggcttgagccaccacacctgacctattcttgtttcttataaaaataaaacttttttggataaagcttatttcttgtttttttctttttctttttttttttttttgagacagtctcgctctttcacccaggccggactgcagcggcgctatctcggctcactgcaaactctgcctcccaggttcacgccatcctcctgcctcagcctcctgagtagctgggactacaggcacctgccaccacgcccagctaattttttgtatttttagtagagatggggtttcaccgtgttagccaggatggtctcgatctcctgacctcatgatccgcccacctcggcctcccaaagtgctgggattacaggcgtgagccaccgcgcccggccaacttatatattttcaagattcacctcctctcaccaaatatttaactacctgctgaatacgcctctgtactaggcacataatggaactaaaaaatgctcatgtccagtttttgtgttgagtgaacaatgctgcagaccctaataagattgggtacagatcggcatgcgcctgtagtcccagctactcaggagaattgcttgaacctaggaggtggaggttgcagtgagccgagatcgtgccactgcactccagtctgggcaacagagcgagactccatctcagaaaaaaagaaaaaaagactgggtacagatgtgatattggaagaaaaagatcaagctgatgaggttaggatacccaggccctttggacttaaagatcactagtgtctaaattccatcgatggcatttcagtctataggtaaacttcctggaagctggatttggagacagtttatcatctgattattgggctttcgtataggtccttagggagcagcttacctgaaatgcatttagtgtacaccagtctgtaaacttcaacctgtaatgaaagtgtaataaatgtacattgagttgatgtgataatgtgatataataagaaatatatatttgatcttcctatctagttccttgttcagagctcctaaaacccttgtaatttccaaagtgatggagtacatcttttgttctagtatttggtctttgaccccagttcctgacacaaagctcctaaattcctttaaatttcccagtgataggagaattttttgttctaatgaggtcactcttgatgggcacctggataactcaggatgggggctgctcacaaagaccacatcatgattggaagtttcaaactttcagtctcccacctccagagaggggagaggggctggagatttgtgtcaataatccatcaggcctatgtcaacaagacataatccgttaactatggagttcagggagcttcagggttggcaaacattttgatgtgccaggaaggtgacgcactccagctttatgaagtcagcaagtcctgtgctcaggatgcttctggaccttgccccaggtaccccttcatgtggctgttgttcatctgtatcctttgtagtagccttaaaataaactgttaaacacaagtaaa

SEQ ID NO: 574 - DNA, 5526 bp, Homo sapiens
  source 1..5526: mol_type = genomic DNA
ctcctccgccccgcgcgccgtccctgcgccccgctccgcccgcgcctctctcccagcgccgcgcctcgggcgtaaagagcgcgcccctcgcaccgcagccagtgccgaccgcagcagcccagccccagccttcctccgcctccgcctctctctcctcctcctcctccgccgccggacacgcagccgcaggccgggaccgggacgcagctggggagtcagggacgcgcgcagccagcccttccccctccggctcccgcaccgccggccgcctcccctcgccctcctactctcccctccctgctccttcgctttttcctcctcctcctctcccggccccggctgccagcaccatgtccgcagggggagattttgggaatccactgagaaaattcaagttggtgttcttgggggagcagagcgtcgggaagacgtctctgattacgaggttcatgtacgacagcttcgacaacacataccaggcaaccattgggattgacttcttgtcaaaaaccatgtacttggaggaccgcacggtgcgactgcagctctgggacacagctggtcaggagaggttccgcagcctgatccccagctacatccgggactccacggtggctgtggtggtgtacgacatcacaaatctcaactccttccaacagacctctaagtggatcgacgacgtcaggacagagaggggcagtgatgttatcatcatgctggtgggcaacaagacggacctggctgataagaggcagataaccatcgaggagggggagcagcgcgccaaagaactgagcgtcatgttcattgagaccagtgcgaagactggctacaacgtgaagcagctttttcgacgtgtggcgtcggctctacccggaatggagaatgtccaggagaaaagcaaagaagggatgatcgacatcaagctggacaaaccccaggagcccccggccagcgagggcggctgctcctgctaatgcagagccgacctgtggcttcccatgacactccttgcttgttgtgttgcttcctattggctagcttcctaaggggggagggaaccgagttatcaagatgggaggatttttcttttctctctgtctttaggagtagggtgggatggggagggaggctgggcatcagggatcacatcactcttaacggctgttacttaaacaactattttttggtttggttgtaatatattgtactttattaagattgccaaaaactgttaaaatttaaaaaaaatttaaatcatgtgtatacaattttttgccagataaaaatgtagtcatttttatttgaaagatgtgctttttgtttttgtatatttgtaaacttatagagaaccttttccacacacctcctccttcctgttctctttgaaccattcatcacctctgccttcctcctatccccagcccaataaattaaaacaattaactgagcaaattaattaggcttcagtctggggccatctggccccactctctaggccctactccagttaaatcaaacattggttgaacacatcagcctctgaaaaggtagctctgactcttgtctttccatggccagagtgggtcgtcaacctcgtgtggagctgagaccaaggtctgtgggctctaggcagcccggcagcagcccccagaggaactgctcccacctctccttctctttccctgaaaagccttgaagggggttgagggtacaggcaaccttgtgttctctgtgccctcagggactggcagagcaagaggccatcagaaggacgaggtgctgttggcaattgcagctgcgtggtgcgtggtttatagactggggtgccatgtgtacttctgaaaatattttaaccagcccacccagcagtcagtacacatgcctgggccaagtctaagaaactcagtgtgtgatgttgggcagtgtgccatcctgaagccttcctcctggatgtcagggaagctggaccacctggagttgatcctctgtgatggggaggcgggggggggggggggtgttgtctgcagaaccaccaccttgaaagatccatgttcttagagcctcagctgctaatattgttgagtgctttctggaaaagctgatttgttgctatgttttcaccccagtggcatggcgcagttgaagtctttgtggacatatctttgtggctactgtggctgcgctgtggtcacctgaggatgtggttcaggtggggtctccagaaggctgcttgcccccagagagccatctcttccatttttgattcattcctgagaatggcttagtcctgagaatctgcaaagtctctgaagagaactctctcttcccactaagtgatataacctacttggccagcattccaaatagactcagactcactgccctgagcctgcacagagccaggtgcaatgggcagtgagtctggccaaaatgtaaaccccaccctccctgctgtcattggctctccctccaggctgctgctgggcatgtcatagatgggatgaatgaccatctggggtatggtgggctgaactccacaaggtcgttggaatgaattttgaaacttctcagaaattaatctgaaatggcaggcagtaagtgcagcagaatctggcaggactgatatttgtgcagtgggcctgccacacaccctctgcctaggaggctgtatgccagagctcatctctagcaaggaatttatcttcaggtgaagaagagaggaagcaggatcccactgagcacctcttgcagaaggcaaggaccaatgtttgaacgtgtttcagatgtcatgtgtttagtttttatatgtgtgtacataattatatatagagatagacttgtgtatacaccttccacaaacacatcctcacggagatacatgtgctcaatgtatattcttgtttctcctgctctcaagttggaacttgcattgtgataagttttggaaattcaaaagtactgcaacgtgttgaaataagaaatacttaatattgtcaaataacttgtgattgtcttgccatcaataaaataatgcatagttgtgttaaactacaggcaaacatagcccacgggaatatctccaccatttctctatgtactttatatgcacgggtgtgcatgcctgtgtgggccagtgtccccccaccatgggcacacccccaagtggtgcttgttggaagagtgcttacttacctcgagagaatttacaggagtccacatgacagtgtcctgcctggttggcagcgggggccatcacctgtggcctctgagaccgccccatttacaggaatctgcactgggtctcagtgaatgaacgtatggtagatttttattttcttggcactaaagattagcttttttaaaaaaacatcccataaaacagtagaaactcagttcccttctcaggggcacacacatccaaggcaccgtggactgtgtttccatcctggcctagaggagcagtaaaagatagcatttggtttgacatggccttagtgagtcctgcctttcctagcatgcacacaacatcctctctttgagtttgggttctccccagccccttggcctctgaggctgagggtggcttcctcccatcctcccatctcagtggttccatggcgctcccttcggcacgtgcggtttccgcccctcccttcctggggtgtggaaaggcagccagacctctttttcagaagttgttggttccctgatttttgtcttgagcaggcaccatccctgtccccttgcttgcaggtagaattggcacagagttaaggttccataataaactgttaggtgctcttgaagaagatgtcatggcattgcctcagcaccccagcaagagcattgcatctttgctgaatccagatgggttagcagagggcaaattggaggattcctttgaggaaatgttctcaattgagcaattcagtccctctccccaaagactagacgtgacctggcagattagcaggatcctcttggccttcttttttggggatggtgggagtgaagggggtgaatcttaaaagcttatcaacaaagctcctgttctgcaggcatcaggaaagttgagtgtaagatggaaaaagcaaacagcctatttacaagtggaaacacattggttctgatcactcctaacttgctgggtgatcatacatacatcaacatgaaggtgtgacatcagaatcatgagcaccatggctgcagttgtgtgatccaaggctagttggcttggtagctgttggcagcagtttcccttggtcagaggcctccttgctatctatcgctgctctcttcttgtcatccttaaacattcagtcatgttcccaggtctgaggggagcaatggccagaccagtttcagtatctctggcaacagaaacaaggattgaaatggtggtagttaagagtgcagacacatctggggtgcaacgtctgcatcatcctggtggctagccagtgcggggaggccctgccctgggataccagttgtgacaataaagggatggccctcctggcttcagcatcctgcaggtagagcagcctcattccttcacaagatggaaggcaggtgaggatgtcaggatgagatgggaccaggtagccgaggacagtgaggcatgtctgagccacttgaggggcagctgaacagaaggatgtctgtgtgcatcaaccgagcagattgtgcgcacactcgtttccgaactgcctctccccaaagaatgtgaggcattgtcaccttgttacagctatgtgaagcagagctgtcacaacttttcctgtctacaggcaggaaaaccaggatggagaagggcaacttgcttattaagatcacccagcaagttaggagtgatcagaaccagtgaagtttccatttttcatccattgctgccctgtgtgtgaacaaatgtgactccatatttattacacagcaaggactgctgtgtgtgggtgtgttcctcagaccatctctactctttttggttaggacactaggttcttcccagcatatgagtgagaatattggtggtattttgggctcctctactgcacaagggccagtccccaagtctactctgattgattgtcatgggcacccacacagatcaggacaccctttgaatttttgtttgacatgaactatttaggtgttccaaaaccttgggatctcaatgtgcaaactccttggactccagacccctgtctggttggcactcccagcagtgtgtggtttcatcaggaaatccttgcagcaggggtttagatggttccttcaggaggtgggaagcctccatagcattgaaggccagcctgcatctcgcggtgtgtgtccacttctcccctcactttcccctcacccatccctttaaagtgattggctgtgaggagcacagagggtggcaattccatctgttatgggctcagaagacatagccgccatgttgatttcacattaaactgtgtaaaatgtggaaaagactcagcatgttggtcaaacaataaactgtcctaattctcaaaa

SEQ ID NO: 575 - DNA, 3973 bp, Homo sapiens
  source 1..3973: mol_type = genomic DNA
aagcagcccgcggaccggcagcaaaggaacgtgcgaacgcgtgacgccgcccgactggctcgcgctctcccgtgccccggcgtcctccgcccgctcatggcccgggccgccgcggacgagcggcgctgaggcgggccgcgtggagacgtgaggcggccgccgtggccctcacagtcggcgtttcgccgcctgcccgcggtgcccgcgcacgccggccgccatcgccttcgcgcctggctggcgggggcgctgtcctcccaggccgtccgcgccgctccctggagctcggcggagcgcggcagccagggccggcggaggcgcgaggagccgggcgccaccgccgccgccgccgccgccgccgcgggggccatgaccgtggagcagaacgtgctgcagcagagcgcggcgcagaagcaccagcagacgtttttgaatcaactgagagaaattacggggattaatgacacccagatactacagcaagccttgaaggatagtaatggaaacttggaattagcagtggctttccttactgcgaagaatgctaagacccctcagcaggaggagacaacttactaccaaacagcacttcctggcaatgatagatacatcagtgtgggaagccaagcagatacaaatgtgattgatctcactggagatgataaagatgatcttcagagagcaattgccttgagtttggccgaatcaaacagggcattcagggagactggaataactgatgaggaacaagccattagcagagttcttgaagccagcatagcagagaataaagcatgtttgaagaggacacctacagaagtttggagggattctcgaaacccttatgatagaaaaagacaggacaaagctcccgttgggctaaagaatgttggcaatacttgttggtttagtgctgttattcagtcattatttaatcttttggaatttagaagattagttctgaattacaagcctccatcaaatgctcaagatttaccccgaaaccaaaaggaacatcggaatttgccttttatgcgtgagctgaggtatctatttgcacttcttgttggtaccaaaaggaagtatgttgatccatcaagagcagttgaaattcttaaggatgctttcaaatcaaatgactcacagcagcaagatgtgagtgagtttacacacaaattattagattggttagaagatgccttccaaatgaaagctgaagaggagacggatgaagagaagccaaagaaccccatggtagagttgttctatggcagattcctggctgtgggagtacttgaaggtaaaaaatttgaaaacactgaaatgtttggtcagtacccacttcaggtcaatgggttcaaagatctgcatgagtgcctagaagctgcaatgattgaaggagaaattgagtctttacattcagagaattcaggaaaatcaggccaagagcattggtttactgaattaccacctgtgttaacatttgaattgtcaagatttgaatttaatcaggcattgggaagaccagaaaaaattcacaacaaattagaatttccccaagttttatatttggacagatacatgcacagaaacagagaaataacaagaattaagagggaagagatcaagagactgaaagattacctcacggtattacaacaaaggctagaaagatatttaagctatggttccggtcccaaacgattccccttggtagatgttcttcagtatgcattggaatttgcctcaagtaaacctgtttgcacttctcctgttgacgatattgacgctagttccccacctagtggttccataccatcacagacattaccaagcacaacagaacaacagggagccctatcttcagaactgccaagcacatcaccttcatcagttgctgccatttcatcgagatcagtaatacacaaaccatttactcagtcccggatacctccagatttgcccatgcatccggcaccaaggcacataacggaggaagaactttctgtgctggaaagttgtttacatcgctggaggacagaaatagaaaatgacaccagagatttgcaggaaagcatatccagaatccatcgaacaattgaattaatgtactctgacaaatctatgatacaagttccttatcgattacatgccgttttagttcacgaaggccaagctaatgctgggcactactgggcatatatttttgatcatcgtgaaagcagatggatgaagtacaatgatattgctgtgacaaaatcatcatgggaagagctagtgagggactcttttggtggttatagaaatgccagtgcatactgtttaatgtacataaatgataaggcacagttcctaatacaagaggagtttaataaagaaactgggcagccccttgttggtatagaaacattaccaccggatttgagagattttgttgaggaagacaaccaacgatttgaaaaagaactagaagaatgggatgcacaacttgcccagaaagctttgcaggaaaagcttttagcgtctcagaaattgagagagtcagagacttctgtgacaacagcacaagcagcaggagacccagaatatctagagcagccatcaagaagtgatttctcaaagcacttgaaagaagaaactattcaaataattaccaaggcatcacatgagcatgaagataaaagtcctgaaacagttttgcagtcggcaattaagttggaatatgcaaggttggttaagttggcccaagaagacaccccaccagaaaccgattatcgtttacatcatgtagtggtctactttatccagaaccaggcaccaaagaaaattattgagaaaacattactagaacaatttggagatagaaatttgagttttgatgaaaggtgtcacaacataatgaaagttgctcaagccaaactggaaatgataaaacctgaagaagtaaacttggaggaatatgaggagtggcatcaggattataggaaattcagggaaacaactatgtatctcataattgggctagaaaattttcaaagagaaagttatatagattccttgctgttcctcatctgtgcttatcagaataacaaagaactcttgtctaaaggcttatacagaggacatgatgaagaattgatatcacattatagaagagaatgtttgctaaaattaaatgagcaagccgcagaactcttcgaatctggagaggatcgagaagtaaacaatggtttgattatcatgaatgagtttattgtcccatttttgccattattactggtggatgaaatggaagaaaaggatatactagctgtagaagatatgagaaatcgatggtgttcctaccttggtcaagaaatggaaccacacctccaagaaaagctgacagattttttgccaaaactgcttgattgttctatggagattaaaagtttccatgagccaccgaagttaccttcatattccacgcatgaactctgtgagcgatttgcccgaatcatgttgtccctcagtcgaactcctgctgatggaagataaactgcacactttccctgaacacactgtataaactctttttagttcttaacccttgccttcctgtcacagggtttgcttgttgctgctatagtttttaacttttttttattttaataactgcaaaagacaaaatgactatacagactttagtcagactgcagacaataaagctgaaaatcgcatggcgctcagacattttaaccggaactgatgtataatcacaaatctaattgattttattatggcaaaactatgcttttgccaccttcctgttgcagtattactttgcttttatcttttctttctcaacagctttccattcagtctggatccttccatgactacagccatttaagtgttcagcactgtgtacgatacataatatttggtagcttgtaaatgaaataaagaataaagttttatttatggctaccta

SEQ ID NO: 576 - DNA, 5216 bp, Homo sapiens
  source 1..5216: mol_type = genomic DNA
aagcagcccgcggaccggcagcaaaggaacgtgcgaacgcgtgacgccgcccgactggctcgcgctctcccgtgccccggcgtcctccgcccgctcatggcccgggccgccgcggacgagcggcgctgaggcgggccgcgtggagacgtgaggcggccgccgtggccctcacagtcggcgtttcgccgcctgcccgcggtgcccgcgcacgccggccgccatcgccttcgcgcctggctggcgggggcgctgtcctcccaggccgtccgcgccgctccctggagctcggcggagcgcggcagccagggccggcggaggcgcgaggagccgggcgccaccgccgccgccgccgccgccgccgcgggggccatgaccgtggagcagaacgtgctgcagcagagcgcggcgcagaagcaccagcagacgtttttgaatcaactgagagaaattacggggattaatgacacccagatactacagcaagccttgaaggatagtaatggaaacttggaattagcagtggctttccttactgcgaagaatgctaagacccctcagcaggaggagacaacttactaccaaacagcacttcctggcaatgatagatacatcagtgtgggaagccaagcagatacaaatgtgattgatctcactggagatgataaagatgatcttcagagagcaattgccttgagtttggccgaatcaaacagggcattcagggagactggaataactgatgaggaacaagccattagcagagttcttgaagccagcatagcagagaataaagcatgtttgaagaggacacctacagaagtttggagggattctcgaaacccttatgatagaaaaagacaggacaaagctcccgttgggctaaagaatgttggcaatacttgttggtttagtgctgttattcagtcattatttaatcttttggaatttagaagattagttctgaattacaagcctccatcaaatgctcaagatttaccccgaaaccaaaaggaacatcggaatttgccttttatgcgtgagctgaggtatctatttgcacttcttgttggtaccaaaaggaagtatgttgatccatcaagagcagttgaaattcttaaggatgctttcaaatcaaatgactcacagcagcaagatgtgagtgagtttacacacaaattattagattggttagaagatgccttccaaatgaaagctgaagaggagacggatgaagagaagccaaagaaccccatggtagagttgttctatggcagattcctggctgtgggagtacttgaaggtaaaaaatttgaaaacactgaaatgtttggtcagtacccacttcaggtcaatgggttcaaagatctgcatgagtgcctagaagctgcaatgattgaaggagaaattgagtctttacattcagagaattcaggaaaatcaggccaagagcattggtttactgaattaccacctgtgttaacatttgaattgtcaagatttgaatttaatcaggcattgggaagaccagaaaaaattcacaacaaattagaatttccccaagttttatatttggacagatacatgcacagaaacagagaaataacaagaattaagagggaagagatcaagagactgaaagattacctcacggtattacaacaaaggctagaaagatatttaagctatggttccggtcccaaacgattccccttggtagatgttcttcagtatgcattggaatttgcctcaagtaaacctgtttgcacttctcctgttgacgatattgacgctagttccccacctagtggttccataccatcacagacattaccaagcacaacagaacaacagggagccctatcttcagaactgccaagcacatcaccttcatcagttgctgccatttcatcgagatcagtaatacacaaaccatttactcagtcccggatacctccagatttgcccatgcatccggcaccaaggcacataacggaggaagaactttctgtgctggaaagttgtttacatcgctggaggacagaaatagaaaatgacaccagagatttgcaggaaagcatatccagaatccatcgaacaattgaattaatgtactctgacaaatctatgatacaagttccttatcgattacatgccgttttagttcacgaaggccaagctaatgctgggcactactgggcatatatttttgatcatcgtgaaagcagatggatgaagtacaatgatattgctgtgacaaaatcatcatgggaagagctagtgagggactcttttggtggttatagaaatgccagtgcatactgtttaatgtacataaatgataaggcacagttcctaatacaagaggagtttaataaagaaactgggcagccccttgttggtatagaaacattaccaccggatttgagagattttgttgaggaagacaaccaacgatttgaaaaagaactagaagaatgggatgcacaacttgcccagaaagctttgcaggaaaagcttttagcgtctcagaaattgagagagtcagagacttctgtgacaacagcacaagcagcaggagacccagaatatctagagcagccatcaagaagtgatttctcaaagcacttgaaagaagaaactattcaaataattaccaaggcatcacatgagcatgaagataaaagtcctgaaacagttttgcagtcgatcatgatgacaccgaacatgcaaggtattatcatggcgataggtaaatccaggagtgtatatgacaggtgtggccctgaagcagggttctttaaggcaattaagttggaatatgcaaggttggttaagttggcccaagaagacaccccaccagaaaccgattatcgtttacatcatgtagtggtctactttatccagaaccaggcaccaaagaaaattattgagaaaacattactagaacaatttggagatagaaatttgagttttgatgaaaggtgtcacaacataatgaaagttgctcaagccaaactggaaatgataaaacctgaagaagtaaacttggaggaatatgaggagtggcatcaggattataggaaattcagggaaacaactatgtatctcataattgggctagaaaattttcaaagagaaagttatatagattccttgctgttcctcatctgtgcttatcagaataacaaagaactcttgtctaaaggcttatacagaggacatgatgaagaattgatatcacattatagaagagaatgtttgctaaaattaaatgagcaagccgcagaactcttcgaatctggagaggatcgagaagtaaacaatggtttgattatcatgaatgagtttattgtcccatttttgccattattactggtggatgaaatggaagaaaaggatatactagctgtagaagatatgagaaatcgatggtgttcctaccttggtcaagaaatggaaccacacctccaagaaaagctgacagattttttgccaaaactgcttgattgttctatggagattaaaagtttccatgagccaccgaagttaccttcatattccacgcatgaactctgtgagcgatttgcccgaatcatgttgtccctcagtcgaactcctgctgatggaagataaactgcacactttccctgaacacactgtataaactctttttagttcttaacccttgccttcctgtcacagggtttgcttgttgctgctatagtttttaacttttttttattttaataactgcaaaagacaaaatgactatacagactttagtcagactgcagacaataaagctgaaaatcgcatggcgctcagacattttaaccggaactgatgtataatcacaaatctaattgattttattatggcaaaactatgcttttgccaccttcctgttgcagtattactttgcttttatcttttctttctcaacagctttccattcagtctggatccttccatgactacagccatttaagtgttcagcactgtgtacgatacataatatttggtagcttgtaaatgaaataaagaataaagttttatttatggctacctatgtgtttgtaagcaggtatattgtatattagtgtattagtaatactagataaatgaattttgtctggggattaagattggatagttaatagattaatacaatcttttaattctgctctaatgctagcaaattggaaaatgtttaagtctttgacacttaaatttatctatatttttaacaaagttcttgaacttagtatggcaccggaacctgttttgaattcagtcaggtttttactcaagtaagtggttgattttttttaagtcaaactacactgaaacttttatccttttcttagattaatcttactttttaaatgtatttacaatatacagcaaggtgattatttcaagagaatcccaaagtacttgaataagggctattgtaaaatttaaaagaaatatttatatatacacatatatacacatacacacatgtatatatatattcttcataatggaggacaatgttttgcaatatataaatcattctatttttgtaaattgtatatcactttaattgaaaatgttctctactaattaatactgtgaaacaaaattgatgttgtttaactagaagttatgagtatcttaactgcctttattccttttcaaaaaggaaaaagctgtagaacattttgtagatgaaactactgtttaagattaatgaattaatattgtgaatgaaaatcaaaatccatactttaaaggtaatcatgttactaacaacctatttttgaattcataaaaatttctttataaatgatgttttgtgaacatagtaaaatagaccattatactatgtgtatgtttgatacagcgtcgccaaaactagtgttctttattagtgcctctcacaaaagatcctggatggaggagtaagatgaaatattatgctattatatgatgctgtttgtaaaggtattaatgtactagtaaggtgttaatgacaaggaattagtactattcctgttgtaaagttagattttgcatattgtatctatcaaaatatgtttgggtttagattttaagttgtctactgagcagatttctgcattggttttccagtcctgttaaaagtttagaaacttcatatgtgtcatcacagcttttgtaaagaaagtatccttaatattttatgacattct

SEQ ID NO: 577 - DNA, 6354 bp, Homo sapiens
  source 1..6354: mol_type = genomic DNA
aggcgggtctgaggtttggtgactgcggggcaggccgggggcagctgtctgtctggctctttttgacagcccccagtgcgaaaggctgccagcatgtcatcagtgagccccatccagatccccagtcgcctcccgctgctgctcacccacgagggcgtcctgctgcccggctccaccatgcgcaccagcgtggactcggcccgcaacctgcagctggtgcggagccgccttctgaagggcacgtcgctgcaaagcaccatcctgggcgtcatccccaacacgcctgaccccgccagcgacgcgcaggacctgccgccgctgcacaggattggcacagctgcactggccgttcaggttgtgggcagtaactggcccaagccccactacactctgttgattacaggcctatgccgtttccagattgtacaggtcttaaaagagaagccatatcccattgctgaagtggagcagttggaccgacttgaggagtttcccaacacctgtaaaatgagggaggagctaggagaactatcagagcagttttacaaatatgcagtacaattggttgaaatgttggatatgtctgtccctgcagttgctaaattgagacgtcttttagatagtcttccaagggaagctttaccagacatcttgacatcaattatccgaacaagcaacaaagagaaactccagattttagatgctgtgagcctagaggagcggttcaagatgactataccactgcttgtcagacaaattgaaggcctgaaattgcttcaaaaaaccagaaaacccaagcaagatgatgataagagggttatagcaatacgccctattaggagaattacacatatctcaggtactttagaagatgaagatgaagatgaagataatgatgacattgtcatgctagagaaaaaaatacgaacatctagtatgccagagcaggcccataaagtctgtgtcaaagagataaagagactcaaaaaaatgcctcagtcaatgccagaatatgctctgactagaaattatttggaacttatggtagaacttccttggaacaaaagtacaactgaccgcctggacattagggcagcccggattcttctggataatgaccattacgccatggaaaaattgaagaaaagagtactggaatacttggctgtcagacagctcaaaaataacctgaagggcccaatcctatgctttgttggccctcctggagttggtaaaacaagtgtgggaagatcagtggccaagactctaggtcgagagttccacaggattgcacttggaggagtatgtgatcagtctgacattcgaggacacaggcgcacctatgttggcagcatgcctggtcgcatcatcaacggcttgaagactgtgggagtgaacaacccagtgttcctattagatgaggttgacaaactgggaaaaagtctacagggtgatccagcagcagctctgcttgaggtgttggatcctgaacaaaaccataacttcacagatcattatctaaatgtggcctttgacctttctcaagttctttttatagctactgccaacaccactgctaccattccagctgccttgttggacagaatggagatcattcaggttccaggttatacacaggaggagaagatagagattgcccataggcacttgatccccaagcagctggaacaacatgggctgactccacagcagattcagataccccaggtcaccactcttgacatcatcaccaggtataccagagaggcaggggttcgttctctggatagaaaacttggggccatttgccgagctgtggccgtgaaggtggcagaaggacagcataaggaagccaagttggaccgttctgatgtgactgagagagaaggttgcagagaacacatcttagaagatgaaaaacctgaatctatcagtgacactactgacttggctctaccacctgaaatgccgattttgattgatttccatgctctgaaagacatccttgggcccccgatgtatgaaatggaggtatctcagcgtttgagtcagccaggagtagcaataggtttggcttggactcccttaggtggagaaatcatgttcgtggaggcgagtcgaatggatggcgagggccagttaactctgaccggccagctcggggacgtgatgaaggagtccgcccacctcgctatcagctggctccgcagcaacgcaaagaagtaccagctgaccaatgcttttggaagttttgatcttcttgacaacacagacatccatctgcacttcccagctggagctgtcacaaaagatggaccatctgctggagttaccatagtaacctgtctcgcctcactttttagtgggcggctggtacgttcagatgtagccatgactggagaaattacactgagaggtcttgttcttccagtgggtggaattaaagacaaagtgctggcggcacacagagcgggactgaagcaagtcattattcctcggagaaatgaaaaagaccttgagggaatcccaggcaacgtacgacaggatttaagttttgtcacagcaagctgcctggatgaggttcttaatgcagcttttgatggtggctttactgtcaagaccagacctggtctgttaaatagcaaactgtaggtccaaatctcaattttttagaattttaagttatgaagtgctcaaaggtactgacacagttgattttattcacaccattaggggtatgcaagatgtccctgttttataaacataatcacaacagtaataaacctcaagtagtggctagtgtttagtatagaaatataagatgttgatttagtaaactgataaaaatcgaattcttgtctttttagtgggatccttactgtccctggaaagatatagcatagtggttctcagcacagtctccagaacagaagcatctgtagtacctggtaacttgttagaaatgtacattctcaggctccacagcaggccgcctgaatcaaatcctgggaggtggggacagaaatctgtgttttaagaagccttccaggtaattctgctgcacactcaagttcaggaaccaccggtatagaccattaccttagtggatttacctgtagagtttattggatcctgaaaccaatcaattacttagaactaggcaaagatgaaagtatagccaactattcttggctatatatatatattcaagtgggccgggcgtgatggctcacacctgtaattccagcactttgggaggtcgaggtaggcagatcaccgagcccaagagttcaagacaatcctggccaacggcgaaactctgtctctacaaaaaatatacaggcgtgttagcatgtgcctgtaatcccagcttcttgggaagctgaggcacaagaattgcctgaacccaggaggtggaggttgcagtgagctgggatcgcgccattgcactccagcctggctgacagagcgagactgtctctaaaaaaaaaagactcaagtggaccctacaatgaagcctacacatcccaatagaagccccttcttatgctgagggaagcagccctcagaacatgatagcttgtatccagcagagtggcacgtgctggcacacctcacagaagcaccctggccctggatgcctgcaacctcagaagagtgcagctcccagagggaggcagccatccatctgggatggtcctaagcatggaatcctaactcctgattccgtctcctatttcttgcttggctacgccagttcccaaatctggtagatgtccatgcccatgtgctcctgctgggactcaattcaggctatgtatgactatgaagtcaggctcatctgcttactggctgtgtgaactttttgtatcttggttttcttcatccatgaaatccaagtaatactacctaattgttactgtggagattaagttcaaatgcaatgtatagtaatattaagcaatttctagttattattctagccagtaatggacttcagaatcttttattacacaatataagaatatgtatgtaaagacattttggaatttcctggatgagaaggaagtctgggctgggcatggtggctcacgcctgtaaccctagcactttaggaaatcgaggcgagtggatcacttaagctcaggagttcaaggccagcctgggcaacatggcaaaaccccatttctacaaaaaatacaaaaattagctgggcatggtggcacccgcctgtagtccagctacttgaggctgagatgggaggatgagggaggtcggggctgcagtgagccaagatcacgccactgcactccagcaccctgggcgacagagtgagaccctgtctcaaaaaaaaaaaaaaaaaaaaagattgggccaaaatactgtgataaaatagcaggcctgctgataaaagtttatctgaatgcattgagaggaaaagtccagacctaggactagttatggcagttggagagaaagaacatcgggatgtttgaaaatatgccattgactatcttaactactgtaattttatcatttccaacgtcatctaactggggactagaacaaactgtgaattcactttcagcaaccagagggcgctaatccacacccacatcgctctgccctgttccacccagcaggggcaacaaggatataacttggggttctcggtattcttcctttagtcctgacacaggcagccttgcactttgtagcagcaggagggcacttgctttaagcatatctttcgaaaggcatccattgagagaataatgcattctccccttgctgtgtatgacatggaacagtatgaccattgcactagctttgtttttggtttgttttgttttttttttaattccaggggtgggaggttggttggttgaagtctaagctcttcctttttcacctgggttttttttttttggggggggtggggggttaggggtggggcgggtggggaagagccaaaattttaaccatttttaagcatataatttgggggtatcagttactggatctaagcatgtccactctacacgctttttttttttttttttttttttttttttgagatggagtcttgctctgttacccaggctgcactgcagtggcatgatctcggctcactgcaacctctgcctccccagttcaagcaattctcatgcctcagcctcccaagtagctgggaccacaggtgtgtgccaccacgcccagctaatttttgtattttttagtagagacagggtttcaccatgttggccaggctggtctcaaactcccaacctcaaatgatccggccaccttggcctcccaaaatgctggcattacaggcgtgagccaccacacccggcttacatgcattttttatcaccacaaactgaaactctgtacccactgaaaaagagctccaaattccaccctcaccccagaccctggtaaccactatttcactttctttctgaatttcccttcatatgagtgggatcaaacaagagttgtccttttgtgtttagcattcttacttagcaagccatcaactgctcgaacagtcactggggcaactacttttcgcccagtgtcctccagaaaagaaagatctggagggtcaggccactctttttcttcaaaataatggggtgcagaagggtagggatgaacctcttcctcctttgccactttagctttagctcaaaggaactccaactttttattatttgcaacagttagctttctttgtttcacatctctgccttgcagaaccatgacctatcaaggtgttttgtcaaacaaaaactaatactttccctgggaaaaagccatgtggtagcaagtaccagaaatttttatggccaaataatacaccactatatccatagaccgcatttggtttatccactcatctgctgattgtttccccctcttgggtattatgagtaatgctatgaacatgggtgtacacatctctcttgaagtcccttcttaggtcctttagggatacatatccaggagcagaactactagatcacatatgctaaggtctgaatgtccccccaccaaattcgtatgttgaagcaaccaccaacgtgataggtgaggctttaggaggtgattatgtcatgagagctccatcctcattaatggatttagtgcctttataaaggggctcaagggaaccaattacctcctttttgcccttcgattcccttccaccatatgaggacacagcaacaggccccgtcctagaagctgagactgggccctcaatagatgataccagtctgccagcacgctgatcgtgggcttctcagtcttcacaactatgagaaataaattcgtacttttaaatta

SEQ ID NO: 578 - DNA, 1286 bp, Homo sapiens
  source 1..1286: mol_type = genomic DNA
caccaccgcccctgccgccatcgccacctccgccgctgccgccttggggccctcctccttcaccgcccccttcaccacctctacacgttctaggccttctgtcctggagaagaagctatagtcgttctcccttgtgggcccggggcgcagccatggcggacggcggcggcggcgggggaactggcgcggtgggcggcggcggaactagccaggcctctgccggggcagcgactggcgctactggggccagcgggggcggtggccccatcaacccggcctcgctgcctcccggcgacccgcagctcatcgctctcatcgtggagcagctcaagagccggggcctttttgacagcttccgccgggactgcctggccgacgtggacaccaagccagcttaccaaaacctgaggcagaaagtggataattttgtgtcaacacatctggacaagcaggaatggaatcctacgatgaacaaaaaccagttgcgaaatggtctgaggcagagtgtggttcaaatacgccagacaccttttgaaagctaatttttggtgaagaaatggattcggttacataagagtgcaacttcagactgaagataggccaaggtcgtcactgatctcaagatttcaaccttgaccatgggcagtgaccagattgaaaggggagcaagttcggcagtgggagagttgaccgtgtcaccccctgcattgtgctgccatttggccagcctgtccaagggcatgacaccaagtagacactacagagagagaaacactacagcaacccagggttgtcctgaaacagacttttatacttgaacatggagactgcacatggactttagggtttgtgctgtgggataaacggaagctacagtgagaacatagccagtcccaaagacaatttcaaagaaaaatgacagtaaagattagctgggagtagtctttgacagtgcttatttgatactgtctctcagagtttgcaaaccagattgtacaagtcattagcgtcagatagctttaaagttgtgaccttcttgtacatgaatcttctagccagtttcctttcctttgtaacgaaacatgaaatcctagaatgtatgagaagttcagacattaggcataaggaaactcgtttgcaggctctctgtccagggctgcttcctgtcctggaggggccagtgagtcttaggtatgtttattttattctcacatttgtgtttttttagaaaagtgaatggtcaataaatggcttatctttcataataaaattatttgatactttta

SEQ ID NO: 579 - DNA, 1785 bp, Homo sapiens
  source 1..1785: mol_type = genomic DNA
cgagccggcaaaggcttgggtgtgagacagcagcggtggcagacaccgcagaagcaaagagcagtgaggctcctgcattcgggtggagcaccatggacgaagctggcagctctgcgagcggcgggggcttccgcccgggcgtggacagcctggacgaaccgcccaacagccgcatcttccttgtgatcagcaagtacacacctgagtcggtgctgagggagcgcttctcgccttttggcgacatccaggacatctgggtggtgcgggacaagcacaccaaggagtccaagggcattgctttcgtcaagttcgcccgcagctcacaggcctgcagggccatggaggagatgcatggccagtgcctcggccccaacgacaccaagcccatcaaggttttcattgctcagtcccgatcatctggaagtcaccgagatgttgaagatgaagaacttacaagaatctttgttatgataccaaagtcctacacagaagaagatctgcgggaaaaatttaaggtgtatggagatatcgagtattgcagcattattaagaataaagtgactggagaaagtaaaggtttgggctacgtacgatacttaaaaccatcacaagctgcccaagcaatagaaaactgtgatcgaagttttagagcaatcttggctgaacctaaaaataaagcatctgaatcctctgaacaagattattatagtaatatgaggcaagaagctttgggacatgaacctagagtaaatatgtttccatttgaacaacaatctgaattttcaagttttgacaagaatgatagccgaggccaggaagcaatctccaaacgcttgtcagttgtatcaagagttcctttcactgaagaacagcttttcagcatttttgatatagtaccaggattggaatattgtgaagttcaacgagatccttattcaaattatggtcatggagtggttcagtattttaatgtagcatcagctatttatgcaaaatacaaattacatggatttcagtaccctcctgggaaccgaataggtgtttccttcattgatgatggaagtaatgcaacagatctccttagaaaaatggcaacacagatggtagctgcacagcttgcatcaatggtgtggaataacccaagtcagcaacaatttatgcaatttggaggaagctctggatcacagttgcctcaaatccagacagatgttgtacttccatcatgcaaaaaaaaagctcctgctgaaactcctgtgaaagaaagactttttattgtgtttaatcctcatcctttacctttagacgtattagaagatatattctgtcgttttggtaacctgatcgaagtttaccttgtgtcaggaaaaaatgtggggtatgccaagtatgccgatagaataagtgctaatgatgccattgccactctacatggaaagattctgaatggggtgagacttaaagttatgctggcagattcgccaagagaagaatctaacaaacggcaaagaacttactgattcttgagaacaaagactaaataatgacataatcctcagctgactgactgaaaatgtgactggacgcattccctgtggacagttgacagctttttttttttccatatacctgatagtctgtgtacagcattgttttgtctgggaagcagggattgctgacatgtatttttgaatccatacattaatgctaaaacgaatatagtagttgttccttagagcaatatgttgttacgtgtagcagaaataaagttttctttgcttaactaaa

SEQ ID NO: 580 - DNA, 2903 bp, Homo sapiens
  source 1..2903: mol_type = genomic DNA
ggcggcggagccgactcgtcgcggccgaggcgcgcgcggtccgtgccggcgtcagtctgggattggccggcccgcgacttcctccgccccctgccaatcgccggggacgacttccgtgggtttttccggctcccccgcgtcgctaaggagcgacgggctgtcggccagaccccgagttctcggtgcgctcagcggccgccgacgctaggaggccgcgctccgcccccgctaccatgaggccccggaaagccttcctgctcctgctgctcttggggctggtgcagctgctggccgtggcgggtgccgagggcccggacgaggattcttctaacagagaaaatgccattgaggatgaagaggaggaggaggaggaagatgatgatgaggaagaagacgacttggaagttaaggaagaaaatggagtcttggtcctaaatgatgcaaactttgataattttgtggctgacaaagacacagtgctgctggagttttatgctccatggtgtggacattgcaagcagtttgctccggaatatgaaaaaattgccaacatattaaaggataaagatcctcccattcctgttgccaagatcgatgcaacctcagcgtctgtgctggccagcaggtttgatgtgagtggctaccccaccatcaagatccttaagaaggggcaggctgtagactacgagggctccagaacccaggaagaaattgttgccaaggtcagagaagtctcccagcccgactggacgcctccaccagaagtcacgcttgtgttgaccaaagagaactttgatgaagttgtgaatgatgcagatatcattctggtggagttttatgccccatggtgtggacactgcaagaaacttgcccccgagtatgagaaggccgccaaggagctcagcaagcgttctcctccaattcccctggcaaaggtcgacgccaccgcagaaacagacctggccaagaggtttgatgtctctggctatcccaccctgaaaattttccgcaaaggaaggccttatgactacaacggcccacgagaaaaatatggaatcgttgattacatgatcgagcagtccgggcctccctccaaggagattctgaccctgaagcaggtccaggagttcctgaaggatggagacgatgtcatcatcatcggggtctttaagggggagagtgacccagcctaccagcaataccaggatgccgctaacaacctgagagaagattacaaatttcaccacactttcagcacagaaatagcaaagttcttgaaagtctcccaggggcagttggttgtaatgcagcctgagaaattccagtccaagtatgagccccggagccacatgatggacgtccagggctccacccaggactcggccatcaaggacttcgtgctgaagtacgccctgcccctggttggccaccgcaaggtgtcaaacgatgctaagcgctacaccaggcgccccctggtggtcgtctactacagtgtggacttcagctttgattacagagctgcaactcagttttggcggagcaaagtcctagaggtggccaaggacttccctgagtacacctttgccattgcggacgaagaggactatgctggggaggtgaaggacctggggctcagcgagagtggggaggatgtcaatgccgccatcctggacgagagtgggaagaagttcgccatggagccagaggagtttgactctgacaccctccgcgagtttgtcactgctttcaaaaaaggaaaactgaagccagtcatcaaatcccagccagtgcccaagaacaacaagggacccgtcaaggtcgtggtgggaaagacctttgactccattgtgatggaccccaagaaggacgtcctcatcgagttctacgcgccatggtgcgggcactgcaagcagctagagcccgtgtacaacagcctggccaagaagtacaagggccaaaagggcctggtcatcgccaagatggacgccactgccaacgacgtccccagcgaccgctataaggtggagggcttccccaccatctacttcgcccccagtggggacaaaaagaacccagttaaatttgagggtggagacagagatctggagcatttgagcaagtttatagaagaacatgccacaaaactgagcaggaccaaggaagagctttgaaggcctgaggtctgcggaaggtgggaggaggcagacgccctgcgtggcccatggtcggggcgtccacgccgaggccggcaacaaacgacagtatctcggattcctttttttttttttttaattttttatactttggtgtttcacttcatgctctgaatactgaataaccatgaatgactgaatagtttagtccagatttttacagaggatacatctatttttatcattatttggggtttgaaaaatttttttttacaccttctaatttctttatttctcaaagcagataattcttctgtgtgaaaatgttttctttttttaatttaaggtttaaaattccttttccaaatcatgttgattttgctctttgctttttcgttgtctgagaaattgttggcgtagatttggcttctggtatgtgtttctgattgcttcctgttgagcacaaagtgagagctgccactgagcagccctgccaggggtgctgtttcaggctgggcatcgccaggcggcctccctgcaaaccaagggctgggggcaaaggggcatgatccagggtcccccagggtgggctcagctccagggagaggccacccacgtggcagccccacctcttgagagcccccagtgccggagcagaaaggaccctggacccagaggcagatactgcggggtggtagaaaaggtagagtaggctgtggcaatggaataaaacacgattaaaaacgttaa

SEQ ID NO: 581 - DNA, 1769 bp, Homo sapiens
  source 1..1769: mol_type = genomic DNA
caagagcctcctgatctagcagccaagactccccctgacctttggccatgtaccccaaccctctcatctactgcacctgctgggacccctggaacttgggaccacggaagctaatcaagacccctcaactaccacgcaagaactccacagggagttccaagctaactcctcttgtaccagctccaaaaaatcacaattacctccaaccaacaaaacctgttgtttccccaaaaatgaaaatccattcagcaaggcaagaagagactaataaatcattttatgaagtgatcaacgtgtcacctggctatcaacttgttcggaatcgggaacagatttctgtcaccttaggggatgagatgtttgataggaaaaagcggtgggaatcggagatcccggacaaaggcagattttccaggaccaacatcatttctgacctagaagagcaaatctcagagctgacagcaataattgaacaaatgaacagagaccaccagtctgcccagaaattgctctccagtgaaatggatctccgctgtgctgagatgaaacagaactttgaaaacaagaacagggagctcaaagaggcccatgaagcagaactcagtgagttggagaacaactacaaagcagccttgaaggcagagaagttggctgcccaagagaagctagaggagatgggaaaagaatacaagtatttgaagaatatgtttcgtacgtatcaggacagtatttatgatgaaatggaagagaagtggtcaaaacagaaggcgaaatggaagaaggatgagaagttcgagcgagaaaatatcctgctacagcaaaaaaaaaagatgaccaaaaaattcgaaatggagtcaggagaagaagataagaaaataaatgaatcctgcagtgctgtctttgagaacttcattcaagagaaggaggagctcttgaaacaacatcaaagtgacaccttgcaattagaagagctgagaaaaaccaaagaggtgccctggagaagagaccaaataaatagacattggcatgatgtcctgcaacagcttcttcttatgcaggtcatgcaggaagaattgcatgcacaagcccttatcctagagtcactgaacacaaacctctactatacccagttggaactccagaaagagaaagctatagtgggaaatctggagaaaatgcttcaaaccaagtttgctgaaactgaagaaaagtataagcacaccatacagatcctgacggaagagaacattcatctgaagcaaaagataatttctaagaatgaagaaatttgtgaaggatgttctgggagattggcctctattactgtttctaaggatgattctgacactgtgcaagatggtagcaagaaaggacaagaatcataaacaaaaagttgctctgcattgttgaagatggttggcacaccatttctgtaggcccaggaaactcctgggagggttttcttgagaaaatgcatataatgagtttagttcttgggttgctctgactctctgaatgtctgaaaatgtttgaattcgcatctgaatttcacagcttatcacggactcttcactgaaaaatgatgctctccatactgggagctgagctttctctgagttttgtactatttttcttctaccttgacgtatttcgttagaaagaaactgatttgaaggccttcttcatattgaacttttactatatttgggaggtgtacctttgtcccctggggcatttaggtagcaaaaaaagatgatgtgttgatttta

SEQ ID NO: 582 - DNA, 2104 bp, Homo sapiens
  source 1..2104: mol_type = genomic DNA
agcgggccgtcggttgggcgcagacaggccgcagaagatggagagatggagccaccccaagagacaaataggcctttcagcacacttgataaccgcagcgggcaggtccaagtcctgtccgccaccccgctattgcagaggaatccctacagcagcccggatatcatgcacattaaagggtcggaggcttcttcggtcccttacgccctgaaccagggcacgacggccctgcctaagaacaagaaccaggagggcaccgggcaccggctgctgaacatgctgagaaaaactcttaaagagtctgatagtgaagaactggaaataacacaggagacgccaaatttggtgccatttggggatgtggttggctgcctgggcattcatataaagaactgcagacattttatgcctaagatcagtttacaacattatgctaatttattcattcgcatctctataaacaaagctgtgaaatgtacaaaaatgtgtagcttgctatccaaaaacgatgagaagaacactgtaattaagttcgatgaagtgaagtatttttctgtacaggttcccagacgttatgatgataagcggaataatattttattggaactcatacaatatgacaatagagaaaaacgtgctttcttgttagggagtgttcagatacatctttatgaggtaattcagaaagggtgcttcattgaagaggtccaagtgttgcatggaaacatatttgtctgcaggctggaggtggaatttatgttctcctatggaaactttggttatggattttcacatcagttaaaacctcttcagaaaattactgagccatccatgtttatgaatcttgcaccacctccagaaagaacagatcccgtgacaaaagttattacaccacagacagtagaatatccagcattcttatccccagacctgaatgttactgttgggactccagctgtgcaatcctccaaccagccatctgtagtgcgacttgaaaaacttcagcaacaaccccgggaaaggctggaaaagatgaaaaaagaatatagaaatctgaatacatggatagataaagctaactatttagaaagcattctaatgccaaaattggaacataaggattctgaggaaactaatatagatgaggcatctgaaaacacgaaaagtaatcatcctgaagaggagcttgaaaatattgtaggagtagatatccctcttgtaaatgaggaagctgaaactactgcaaatgagttactggataatgattctgagaaaggcctgactataccaactttgaaccaatcggaccaagataattcaactgctgatgcttctaaaaatgatgaatcaacaccttcacccacagaagtgcactcattgtgcactatttctaaccaggaaacaataaaagcaggcagaataccacctttaggtgaacgtcaatcagaaagcatgccagacagaaaaatgaaaaatgtattttttccattagaagtaaaattaaaagataactatccaagcattttaaaagcagactcatctctatcagaggtggctttttcaccaaaagaatataattcaccatctttcagaccagaatatatagaattcaaaccaaaatttcaggattgttcagataaatttgaggatttacatgacatgacctcatttacacaccttaaaaaagtaaaatcaagatcaaggcttttaggaaaaagctcagatgatatccataaccatgccagacactctgcaagaccatatactgctccggaggttaacaagcaacgagaaagctacagtggaaagtttacaagtcgtcgaatggtttcatcaggcttagttcatataaatgataaaacatcagattatgaaatgcataaaatgcggccaaaaaaaattaaaagaggatattgaaaaatgttcgctcatttgtgatattataaaacatgtttaactcagaatgatatgtgaggccagcagtcagaatatcacttctccattaacaaaatggtttggagatctcttcttttgtgtgacagaagtcagcaaccaaatttcatcttgttagaaccattttgttttgattaaaatgaaaaacaaa

SEQ ID NO: 583 - DNA, 5976 bp, Homo sapiens
  source 1..5976: mol_type = genomic DNA
cacaggaaataagcaatggaggtggggtcctttgctcgcgccgaaattcaaaggaataaatagttccggcgcgggtgttgagagcggtgtggcaggtgttgtagccgctatggtgaagttcgctttgtagcggccccggctagagagttgttctgttccctgcctttgtgacccggaggagcttttggggtgcgtcaagcccctggcctgaggcagcggtgaggcgtaactggtttgtggcctgtttgattcctgtcagaggtttgctgacccaagacagtatcgaaaatgcatattaagtcaattattctagagggattcaagtcctatgctcagaggaccgaagtcaatggttttgaccccctcttcaatgctatcactggcttaaatggtagtgggaaatccaacatattggactccatctgctttttgctgggcatctccaacctgtctcaggttcgggcttctaatttacaagatttagtttacaaaaatgggcaggctggtattaccaaagcctctgtgtcaatcacttttgataattctgacaaaaagcaaagtcctttaggatttgaggttcatgatgaaatcacagtaacaaggcaggtggttattggtggtagaaataaatatttaatcaatggagtcaatgccaacaacaccagagtacaggatctcttctgttctgttggccttaatgttaacaaccctcactttctcatcatgcagggccgaattacaaaagtattgaatatgaaacctccagagattttatccatgatagaagaagcagctggaaccaggatgtatgaatacaaaaaaatagctgcacagaaaactatagaaaaaaaggaggctaagctgaaagaaattaagacgatacttgaagaagagattactccaaccattcaaaaattaaaagaggaaagatcgtcctacttggagtaccaaaaagtaatgagagaaatagaacatttgagtcgtttatatattgcttatcagtttttgctggctgaagataccaaagtacgctcagctgaggaattaaaagaaatgcaagataaagttataaagcttcaggaagaattgtctgagaatgataaaaaaataaaagcacttaatcatgaaatagaagaattggaaaaaagaaaagataaggaaactggaggtatacttcgatctttagaagatgctcttgcagaggctcagcgagttaatactaaatctcaaagcgcatttgatctcaagaagaaaaatctggcatgtgaggaaagcaaacgcaaagagctggaaaaaaatatggttgaggactcaaaaactttagcagcaaaggaaaaagaggttaaaaagataacagatggactgcatgcccttcaagaagcaagtaataaagatgctgaagctctggcagctgcacagcagcacttcaatgctgtttccgctggcctgtccagtaatgaagatggagcagaagcaactcttgctggtcaaatgatggcctgtaaaaatgatataagtaaagctcagacagaagccaaacaggctcagatgaagttgaagcatgctcaacaggaattaaagaataaacaagctgaagttaagaagatggatagtggctacaggaaggatcaagaagctctagaagctgtaaaaagacttaaagaaaaacttgaagctgaaatgaaaaagctaaattatgaagaaaataaagaggaaagccttttggaaaagcgcaggcagctgtctcgtgatattggtagattgaaagaaacatatgaagctctattagccagatttcccaatcttcgatttgcatacaaggatccagagaagaactggaatagaaattgtgtgaaaggacttgtggcttctctgattagtgtgaaagacacttctgcaaccacagctttagaattagtggctggagaacgactctacaatgttgtagtagacacagaagttactggtaaaaagctactagaaaggggggaactgaaacgtcgatacactataattccactcaataaaatttcagccagatgtattgcaccagaaactctgagagttgctcagaatcttgttggccctgacaacgttcatgtggctctttccttggttgaatataaaccagaacttcagaaagcaatggagtttgtctttggaacaacatttgtttgtgacaatatggataatgccaaaaaagtggcctttgataagaggataatgactagaactgtaactctcggaggtgatgtgtttgatcctcatgggacattgagtggaggtgctcgatcccaggcagcttccattttaaccaagtttcaagaactcaaagatgttcaggatgaactgagaatcaaagagaatgagctgcgggctctagaagaggaattagcaggtcttaaaaacactgctgaaaagtatcgccaactaaaacagcagtgggagatgaaaactgaagaggcagatttattacaaaccaagctccagcaaagctcatatcacaagcaacaagaagaattagatgcccttaaaaaaaccattgaggaaagtgaggagactttgaaaaacactaaagaaatccaaagaaaagcagaagaaaaatatgaagtattggaaaataaaatgaaaaatgcagaagctgaaagagagcgagaactgaaagatgctcagaaaaaactggattgtgccaaaacaaaggcagatgcatctagcaagaagatgaaagaaaaacaacaggaagttgaagctatcactctggaactggaagagctcaagagagagcatacatcttacaaacaacagcttgaagctgtaaatgaagctatcaaatcctatgaaagtcagattgaagtaatggcagctgaggtggctaaaaataaggagtcagtaaataaagctcaagaagaggtgaccaagcaaaaagaggtgataacagcccaagacactgtaattaaagctaaatatgcagaagtggcaaaacacaaggagcaaaacaatgattctcagcttaaaattaaggaattagaccacaacatcagcaaacataaacgggaggctgaagatggtgctgcaaaggtatccaaaatgttgaaagattatgactggattaatgcagagagacacctctttggccaacccaatagtgcctatgatttcaaaactaacaaccctaaagaagctggtcagagacttcagaagttgcaagaaatgaaggagaaactaggaagaaatgtcaatatgagagctatgaatgtattgacagaagctgaagagcgatacaatgacttgatgaagaagaagagaattgtagaaaatgacaaatccaaaattcttacaactatagaagaccttgaccagaagaaaaaccaagccctaaatattgcatggcaaaaggtgaacaaggactttgggtctattttttctactcttttgcctggtgctaatgctatgcttgcaccaccagagggtcaaactgttttggatggtctggagttcaaggttgccttgggaaatacctggaaagaaaacctaactgaacttagtggtggtcagaggtctttagtggccttgtcattaatactgtccatgcttctcttcaaacctgctccaatttatatccttgatgaggtagatgcagccttggatctttctcatacccaaaacattggacagatgctgcgtactcatttcacacattctcagttcattgtggtgtcactaaaagaaggtatgttcaacaatgcaaacgttcttttcaaaaccaagtttgtggatggtgtttctacagtagccagatttactcaatgtcaaaatggaaagatttcaaaggaagcaaaatccaaggcaaaaccacccaaaggagcacatgtggaagtttaaactacaaagttatttcttcatcttgacctgtttttttaaatgtaaacttttaaggacttgagataactaatttgtttatatacaaaaattaatgttactgtgttacttaacccatgttttctctttatataatcacttatcgcttacaaatgagcatatattcctcatctcttaactagtctaattatggtccaattattgtggttgtgattttatgcatatcatcaaatgtttttttcttatgcgggtcttttatatattagggatcctgagatacccgattctatatgtaaaagctaatatacaaaaaagcagattaaattacatgataaatgtagctgatcatcagtgtttaattgatttaattcctaaggcaatattaatgtgttttctaaagtcattcaggtaaggaagaattataaatcaggtaactggaccaacaaagggaacacatataaagctattatgcatgcatggagccgtttgaggctagttttttaaggccacaactccagacccctgatttagactgagataggaaacagatcttgaaagaatccttattttaatgatacatgaatatcatgttcctatacgcttaataattggtctctacgttttaatgatacatgaatatcatgttcctatacgcttaataattggtctctacgactttaatgtttttgtttttttaagctgtgtaagtatttttaaatcaaagcttaggaggtgtgttgcgtggtactatctgctgcaaatttatctgaagtttgttaatattttccaagatttttgtcagccttttcataatccagtcattaacaacctattggtaaacaagaatgtaggtgccagtagactaaaccaaatttatttttccctgagtctgatatatatatgtataaatataaataactcaatccatctgttccaccaaaataactcaaaagttggatgattatttgtcttccgctttccagttcaaagggatgaaattcctttagaacttgaaagatgacactagcgaacaccatgagaatactgtctacagtttttggtacgtcatcactagaacagtgaccccaaactgaatcatgaaaggtctgacatgatgtaatctgatcttccatgtgttattttggccccacatctcttcttgattttttagtcttatttccttagtgttattatcatacttcccctgatatatggccgtacttcctggccctgggcttgacatttcccacccttcattctccatacatatgagatgtcagaaaacatgcagtaattgatattatgggacacattggaaaggattgaatctggaattagttctgtccactgtggaggggagaggaaataatgctgtaaatgttgagttacagaaagtccaatgtcaaatatagtttttttgtttcctttcaaatgtattacagactgtgccaaaacagttaccaattcacactgtcaatattaaagtataccatagtatacaaattagtcagtacttgctgttaattttaatatttctgatttaacagttagttattaagtggtacttcattgctgttttagccaacgttttaaaaataatttgggagtttgactattttggcttacgtactcatttccttttctctgctaaaaatgttttgcttgtgtgcgttcctgatttttgtcttgtataatcttgatctttgaaaaccctcaaacatgtattaaattgttgtaactttttttcattagagggaagacattaaggggattggggacatttgtttcacacatctgcagtaatatgagttaactaatatttaacaagctctttctttacattagctgctgttctcatttgtatgtattgtcatatttaatcctcagagtaacctagtgaggtaaatactgttgttgtcagcatggtgtaatcgaggaattgagtgagttgagcagaaaagttaggaaacttgctcagggtgataatacagttaggagtgtcagggcccatggacaaatcttgtcagtctccagaacctaagatatactacgtcactgacagcttgaacatttgtatttattgtacagaataaattt

SEQ ID NO: 584 - DNA, 1897 bp, Homo sapiens
  source 1..1897: mol_type = genomic DNA
tccagcgatcgcagcccagccccagctcctcctcctccacggcttacccgggctccgacagcggctgcaggtctccaagttgcggccgctggagcccgagccatgcggaccgcggaccgggaggcgcgcccggggcttccgtccctgctgctgctgctgctggccggggccgggctgtcagccgcctcgcccccagcagcgccgcgcttcaacgtgagcctggactcggtccccgagctgcgctggctgcccgtgctgcggcactacgacttggacttggtgcgcgccgcgatggcgcaagtcatcggggacagagtccccaagtgggtgcacgtgttaatcggaaaagtggtcctggagctggagcgcttcctgccccagcccttcaccggcgagatccgcggcatgtgtgacttcatgaacctcagcctggcggactgccttctggtcaacctggcctacgagtcctccgtgttctgcaccagtattgtggctcaagactccagaggccacatttaccatggtcggaatttggattatccttttgggaatgtcttacgcaagctgacagtggatgtgcaattcttaaagaatgggcagattgcattcacaggaactacttttattggctatgtaggattatggactggccagagcccacacaagtttacagtttctggtgatgaacgagataaaggctggtggtgggagaatgctatcgctgccctgtttcggagacacattcccgtcagctggctgatccgcgctaccctgagtgagtcggaaaacttcgaagcagctgttggcaagttggccaagactccccttattgctgatgtttattacattgttggtggcacgtccccccgggagggggtggtcatcacgaggaacagagatggcccagcagacatttggcctctagatcctttgaatggagcgtggttccgagttgagacaaattacgaccactggaagccagcacccaaggaagatgaccggagaacatctgccatcaaggcccttaatgctacaggacaagcaaacctcagcctggaggcacttttccagattttgtcggtggttccagtttataacaacttcacaatttatactacggtaatgagcgccggtagcccagacaagtacatgactaggatcagaaacccgagtagaaagtaagtcagcagaagagcgagttcgcccgtgctgtgaaagatgattttttaaaaaatgaaattcttgaagagctgcaccttaaaaaataagacaaagtgaaagtattgtattatgttacaaacaatgcaggctccttcctcatttaactttacaaccttgcgaagtgggtccaggagatttggagtttgtggtaaagccagtaatgggcattgtcctgcattcccttcccttcatggtttgcctcgatcctctctaagcttctatcctggcctgaataactcaaagataattggtctcagagatcaagccatatcctcaggccttatttccatcttctcatgattctgccatcatacctttgcttctccgctaatgaaatgagctggcaagacctctgttcattgtgaagtgcttctgaaagagcctaagaaaaaaggctcatctgaaagaaatggagaactctatttcgaaccaagcctgtttgaatgtgtgttagtctgatctttgatcatgtgtttccatgtaatgggagtctcgttttttataatgtttctaacgttttattgaaaaacctatggccctccttctttctcaatagctactttcttactgctttttgaaaataatatgcaaccaaattatttcttaatgtcacataattaagtaataaaatgtcaaaagaaatgttggcaaggagaataaaaaaatttccaagaaa

SEQ ID NO: 585 - DNA, 2005 bp, Homo sapiens
  source 1..2005: mol_type = genomic DNA
gatcggggatcgtcagcttggttctggccacagaggttgctcttctcgcgatgcttcagacctggcggcagggaaagggtgggctaattggagagccaggaagagcgtgaggcggccccacgctgctttcccagaaggctgtgcgtgctcctcgcttcctccgcggtcttccgagcggtcgcgtgaactgcttcctgcaggctggccatggcgcttcacgttcccaaggctccgggctttgcccagatgctcaaggagggagcgaaacacttttcaggattagaagaggctgtgtatagaaacatacaagcttgcaaggagcttgcccaaaccactcgtacagcatatggaccaaatggaatgaacaaaatggttatcaaccacttggagaagttgtttgtgacaaacgatgcagcaactattttaagagaactagaagtacagcatcctgctgcaaaaatgattgtaatggcttctcatatgcaagagcaagaagttggagatggcacaaactttgttctggtatttgctggagctctcctggaattagctgaagaacttctgaggattggcctgtcagtttcagaggtcatagaaggttatgaaatagcctgcagaaaagctcatgagattcttcctaatttggtatgttgttctgcaaaaaaccttcgagatattgatgaagtctcatctctacttcgtacctccataatgagtaaacaatatggtaatgaagtatttctggccaagcttattgctcaggcatgcgtatctatttttcctgattccggccatttcaatgttgataacatcagagtttgtaaaattctgggctctggtatcagttcctcttcagtattgcatggcatggtttttaagaaggaaaccgaaggtgatgtaacatctgtcaaagatgcaaaaatagcagtgtactcttgtccttttgatggcatgataacagaaactaagggaacagtgttgataaagactgctgaagaattgatgaattttagtaagggagaagaaaacctcatggatgcacaagtcaaagctattgctgatactggtgcaaatgtcgtagtaacaggtggcaaagtggcagacatggctcttcattatgcaaataaatataatatcatgttagtgaggctaaactcaaaatgggatctccgaagactttgtaaaactgttggtgctacagctcttcctagattgacacctcctgtccttgaagaaatgggacactgtgacagtgtttacctctcagaagttggagatactcaggtggtggtttttaagcatgaaaaggaagatggcgccatttctaccatagtacttcgaggctctacagacaatctgatggatgacatagaaagggcagtagacgatggtgttaatactttcaaagttcttacaagggataaacgtcttgtacccggaggtggagcaacagaaattgaattagccaaacagatcacatcatatggagagacatgtcctggacttgaacagtatgctattaagaagtttgctgaggcatttgaagctattccccgcgcactggcagaaaactctggagttaaggccaatgaagtaatctctaaactttatgcagtacatcaagaaggaaataaaaacgttggattagatattgaggctgaagtccctgctgtaaaggacatgctggaagctggtattctagatacttacctgggaaaatattgggctatcaaactcgctactaatgctgcagtcactgtacttagagtggatcagatcatcatggcaaaaccagctggtgggcccaagcctccaagtgggaagaaagactgggatgatgaccaaaatgattgaaattggcttaatttttactgtaggtgaaggctgtatttgtagtagtactcaagaatcacctgatgttttcttattctccttaaattaagagttattttgtgtttgtattcttggctggatgttataataaacatattgttactgtcaaagc

SEQ ID NO: 586 - DNA, 2014 bp, Homo sapiens
  source 1..2014: mol_type = genomic DNA
atcttttccatctcctgctccttccgccttcccgccatccgccctccacacgattcagcccggtggtgttagccccctggactcgattcctgaggcaaacagtgccccttaaggtcggcgacagcctcttctgggttcactgcagtccaaccggttccctaccctctgccattatgaacatccgcaacgctcagccagacgacctgatgaatatgcaacactgcaacctcctttgccttcctgagaactaccagatgaaatactatttatatcatggcctttcctggccccagctttcttacatcgctgaggatgaggacgggaagattgtgggctatgttctggccaaaatggaggaggaaccagatgatgtcccgcatggccatatcacctcactggccgtgaagcgttcacaccggcgcctcggcctggcccagaagctgatggaccaggcctccagggccatgatagagaactttaacgccaaatacgtgtctctgcacgtcaggaagagtaaccggccagccttgcacctttattctaacaccctcaactttcagattagtgaggtggaacctaaatactatgcagatggggaagatgcttatgctatgaagcgggatctctcgcagatggcagatgagctgagacgacaaatggacctgaagaagggcgggtatgtggtcctgggctccagggagaaccaggagacccagggcagcacactttctgattctgaagaggcctgtcagcaaaagaacccggctaccgaagaaagtggcagtgacagcaaagaacctaaggagtctgtggagagcaccaacgtccaggacagctcagaaagctcggattccacctcctagagcatgcttaagcatttcaggtcctcatgtctcaaccacatctactctgtgaaccctggcttagtctgtctgctctgcagcatctgctgtggggatcatctcacagtgaccagaatggcttctcactcttaactctataaacaaccacctttcacatatcctgctgggatcatgaaggaatacctggacacaagagccactgcacaacagccaaggaactttgagacctgccattacagaacctttcttggcctactcacactacgctgccattttattctgtttgtagtagtcctctgttgggtgtggttatcctgcaagtttttctccttttagaatgatgaacaggaagcagggcaaactcttgaagatttccagctttcagtttttgtttttgttttttaaccattatttacctgagttttcatccttgaggaggtgaagtagtcaggaccatgaagtcagacctcatgccctcttcctcctctttcctggaagaagtattcagtttccttttcctttctctggtaactcctcctttatactattcccccctcccttttttttgaggaggagggcatcaccttcccagtgggaaaaggtgttaagttaggagcttctactgtacaatcagaacttggagattttaagaaaaggacaaacggtaattaaattggaatctctaatgtgcttgtttgtgttagtttttttgtgattatgtcacttggcatttattgagtacctgcagtgttcacacacaatgctggagccttcattagttacatatttaaccctctcagcaaccctgtaaagtaggtagtattatccctgttttacagatgaggaaactgaagctcagagaagtgaattaaatatcctggatctgaacccaattctgtttgaattcaaagccaaagttccttctacttttctgttcctactctttgcattttatttataaatgtgttaaaattttagcaaaaatggagaatctgctgtttaaaaatgtgtttgcttaatacatggctactgtatgtcaattgtaaatatttatataacctacaattataatctatttttattatttttctctagtaaaaataagtgaagacaaagtaccttgacctctgcagtaaaagttaccagataaa

SEQ ID NO: 587 - DNA, 4453 bp, Homo sapiens
  source 1..4453: mol_type = genomic DNA
aactccattggataaatggcgaggaaacgtatactccctcttaaggaacacggtgtcttccttcgtctccgggttcccgagaccccagagtcactgacctccgtccctcagctttcggggttcggcagcagaaggggcgggcccgggcctgggattggctggcgtcgtccgacccccttcgctgctctccattcgcaatcgcccgcgggcgcctgcgcgatgggtcggccgtggggagcggggcgggaagcgcttcagggcagcggatcccatgtcggccctgaggcgctcgggctacggccccagtgacggtccgtcctacggccgctactacgggcctgggggtggagatgtgccggtacacccacctccacccttatatcctcttcgccctgaacctccccagcctcccatttcctggcgggtgcgcgggggcggcccggcggagaccacctggctgggagaaggcggaggaggcgatggctactatccctcgggaggcgcctggccagagcctggtcgagccggaggaagccaccaggagcagccaccatatcctagctacaattctaactattggaattctactgcgagatctagggctccttacccaagtacatatcctgtaagaccagaattgcaaggccagagtttgaattcttatacaaatggagcgtatggtccaacataccccccaggccctggggcaaatactgcctcatactcaggggcttattatgcacctggttatactcagaccagttactccacagaagttccaagtacttaccgttcatctggcaacagcccaactccagtctctcgttggatctatccccagcaggactgtcagactgaagcaccccctcttagggggcaggttccaggatatccgccttcacagaaccctggaatgaccctgccccattatccttatggagatggtaatcgtagtgttccacaatcaggaccgactgtacgaccacaagaagatgcgtgggcttctcctggtgcttatggaatgggtggccgttatccctggccttcatcagcgccctcagcaccacccggcaatctctacatgactgaaagtacttcaccatggcctagcagtggctctccccagtcacccccttcacccccagtccagcagcccaaggattcttcatacccctatagccaatcagatcaaagcatgaaccggcacaactttccttgcagtgtccatcagtacgaatcctcggggacagtgaacaatgatgattcagatcttttggattcccaagtccagtatagtgctgagcctcagctgtatggtaatgccaccagtgaccatcccaacaatcaagatcaaagtagcagtcttcctgaagaatgtgtaccttcagatgaaagtactcctccgagtattaaaaaaatcatacatgtgctggagaaggtccagtatcttgaacaagaagtagaagaatttgtaggaaaaaagacagacaaagcatactggcttctggaagaaatgctaaccaaggaacttttggaactggattcagttgaaactgggggccaggactctgtacggcaggccagaaaagaggctgtttgtaagattcaggccatactggaaaaattagaaaaaaaaggattatgaaaggatttagaacaaagtggaagcctgttactaacttgaccaaagaacacttgatttggttaattaccctctttttgaaatgcctgttgatgacaagaagcaatacattccagctttcctttgattttatacttgaaaaactggcaaaggaatggaagaatattttagtcatgagttgttttcagttttcagacgaatgaatgtaataggaaactatggagttaccaatattgccaagtagactcactccttaaaaaatttatggatatctacaagctgcttcttaccagcaggagggaaacacacttcacacaacaggcttatcagaaacctaccagatgaaactggatataatctgagacaaacaggatgtgtttttttaaacatctggatatcttgtcacatttttgtacattgtgactgctttcaacatatacttcatgtgtaattatagcttagactttagccttcttggacttctgttttgttttgttatttgcagtttacaaatatagtattattctctacttcttggtacattttgtagtaatatgtttaatataattattcaagagactatattgacagccagatagtatggcagttctgaaaaaatttatatcttttcaccacttgaatatactgcaatgtgtagtgagtaaattgtctccctttttctatagatcattaggttagagtttttttcttcttttttttttttttttttttttaccacttctgctgttcatggtagtagtggaaggtaaatttggaaatggcattgacataaaatgaaaatgtttacggacacttttcttttttgcttttttattgtatttggataaagatccacttaaaagttatctgttttttcctgttttttttttttttccccaaagtgtagttatgttttcactattgctgcttctatagagggcattgtgatagagagttacagatgaaacattaaatgccacagtgagtagaaataattactacaaaaagtaataaatatgattacttggtaatatcattctccatctaaaatactagtttcacctgtgagcagatttcagctcagtttatagttaaaaacaatgagggtaaaatgggattcatgctcagggaatgaatcagccatagttagagtgggaaattattattttcttcatttaaaggtagattttatgtttatttccctaaattgcataagataaaattgtctgtttaataaaaagacatttattaccattattaacagtcattttagagccaaatttaagaaaaggatattgaaagggtctttattggccttgtttgggtaactctatgctgttagatagaagagacttaggtaaataactttttatgtctgaggtgagtacacaatattggttcttggaaaaatagctgtttcttcataagatacccaagtgataattttttttcccctagactgtcaggcctatgagtaaatactaaatctattagctgtccccactcataaaccaaaccaaaccaatacaaacagatgaggagaggaaatgtagtaaaaatactggctgggtcttatgattgggatgagtgattttataagataatatggtgataattttattctaggattttatttttggcctaatataggaatgtttaaaaaaggcttttctatgaaaattagaaatttatacttgaaattaaaagtctagaagggggaggaccttaaagctaagctaccagtaagacaatgaataattcagaagagaacactattcttttactgactgagtgcccaagatgccaatttccatgaagtcttgatttatatatatgtacacatgttatgcacatacatgtttgttttctaacagttattttttaagcttttgagataattttagacttacagaagagttgtaaaagtagtagagttcttgtatactctgcacccaccttgcccttatgttaacatcttacgtaacaatagaacatttgtcaaaattaagaaattaaccttgatataatactaactaaagtagaaagtttaaaaagtagagattttagtcttttcactaatgtccttttactgttccaagacccagccttgcatttagctatcatgcctacgtcctgtcttccagtctgtgacagtgtatcataacaggggatacctgatgttgtaatgtatttctggtgttgttaaccttgatcactatgctaaggtggtgtctgctaggattcgctactgtaaacttactgtgttttccttgtaattattgaatatttgctggagatacccggagactatgcaaatgtcccgtttctgcttaaacttttgctcattttactatccattggcagatcttgcttgtggcagttactactgtggtgttctaatggtgattttctatttctctcaatccttctacatttattattggaattcttctgtaaggaagagttgtcagttctggatttatatttttaactataataagatattcaggataagtatagatttagaacttaaagatgttaaatcatgttaaaattattccaaataccaatatcaaagaaaactaagttggtaatctatctcagaaaatatatgaacttaagaaggaaaatagtatttatgatttgtagaattggttcaacttttgacttaatactgactttggactgaattcaaagttttcttgaaatttcacatctggactttttaaagtgtctacatttatattactttggggatcattttgtcaaagtcttgaataaagttacccagtcctggcatgataaacacaa

SEQ ID NO: 588 - DNA, 3502 bp, Homo sapiens
  source 1..3502: mol_type = genomic DNA
aaatttcccgggccgggagcgctgggcctgccgggaaggcgctgggacggttacccagcgggccgccggcggtcgtgggcaagcttcgccatgcagagcactgacctaggcaacaaggagagcggcaagatatggcaccgcaagccgtccccggccacgcgggacggaattatagtgaacattattcacaacacttccgattaccatccaaaagttttgcgatttttgaatgtggcttttgatggcacaggcgactgcttaattgctggggaccaccaaggaaatatttatgtttttgacttacatggaaacaggttcaatcttgttcagcgaacagcacaagcttgcacagctctggcctttaatcttcgtaggaaatctgaattccttgtggcattagctgattattctattaaatgttttgatacagtcaccaaggagctagttagctggatgagaggacatgaatcatcagtattttcgatctctgtgcatgcatcagggaaatatgccatcacaacttcttctgatacagcacaattatgggacttggatacctttcagagaaaaagaaagctgaatattcgccagtctgtgggtatacagaaggttttctttctaccattaagtaataccatcctcagctgttttaaagataattccatttttgcctgggaatgtgacacacttttttgcaaatatcaattgccagctccacctgaaagctctagtatattatacaaagtgtttgctgtaaccagagatggccgaatcctggctgctggaggcaagtcaaatcatcttcatttgtggtgcttggaagctaggcagctctttagaattatccagatgcccactaaagttcgagccattcgccatctggaatttcttcctgatagttttgatgctggttctaatcaggttcttggagtactaagtcaagatggtattatgagatttatcaatatgcagacttgtaaacttctctttgagattgggagcctcgatgaaggaattagctcatcagcaattagcccacatggacggtacattgcatctattatggaaaatggaagtctaaacatatattcagttcaggctttaacacaagaaataaataagccacctccgcctttagtgaaagttattgaagatttgcccaagaataaactgagttccagtgatcttaagatgaaagtaacatcagggagagtacagcagccagcaaaatctagggaaagcaaaatgcaaactagaatattaaaacaagacctgactggtgattttgaaagtaaaaagaatgaattaccagatggattaaacaaaaagcgtttacaaatcttattaaaaggctatggtgaatatccaacaaaatacagaatgttcatttggcgctctctgctacaactgcctgaaaatcatactgcgtttagtaccctcatagataaggggactcatgtggcatttctcaaccttcagaagaaataccccatcaaaagtaggaagctactcagagtattacagagaaccttatctgcattagctcactggtctgtcatttttagtgacacaccatatcttccactcttggcatttccatttgtaaaattattccagaacaaccaactcatctgttttgaagttattgctactctcataatcaattggtgtcaacactggtttgaatattttcctaatcctcctatcaatattcttagcatgatagaaaatgttttggcatttcatgacaaggaactgctgcaacacttcatagatcatgatataacctcccagctatatgcatggcctcttcttgaaactgtgttctcagaagtgctgacaagagaggagtggctgaaattgttcgataatatcttttccaaccatccttccttccttctgatgactgttgtagcctacaacatatgttctagaacgcctctgctcagctgtaatcttaaagatgactttgagtttttttttcaccatcggaataacctggatataaatgttgtgattagacaagtttatcatctcatggagaccacgcctactgacattcatccagacagcatgcttaatgtttttgttgcactgacaaaagggcagtatccagtatttaatcaatatccaaagtttattgtggactatcaaacacaggaacgagaaagaataaggaatgatgaattggattacttaagagagaggcagacagttgaagatatgcaagctaaagtcgaccagcaaagagttgaagatgaagcttggtaccagaaacaggagctgcttcgtaaagctgaagaaacaagaagagaaatgctcttacaagaggaggagaaaatgatacaacaaagacagaggctagctgctgtgaaaagagagctgaaagtaaaggaaatgcacttacaagatgctgcaagaaggcgttttctgaagcttcagcaagatcaacaggaaatggaactaagaagactggatgatgaaattgggagaaaggtatatatgagagatcgagaaattgctgccacagccagagacctagaaatgagacagctggaactcgaatcacaaaagagactttatgagaagaatcttactgaaaatcaagaagctcttgcaaaagaaatgcgagcagatgcagatgcctatagacgaaaagtggatcttgaagaacacatgtttcataagctgatagaagcaggtgaaacccagagccagaaaactcagaaggtgattaaagaaaatttggcaaaggctgaacaagcatgcctaaataccgactggcagattcagtctttacataaacaaaaatgtgatgatctacaacgaaacaaatgttaccaggaagtagccaaactccttagggaaaacagaaggaaagaaatagagataataaatgcaatggtggaggaggaagccaagaagtggaaggaagctgaaggaaaagagttccgtttgagatcagcaaagaaagcttctgctctttcagatgcgtctagaaagtggtttttaaagcaagagataaatgcggctgtagaacatgctgaaaatccatgtcataaagaagaacccaggttccaaaatgaacaggactcaagctgtttgcctagaacctcacaattaaatgactcttctgaaatggatccctcaacacagatttctttaaatagaagagcagtagaatgggacaccacgggacagaatcttattaagaaagtgagaaatcttcgccagagactcactgcccgggctcgtcacagatgtcaaacccctcatcttttggctgcatagaatgcatgtcaccttgagacggtcgagagagagacctattttgcaatcagtgacattgatttttagattatttatttaaaattcctataaagatcagccctttgtacagaaaaatgtgtctataaaaattatgtgttatttaattctgatactttttggcttgtaaatggcttcttgaactttttacaataaaaatgttttagaaactgtt

SEQ ID NO: 589 - DNA, 1349 bp, Homo sapiens
  source 1..1349: mol_type = genomic DNA
cctctccccccgggctccgcccaccccacgccgggaacccacgcgggccactacaagcccgccctttcctacgtctggtccagtcggtcttcctccggcccgggccctggcccagctagccggccatggaaggtaatggccccgctgctgtccactaccagccggccagccccccgcgggacgcctgcgtctacagcagctgctactgtgaagaaaatatttggaagctctgtgaatacatcaaaaaccatgaccagtatcctttagaagaatgttatgctgtcttcatatctaatgagaggaagatgatacctatctggaaacaacaggcgagacctggagatggacctgtgatctgggattaccatgttgttttgcttcatgtttcaagtggaggacagaacttcatttatgatctcgatactgtcttgccatttccctgcctctttgacacttatgtagaagatgcctttaagtctgatgatgacattcacccacagtttaggaggaaatttagagtgatccgtgcagattcatatttgaagaactttgcttctgaccgatctcacatgaaagactccagtgggaattggagagagcctccgccgccatatccctgcattgagactggagattccaaaatgaacctgaacgatttcatcagtatggatcccaaggtaggatggggcgccgtctacacactatccgaatttacacatcggtttggcagtaaaaactgctgaacttggtctcaagatgtggaactgtggagaaattctaggacatgaacaagctatcctttcatcgaggacagcaaacattatggtacagttggcttggaattatgtctttctcttttaatttgattgagtggaaatctgagtgaatacaaatataaatgaacaacataaaaacttttgttttgacatgtcaaattgaaacttgataaagtgcgtacttgctaagatattcctgtggctcatgcgttacaacacgaggacttaagccagtaatcgtttttgttcagatagaggtgtggaggtagagccagcccctcatgtctgttttggatgttttgtgtctctccagctacattgtaagttccttgagggcagggccatggcccattgctctgtgaatctcaaatgcccataaaaggtgcccataaaatgttttcttgaacatttgaatgtgctgttgtctggaaaggggtaatattgtgagctgaatcagcaataagtattagtctttttggactatggtattgttaaaaagactgcagccctctcagacttgagcgttaattggcttatttatttatggctttaaataaaatcgatttaacgtta

SEQ ID NO: 590 - DNA, 3880 bp, Homo sapiens
  source 1..3880: mol_type = genomic DNA
cccctcgtttctccctccccgcctcctccgcagaagccgagcgccaaactcaaactttatcaggacccggacctctcaggctaatcccgagggccgggcctgttgggcttttctgcacaccagccgaggcagcgagccaacatgagccaagtgctgttccaccaactagtcccgttgcaggtgaaatgcaaagactgtgaggagaggagagtaagtataagaatgagcattgaactacaatcagtttctaatccagttcacagaaaggacttagttattcgtctgactgatgacacggatccattttttttatataaccttgttatatctgaggaagattttcaaagtttaaaattccagcaaggtcttctggtagacttcttagctttcccacaaaaatttatagatctccttcagcaatgtactcaagaacatgccaaagaaattccaaggtttttgctacagttagtttctccagcagctattttggataactcacctgcatttttaaatgtggtagagacaaatccttttaagcatcttacacacctctcactaaaacttttacctggaaatgatgtggagataaagaaatttctcgcaggctgtttgaaatgtagcaaggaagaaaaattatcattgatgcaatcactagatgatgctactaagcaactggactttacacgaaagacattagcagaaaaaaaacaagaattagataagttacggaatgaatgggcgtcacatacagcagccttgacaaacaagcattctcaggaactgacaaatgaaaaggaaaaagccttgcaggcacaggttcaatatcaacagcagcatgaacaacagaaaaaagatttagaaatcctccatcaacaaaacatccaccagctacaaaacagactgtctgagttagaagcggctaataaagacttaaccgaaagaaaatataaaggagactccactattagagaacttaaagcaaaactttctggtgttgaagaggagctacagcggactaagcaagaagtcctctctttgcgaagagagaattctacactagatgttgaatgccacgagaaagaaaagcacgttaatcagctacaaacaaaagtggcagttttagaacaggaaatcaaggataaggaccagcttgttttaagaacaaaagaggcatttgatacaatccaggaacaaaaggtggttttagaagaaaatggtgagaaaaatcaagtacaactaggaaagcttgaagctacaataaaatcattatctgcagaacttctgaaggcaaatgaaattatcaagaagttacaaggggatctgaaaactttaatgggtaagttgaaattgaagaatacagttactattcagcaagaaaaactcttggctgagaaggaggaaaaattacaaaaggaacaaaaggaattacaagatgttggacagtctcttcgaattaaagagcaagaggtatgcaaattacaagaacaattagaagctacagttaaaaaacttgaagaaagcaaacaacttctaaaaaataatgaaaagttaatcacgtggttaaataaagaactaaatgaaaatcagctagtgagaaagcaagatgtattgggaccttctactactccgcctgcacattccagcagcaacacaatcagaagtggaatttctcctaacctgaatgtggttgatggtagactgacttacccaacctgtgggattggttatcctgtctcctctgcatttgcattccagaataccttccctcattcgatatctgccaaaaataccagccaccctggttcaggaacaaaggttcagtttaatttgcagtttacaaaaccaaatgcatcactaggagatgttcagtcaggagcaactattagtatgccttgctcaactgataaggaaaatggtgaaaatgtagggttggaatccaaatacctgaagaaaagggaagatagcattcctttacgcggactcagccagaacctatttagtaattcagaccatcagagagatggcactttaggagcattacatacatcttccaaacccacagcgctcccctctgcgtcttcagcctatttccctgggcagttaccaaacagttaattctagtgtcatgttttactttttattggtattttagaaactcaggtgcttaaaaaatatgtcaacacaaaccagatcctcaaatagcaagtttcaaattttacttgagctgttaaagactggatactttaagtactgcttttatggcagtttataatataggaacaaatttgtacttggggattggtaaagattgtgagtaaatgacattttttggtttgtgaacatggcgttttatagaataatatgaattttattaagctattctttagaaattcagttctaaggaaagagttgatccttatgagggagattctgatcatattaaaaatctgggtaaactaaaacctgctcataacctcatagtatgcaaccaaagaatactaattcattttatcactttcattggtaaaacttttaaattcaacacctgaaaatcatgagggaaaatgattacctcttgagatatattattgatgacatttaaagggaaaagtcctaaatttaccttaaataactgaaatgaattaagccttcatagcgtattttccttgaagcatttaaatttgctagtgatgaatcaaataaatttgatatacttaaaataatttggacagtttttatgtgaccagattaagtgcttttgtcatttgagctgacaagtttttaaaacttcagtgcttcctaaatgtttatactcatctagtttttctcaatttgtagttttattatgcagttaaatctgtatcagtggacttttaaaacttggtactactactaaatctactatatcatgaatattcatttatttttatagtatcagaacttgggttgatttcaatgttaataaactaggcaaaacaaataactgttagaaggtacaattttcttctcttccctgtaactgaaagttttaagaattgttccttggggaaaaatttttttaaaattcacctagaatcatagggcctcattttgttttcttattgacaaacaatacctggtagcattctctaaagagtcttctagatcaatttttataaagtactaatgctcatgtgataatttaaaattattttcaactactttattacacagatgaagaaacatttcaagatattgatgtaataacattactgagtcccatggtaagaaagaatctttgctaattttttttttttttttacgaagccagtatcttgaaactattggcaattgcaagtgtctttaaactagggatctaatctgaaaattcagtaactaatattaggcagttgatactcccccacctcccccatttagatacactactgtattagtgagaatacttggtacagtaacttgaaagcacttgctattctggaaagaagcctcttggtgattttggaaggagctttattgtaaatactatggaaggggctttgttgtaaatactatgtaatatatataaaatattgtgacatgttttggatgggatgcatgacatacaggtagctctcttttttaaaatataggtatctctttgcatatatatacacaaggaaagttgaattttcaggagagatcattctgatatcttgcaaatttgtattaaatgtatacagacttccaagtgtgctaattctttacctcctaaacttttagttgcaattgttttgcagtgtaaaattgtacatgtgttaataatcaaaaagtgttgcatttaatgttatttctgtaaactttgagctttgttaataaactattatgcagcatctacactttg

SEQ ID NO: 591 - DNA, 1412 bp, Homo sapiens
  source 1..1412: mol_type = genomic DNA
gccgggggtgggaagaagactgccactctccgcccctacctgagtgccgtgcgggccacattgcaggctgccctctgcctggagaacttctcctcccaggttgtggaacgacacaacaagccggaagtggaagtcaggagtagcaaagagctcctgttacaacctgtgaccatcagcaggaatgagaaggaaaaggttctgattgagggctccatcaactctgtccgggtcagcattgctgtgaaacaggctgatgagatcgagaagattttgtgccacaagttcatgcgcttcatgatgatgcgagcagagaacttctttatccttcgaaggaagcctgtggaggggtatgatatcagctttctgatcaccaacttccacacagagcagatgtacaaacacaagttggtggactttgtgatccacttcatggaggagattgacaaggagatcagtgagatgaagctgtcagtcaatgcccgtgcccgcattgtggctgaagagttccttaagaatttttaaaccatctggctggatctcgtggccttccccctcagactacccatgtctccacgaaggcgtcctggagtcactccccgagcagcgcggcggcggcagggagttgggttggggtgggcatttgatgcgggaggtgggtggtgtgcttgctagctgggcaagaaagcagcagtggacctgccccaaggccacacgtgcctggtcaggctggcttctgatgttcagtcccctgggccgggacagattttttttaacgtcttgaaacttaaactctgtgcttgtaggatactgtaacctttttgtctttttttttttttttttttttaaacctccacctccagtggctgtgactggtcccagtgattatacgttattggttgctgtgggtctgggcgggcctggagccagaaggcgacttattttttctctcctatgccaccccaggtggggagggagggaggtttcagactccagtttctcccttgcccttttattcccaagcctccttggccccagtataagtgttgggaactctctgccagcttcctgagttctgcctaaagatggccccccagcactggttggggacaagggccaaattggtgaccaccagtcatgcctaggacctggggcccaaaagccgggcaacctctggctacaggggccattgggtgccctcccagttgagaggggccgctgtttcgccttgtccgtcagtgccagtgcctgtgccagaggtggcgaggtgagtcctccagagcttcctggccgggccctcctcctgcctgttctggctcctctgctcccacgctagctgtcccttttctgattctggtggatcctccctcccctaattaaagtctctttttgcccctttggggctgcatgaggtc

SEQ ID NO: 592 - DNA, 1204 bp, Homo sapiens
  source 1..1204: mol_type = genomic DNA
gcgcggcccgaggggcgggggcggcgggcggcccggggctgcaaagcggggggccgccgcctccctgggcctgcctgggcggccgcctccgcgatgccgctgctcgtcgaggggcggcgagtgcggctgccgcagtcagccggggacctcgtccgagcccacccgcctttggaggaaagagccagacttctcagaggtcagtctgttcaacaagtgggaccccagggccttctgtatgttcagcaaagagagcttgcagtgacctccccaaaggatggctccatctccattctgggttctgatgatgccactacttgtcacattgtggtcctgaggcacacaggtaatggggccacctgcttgacacattgtgacggaaccgacaccaaagctgaggtccccttgatcatgaactccataaaatccttttctgaccacgctcaatgtggaaggctggaagtacaccttgttggaggcttcagtgacgacaggcagttgtcacaaaaactcactcatcaacttcttagtgaatttgacaggcaagaagatgacattcacttagtgacattatgtgtgacagaattaaatgaccgggaagaaaacgaaaaccactttccagtaatatatggcattgctgtcaacattaagactgcagagatttacagagcatcctttcaagatcggggtccggaggagcagcttcgtgctgcgcgaactttagcaggaggaccaatgattagcatttatgatgcagagacagaacaacttcgtataggaccgtactcctggacaccatttccacatgtggatttctggttgcaccaagatgacaagcaaatactagagaatctttccacttcgcctctggctgagccaccccactttgttgaacatattagatctaccttgatgtttttaaaaaaacacccatctccagctcacacactgttttctggaaataaagccctactctacaaaaaaaatgaagatggcttgtgggaaaagatctcttctccaggaagttaaaaaacatgaattaccaaagaaagcaccttcttggcctgacagaccattggtggggctggcacgaatccagatctggatcctacatctgttgggtcttaggcctccttccctcctcagtgtctttcaaatgactttcatcaaatgactttcaaaataaaaccttattttggcaaaggca

SEQ ID NO: 593 - DNA, 5663 bp, Homo sapiens
  source 1..5663: mol_type = genomic DNA
ataaactctaaggaagacagtgatggagtgaagtgggctgggggcgatagagaggatggggtggggcaccaggcgagagatgcgaaggaagccagaacgaaaagagagcgaccgaggagagaagagagcagagcaatacaaaagcagcctcggatctagccggagctgcaagcgttaaggggaggcggagagtgacgcggtttgcgtctggagcggctccttggagtccacagcatccaccgccggagcctcgccttcctttctccctctgcagacacaacgagacacaaaaagagaggcaacccctagaccaccgcgaaggacccatctgcaccatgaccgagaccaccaagacccacgttatcttgctcgcctgcggcagcttcaatcccatcaccaaagggcacattcagatgtttgaaagagccagggattatctgcacaaaactggaaggtttattgtgattggcgggattgtctcccctgtccacgactcctatggaaaacagggcctcgtgtcaagccggcaccgtctcatcatgtgtcagctggccgtccagaattctgattggatcagggtggacccttgggagtgctaccaggacacctggcagacgacctgcagcgtgttggaacaccaccgggacctcatgaagagggtgactggctgcatcctctccaatgtcaacacaccttccatgacacctgtgatcggacagccacaaaacgagaccccccagcccatttaccagaacagcaacgtggccaccaagcccactgcagccaagatcttggggaaggtgggagaaagcctcagccggatctgctgtgtccgcccgccggtggagcgtttcacctttgtagatgagaatgccaatctgggcacggtgatgcggtatgaagagattgagctacggatcctgctgctgtgtggtagtgacctgctggagtccttctgcatcccagggctctggaacgaggcagatatggaggtgattgttggtgactttgggattgtggtggtgccccgggatgcagccgacacagaccgaatcatgaatcactcctcaatactccgcaaatacaaaaacaacatcatggtggtgaaggatgacatcaaccatcccatgtctgttgtcagctcaaccaagagcaggctggccctgcagcatggggacggccatgttgtggattacctgtcccagccggtcatcgactacatcctcaaaagccagctgtacatcaatgcctccggctagcagcccctcgtcctccggcaacacaatggcccctccatctttgtcagccccctgtttctctcctgcctctctgtttctccatctcctcgtcttgactgttttccctacttgctgacttaaccccccatagtgtgggggacctgcagagaaccatggcattccctattccacagtcatctttggacagactttcctctagtctccgggttgggggtgggtgagggaatggggtgggagtcgggggaagtgcagtccttggagatgtactggtgtccgtctcccagcatgctctagagaggcggctctggtgcccatcctcccagcacgctctggggaggcggctctggtgcccatcctcccagcatgctctagagaggcggctctggtgcccctcctcccagcatgctctggggaggcggctctggctcttgccttcccagcatgccctttactacaaagggctatttttcttttctttcttttgtttatttatttttctttgttcactccctgtagaacttggatgaaatcagtgtccatggttctttatgtttgtagtcttgatgtgctcctgtggtattacttcccctctgataggacattgtagccagcctcagcactcagtgagttcatcagggccacacccagtagagaaggccaagcaacctccacttcttcagcaccacacacacgcacacacacacacacgcacacatgcgtgtgcacccgcgcacgcacatacacacacacatatagcagtagcagcagcagcagcagcagcagcaacctttgatcaggagtgagattttcgggttctgaaacctgggacacgagtctgtgaatagtcggttttctcagaataatttgaatctgttttcttagtttcaaatgaccatttccctgatgctctgagcttatgatcacacagagccagtccatcctcatttcctggtggcatctgttcatttacctttgtggactgtagctgatggcacagtgcgggttccctaccagccaggggtttccaagggacctttggaggccatgcttagacacattcctgtacctgagaacaaccacataggcaggaccagatccacatcgtgcagtcgtgtcataaaaaaacaaaacaaaacaaaaaaacactaggagtccactcaaccctggaggtctttgctaattggaattatgtattgtctgttgggctgggaaatgtctctttcatattgtaagtccaggatgaactaggagaaagcaatttgttgccctgatgataactgatgattttcaccctctctagctgaggtaactcagacagtgcatgaggtcagtttcttcttgagaagcagtgccttggtcttgtttctgtggttggttctagcccctgcagagcctgggagctgcaggaactgtctgagaaaatctccctaataggggagtgggttcccagaagggagatctgggaggggtcaggagccactaagttgcttcactccttttttctctaattttctaccttcctctctgttcctgcagacagttttgccagctttgcttctggttactagggtctcatgcgtgtcctgcttggagagccataaggaaattgctgtcttgtgctttgtgtctctcatccagtctctggctcttgggattctggtctttgagaaatagtccctgagtattaggatacttttatcaaaatctagtaccagctacggccagaaagggccaggtgggacctgaaagcaaagacaatgttctttaccacacgtttcacatctgcaacatccttcaattgcgggaaaaggaacttgatttaacagaagaacatggtagagcagcatccagaaagtctgttattcctcttggattttttgaaataatcttcagaggaaggaaggaaaatcctattttggggtatcagtgtttgactagggatcatgaaataataaactgaaaaaaactttagagttcagttgatccaacactttcctttaaaagttgagggagcagaggcccatgggattaaatggctggtccaggtcagccagcaggtgtagggcctgacaagaacatattgtttccctgacccctaggccgtcacaccacaccctccatttcctcatgttgctgaccaggtgcccatatgatttctacacttcccaagccttaccctggcatctttcttttaaattatatctgtcccaggtgctctccacacataggatggtaatgccagtcccaggggagggtgtgatagtaaggaaggccactgttaggtttcctttagaaataaagagatctcagcagcttggaagaaatcccagaagcggactccatcaatccaagaaagagttgctttgtggaaggtgaaggaagacccacagagtgctcaggatgatgctattgctggagagcgaaagatggaacagccttgtccaggcagaacagtcataagccaggaaatgaaacaaaggaaaacaggtgcctgaatttcctggggaaacatggcttgtttaaggacttggagttatggatggaatttatgggacccacgtgagcagacctgaggaaggctcgatttcttttgtttcttggtccactctgtcactctgctctggtcaagccccatttggtctacagcccatgagaaggaatgaggctggttctgcactctcagcatgcagtccgaaagcatgtgggagtggggagggaaagtgagatgaattaagacaaagaacaggtgccatagaagtagatttctaggaatgaagtggggcagatcttatctttgtggattacaggcactgtactaaaaacaggtttcctatttaatataaaaagaaagtgaatcttcttttggatagaatcatccattcccatcgccgcaccccctaccccccaaacacacacacacacacacacacacacacacacacacacacacacacacacgccctactcttcatttgctaggggaaggtcacagcacaactaaatccaggacaggacattgtgaccatgacccagccacagtcaataccagaaagatgattcagagtctgaagtggtgccccaggtgccaacaggataacctctaccccccgactttgtctctggggtcctgttccttcctgcaaagcccaatccaagactggcatggctcagaggttgtgagaaaggcatggactggaacaatcatgtccagaggggtctggagctttgtttcctgttcaccagcaaaaaatgtctctcccatttttctgaaagtggctgatgtaagaacaggcagaaggaaaaccctttttgtcaataactctgtccttaaggaatggtcctctgggagggctgtgctgctagtgggtacctcagtcacacacccccaaccccaggcagcctctagagccttcttgctttcattttccttgaatgtacataggaacaagggggaaagtctcttactgaagtgcctgaaacccaaagctagagcttctagagacgccgttcttcctgtctcagcttggccagcctttcaacaatgttctctagtttcaagctccagcttctcagaaagaattaaagaacttgctgttcaaattaagtagaaagtgagactcaataataactgaactacagcaaaaggcagagaattacagggagaaaaaacttgtacttaccagcccaattctactctcctcaaactgacacacacacacacacacacacacacacacacacacacacactcttttaggggactaagagagagaagcatgttattacattttactcatccaaacagtaatgcaaaaataaaacggtagaatatgaaaagctcaggatctctcccaaggctacctactgcaggagggccaacaggtgagatgggaagaatggaaacagggaccgattttgtagctcatacaattaggacaccttaggaatagcattgtagtaatggtgatgaatatgctctgccaaattcatccagtctgcaccatcttatagctgcccagcacactcgactgttcatgtggtctctttgtagtgtgagtttggagtgtcctattagcctgttctggttaggaatgagttaacggctctttccctcaaccttagtctagtcccagggctgaggattcagctggatccacatggtcttgagggttggcatgaggagggggaagcttttttgaatcgctttttgatcacataatctgccattttaagagtaagatttgctttatggaaatcaattcattaataaaaaatgatattcaagttgcaataccatttcacagtgaaatattttgagtacaattttgttgctagaatagtcatgggcaagagttttatgcaaaatgtttcaattatgttaataaataagacaatgctacaaga

SEQ ID NO: 594 - DNA, 4401 bp, Homo sapiens
  source 1..4401: mol_type = genomic DNA
tctaccagtacctaagatggccgccggcccatccaccgtcgcgatcggtgtgaggaaagtgtcacgaacccggaattgcccgactccgtcatggcaggcgccgggggcgtggcttccggcggccacagcttgctagtcgccgcggcggggtcgagcgggggcggcagctgacaggcgctcctcccccgaccgcagcggctggttcccagcgaggcgggcggcccccagctcgcgtccccgagtcctagcccgcgaggcgccagggctgcgcctgggcatggaagaggggaagatggacgagaatgaatgggggtaccacggagagggcaataagagcctggtggtggcccacgcgcagcgctgcgtcgtgctgcggtttctgaagtttcctccaaataggaagaagacctcggaagagatatttcaacacctgcagaacatagtggactttgggaaaaatgtcatgaaggagtttttgggggagaactatgttcattatggggaggtcgttcagctacctttagagtttgtgaaacagctttgtttaaagatacaatctgaaagaccagagtctcgctgtgacaaggacctggatactctcagtggttacgctatgtgccttcctaatttaaccagactccaaacctaccgctttgcagagcaccggccgattctgtgtgtagagattaagccaaaatgtgggtttattcctttctcgagtgatgtcacgcatgagatgaagcataaggtctgtcgatactgcatgcaccagcacctcaaggtagcaactgggaagtggaagcagatcagcaaatactgtccccttgatctctactcaggaaacaaacagagaatgcactttgccttgaagagtttgctgcaggaggcacagaacaacttgaagatatttaagaatggtgagctgatttacggctgcaaagatgcccggagccccgtggctgactggagcgagcttgcacaccacctgaagccgttcttcttcccttccaacggcctggccagtgggccccactgcacaagggctgtgatcagggagctggtgcacgtgatcacacgggtgctgctgagtggctcggacaagggccgggcaggcaccctgagtccggggctcgggcctcagggcccgcgagtctgcgaagccagccctttcagtaggagccttcgctgccaaggaaaaaacaccccagagcgctcggggttaccgaagggctgtcttctgtacaaaaccctccaggtgcagatgttggacctgctggacatcgaaggcctctaccctctgtacaaccgggttgagcgatacctggaagagtttcccgaggagagaaaaaccttacaaatagatgggccttatgatgaagcattttaccagaagctgcttgacctttccactgaggatgacgggacagtggccttcgcgctaacgaaggtgcagcagtaccgcgtcgccatgactgccaaggactgctccatcatgattgcactgtctccctgtctgcaggatgccagctctgatcaaaggcctgtcgtcccttcatcgaggtccaggtttgccttttccgtgtctgtgctggaccttgacctcaagccctacgagagcattccccatcagtataaactggacggcaagatcgtcaactattattcaaagactgtacgtgccaaagacaacgccgtgatgtcgactcggttcaaggaaagcgaagattgcacattagttctccacaaggtctaactctttccctgcagtgtctttgaaacttgaacataatgtgaaggctgaatgatagagatattttctgttgtgttgggtgacctttggttgtgaatgtttttgcttttaaccccttttgaggtgggattgcctcttggagacatggaattgaagagcactagaaacaacttcctggacaaggaatgtaggaagtgagtgctgtgtcccaggaagctgctcacactcttaaaatggaagtgtccgttaagccctgggaagacgttctggatagttcttctttcccaaccagggctcatgtctgattctctaatgcgaaaagccttattctaagacccaaggtttggatctgctaccaccagactcctaacatagaaaacttgaattgtcacatacattttacagtttggacttttaagaaaacatggatactactggaacttcccccagctgagttacatggtcactttttcagtgcaagccacatatcaacacaggtttttaggtggttccctgctgcacagcgtgacctcgtggtcgcgcagatgccgattctgagcagtgtagactcagggtccctgtggaggtgctgaagcccacagttccacacagggcagcagggagcgcaaggctcaggtcaggatggacaccactcatgcgagcattgacctttttttttttgctttacaatttaatctttcacatgagggggagatgagctgttctttcccactaaaaattgctgctgtagaagttggaggtggagctgtgactggctgagctgctgtggccgggctgggcagtgtgccccaacagctcagtgctttcctgacactccagtgtctggggtggttgaggagcgagttctctcttcctcccagaccaagttcctccctcgggtttgccttgagacgtgttgcgtttttgggccccgtggcctctccctgttaggctgccacaggccctgcttctggaaggtgaacagctcctggctgctgccgagagggttctcgttggggtcaccaaagtgtgcccggctgctatgaaaaacgttgggaatcttggtttcagttttttattctatgctaggttgtacagacttatttatatcatcgttttgagggactaatggaggcttattgtaacatataatattagtgaaaccatggaattatatgaaaatgatacatgagaaataaggaaactattttgctgattgtaaatttttgtgggaaattttgtgataacttgagaattatacttgtttgaatcaaggcaactcttctagaatttattgttcaattctgtcatatttacttctaattctactctcagaggtgcaaaaagatacttatctaactggacacttttactgttttcttctcacttccaatgacaccgtctcatacacacgggtcctgtgtgctgggatgggggctttggtgaagtgcacggagctcacggacaagccgcaggctctgggaagcgtggaggtagtggccgttgagtactgtcttgacccaagggagttcactgttgctgggctggggctggggcagcctggtttgggatgattttgcccattgtcacggtgtgtggaggatgctgggtcctgggttcaagtgcacatgtgagggaaccccagtccgtgggaaggtgggctgggctccctaggtccttcagggctgcaagagttattgcctagcacagggcccagacagggctggactagacacgatgaaaacagcctgtatttgagggagaagagaaaacagatggagacccccactctgtctggtcttggctcccaccagcccgggctgtgaggagcccctgagccgcgggtgccactgctgtggatgcgtttctggcccgtcttggaaactgctgctgctgcgtagtcatgacggccctgactggtttgagacaacacgcgttcacagatcttaacaatgctaaatgggcgactgatgaggtcacggttcttaaggcacatccgggacgatcgatatagcacttaggctatgcaggggggtctttctttcataaaggacctcattccttgcgtcccagcccaggaacagtgctgtctttgctgtcttaggccattcttgttattaagctgacagcttcactttcttgtggaagaccaagaacagcatgaggacttgctgagactgcctcacggtgccaccatgcggaccggggggaggcagggagtgagggtgtggctcccctgggctactaaggacagtttaaagatgaggcgccataggcatccgtctccagagcccccaggaggcaggaaccaggataagggtggcttctcccagctgagtaatgtggccaccatgtccaaggtggactcggtgtgaggctgcagtgggtgggggatggatcctccccacacatctgaggacacacaaccacttggtacattttctcagatgttaagcttatttttataaaccacattgtacgtgtcacttttatttggcattttatacttaactagttgtatttatttttcatgtcatgagagtttccatataatgtgccataactgcatagacagcacgtcttcagggtgtggtttctaagcagaaaatagcaaatgtttatattgaataaaattgcatgttcctccacgc

SEQ ID NO: 595 - DNA, 8020 bp, Homo sapiens
  source 1..8020: mol_type = genomic DNA
cagtgatgagttctagaaggaaagaaaaggctgatgtgacagtgaggaagggatgagtggagacttctctgagacttcagtgattcctcttcctctgagctgagccaagctgagaagctgagaagagtaagatagggccgggaactcaggtccgttagtccgtcctccgaggtggggcgggccagcagaatggatttccgatctactctgtgagagcctcgcccaagaaagcccagagccacttccaagatccgcgctcccacggcgatgagaagcgttttcccccgggactgcttggcttaggactggggacccactggctttggagtaagccctggcacgggcctcgagggaagaaagaactcccgcgctccccacactccacagggcctgcgatcatctcagatgttccggttccacgtgcagaaaccccgccggtccgaggccccggttctaaaacggccctaagagtcaaggcttccacagctcgcctctgagggtggcaaagaggccgcgggggcggtgcctcgcgagacccaaacaagcccacgtggcaggggcggggctccgcgaaggcgtcacggcgcgctcgtgcgctgctgaggtcacgcgccggcagtacccttgcccgggggccgtaaagcgcggaaggtcgcggtctcggcttccccggaactttttgctcgcttcgccccgcccccttcccatccccgaaccccgctttccggcccgcggcgaccccaggcaactgttgtggctgccgcattgctcccgccgggctgtagctgagcgcggagcccgtggggaccggtgagatggaactgttttcccgcgttgagacgtgcggtccgcttgtgcttttagaactaaagactgctgcagagtccggaggaagaagtcacctagaaaaatctgggacagggcatttgagttcctgagatctagttggtgagagacatgatgttctaccggttgctgtcgattgttggaagacaaagagccagcccaggatggcagaactggtcctctgcaagaaacagcacgtcagctgccgaggcgcgttccatggccctgcccacccaggcacaggtggtcatctgtggaggtggaatcacgggcacttctgtggcctatcacctctccaaaatggggtggaaggatattgtccttttggagcagggcaggctggctgctggctctaccaggttctgtgctggcatcctgagcactgccaggcacttgaccattgagcagaagatggcagactactcaaacaaactctactatcagttagagcaagaaacagggatccaaacaggttacacaaggacaggctcaatctttctggcccaaactcaggaccgactgatctccctgaagcgcatcaacgcagggctgaatgttataggtatcccttctgagatcatctcccccaagaaagtggccgagcttcaccatctcctcaacgtgcacgacctggtgggggccatgcatgttcccgaggatgcagtggtgtcttccgctgacgtggctcttgccctggcaagtgctgcctcccaaaatggtgttcagatctatgaccggacatctgttcttcatgtaatggtcaaaaaaggtcaagttactggagtggagaccgataaaggacagattgaatgccagtattttgtcaactgtgctggccagtgggcatacgagctgggtctgtccaacgaggagccggttagtatcccgctacatgcctgcgaacacttctacctcctgactcgccccttggagacccctctgcagagcagcacaccaactattgtggatgctgatggaagaatttatattcggaactggcagggtggcatcctgtctgggggctttgagaagaacccgaaaccaattttcactgagggcaagaaccagctggagattcagaatctacaggaagactgggatcactttgagcctctgttgagttcccttctgaggaggatgccagaattagagactctggagatcatgaagttggtgaactgcccagagaccttcacaccagacatgaggtgcatcatgggcgagtctcctgcagtgcagggctactttgtcctggcaggaatgaactctgctggcctttcatttggtggaggagccggaaagtaccttgccgaatggatggtacatggttatccctcagaaaacgtttgggaattggacctgaaacgttttggagccctccagagcagccgcacctttctgcgccaccgggtcatggaagtcatgcctttgatgtatgatctgaaggttccccgctgggacttccagaccggtaggcagttacgcacctctcctctctacgaccggctggatgcacagggagccaggtggatggagaaacatggatttgagaggccaaagtactttgttccccccgacaaggacctcctggcattggagcagagcaagactttctataagccagattggtttgacatcgtggagtctgaagtcaagtgctgtaaggaagctgtgtgtgtcattgacatgtcctctttcacaaagtttgagataacatccactggggatcaggcattagaagttctacagtacctcttctccaatgacctggatgtgcctgtgggccacattgtgcatactggcatgctcaacgagggtggagggtatgaaaatgactgcagcatagcacgactgaacaagcgcagtttcttcatgatctctccaaccgaccagcaggtccactgttgggcctggcttaagaaacacatgccgaaagacagcaacctgctcctggaggacgtcacctggaagtacacagccctcaatctgattggccctcgagctgtggatgtgctgtctgagttgtcctatgcccctatgactccagaccacttcccaagcctcttttgcaaggagatgagtgtgggctatgcaaatgggatccgggtgatgagcatgacgcacacaggagagccaggattcatgctctacatccccatagagtacgccctgcatgtatacaatgaagtgatgagtgttggccagaaatacggaatccggaatgctgggtattacgctcttcgcagtctccgaattgagaagttttttgccttctggggtcaggatataaataacctcaccacgcccctggaatgtggacgagagtctcgggtgaaattagagaagggcatggatttcattggtcgcgacgccctcctgcagcagaagcagaatggagtgtataaacgcctcaccatgttcatcctggacgaccatgattcagacctagacctttggccttggtggggagagcccatttaccggaatgggcagtatgttggcaagaccaccagcagtgcctacagctacagcctggagcgccacgtttgcctgggctttgtgcacaatttttctgaggacacgggggaagagcaagtggtgacagcagatttcatcaaccggggagagtatgagattgacatcgcgggataccgcttccaggccaaggccaagctctaccctgtcgcctccctcttcacccagaagcgccgaaaggatgacatggagctgagtgacttacatgggaagtgatgccaccagggcagcctcacctcctccccatcatcttgtcctagagtgggcgtcaccttggagcttctcttccttccgcctctgttcctcttctggagcctttgcctcccatctcttatctccttgatataattttgaacttgacctactttaaacttttttgctctgcagccttccttgcccttccacctcctcctcctaatattcactctgggctcttcttcccttcccacccctcactcagcttctcgtggtggcaggaggtatgtctgacaggacagaagcaagctccactgtggacatgagtgatggtgacagctgctttcaaattctgcatctcaaggcagggcaagccggggtggtgcaggtctcagggcacgagtccctctcccttgggttccattttcttggagcagcctattagttctggtggggttgccgtgtgtcggatgcagccctgaggggcagctcgtgcctgcagcccggcagctcgttctcctgttctgctgtgctgtgggctggcactcgatacctctggcaagaggatgattatctacctcactgataagaggcatcgcatggacgttctctggtctgtagtggagacaagcagttaacctagcaccatcctcatcctccctgcagaagccattagcagacctttgggccagggcagcctccctataattttcttcatctcttgctaatctctataataaggttgctttttctttcttagttgagtaaacaagtaagccacagtgtttgaaagggaaaaaccatattgccttgtgtgttgcttttcccagtcaaaagggtctgaccttagaaagtccccaccagtgatgctgagtgttctgctatggaaacaatgctgcttttctctcagctgtccaaagttcagccgttcctccttccccttctcccagtgcgtttgactttgtcaggtcagcctcacttgtccctttcacagttggcccataaagtcatgtttctctccctttagaatagggaggggaagggatcaggtgtgttgtcctgggcctttcaaccttgcgggctgtgctgagttccagagagctgccggaattccaggtttgactctccagcacagagcagagctacacagaggtgacccacgttagtccactgagagttctgagtccaaagggtgtacgttgcataaggctagagaccgcttttcctcctttccccccaggctctttgtttccctccacccacccttccatatcctctggagcaggagacaatgtgggtgcccagaagtgccctgcgctttcaggcagtgtctctgttttcccaaggtgaaacttagatatcatggactgttgtccagcctcaatgcttcattttccccttgcatatcaactgccctaatctgactttttttaagtgcaaataaactgctataagacattttggttagtaaaactctagcctttggcgtgttggtatcttggaagcattagctctgataggtctataagtgtattaagggacatccttccatttcattagagcagcttaaaatgctcaggtgtctgccttctctggtgtttctttgggatctctgtttacccacttacgctggctccttctagacatttcttgccacttccccaactagaccactcctagtgattactgactttagtgcctaaacctttttggaaggttctggttggcttgttagaggagcatatgattagaattctgtttgggggtctagttgtcttggagcaagtatgtacttaactagccgagagatgctgcctctaggcagagaggaggagaggtgttgccggctggagggccaaccagtgaacaccagctgtgaaggccttgggagaggaggaacaggcccttgggcagatgcaggcattaccagcagggagcagacttacctccgaagatggagacaggtgactgagagctgcaggcctcctctgctcttccaaacacgtagcatttgcacccctccaaagccatctttgtaaaggaaaacgtatttgtaattgaatccagaagaatttagttacacatagacataactcttcaaccttaactatggcaatacatttgtgctttaactgttacatagcagtatcaccacttaccaggatccaaatcgaaataataaaagctgtctccatagtttaaaatcgaatagtgccatcatcacagtatattagtcaaatagaagcttcatcagaaatgtatcccacatagagttttaagacttggattctcttctgcccttgttaatctccaactaattactacagattgacacgtttttaattagctgtcctttgtaagaagtcaggaaatctgatgctgtgtccaaaattatgcactgtttgttgaagtagaaccagaaatcctgacctcctgttaaatgacatcagtttccccctctgagcaacagactgcttgtcttgctaggagaggaggatggggggctgagcactcaggctgtccattgaaaccccttgtccatgaatagggtcatactcctaagactgatggggtgttgatcttctaggacatcacttgtttattcagtgccccaaacacagatttctcttctagcactttagagttgatccttgaagtctctcctggttcattcaaatacaagctgtgtgagtctggtggttttctgtgattggtctaatgtgagctctttgaacagacagatctgacagtgaatgactctcccctgcttctggcataactgctttgcctctgtctagtgtccaagcatcttagctgttcaagaggagagggcagcataacttcctgaccaccggtgtcagatatcagagcattctggactcctgagaggcagtggcctcttgagtgaacaggggaggccagtagatgccccagatccagagccgtggctgcaaatccagcaggaataaggagggacaaccacagcctcctcatccatgtgtcatttccaagggtttgccttgtgtctcagctcattctgggcagcacgtttgtcttctgtccctagagatttgaaggattttggactcttgtgaatgggtgactggacttggctttacagagttgggtgcttttttctctctgcaattacctgtcatagcattttgtgctcaccacgaaggatggtctctgccttctcttgtcggtgtatgccatctgaacctaggaacacaaagtatattggcctcaaacggagacccagggttgccagttttccgtgggccttcccctcccttgaaatgtctttaattacctccccttcatcgtcaggccacgtgtgacttctgttcttagcactgccagggtcattgacttccatctaagcttgcatcaggaagatgttccttctgtgatcattggtactgaagccagaaaagctctcattcaggaactctgaagagcaaaaagggacaaacactaactgctgagctgggccatttgatctcctttcaccttgcattgctgtcacagcaccttgtatgatggcaggacaggctccagcagagagaactgcacagtgaccactgtatttttcacgctcttccagggatccctgtcccccgacattgaagagatctcattcaggccagagacacagagaccacatagcccagtgattaaaccccggtttcactctggccccaggagtggagcctggccactcctgtttggttctcactgggaggcccactggccttggatcatctcctcatgcacacccggagttttacctgcttgcttgctttcctggactgctgtttgcaagaaagtaactaaaacatgaaaagtaaacctccagcttccacagtatattacctgccgttgcatgcatttgaaagttagcctcctcccttgccaccgtcttggtggcagtagcgatgcaagaatgatgggagctttccgagagcgttcagtgtttcactgaagacaggacccatagccttcatttctggctctgtgtctcctctggcatatggacacatttcctggcatttgcctgagtctacaccactttttgagaacctgaaatagaagggaatcttctgtggcccacagtctccatattggcactagaagactggcctggcggaggaatttgcgttggcttgctttcaggggttagctacaagattcagctttatatctctgttgcttcttggccagtgtagtcaataagggtcttctttaacatctaagatagaggtttggttggccgggcgtggtcgcttactcctgtaatcccagcactttgggaggcccagtgaggtgggagaattgcttgaacccaggaggcagaggttgcagtgagctgagattgcaccactgcactccagcctgggtaacagagtgagactcttgtctcaaaaaaaaaaaaaaaaaaatc

SEQ ID NO: 596 - DNA, 3260 bp, Homo sapiens
  source 1..3260: mol_type = genomic DNA
ccggtctgcagccttgtagtggggctggagcagagcctgccgcgaacccccggagcccacgatccctcgtgccatccctcgaatccaccagcacgagcgtcccacccgcgcctgggaccatggccactgactcatgggccctggcggtggacgagcaggaagctgcggctgagtcgttgagcaacttgcatcttaaggaagagaaaatcaaaccagataccaatggtgctgttgtcaagaccaatgccaatgcagagaagacagatgaagaagagaaagaggacagagctgcccagtccttactcaacaagctgatcagaagcaaccttgttgataacacaaaccaagtggaagtcctgcagcgggatccaaactcccctctgtactcggtgaagtcttttgaagagcttcggctgaaaccacagcttctccaaggagtctatgccatgggtttcaatcgtccatccaagatacaagagaacgcattgccactgatgcttgctgagcccccacagaacttaattgcccaatctcagtctggtactggtaaaacagctgccttcgtgctggccatgcttagccaagtagaacctgcaaacaaatacccccagtgtctatgtctctccccaacgtatgagctcgccctccaaacaggaaaagtgattgaacaaatgggcaaattttaccctgaactgaagctagcttatgctgttcgaggcaataaattggaaagaggccagaagatcagtgagcagattgtcattggcacccctgggactgtgctggactggtgctccaagctcaagttcattgatcccaagaaaatcaaggtgtttgttctggatgaggctgatgtcatgatagccactcagggccaccaagatcagagcatccgcatccagaggatgctgcccaggaactgccagatgctgcttttctccgccacctttgaagactctgtgtggaagtttgcccagaaagtggtcccagacccaaacgttatcaaactgaagcgtgaggaagagaccctggacaccatcaagcagtactatgtcctgtgcagcagcagagacgagaagttccaggccttgtgtaacctctacggggccatcaccattgctcaagccatgatcttctgccatactcgcaaaacagctagttggctggcagcagagctctcaaaagaaggccaccaggtggctctgctgagtggggagatgatggtggaacagagggctgcagtgattgagcgcttccgagagggcaaagagaaggttttggtgaccaccaacgtgtgtgcccgcggcattgatgttgaacaagtgtctgtcgtcatcaactttgatcttcccgtggacaaggacgggaatcctgacaatgagacctacctgcaccggatcgggcgcacgggccgctttggcaagaggggcctggcagtgaacatggtggacagcaagcacagcatgaacatcctgaacagaatccaggagcattttaataagaagatagaaagattggacacagatgatttggacgagattgagaaaatagccaactgagaagctccaccagccactgatgccagccctggcactgcccctgcacaggagacaagtgcgttcagggcacaggccccgacatcaccccaaggacaacggcacaagtagagagaaactacctacctcacttcaaattatgtttggacttgacaaaaatgtatgcaaatgatgggggatggtagaaaaaaattatttacacaaccttggaagattaggcatgaatacacagagatttaccttttggaagtttcatcttttaatttggccagtgtttccttcatgctaatctagatgctgtggctgattacttgcccaggatctcctgtggcagcctctgcttgttctctggcttggagtggatggggcagcctccagctcctgtggaagtaatggaatagtggtggaaagggaacacagagagggaggcttccagtaagataggtgtgtaagcccagccatcatgtttggaatggcatgaggcagcagaggaggcctgagagctgctgctttggacttgggggtgggacagctcatctgagtattgccagccccctgtcctagtgcccacagcagaagggaatttgttaaataagcatggaccaaaatgccaacctctcggttgtgtatatgggtttgtgtcacaggactgtgacctgttctcggtgggtgcagtctgtgtagagtgcacatctgattattggtgggtcctgtgcctgtgcttaagcaagtcctgtggagaagtcatcatggagaattagtggtggccctagcgtgccacaaaacctggtctcatgagcatttgcaacatcccttttacatccttaatatccccttaccccacagtagccccaaacaaatgtgatctgaggtttagatcctcagtgaaaattgtggtttcaagtcttcatggccagcctcaaggcagttctagatgtgatcagcagtagtcacaaattcttgttttgtctccacacccagaaggcaagttttgtcagagctggggaataatttcagatatttgacatcttgattataaagggcttctgaacatctgtgtttactgcctttggaatacaaacaggtgcaactgagggactagctacactaccaccatttatctgtccaaggcaagagtatcaccaaggcctttgctccagccttacttggcatctttgcgcaagatagtcagagcaaacaatagtaatggacacttctcacacctggccaaggctgttggtacccacgaaatgacagcaaagatgagaggaaactgaattgcaagagcaatatgaaaccccaaccaagaggagtactctgcagttctttggctttggtatagagtggccactttctctaggacctggaagaagagtttgatggctaagaacgattgtgatcctaggtcttctttgtacgcatctccgtatttaggccagatctgcctcctgggaagggaaggggccaatgtcagcctccaggtgatttctttaatctgacattacaaagagaccaacagactgccaattctaccacattcccctggtgggtactcgactatgtagttttctctatgcttctggtcaactctgacacatcttggaattcttgtaataagaaaagaaatttttatacttttttctccttccctgagtcctgtggaccaaccctgaaatactaaaaacaagggcaataattaaagaa

SEQ ID NO: 597 - DNA, 3907 bp, Homo sapiens
  source 1..3907: mol_type = genomic DNA
aaagagcccgctccgccgagcgccgggcgacggcaggaagcccctccgcttggccagaatggagcagccgaagggagttgattggacagtcatcatcctgacctgccagtacaaggacagtgtccaggtctttcagagagaactggaagtgcggcagaagcgggagcagatccctgctgggacgctgttactggccgtggaggacccagagaagcgtgtgggcagcggaggagccaccctcaacgccctgctggtggctgctgaacacctgagtgcccgggcaggcttcactgtggtcacatccgatgtcctgcactcggcctggatcctcattctgcacatgggtcgagacttcccctttgatgactgtggcagggctttcacctgcctccccgtggagaaccccgaggcccccgtggaagccttggtctgcaacctggactgcctgctggacatcatgacctatcggctgggcccgggctccccgccaggcgtgtgggtctgcagcaccgacatgctgctgtctgttcctgcaaatcctggtatcagctgggacagcttccggggagccagagtgatcgccctcccagggagcccggcctacgctcagaatcatggcgtctacctaactgacccccagggccttgttttggacatttactaccagggcactgaggcagagattcagcggtgtgtcaggcctgatgggcgggtgccactggtctctggggttgtcttcttctctgtggagactgccgagcgcctcctagccacccacgtgagcccgcccctggatgcctgcacctacctaggcttggactccggagcccggcctgtccagctgtctctgttttttgacattctccactgcatggctgagaacgtgaccagggaggacttcctggtggggaggcccccagagttggggcaaggcgatgcagatgtagcgggttatctgcagagcgcccgggcccagctgtggagggagcttcgcgatcagccccttaccatggcctatgtctccagcggcagctacagctacatgacctcctcagccagtgagttcctgctcagcctcacactccccggggctcctggggcccagattgtgcactcccaggtggaggagcagcagcttctggcggccgggagctctgtggtcagctgcctgctggagggccctgtccagctgggtcctgggagcgtcctgcagcactgccacctgcagggccccattcacataggcgctggctgcttggtgactggcctggatacagcccactccaaggccctgcatggccgggagctgcgtgaccttgtcctgcagggacaccacacgcggctacacggctccccgggccacgccttcaccctcgttggccgtctggacagctgggagagacagggggcaggcacatatctcaacgtgccctggagtgaattcttcaagaggacaggtgttcgagcctgggacctgtgggaccctgagacgctgcccgcagagtactgccttcccagcgcccgcctctttcctgtgctccacccctcgagggagctgggaccccaggacctgctgtggatgctggaccaccaggaggatgggggcgaggccctgcgagcctggcgggcctcctggcgcctgtcctgggagcagctgcagccgtgcctggatcgggctgccacgctggcctctcgccgggacctgttcttccgccaggccctgcataaggcgcggcacgtgctggaggcccggcaggacctcagcctgcgcccgctgatctgggctgctgtccgcgagggctgccccgggcccctgctggccacgctggaccaggttgcagctggggcaggagaccctggtgtggcggcacgggcactggcctgtgtggcggacgtcctgggctgcatggcagagggccgtgggggcttgcggagcgggccagctgccaaccctgagtggatgcggcccttctcatacctggagtgtggagacctggcagcgggcgtggaggcgcttgcccaggagagggacaagtggctaagcaggccagccttgctggtgcgagcggcccgccactatgagggggctggtcagatcctgatccgccaggctgtgatgtcagcccagcactttgtctccacagagcaggtggaactgccgggacctgggcagtgggtggtggctgagtgcccggcccgtgtggatttctctgggggctggagtgacacgccaccccttgcctatgagcttggcggggctgtgctgggcctggctgtgcgagtggacggccgccggcccatcggagccagggcacgccgcatcccggagcctgagctgtggctggcggtggggcctcggcaggatgagatgactgtgaagatagtgtgccggtgcctggctgacctgcgggactactgccagcctcatgccccaggggccctgctgaaggcggccttcatctgtgcagggatcgtgcatgtccactcggaactccagctgagtgagcagctgctccgcaccttcgggggcggctttgagctgcacacctggtctgagctgccccacggctctggcctgggcaccagcagcatcctggcaggcactgccctggctgccttgcagcgagccgcaggccgggtggtgggcacggaagccctgatccacgcagtgctgcacctggagcaggtgctcaccactggaggtggctggcaggaccaagtaggtggcctaatgcctggcatcaaggtggggcgctcccgggctcagctgccactgaaggtggaggtagaagaggtcacggtgcctgagggctttgtccagaagctcaatgaccacctgctcttggtgtacactggcaagacccgcctggctcggaacctgctgcaggatgtgctgaggagctggtatgcccgacttcctgctgtggtgcagaatgcccacagcctggtacggcaaactgaggagtgtgctgaaggcttccgccaaggaagcctgcctctgctgggccagtgcctgacctcgtactgggagcagaagaagctcatggctccaggctgtgagcccctgactgtgcggcgtatgatggatgtcctggccccccacgtgcatggccagagcctggctggggcaggcggtggaggctttctctatctgttgaccaaggagccacagcaaaaggaggccttggaggcggtgctggccaagaccgagggccttgggaattacagcatccacctggttgaagtggacactcagggcctgagcctgaagctgctggggaccgaggcctcaacctgttgccctttcccatgaagctggcttctctctgcaacaggagaaaacctggagctacagtgtcccccaccttccttgccccatgggaacctccacctcctactccccacccacctctgcgaatctgctcccaaaggaagctgaccagagcaagatctgggcaagcagagagtgcctgggacaggactgtgacctggtggacaggggcctagatgtagcctctgttcctcctggacataggaaggtcccaagcttagtatcccacgtggcctttacaaatcctatggctggccttctcattccacaagggccctggaaagggttgacagccagccttggcatatggctgggagtcccttagcaaggccaaccctgaagaggccctttgaggcattccctatggcttagagttgtagacttacactcaaccctcatgtgagcgtgggagtgagggtggcggtcccttgccaagttggtagcagtgacccagtgattcactgccatcccaggccttaactagcaaaactacggagcgtgccaagtgacctggtgcctgtgggaagtgggttctcaggactggcattcttggaataaattcactctgtccttgca

SEQ ID NO: 598 - DNA, 4564 bp, Homo sapiens
  source 1..4564: mol_type = genomic DNA
aagatttgggggtcgccttgccggcctcctgtcctcctccggcggcggcggagcccgagagaactaggtgaacaccgctttgccagcctcacacagcgtcccctggctctgccgccgctccggacgtcgccctcccgttctgcttgggtccccttagtcgctacctttgctgggatccccctcctccatcctgtggcttcgggttgccgaagagcgatgctcggagggcggccggaagtggcgttggccgccattggcctgccggccagccaccttgctgtcctccgccgccttccgggtgttacatgcagccgggctcggcccctccccctggccggatggatccgtcggcgccacagccccgcgcggaaacctcaggcaaagacatatggcatccaggagaaagatgtcttgccccttctccagataatggaaaactttgtgaagcaagcataaaatctatcacagtggatgaaaatggcaagtcatttgcagtcgtcttatatgcagattttcaagaaaggaaaatacctcttaaacagcttcaagaagtgaaatttgttaaagattgccctaggaatcttatatttgatgatgaagatttagaaaaaccttatttcccaaaccgaaaatttccatcatcttctgttgcttttaaattatctgacaatggagactctattccttataccatcaataggtatttgagagactaccaaagagaaggaacccggtttctttatggacactacatccatggaggagggtgcattctgggtgatgacatgggacttggaaaaacagtacaggttatttcatttctggctgcagttttgcataaaaagggaactcgtgaggatattgaaaataacatgccagagtttttactaagaagtatgaaaaaggaacccctttcttctacagcaaaaaagatgttcttaatagttgctcctctttctgtcctctacaactggaaggatgaattggacacctggggatatttcagagtcactgttttacatggaaacagaaaagataatgaattaattcgtgtaaagcagaggaaatgtgaaattgctctaacaacttatgaaacactacgcttatgcctggatgaacttaacagtttggaatggtcagctgtcattgtggatgaagctcatagaatcaagaatccaaaagctagagtaacagaagttatgaaagctttgaaatgtaatgtccgcattggcctcactggaaccatccttcagaacaacatgaaggaactgtggtgtgttatggactgggctgtgccaggccttttagggagtgggacctacttcaagaagcagttttctgacccagtagaacatggtcagagacacacggcaacaaagagagaactagccactggccgaaaggccatgcaaagacttgccaaaaagatgtctggctggtttctcaggcgcaccaagactcttatcaaggatcagttgcctaagaaggaagaccggatggtgtattgttctttgacagatttccagaaagctgtctatcaaacagtgttagaaacagaggacgtgactttgatacttcaatcttctgagccttgtacctgtaggagtggccaaaaaaggagaaattgttgttataagaccaattctcatggtgaaacagtgaaaaccttgtatctcagttaccttacagtccttcagaaggtagctaaccatgtcgcgctactgcaagctgctagtacttccaaacaacaggaaacacttatcaaaaggatatgtgatcaggtattttccagattcccagattttgtgcagaaaagcaaagatgcagcctttgaaacactttctgaccctaaatacagtggaaaaatgaaggtccttcagcagcttttaaatcattgcaggaaaaacagagataaagttcttctcttttctttttccaccaagttgcttgacgtgctacagcagtactgtatggcgtctgggcttgattaccgacgacttgatggaagtacaaaatcagaggaaagactcaagattgtaaaagagttcaacagtacacaagatgttaacatttgccttgtctctacaatggctggtggactaggcctcaattttgtcggtgccaatgttgttgtattatttgatcctacttggaatccagccaatgatcttcaagccattgacagagcatataggattggacaatgtagagatgtcaaagtgcttaggctgatatccttgggaactgtggaggaaatcatgtatttacgacagatatacaagcagcaacttcactgtgtggtggttggaagtgaaaatgccaaacgatattttgaagcagttcaaggatctaaagagcatcaaggagagctttttgggatccataacctcttcaaatttaggtcccaagggtcttgtcttacgaaggacatcctggaggtgtgaacttcttctctgaccttttcaataatattttaaatacagtttttcttcctcaggaaatctgaaatacaattgctgttgccttttcagagaaacttttggttttctttatcaaaaatgccttggaatttttacttttagagaataagaaatgaattattgtacctctaaactaagattttcccatgcataattacaaataatgcacacacacaaatgtatatgctgggtagtatgaactccaaggcaattttaaataggcagagagaagtttatagttttgaaaacagctgctgaagtcaggaactaaaaaaagaggttttcctaaataaacaaaaatataaaatgtgttttaattaaaagttaccaaatactccctgagatgtactctcatgtctcatggagatttttgttttctgttcccaataaaaattccacaccagtattttaaactctccctgttgtgttcatcctcagcatacagatgtttcttattcctcaaacaaaatattttatatccttttttaaaaaaatctttaagttcttttatataccggaatactaaggatattaacctattttctaattgatattcatataggtatcataaaatcctggagtatcatctttttcaacctcctcatggtatagatgaggaaactgagtcttagagaacttcaggatatttctcttgacttccaggactttgtagtaaaatcttaatgtacttcatttattcagtaagtaccataaaggcagttcaaggagcaattggttcctgtccttgaggaacttaaaccatcttgaccggaggtggaagagaacgtttacataataaccatgcaatgtcaggaatcgtatgctgaacaagttaaacagtagaccatggatggctgggggagaggaaggtatatattatttgaatcctataaatgttgttactattatacagtttctgatatatactgctgagtttctattttatagtaactatatttgattctgaattcagtggcccatttggagtcctactttttggggttttttccccttgctttttaaatacgctgtttctttcatgaatttgttctttccagtttcccttttcatatcaataactttgtttgccctccagctcccaaacccagctgctacctccatctcagagtactacttgacatgcctatattgatgttaaagtcaattgtctataaaaatattagcattttattatttatcctgttttctgtcatatatgacatagttacctgtttttatcagaataaccacctatttctttgttaaacaagtgttatataagacatatcaggatgacaggttattaagtagaaaaagttcccttgtttatcgtgccactgcactccagcctggggaacaaagcaagagacttgtctcaaaaacaaaaaacaaaaacaaaaaaaagttctcttgttcactggttattctaagaatatcttgtttcaccttcagaagtgtttattaatgacaggaccatccatgtcttacattttcttttttaaaaatatcttttaagttctttaatataccagaacactaagaatattaacctattttctaattgatattaataaggggtgacaaggccatccatgccctacatttgtcttgctaggcatatcattggcacttgattattaagttaaattttgaattaaaattactcatttgtcatcaatcagaatgtaaatttattcaggattggttagattcatgctgctttgggccaaaaggtgcttctaaatattattattagccccatataatgggagtacctatcataaagtaaaaggagtatttcacttcatgtgagacatttttaatttttaaaggttgtataaaatctcttttaaaatgttttaagatgtaaaaatttgaatatttacacttataatcttatgatttctgggcaatttcattctgttttgcattgactttccattatctatattatggtttctcttcaaagatagatattgagagttcattttacaagtatttgttgagcatctgctaaatgtcaggtactgttcatagagctttgcatacataaaagaacaaaataaacaaaacgatcctgtcta

SEQ ID NO: 599 - DNA, 2586 bp, Homo sapiens
  source 1..2586: mol_type = genomic DNA
gttttccggagactgttagaggaagagtcgctttttcctgcctcccaggctgcccagcggcgccggttgccggggaacgcaggcgccgtggggagggatggcgggaggatactgcttaggtgctggagacggagttgagctggtgaagaagagctcgggctcatcatgaaacaacgaaaaggccaagggtctgggggcagccgtgggcgcaaaaaaagaggtttaagtgacatttctccatctacaagcctgccacctctggttgaaggccagctacgctgttttctaaaacttactgttaatagagtcatatggaagattgcaaagcctcccacttgtgtacttgtccgagtgagatggtggggagaaacatcagatggaaccctcttttgtcccagggatgcattgcagactgaaccaaaagctgtgagaacaactacacgttacgctattcgttgtggtccaaaacagtttacctcttatctaacagatatggctgtgctggtgctggaagtaatcaccaaacttgatggtcttccaattggtagagttcagatcaatggactagctcaactttctccaacccatcaaatcaatggattttttaccattgtttcatcaacgtctaagaaacttggagaactccaggtctcacttgccctggaacctctgtcagaaacttacgacagctaccatccacttcctaccactgacatgacagaaaatgtgcttttatctaagcagggattcagagagaatactgaacccagcagtacccagtttcaggttccatcaaggcctcgcgacatacataccatcaaaattgatggaaaagagttagcagccaacagcagtagatcaaccactccgaggggaaaagaccatgtatgctttgcagagaaccctgatacaataaaggattcttcctttggactacagcacagtcttaattcaggacagagtttagagtctgtaactctgaaaggcagagctccacggaagcagatgtcccttctgaacagttctgaattccagcctcaaattagaacagttgccaagagtcacagtgactcatgcattctttcttcaaacaacctccctaccaaggatcttctttcagctctgttagaacaaggcaataaactgcgtaatgccatggtgatttctgcaatgaaatcaagcccagagaccagcatgttgttggaccaagttcatcctctattaatgaagattctcttagagcatcaacacagatcagagccttttctaggaatcggtttaaagaccacattgaagatcacctcctcccttcaactgagaatacattttggagacatgacacaaaagctgataccagagctatacagctgctattaggcagtgctgaattatcccaaggcaatttctgggatgggctaggctctcctccagattccccatctcctgggagtgatgtgtattgcatcagtgagctgaatgaccctcagtatgaccagagtcttctggagaatttattttatacagcacctaaatctgataccagcatcagtgatttcctcagtgaagaggatgatatcgtcccttctaaaaaaataagccagtcaacagctcttgccagatcatctaaggttctggagtcaagtgatcataagctgaagaagaggtcagcaggcaagagaaatagaaatttggttgaacaacagatgctctcagaaactccagaagatgcccaaacgatgacactaagtgtggatagactggcccttttgggtagaacacattcagtcagaatcatcatcgaaaccatgggagttcctccagatagtcctcagatgacccctggcaaaaaaagctatgctggtccaccacctaaggtgactacagcaaaaaagcgcactttctttgtagaatatcactttcctgtgggcttttcggaaagcggattgggaaagacagctttgatcactgaggttgttcgactcgcctccagtaaaattacagatggaagtaagagacacactggttttctgcaccttagacattctgactttggaagaatttttgaattcctaattactcatttgactttttttttttttttttttttgacatggagtctcactctttcgcccaggctggagtgtggtggcgcaatctctgctcactgcagcctccacctcccgggttcaagtgattctcccatctcagcctcctgagtagctgggattacaggcgtatgccaccacacccagctaatttttgtattttttagtagagacagggtttcaccatgttggccagggtggtctcaaacccctgaccttaagtgatccgcctgcctcggcctcccaaagtgctgggattacaggcataagccatcacgcccagccaatattttcaaggctgtgcaaccatcaccacaatctaattttagaacattttcatcccccctaaaagaaaccccatacttactagcattcgcttcgcatttccctcttcccccagccctaagcaactgctaatctttctttccctatcaatttgtccattctggatgtctcatataaatggaatcatgcaacttgt

SEQ ID NO: 600 - DNA, 4716 bp, Homo sapiens
  source 1..4716: mol_type = genomic DNA
aggcggctgggcgatgcgcttgcgcactgagaactcacaccatatgtgtcctgttccagtgcgcgggtctgtggagagccgggtgcgagcggcggcagcacgaggggaaaagagctgagcggagaccaaagtcagccgggagacagtgggtctgtgagagaccgaatagaggggctggggccacgagcgccattgacaagcaatggggaagaaacagaaaaacaagagcgaagacagcaccaaggatgacattgatcttgatgccttggctgcagaaatagaaggagctggtgctgccaaagaacaggagcctcaaaagtcaaaagggaaaaagaaaaaagagaaaaaaaagcaggactttgatgaagatgatatcctgaaagaactggaagaattgtctttggaagctcaaggcatcaaagctgacagagaaactgttgcagtgaagccaacagaaaacaatgaagaggaattcacctcaaaagataaaaaaaagaaaggacagaagggcaaaaaacagagttttgatgataatgatagcgaagaattggaagataaagattcaaaatcaaaaaagactgcaaaaccgaaagtggaaatgtactctgggagtgatgatgatgatgattttaacaaacttcctaaaaaagctaaagggaaagctcaaaaatcaaataagaagtgggatgggtcagaggaggatgaggataacagtaaaaaaattaaagagcgttcaagaataaattcttctggtgaaagtggtgatgaatcagatgaatttttgcaatctagaaaaggacagaaaaaaaatcagaaaaacaagccaggtcctaacatagaaagtgggaatgaagatgatgacgcctccttcaaaattaagacagtggcccaaaagaaggcagaaaagaaggagcgcgagagaaaaaagcgagatgaagaaaaagcgaaactgcggaagctgaaagaaaaagaagagttagaaacaggtaaaaaggatcagagtaaacaaaaggaatctcaaaggaaatttgaagaagaaactgtaaaatccaaagtgactgttgatactggagtaattcctgcctctgaagagaaagcagagactcccacagctgcagaagatgacaatgaaggagacaaaaagaagaaagataagaagaaaaagaaaggagaaaaggaagaaaaagagaaagagaagaaaaaaggacctagcaaagccactgttaaagctatgcaagaagctctggctaagcttaaagaggaagaagaaagacagaagagagaagaggaagaacgtataaaacggcttgaagaattagaagccaagcgtaaagaagaggaacgattggaacaagaaaaaagagaaaggaaaaagcaaaaagaaaaagaaagaaaagaacgcttgaaaaaagaagggaaacttttaactaaatcccagagagaagccagagccagagccgaagctactcttaaactgctacaagctcagggtgttgaagtgccatcaaaagactctttgccaaagaagaggccaatttatgaagataaaaagaggaaaaaaataccacagcagctagaaagtaaagaagtgtctgaatcaatggaattatgtgctgctgtagaagttatggaacaaggagtaccagaaaaggaagagacaccacctcctgttgaaccagaagaagaagaagatactgaggatgctggattggatgattgggaagctatggccagtgatgaggagacagaaaaagtagaaggaaacaaagttcatatagaagtaaaagaaaaccctgaagaggaggaggaggaggaagaagaggaagaagaagatgaagaaagtgaagaagaggaggaagaggagggagaaagtgaaggcagtgaaggtgatgaggaagatgaaaaggtgtcagatgagaaggattcagggaagacattagataaaaagccaagtaaagaaatgagctcagattctgaatatgactctgatgatgatcggactaaagaagaaagggcttatgacaaagcaaaacggaggattgagaaacggcgacttgaacatagtaaaaatgtaaacaccgaaaagctaagagcccctattatctgcgtacttgggcatgtggacacagggaagacaaaaattctagataagctccgtcacacacatgtacaagatggtgaagcaggtggtatcacacaacaaattggggccaccaatgttcctcttgaagctattaatgaacagactaagatgattaaaaattttgatagagagaatgtacggattccaggaatgctaattattgatactcctgggcatgaatctttcagtaatctgagaaatagaggaagctctctttgtgacattgccattttagttgttgatattatgcatggtttggagccccagacaattgagtctatcaaccttctcaaatctaaaaaatgtcccttcattgttgcactcaataagattgataggttatatgattggaaaaagagtcctgactctgatgtggctgctactttaaagaagcagaaaaagaatacaaaagatgaatttgaggagcgagcaaaggctattattgtagaatttgcacagcagggtttgaatgctgctttgttttatgagaataaagatccccgcacttttgtgtctttggtacctacctctgcacatactggtgatggcatgggaagtctgatctaccttcttgtagagttaactcagaccatgttgagcaagagacttgcacactgtgaagagctgagagcacaggtgatggaggttaaagctctcccggggatgggcaccactatagatgtcatcttgatcaatgggcgtttgaaggaaggagatacaatcattgttcctggagtagaagggcccattgtaactcagattcgaggcctcctgttacctcctcctatgaaggaattacgagtgaagaaccagtatgaaaagcataaagaagtagaagcagctcagggggtaaagattcttggaaaagacctggagaaaacattggctggtttacccctccttgtggcttataaagaagatgaaatccctgttcttaaagatgaattgatccatgagttaaagcagacactaaatgctatcaaattagaagaaaaaggagtctatgtccaggcatctacactgggttctttggaagctctactggaatttctgaaaacatcagaagtgccctatgcaggaattaacattggcccagtgcataaaaaagatgttatgaaggcttcagtgatgttggaacatgaccctcagtatgcagtaattttggccttcgatgtgagaattgaacgagatgcacaagaaatggctgatagtttaggagttagaatttttagtgcagaaattatttatcatttatttgatgcctttacaaaatatagacaagactacaagaaacagaaacaagaagaatttaagcacatagcagtatttccctgcaagataaaaatcctccctcagtacatttttaattctcgagatccgatagtgatgggggtgacggtggaagcaggtcaggtgaaacaggggacacccatgtgtgtcccaagcaaaaattttgttgacatcggaatagtaacaagtattgaaataaaccataaacaagtggatgttgcaaaaaaaggacaagaagtttgtgtaaaaatagaacctatccctggtgagtcacccaaaatgtttggaagacattttgaagctacagatattcttgttagtaagatcagccggcagtccattgatgcactcaaagactggttcagagatgaaatgcagaagagtgactggcagcttattgtggagctgaagaaagtatttgaaatcatctaattttttcacatggagcaggaactggagtaaatgcaatactgtgttgtaatatcccaacaaaaatcagacaaaaaatggaacagacgtatttggacactgatggacttaagtatggaaggaagaaaaataggtgtataaaatgttttccatgagaaaccaagaaacttacactggtttgacagtggtcagttacatgtccccacagttccaatgtgcctgttcactcacctctcccttccccaacccttctctacttggctgctgttttaaagtttgcccttccccaaatttggatttttattacagatctaaagctctttcgattttatactgattaaatcagtactgcagtatttgattaaccaagcttctgcagattttgtgattcttgggacttttttgacgtaagaaatacttctttatttatgcatattcttcccacagtgatttttccagcattcttctgccatatgcctttagggcttttataaaatagaaaattaggcattctgatatttctttagctgctttgtgtgaaaccatggtgtaaaagcacagctggctgctttttactgcttgtgtagtcacgagtccattgtaatcatcacaattctaaaccaaactaccaataaagaaaacagacatccaccagtaagcaagctctgttaggcttccatgttagtgtagcttctctcccacaagttgtcctcctaggacaagaattatcttacaaactaaactatcatcacactaccttgtatgccagcacctggtaacagtagagatttttatacattaatcttgatctgttttaatcttgatctgttttagtagagatttttatacattaa

SEQ ID NO: 601 - DNA, 685 bp, Homo sapiens
  source 1..685: mol_type = genomic DNA
ggcggggcctgctgggtggcttagcactgcagggctctgcgcgggaacgctaacctggtccggagcgagtctgggtctcagccccgcgaacagcctttcacgagtcttcaagctttcaggctatcttctagtcaagatgagtgataagccagacttgtcggaagtggagaagtttgacaggtcaaaactgaagaaaactaatactgaagaaaaaaatactcttccctcaaaggaaactatccagcaagagaaagagtgtgttcaaacatcataaaatggggatcgcctcccaacagcagatttcgacattacctgagagtcttgattttaggcttgttttttgtaaacccatgtgtttgtagagattttaggcgtcttcggatatcttctcacctatgttccctggctaagaagtcagaggtagccaatgtttccttaaattcatttttaaacttaccattggtgcatatgttccagatggcagatgctgtcaataatctcaccattgatgacctttgtgtatgtagttcttgcatcctatactggataagcctgttttaacctgctatgatgggtgcttccattgcttcataatcttcatgaagttgcatgcttttgcagcttttcacagtttatttgcatttctaatgtagtaataaagtaaccaatataatcattatcttga

SEQ ID NO: 602 - DNA, 2599 bp, Homo sapiens
  source 1..2599: mol_type = genomic DNA
cctcgctttcgctgggcgctgtccctctccgcggcggtctggtttccccgacgtgttttgtttgcgacgctgtcgtgtaacagcgcgctttacggccgcggggacggagcgagccggcgccagggcccctcgggccgggaagaggggaaggggagcgaggttgatgcccggcggaggggcgagcgcggcgtctggccggcttctcaccgccgcggagcaaagagggtcccgggaagcggcagggtcggcgtccaggagcggcttcgggggctccggcggcggcagaggcggagcaagcggccccgggtccgggagcggaggcccggggggccccgcgggcaggatgagcttgaccccgaaggagctctcgagcctgctgagcatcatatcggaggaggcgggcggcggcagcaccttcgagggcctgtccaccgccttccaccactacttcagcaaggccgaccacttccgcctgggctcggtgctcgtcatgctgctccagcagcccgacctgctgcctagcgcggcgcagcgcctcacggcgctctacctgctctgggagatgtaccgcaccgagccgctggccgccaaccccttcgccgccagcttcgcgcacctgctcaaccccgcgccgcccgcccgcggcggccaggaacccgaccgccctccgctctcaggatttttacctcctataactccaccagaaaagttttttctttcccagctgatgctggcacccccacgggaactcttcaaaaagacgcctcgccagattgcactgatggacgttggaaacatgggccagtctgtggacattagtgggcttcagttagccttggccgaacgccaatctgaattgccaacgcaaagcaaagcgagcttccccagtattctcagtgacccagacccggattcttctaattctggatttgacagctcagttgcctctcagatcacagaagctttagtcagcggaccaaagccacctattgaaagccattttcgaccagagtttattcgtccaccgcctccactccacatttgtgaggatgaacttgcttggctaaaccccacggagcctgaccacgcgatccagtgggataaatcgatgtgtgttaagaatagcactggtgtggagatcaaacgaataatggccaaagccttcaaaagccccttatcctctccccaacaaacacagctacttggtgagttggaaaaagaccccaaacttgtctaccatattggcctcaccccagccaaacttcctgaccttgtggaaaacaaccctttagtcgctatagaaatgttgctgaaattaatgcagtcaagccagatcactgagtatttctctgtcctggtcaatatggacatgtctttacattcaatggaagttgtaaatcgactaactacagctgttgatctacctcctgaatttattcacctttatatatcaaattgcatctctacttgtgaacagattaaggataaatatatgcagaatcggttggtgcgtcttgtgtgtgtgtttctccaatccttgatccgtaacaaaattattaatgtacaggatttgtttatagaagtgcaggcattctgtattgaattcagtaggatacgagaagctgctggtcttttccggttgttgaagacattggatactggggaaacaccttctgagaccaaaatgtcaaaataatacctcatcagaaccatcccatccattcactgttcagctgtactgtgatttagtttttacaccgttaaaaccctgagtggattgcttggtttaatgcatataaacagtactttatctacttaaagcaaagttttgctttcttgaatgactttttctgtgagatgaatttttgataagaactagggaaaacatgtcttttaggtgtcttgctgatgactatccataggaggaatggctatcccaaaaaaagttccgcaaaaaagtagatgagtttcttttttttttaagcactaaagaacaaaatgcatttttcattaatacaggcttctgatgaaccaggaatcctgttttcgtaaagttccaatgttgatgagagtaaattcttaagcatttgtcctagaggtgaaagcagctgaatgtttctgaaccatcaagaggcaaacaaacaggagtttgtttcttgaacctgcttatgcacacagctcttaactcctcatgaggcacacagctcttaactcctgatgaaccaaggatttactcataactttctccttgtcatggaggcttaatagacaacagaataaatgcatttcttgggcctcttataaacttgggaattcttagaaagctgcttctattaccaggctgtaatagctggtatagttttttttttttctcttaagatgttctgttattagtctgagacagccatttttttgttttaaggaaaaatatcagtcagtgctccgggaggtaatttcctgtggggtctgcaccctcctgtctgggtggtggatgtgggtttgagaagtaggagagcagggtggtaccgtgtgggctcttaccctttatgtgattttggacaacagtgccttccattaaagttctttttatcaactgtta

SEQ ID NO: 603 - DNA, 3301 bp, Homo sapiens
  source 1..3301: mol_type = genomic DNA
gcgcgggccgggccgggcggcggcggcggcaccatgagcggccggaagcgcagcttcaccttcggggcctacggcggggtggacaagtccttcacttctcgccggagtgtgtggaggagcgatgggcagaaccagcacttccctcaggcactagacctgtcacgagtgaacttagttccctcctatactccttcactctaccctaagaacacagatctatttgagatgattgagaagatgcagggaagcaggatggatgaacaacgctgctccttcccgccgcccctcaaaacagaggaggactacattccatacccgagcgtgcacgaggtcttggggcgagaaggacccttccccctcatcctgctgccccagtttgggggctactggattgagggcaccaaccacgaaatcaccagcatccccgagacagagccactgcagtcgcccacaaccaaggtgaagctcgagtgcaaccccacagcccgcatctaccggaagcactttctcggcaaggagcatttcaattactactcactggacgctgccctcggccaccttgtcttctcactcaagtacgatgtcatcggggaccaagagcacctgcggctgctgctcaggaccaagtgccggacataccatgatgtcatccccatctcctgcctcaccgagttccctaatgttgtccagatggcaaagttggtgtgtgaagacgtcaatgtggatcggttctatcctgtgctctaccccaaggcttcccggctcatcgtcacctttgacgagcatgtcatcagcaataacttcaagtttggcgtcatttatcagaagcttgggcagacctccgaggaagaactcttcagcaccaatgaggaaagtcccgctttcgtggagttccttgaatttcttggccagaaggtcaaactgcaggactttaaggggttccgaggaggcctggacgtgacccacgggcagacggggaccgaatctgtgtactgcaacttccgcaacaaggagatcatgtttcacgtgtccaccaagctgccatacacggaaggggacgcccagcagttgcagcggaagcggcacatcgggaacgacatcgtggctgtggtcttccaggatgagaacactcctttcgtgcccgacatgatcgcgtccaacttcctgcatgcctacgtcgtggtgcaggctgagggcgggggccctgatggccccctctacaaggtctctgtcactgcaagagatgatgtgcccttctttggaccccccctcccggaccccgctgtgttcaggaaggggcctgagttccaggaatttttgctgacaaagctgatcaatgctgaatatgcctgctacaaggcagagaagtttgccaaactggaggagcggacgcgggccgccctcctggagacgctctatgaggaactacacatccacagccagtccatgatgggcttgggcggcgacgaggacaagatggagaatggcagtgggggcggcggcttctttgagtctttcaagcgggtcatccggagccgcagccagtccatggatgccatggggctgagcaacaagaagcccaacaccgtgtccaccagccacagcgggagcttcgcgcccaacaaccccgacctggccaaggcggctggaatatcactgattgtccctgggaagagccccacgaggaagaagtcgggcccgttcggctcccgccgcagcagcgccattggcatcgagaacatacaggaggtgcaggagaagagggagagccctccggctggtcagaagaccccagacagcgggcacgtctcacaggagcccaagtcggagaactcatccactcagagctccccagagatgcccacgaccaagaacagagcggagaccgcagcgcagagagcagaggcgctcaaggacttctcccgctcctcgtccagtgccagcagcttcgccagcgtggtggaggagacggagggtgtggacggagaggacacaggcctggagagcgtgtcatcctcaggaacaccccacaagcgggactccttcatctatagcacgtggctggaggacagtgtcagcaccactagtgggggcagctccccaggcccctctcgatcaccccacccagacgccggcaagttgggggaccctgcgtgtcccgagatcaagatccagctggaagcatctgagcagcacatgccccagctgggctgttagccgggccaccccctctgaaggtgaaactgagcagatgaggccacagaagcacaaggggaaggtgccgtgtcaagcccaggcagacgagacctctgccctgaagaccaacaccagcccgtgggctgccccctgcctccccaccctccccatggcccacccatctgggctgtctctgcagggcagagccgtccagacctgggatcagggaagctgctggcatcgtccccacccccagcctgggggtctgggctggggcagggattgctcagtggaagcaggactgggggtctggcttgccccctccctgggcctccatcacccctgagcatccctctggactcagagggaacaaggtgggagagagagtttgagacagctccgtgtggagagcttagcccctggaggcagcacaaggaggatgtgatatgtgggggagtgagcactgggttgggagccgggtcctggtttccaatttgggttctgctgtgtgactctgggcaagtcactctccctctctgggcatgtctgctacaaatggacaagattatttcagaggtcactgaagactgtgattacatgcacctgccttagaaggtaggattttcttcccagggacctcctatcaccctaccctgcttcttgaggtccctggagccccaggtgggctgaggggcagggagccggctgtgcccagtatgcctcctggaccctccagttctgccacaggtctgccgatgccctgtccactgcctacacatgacagacaagtaaccccctcatgggggatggggacctacctggctcctcagccagcacccagcttaacccctgccatcccatgctgggccctccaggccaagagtctcagctggccgagagtccaggccttgcctcccccgaccgccatggagggggcagcccggcacagctgctgggagcccttgtgtgtctggtcacactttttaggcgtcacgccaaaggccagcctcctggccccaatacccattttggaagcccctgtggccgtgtggatgtcggtaacagttgtataaaataaattctatttatcgctattgtacccaga

SEQ ID NO: 604 - DNA, 1692 bp, Homo sapiens
  source 1..1692: mol_type = genomic DNA
tggagactgaaagcggcggaagggacgctggaatgtggagcggttgtggggcggcagctgcggaactgcgcgattgtggttcccgccgtatttcccgttccccatctagtaactcccatctcagcccacgtatctccctgagtggaaatctcgggccccagaccagtcgattgggaggtccgccctccccttcagcgacttggtctgtgttttggcagttgccgcgacaacagtcacttccgggaaggggctctgcgaatctccttccgtcggtccgctcagaatcagctgtcctctcagactgtgtgggtggtttccccggccgcagctccgtacgggcttggattgctgggcctcggtgcaccccagcctcccccactcgggttctgagcttgagctggcggctctttaactctgcttcactgttgctcttggcaacatccacttccgggagcgagtgccgtttcccccgctcaccgcgggctagggagcgtgggattccggactgtgagcggctgttagtgcgtcgcagctgctggcgatccggcgaccctcggccggcaggacccgcgggccacgcagccggggccttctcaacgcctcagtacctcggcgggaccgccatggttctgctgcacgtgaagcggggcgacgagagccagttcctgctgcaggcgcctgggagtaccgagctggaggagctcacggtgcaggtggcccgggtctataatgggcggctcaaggtgcagcgcctctgctcagaaatggaagaattagccgaacatggcatatttctccctcctaatatgcaaggactgaccgatgatcagattgaagaattgaaattgaaggatgaatggggtgaaaaatgcgtacccagcggaggtgcagtgtttaaaaaggatgatattggacgaaggaatgggcaagctccaaatgagaagatgaagcaagtgttaaagaagactatagaagaagccaaagcaataatatctaagaaacaagtggaagccggtgtctgtgttaccatggagatggtgaaagatgccttggaccagcttcgaggcgcggtgatgattgtttaccccatggggttgccaccgtatgatcccatccgcatggagtttgaaaataaggaagacttgtcgggaacacaggcagggctcaacgtcattaaagaggcagaggcgcagctgtggtgggcagccaaggagctgagaagaacgaagaagctttcagactacgtggggaagaatgaaaaaaccaaaattatcgccaagattcagcaaaggggacagggagctccagcccgagagcctattattagcagtgaggagcagaagcagctgatgctgtactatcacagaagacaagaggagctcaagagattggaagaaaatgatgatgatgcctatttaaactcaccatgggcggataacactgctttgaaaagacattttcatggagtgaaagacataaagtggagaccaagatgaagttcaccagctgatgacacttccaaagagattagctcacctttctcctaggcaattataatttaaaaaaaaaaaaaaggccacttactgccctctgtaaaagatgttaacatttctagttttcttttagtgtgaatttttaaaatagcagttattcaaggttttagaacttaataaatacctagtcagaagaaaa

SEQ ID NO: 605 - DNA, 1161 bp, Homo sapiens
  source 1..1161: mol_type = genomic DNA
gagaggcccaagatggagacggcggcggctgtagcggcgtgacaggagccccatggcacctgcccagccccacctcagcccatcttgacaaaatctaaggctccatggagccaccacggggcccccctgccaatggggccgagccatcccgggcagtgggcaccgtcaaagtatacctgcccaacaagcaacgcacggtggtgactgtccgggatggcatgagtgtctacgactctctagacaaggccctgaaggtgcggggtctaaatcaggactgctgtgtggtctaccgactcatcaagggacgaaagacggtcactgcctgggacacagccattgctcccctggatggcgaggagctcattgtcgaggtccttgaagatgtcccgctgaccatgcacaattttgtacggaagaccttcttcagcctggcgttctgtgacttctgccttaagtttctgttccatggcttccgttgccaaacctgtggctacaagttccaccagcattgttcctccaaggtccccacagtctgtgttgacatgagtaccaaccgccaacagttctaccacagtgtccaggatttgtccggaggctccagacagcatgaggctccctcgaaccgccccctgaatgagttgctaaccccccagggtcccagctgccggtagtagaggaggtagtgatggaaccccccgggggagccccagcccagccagcgtgtcctcggggaggaagtccccacattccaagtcaccagcagagcagcgcgagcggaagtccttggccgatgacaagaagaaagtgaagaacctggggtaccgggactcaggctattactgggaggtaccacccagtgaggtgcagctgctgaagaggatcgggacgggctcgtttggcaccgtgtttcgagggcggtggcatggcgatgtggccgtgaaggtgctcaaggtgtcccagcccacagctgagcaggcccaggctttcaagaatgagatgcaggtgctcaggaagacgcgacatgtcaacatcttgctgtttatgggcttcatgacccggccgggatttgccatcatcacacagtggtgtgagggctccagcctctaccatcacctgcatgtggccgacacacgcttcgacatggtccagctcatcgacgtg

SEQ ID NO: 606 - DNA, 2410 bp, Homo sapiens
  source 1..2410: mol_type = genomic DNA
agcgcgagccccgccgccgccgagcatggacgaccccgactgcgactccacctgggaggaggacgaggaggatgcggaggacgcggaggacgaggactgcgaggacggcgaggccgccggcgcgagggacgcggacgcaggggacgaggacgaggagtcggaggagccgcgggcggcgcggcccagctcgttccagtccagaatgacagggtccagaaactggcgagccacgagggacatgtgtaggtatcggcacaactatccggatctggtggaacgagactgcaatggggacacgccaaacctgagtttctacagaaatgagatccgcttcctgcccaacggctgtttcattgaggacattcttcagaactggacggacaactatgacctccttgaggacaatcactcctacatccagtggctgtttcctctgcgagaaccaggagtgaactggcatgccaagcccctcacgctcagggaggtcgaggtgtttaaaagctcccaggagatccaggagcggcttgtccgggcctacgagctcatgctgggcttctacgggatccggctggaggaccgaggcacgggcacggtgggccgagcacagaactaccagaagcgcttccagaacctgaactggcgcagccacaacaacctccgcatcacacgcatcctcaagtcgctgggtgagctgggcctcgagcacttccaggcgccgctggtccgcttcttcctggaggagacgctggtgcggcgggagctgccgggggtgcggcagagtgccctggactacttcatgttcgccgtgcgctgccgacaccagcgccgccagctggtgcacttcgcctgggagcacttccggccccgctgcaagttcgtctgggggccccaagacaagctgcggaggttcaagcccagctctctgccccatccgctcgagggctccaggaaggtggaggaggaaggaagccccggggaccccgaccacgaggccagcacccagggtcggacctgtgggccagagcatagcaagggtgggggcagggtggacgaggggccccagccacggagcgtggagccccaggatgcgggacccctggagaggagccagggggatgaggcagggggccacggggaagataggccggagcccttaagccccaaagagagcaagaagaggaagctggagctgagccggcgggagcagccgcccacagagccaggccctcagagtgcctcagaggtggagaagatcgctctgaatttggaggggtgtgccctcagccagggcagcctcaggacggggacccaggaagtgggcggtcaggaccctggggaggcagtgcagccctgccgccaacccctgggagccagggtggccgacaaggtgaggaagcggaggaaggtggatgagggtgctggggacagtgctgcggtggccagtggtggtgcccagaccttggcccttgccgggtcccctgccccatcggggcaccccaaggctggacacagtgagaacggggttgaggaggacacagaaggtcgaacggggcccaaagaaggtacccctgggagcccatcggagaccccaggccccagcccagcaggacctgcaggggacgagccagccgagagcccatcggagaccccaggcccccgcccagcaggacctgcaggggacgagccagccgagagcccatcggagaccccaggcccccgcccggcaggacctgcaggggacgagccagccgagagcccatcggagaccccaggccccagcccggcaggacctacaagggatgagccagccgagagcccatcggagaccccaggcccccgcccggcaggacctgcaggggacgagccagccgagagcccatcggagaccccaggcccccgcccggcaggacctgcaggggacgagccagccgagagcccatcggagaccccaggccccagcccggcaggacctacaagggatgagccagccaaggcgggggaggcagcagagttgcaggacgcagaggtggagtcttctgccaagtctgggaagccttaaggaaaggagtgcccgtcggcgtcttggtcctcctgtccctgctgcaggggctggggcctccggagctgctgcgggctcccctcaggctctgcttcgtgacccgtgacccatgacccacagtgctggcctcctgtggggccactatagcagccaccagaagccgcgaggccctcagggaagcccaaggcctgcagaagcctcctggcctggctgtgtcttccccacccagctctcccctgcgcccctgtctttgtaaattgacccttctggagtggggggcggcgggcagggctgcttttcttagtctgataccaagcaaggccttttctgaataaattcatttgactttga

SEQ ID NO: 607 - DNA, 1099 bp, Homo sapiens
  source 1..1099: mol_type = genomic DNA
ccacaccgcgctcagcgccttcactgccatccccgctgtccttgccgcccccgccatgggcctagagctgtttcttgacctggtgtcccagcccagccgcgccgtctacatcttcgccaagaagaatggcatccccttagagctgcgcaccgtggatttggtcaaagggcagcacaagagcaaggagttcttgcagatcaacagcctggggaaactgccgacgctcaaggatggtgatttcatcttgactgaaagctcggccatcctgatttacctgagctgtaagtaccagacgccggaccactggtatccatctgacctgcaggctcgtgcccgtgttcatgagtacctgggctggcatgccgactgcatccgtggcacctttggtatacccctgtgggtccaggtgttggggcccctcattggggtccaggtgcccgaggagaaggtggaacgcaacaggactgccatggaccaggccctgcaatggctggaggacaagttcctgggggacaggcccttcctcgctggccagcaggtgacactggctgatctcatggccctggaggagctgatgcagccggtggctctcggctatgaactgtttgagggacggccacgactggcagcatggcgtggacgagtggaggctttcctgggtgctgagctatgccaggaggcccacagcatcatcttgagcatcctggaacaggcggccaagaaaaccctcccaacaccctcaccagaggcctatcaggctatgctgcttcgaatcgccaggatcccctgaagggtctgggatgggggccaggagattagcaacaaggattcattctgttacttacttgcccctttttatctttccctcttgccccagtcccttctctccagcttcatgtgaagctctgcacagacaagacactcagtgtccttggcagtgctgctactcctcaggtgcagcatacataaccagtaagagactaaatctgcaatatataaagagctcctacaaatcagtaacatgaagaacactcaaaaattggcaaatgtcatcagtgttttaaacagaataaagattccaaacactttgaatagagaa

SEQ ID NO: 608 - DNA, 1089 bp, Homo sapiens
  source 1..1089: mol_type = genomic DNA
cccgggagccggcagggagcggagctgcggagccgcctggtctcccgcgtccatcggtccattcctgcgtcgttctgtccttccgaacgcacacttcaggagcagccgcgaggagtgagcactgcacgcaggatccgcccagtgcttgggccaagcaccctgtggcatccaagctcccctggacgttacccttggtgaaccaaggtggcatggcagcgagcacagacatggctgggctggaggagagcttccgcaagtttgccatccatggtgaccccaaggccagtgggcaagagatgaatggcaagaactgggccaagctgtgcaaggactgcaaggtggctgacggaaagtccgtgacagggaccgatgtggacatcgtcttctccaaagtcaaggggaagtctgctcgggtcatcaactatgaggagttcaagaaggccctggaagagctggcgaccaagagattcaaggggaagagcaaggaggaggccttcgatgccatctgccagctggtggcaggcaaagagccagccaatgtgggcgtcactaaagcaaaaacagggggtgctgtagaccggctgacggacaccagcagatacacgggctcccacaaggagcgcttcgatgagagcggcaagggcaagggcattgcgggacggcaggacatcctggacgacagtggctacgtgagcgcctacaagaatgcaggcacctacgatgccaaggtgaagaagtgaggcttgggaagaccgccctgccaagtgcggctgcccctgccagaggctcaggcctgggtctaaggggcacgtggagcaagagatcctggtcccctccctgctggacctgccacccagagcttcctgcctagtcccactgggctggcccaccaggcctctgacccaggctgctctgcggccccttcctcctcctcttcctgctccaacttctgtccacctggggacagtctgtgcctgtagcctcatgaccccaacccagccccaggcatggctaacccctgactgcttgcctcatatttaagctgctgctctggccaagtgcctaattttaacccagacctcaataaag

SEQ ID NO: 609 - DNA, 1430 bp, Homo sapiens
  source 1..1430: mol_type = genomic DNA
tggctcctcccgcttcgtccgcgtcgcctgtccccgctccccatcttccgggctgggagggaggcgggaccggccgcgtctccatggcgacgcgggacgcggcggtggaggcggttgctacccacctgctagaggcgctgcggctgtgatccaggctggggcgagaccatgtcggacctgggctcggaggagttggaggaggagggagagaatgatattggggaatatgaggggggtcggaatgaggcaggcgaaaggcacggacgtgggagggcacggctacccaacggggacacctacgaagggagctacgaattcggtaaaagacatggccaggggatctacaaatttaaaaatggtgctcgatatatcggagaatatgttagaaataaaaagcacggtcaaggcacttttatatatccagatggatccagatatgaaggagagtgggcaaatgacctgcggcacggccatggcgtatactactacatcaataatgacacctacactggagagtggtttgctcatcaaaggcatgggcaaggcacctatttatacgcggagacgggcagtaagtatgttggcacctgggtgaacggacagcaggagggcacggccgagctcattcacctgaaccacaggtaccagggcaagttcttgaacaaaaatcctgttggccctggaaagtatgtatttgatgttgggtgtgaacaacatggtgaatatcgtttaacagatatggaaagaggagaagaggaagaggaggaagaattagtaactgttgttccaaaatggaaagctacccaaatcactgaattggccctgtggacaccaactctccccaaaaagccgacctctacggatggacctggccaagacgctccaggagctgagagtgcaggagaacccggggaggaggcccaggctctgctggagggcttcgagggtgagatggacatgaggcctggagatgaagatgcagacgtcctccgggaagagagccgggagtatgaccaggaggagttccgctatgacatggatgagggaaacattaattctgaagaagaagaaactagacagtcagacctccaggactaagatgaagtgagccgagaggagatcgtatcataagaatgcttctgtcgttagccgggtgcagtgctgtgtgtatctagttccagctacttgagaggctgaggcaggaggattgcttgagtccagaaagtggcagttgcagtgagtggagatcgcgccactgctctccagcctgggtggcagagcgagaccctgtctcaaaaaataaacaaaaacaaaatgcttctgtcagttaacaatctttattagagggtttttagtctttctttctcagctgtatgttaagttgattgacaaatgcaaataaacgtctttattatcctttctttctgaaa

SEQ ID NO: 610 - DNA, 6113 bp, Homo sapiens
  source 1..6113: mol_type = genomic DNA
taatacttaattaccttctaataattggagcagaagatgaacccaactaatcctttcagtgggcagcagcctagtgctttttcggcgtcttctagtaatgtaggaacacttccatctaagccgccatttcgatttggtcaaccttctctttttggacaaaacagtaccttatctgggaagagctcgggattttcacaggtatccagctttccagcgtcttctggagtaagtcattcctcttcagtgcaaacattagggttcacccaaacctcaagtgttggacccttttctggacttgagcacacttccacctttgtggctacctctgggccttcaagttcatctgtgctgggaaacacaggatttagttttaaatcacccaccagtgttggggctttcccaagcacttctgcttttggacaagaagctggagaaatagtgaactctggttttgggaaaacagaattcagctttaaacctctggaaaatgcagtgttcaaaccaatactgggggctgaatctgagccagagaaaacccagagccaaattgcttctgggttttttacattttcccacccaattagtagtgcacctggaggcctggcccctttctcttttcctcaagtaacaagtagttcagctaccacttcaaattttaccttttcaaaacctgttagtagtaataattcattatctgcctttacccctgctttgtcaaaccaaaatgtagaggaagagaagagaggacctaagtcaatatttggaagttctaataatagcttcagtagcttccctgtatcatctgcggttttgggcgaacctttccaggctagcaaagcaggtgtcaggcaggggtgtgaagaagctgtttcccaggtggaaccacttcccagcctaatgaaaggactgaaaaggaaggaggaccaggatcgctccccaaggagacatggccacgagccagcagaagattcggatcctctgtcccggggcgatcatcctccagacaaacgacctgtccgcctgaatcgaccccggggaggtactttatttggtcggacgatacaggatgttttcaaaagcaataaggaagtaggtcgtctgggcaacaaggaggccaaaaaggaaactggctttgttgagtctgcagaaagtgaccacatggctatcccaggagggaatcagtctgtcctggcaccttcccggattccaggtgtgaataaagaggaagaaactgaaagtagagagaagaaagaagattctctaagaggaactccggcgcgtcagagtaacagaagcgagagcacagacagtcttgggggcttgtctccctctgaagtcacagccatccagtgcaagaacatccctgactacctcaacgacaggaccattctggagaaccattttggcaaaattgctaaagtgcagcgcatctttaccaggcgcagcaaaaagcttgcagtggtacatttctttgatcatgcatctgcagccctggctagaaagaaggggaaaagtttgcataaagacatggctatcttttggcacaggaagaaaataagccccaataagaaacccttttccctgaaggagaagaaaccaggtgacggtgaagtcagcccgagcacagaggatgcaccctttcagcactctcctcttggcaaggccgcagggaggactggtgctagcagcctcctgaataaaagctctccagtgaagaagccaagtcttctaaaggcccaccaattcgagggagactcttttgactcagcctccgagggctccgagggcctcgggccatgtgtgctctccctcagtaccctgataggcactgtggctgagacatccaaggagaagtaccgcctgcttgaccagagagacaggatcatgcggcaagctcgggtgaagagaaccgatctggacaaagcgaggacttttgttggcacctgcctggatatgtgtcctgagaaggagaggtacatgcgggagacccgtagccagctgagcgtgttcgaagtggtcccagggactgaccaggtggaccacgcagcagctgtgaaagagtacagtcggtcctcggcggatcaggaggagcccctgccccacgagctgcggcccttgccagtgctcagcaggaccatggactacctggtgacccagatcatggaccagaaggagggcagcctgcgggattggtatgacttcgtgtggaaccgcacgcgtggcatacggaaggatatcacgcagcagcacctctgtgaccccctgacggtgtccctgattgagaagtgcacccggtttcacatccactgtgcccacttcatgtgtgaggagcccatgtcctcctttgatgccaagatcaataatgagaacatgaccaagtgcctgcagagcctgaaggagatgtaccaggacctgagaaacaagggtgtcttctgtgccagcgaagcggagttccagggctacaatgttctgctcagtctcaacaagggagacatcctaagagaagtacaacagttccatcctgctgttagaaactcatctgaggtgaaatttgctgttcaggcttttgctgcattgaacagtaataattttgtgagatttttcaaactggtccagtcagcttcttacctgaacgcttgtcttttacactgttacttcagtcagatccgcaaggatgctctccgggcgctcaactttgcgtacacggtgagcacacagcgatctaccatctttcccctggatggtgtggtgcgcatgctgctgttcagagactgtgaagaggccaccgacttcctcacctgccacggcctcaccgtttccgacggctgtgtggagctgaaccggtctgcattcctggaaccagagggattatccaagaccaggaagtcggtgtttattactaggaagctgacggtgtcagtcggggaaattgtgaacggagggccattgccccccgtccctcgtcatacccctgtgtgcagcttcaactcccagaacaagtacatcggggagagcctggccgcggagctgcccgtcagcacccagagacccggctccgacacagtgggcggagggagaggagaggagtgtggtgtagagccggatgcacccctgtccagtctcccacagtctctaccagcccctgcgccctcaccagtgcctctgcctcctgtcctggcactgaccccgtctgtggcgcccagcctcttccagctgtctgtgcagcctgaaccaccgcctccagagcccgtgcccatgtactctgacgaggacctggcgcaggtggtggacgagctcatccaggaggccctgcagagggactgtgaggaagttggctctgcgggtgctgcctacgcagctgccgccctgggtgtttctaatgctgctatggaggatttgttaacagctgcaaccacgggcattttgaggcacattgcagctgaagaagtgtctaaggaaagagagcgaagggagcaggagaggcagcgggctgaagaggaaaggttgaaacaagagagagagctggtgttaagtgagctgagccagggcctggccgtggagctgatggaacgcgtgatgatggagtttgtgagggaaacctgctcccaggagttgaagaatgcagtagagacagaccagagggtccgtgtggcccgttgctgtgaggatgtctgtgcccacttagtggacttgtttctcgtggaggaaatcttccagactgcaaaggagaccctccaggagcttcagtgcttctgcaagtatctacagcggtggagggaagctgtcacagcccgcaagaaactgaggcgccaaatgcgggctttccctgctgcgccctgctgcgtggacgtgagcgaccggctgagggcgctggcgcccagcgcagagtgccccattgctgaagagaacctggccaggggcctcctggacctgggccatgcagggagattgggcatctcctgcaccaggttaaggcggctcagaaacaagacagctcaccagatgaaggttcagcacttctaccagcagctgctgagtgatgtggcatgggcgtctctggacctgccatccctcgtggctgagcacctccctgggaggcaggagcatgtgttttggaagctggtgctggtgttgccggatgtagaggagcagtccccagagagttgtggcagaattctagcaaattggttaaaagtcaagttcatgggagatgaaggctcagtggatgacacatccagcgatgctggtgggattcagacgctttcgcttttcaactcacttagcagcaaaggggatcagatgatttctgttaacgtgtgtataaaggtggcccatggcgccctcagtgatggtgccattgatgctgtggagacacagaaggacctcctgggagccagtgggctcatgctgctgcttccccccaaaatgaagagtgaggacatggcagaggaggacgtgtactggctgtcggccttgctgcagctcaagcagctcctgcaggctaagcccttccagcctgcgcttcctctggtggttcttgtgcctagcccaggaggggacgccgttgagaaggaagtagaagatggtctgatgctacaggacttggtttcagctaagctgatttcagattacactgttaccgagatccctgataccattaatgatctacaaggttcaactaaggttttgcaagcagtgcagtggctggtttcccactgcccccattcccttgacctctgctgccagactctcattcagtacgtcgaagacgggattggccatgagtttagtggccgctttttccatgacagaagagagaggcgtctgggcggtcttgcttctcaggagcctggcgccatcattgagctgtttaacagtgtgctgcagttcctggcttctgtggtgtcctctgaacagctgtgtgacctgtcctggcctgtcactgagtttgctgaggcagggggcagccggctgcttcctcacctgcactggaatgccccagagcacctggcctggctgaagcaggctgtgctcgggttccagcttccgcagatggaccttccacccctgggggccccctggctccccgtgtgctccatggttgtccagtacgcctcccagatccccagctcacgccagacacagcctgtcctccagtcccaggtggagaacctgctccacagaacctactgtaggtggaagagcaagagtccctccccagtccatggggcaggcccctcggtcatggagatcccatgggatgatcttatcgccttgtgtatcaaccacaagctgagagactggacgcccccccggcttcctgttacatcagaggcgctgagtgaagatggtcagatatgtgtgtatttttttaaaaacgatttgaaaaaatatgatgttcctttgtcgtgggaacaagccaggttgcagacgcagaaggagctacagctgagagagggacgtttggcaataaagccttttcatccttctgcaaacaattttcccataccattgcttcacatgcaccgtaactggaagaggagcacagagtgtgctcaagaggggaggattcccagcacagaggatctgatgcgaggagcttctgctgaggagctcttggcgcagtgtttgtcgagcagtctgctgctggagaaagaagagaacaagaggtttgaagatcagcttcagcaatggttgtctgaagactcaggagcatttacggatttaacttcccttcccctctatcttcctcagactctagtgtctctttctcacactattgaacctgtgatgaaaacatctgtaactactagcccacagagtgacatgatgagggagcaactgcagctgtcagaggcgacaggaacgtgtctaggcgaacgactaaagcacctggaaaggctgatccggagttcaagggaagaggaagttgcctctgagctccatctctctgcgctgctagacatggtggacatttgagcagcctgacctgtggggagggggtctctcccgaagagtttctgtttttactcaaaataatgttattctcagatgcttgatgcactgttggaaatgtgattaatttaatcatgcagataaaccatttaaatgtc

SEQ ID NO: 611 - DNA, 3934 bp, Homo sapiens
  source 1..3934: mol_type = genomic DNA
gtctcgtgtttctctcttccaatcggttgtctttatcgtggacactgaggtgttctctgccttgactaaagatgagtgacgtgaatccaccctctgacacccccattcccttttcatcctcctccactcacagttctcatattccgccctggacattctcttgctaccccggctccccatgtgaaaatggggtcatgctgtacatgagaaacgtgagccatgaggagctacaacggttcaagcagctcttactgactgagctcagtactggcaccatgcccatcacctgggaccaggtcgagacagccagctgggcagaggtggttcatctcttgatagagcgtttccctggacgacgcgcttgggatgtgacttcgaacatctttgccattatgaactgtgataaaatgtgtgttgtagtccgcagagagataaatgccattctgcctaccttggaaccagaggacttgaatgtgggagaaacacaggtgaatctggaggaaggagaatctggtaaaatacggcggtataaatcgaatgtgatggaaaagtttttccccatatgggacattacgacttggcctggaaaccagagggacttcttctaccaaggtgtacacaggcacgaggagtacttaccatgtctgcttctgcccaaaagaccccagggtagacagcccaagaccgtggccatacagggagctcctgggatcggaaaaacaatcctggccaaaaaggtgatgtttgagtgggccagaaacaagttctacgcccacaagcgctggtgtgctttctacttccattgccaagaggtgaaccagacgacagaccagagcttctccgagctgattgagcaaaagtggcctggatctcaggacctcgtgtcaaagattatgtccaaacccgaccaacttctgctgctcttggatggctttgaggagctcacatctaccctcattgacagactggaggacctgagtgaagactggaggcagaaattgcctgggtctgtcctactgagcagtttgctgagcaaaacgatgcttccagaggccacgctactgatcatgataagatttacctcttggcagacatgcaagcccttgctgaaatgtccctctctcgtaacccttccggggtttaatacgatggaaaaaatcaagtatttccagatgtattttggacacacagaggagggagaccaagtcttgagtttcgccatggaaaacaccattctcttctccatgtgccgggtccctgtggtttgctggatggtctgctctggtctgaaacagcaaatggagagaggaaacaatctcacacagtcatgtccaaatgccacctctgtgttcgtccggtatatttctagcttgtttcccaccagagctgagaacttttccagaaagatccaccaagcacaactggaaggtctgtgtcacttggccgcagacagcatgtggcacaggaaatgggtgttaggtaaagaagatcttgaggaagccaagctggatcagacgggagtcaccgccttccttggcatgagtattcttcggagaattgcaggtgaggaagaccactatgtctttaccctcgtgacttttcaggaattttttgcggccttgttttatgttctctgtttcccacaaagactcaaaaattttcatgtgttgagccacgtgaatatccagcgcctgatagcgagtcccagaggaagcaaaagctatctctctcacatgggacttttcttattcggttttctgaacgaggcctgcgcttcggccgtggaacagtcattccaatgcaaggtgtctttcggtaataagaggaaactgctgaaagtcatacctctgttgcataaatgtgacccaccttctccgggcagtggggtcccgcagttattctactgtctgcatgaaatccgggaggaagcctttgtaagccaagccctaaatgattatcataaagttgtcttgagaattggcaacaacaaagaagttcaagtgtctgctttttgcctgaagcggtgtcaatatttgcatgaggtggaactgaccgtcaccctgaacttcatgaacgtgtggaagctcagctccagctcccatcctggctctgaagcgccagagagcaatgggctgcatcgttggtggcaagacttatgctctgtgtttgcaacgaatgataagctggaagtcctgactatgaccaacagtgttttggggcctccttttttgaaggctctcgcggccgcactgaggcaccctcagtgcaaactgcaaaagctactcctaaggcgtgtgaatagcaccatgttgaaccaggacttaatcggtgttttgacggggaaccagcatctgagatacttggaaatacaacatgtggaagtggagtccaaagctgtgaagcttctatgcagggtgctgagatccccccggtgccgtctgcagtgtctcaggttggaagactgcttggccacccctagaatttggactgatcttggcaataatcttcaaggtaacgggcatctaaagactctcatactaagaaaaaactccctggagaactgtggggcgtattacctgtctgtggcccagctggagaggctgtcgatagagaactgcaaccttacacagcttacttgtgaaagccttgcctcctgtctcaggcagagtaagatgctgacccacctgagcttggcagaaaacgccttgaaagatgaaggggccaagcatatttggaatgccctgccacacctgagatgtcctctgcagaggctggtactgagaaagtgtgacttgacctttaattgctgtcaggatatgatctctgcgctctgtaaaaataaaaccctgaaaagtcttgacctaagttttaatagcctgaaggatgatggggtgatcctgctgtgtgaggccctgaagaaccctgactgtacattacagatcctggagctggaaaactgcctgttcacctccatctgctgccaggccatggcttccatgctccgcaaaaaccaacatctgagacatctggacttgagcaagaatgcgattggagtctatggtattctgaccttgtgcgaggccttctcaagccaaaagaagagagaagaggtcattttctgtattcctgcctggactcgaataactagcttctccccaactcctcacccacccgacttcacgggaaaaagtgactgcctatcccagattaatccttaggccgtccagtcatctttctctggggcttgattgatcagttcccactctgacaactggcaaataccaggcgttatcatcctgtatgcattaacgtactttcccctgaaacagagcaacccagtcaacaccacagaacctcagctttgaaccctggagtgaggacggtgatgccctgtgtgtattaatatgctatgtaaggctgggcgtggtggctcacgcctgtaacccagcactatgggaggtcgaggtgggcagattacctgaggtcaggagttccagaccagcctggccaacatggtgaaaccccgcctctactaaaaaaaaaaatacaaaaaattaggcgtggtggtgggctcctgtaatcccagctgctcgggaggctgaggcaggagaatcacttgaatctaggaggcagagtttgcagtgagctgagatcacgccattgcactccagcctgggcgacagagcaagactctgtctcaagaagaaaaaaaaaatacatatacacataaatatatatatgtgtgtgtgtatatatatatatatatatatatatgctatataaagtttaaatgaaatgctttgagtcacctaagacaggatatagacaaagtcttcatcgtcttcttgcttcttctacctttatttattctcagctctgaatgtatgaacctgctcaatcacctcatcttaaaaataaaatcactgtccctaga

SEQ ID NO: 612 - DNA, 6067 bp, Homo sapiens
  source 1..6067: mol_type = genomic DNA
cagccgcgtcccccagccccggcctcccgcggacccatgcccgcccgtatcggctactacgagatcgaccgcaccatcggcaagggcaacttcgcggtggtcaagcgggccacgcacctcgtcaccaaggccaaggttgctatcaagatcatagataagacccagctggatgaagaaaacttgaagaagattttccgggaagttcaaattatgaagatgctttgccacccccatatcatcaggctctaccaggttatggagacagaacggatgatttatctggtgacagaatatgctagtggaggggaaatatttgaccacctggtggcccatggtagaatggcagaaaaggaggcacgtcggaagttcaaacagatcgtcacagctgtctatttttgtcactgtcggaacattgttcatcgtgatttaaaagctgaaaatttacttctggatgccaatctgaatatcaaaatagcagattttggtttcagtaacctcttcactcctgggcagctgctgaagacctggtgtggcagccctccctatgctgcacctgaactctttgaaggaaaagaatatgatgggcccaaagtggacatctggagccttggagttgtcctctacgtgcttgtgtgcggtgccctgccatttgatggaagcacactgcagaatctgcgggcccgcgtgctgagtggaaagttccgcatcccattttttatgtccacagaatgtgagcatttgatccgccatatgttggtgttagatcccaataagcgcctctccatggagcagatctgcaagcacaagtggatgaagctaggggacgccgatcccaactttgacaggttaatagctgaatgccaacaactaaaggaagaaagacaggtggaccccctgaatgaggatgtcctcttggccatggaggacatgggactggacaaagaacagacactgcagtcattaagatcagatgcctatgatcactatagtgcaatctacagcctgctgtgtgatcgacataagagacataaaaccctgcgtctcggagcacttcctagcatgccccgagccctggcctttcaagcaccagtcaatatccaggcggagcaggcaggtactgctatgaacatcagcgttccccaggtgcagctgatcaacccagagaaccaaattgtggagccggatgggacactgaatttggacagtgatgagggtgaagagccttcccctgaagcattggtgcgctatttgtcaatgaggaggcacacagtgggtgtggctgacccacgcacggaagttatggaagatctgcagaagctcctacctggctttcctggagtcaacccccaggctccattcctgcaggtggcccctaatgtgaacttcatgcacaacctgttgcctatgcaaaacttgcaaccaaccgggcaacttgagtacaaggagcagtctctcctacagccgcccacgctacagctgttgaatggaatgggcccccttggccggagggcatcagatggaggagccaacatccaactgcatgcccagcagctgctgaagcgcccacggggaccctctccgcttgtcaccatgacaccagcagtgccagcagttacccctgtggacgaggagagctcagacggggagccagaccaggaagctgtgcagagctctacctacaaggactccaacactctgcacctccctacggagcgtttctcccctgtgcgccggttctcagatggggctgcgagcatccaggccttcaaagctcacctggaaaaaatgggcaacaacagcagcatcaaacagctgcagcaggagtgtgagcagctgcagaagatgtacggggggcagattgatgaaagaaccctggagaagacccagcagcagcatatgttataccagcaggagcagcaccatcaaattctccagcaacaaattcaagactctatctgtcctcctcagccatctccacctcttcaggctgcatgtgaaaatcagccagccctccttacccatcagctccagaggttaaggattcagccttcaagcccaccccccaaccaccccaacaaccatctcttcaggcagcccagtaatagtcctccccccatgagcagtgccatgatccagcctcacggggctgcatcttcttcccagtttcaaggcttaccttcccgcagtgcaatctttcagcagcaacctgagaactgttcctctcctcccaacgtggcactaacctgcttgggtatgcagcagcctgctcagtcacagcaggtcaccatccaagtccaagagcctgttgacatgctcagcaacatgccaggcacagctgcaggctccagtgggcgcggcatctccatcagccccagtgctggtcagatgcagatgcagcaccgtaccaacctgatggccaccctcagctatgggcaccgtcccttgtccaagcagctgagtgctgacagtgcagaggctcacagcttgaacgtgaatcggttctcccctgctaactacgaccaggcgcatttacacccccatctgttttcggaccagtcccggggttcccccagcagctacagcccttcaacaggagtggggttctctccaacccaagccctgaaagtccctccacttgaccaattccccaccttccctcccagtgcacatcagcagccgccacactataccacgtcggcactacagcaggccctgctgtctcccacgccgccagactatacaagacaccagcaggtaccccacatccttcaaggactgctttctccccggcattcgctcaccggccactcggacatccggctgcccccaacagagtttgcacagctcattaaaaggcagcagcaacaacggcagcagcagcagcaacagcagcaacagcaagaataccaggaactgttcaggcacatgaaccaaggggatgcggggagtctggctcccagccttgggggacagagcatgacagagcgccaggctttatcttatcaaaatgctgactcttatcaccatcacaccagcccccagcatctgctacaaatcagggcacaagaatgtgtctcacaggcttcctcacccaccccgccccacgggtatgctcaccagccggcactgatgcattcagagagcatggaggaggactgctcgtgtgagggggccaaggatggcttccaagacagtaagagttcaagtacattgaccaaaggttgccatgacagccctctgctcttgagtaccggtggacctggggaccctgaatctttgctaggaactgtgagtcatgcccaagaattggggatacatccctatggtcatcagccaactgctgcattcagtaaaaataaggtgcccagcagagagcctgtcatagggaactgcatggatagaagttctccaggacaagcagtggagctgccggatcacaatgggctcgggtacccagcacgcccctccgtccatgagcaccacaggccccgggccctccagagacaccacacgatccagaacagcgacgatgcttatgtacagctggataacttgccaggaatgagtctcgtggctgggaaagcacttagctctgcccggatgtcggatgcagttctcagtcagtcttcgctcatgggcagccagcagtttcaggatggggaaaatgaggaatgtggggcaagcctgggaggtcatgagcacccagacctgagtgatggcagccagcatttaaactcctcttgctatccatctacgtgtattacagacattctgctcagctacaagcaccccgaagtctccttcagcatggagcaggcaggcgtgtaacaagaaacagagagttttgtgtacagcttgggaatgaaaaggttgattgtaaacccacagtatctagcagcgttgtgccaaattgcccttgtgtttctctccacccaaaatatcacagctgctttcctcacatttggttcatccgtgtgctgttcttttgggttctgagagggttttgccatgtttgcttgtatgaccaagtcaccaaggaaataaacaggaaggaaatccatgttctccatcttttgtgaaagtatatttgagttggtggttttttgttttgtttgggggtttgtgttttgttttgtttttggtatgttttcttccagaggtgatatactttcttttttttcttcctttcttttttttctttcgttccttttttgaaacaggagagcaaagcagttagagttcagaggccagcggcctcagggccactccctccctagccttcatcagcagagcaccctccatccccctgcattgctcttctgtgaaagcaaatactaaaggatgccatcctctggaatcctaatggcaggcaaagggagagaggaagggtgacggcttctggcacttagaaaacaaaaagaacaaaaaaagagaaacccccaagcctggaacgcagagaggtctttactgctgggatccacggaaaacatgtctgtcctagccaagatcatatgaagagtttggcacggaggctgagaatgacctggcatagatggtttgccagttaggatgtctcaatttgagcctttgcttttggtggataactcagctcccctcttgtaacctggaaagttggttgcctttatcatcctgctggttttatccatggactgaacacccaacagcagtgcactatgctttctatggcatctttcattctcattttatattgtgctataaaaaggattgtttctccatatatatattatatatgtgtgtatatatataatataatatatgtgtatatatatattatatatataatatataatataatatattatatatatattatatatataatatatatataaaatatatatatatatgctctcctctttcagcctctttgtcacagggaagaagtgtaggaggttgccttgggccctgcctctctcctaacctcctcttccccactgggtaccctcagcccctatattttaattcttgatcatgtagaaattgtttttggtaaatgttgatattattgttattatcattattaataaataaagagaaaaggaatttttgtttaaatgagaaatgtttaaccagattctgttctatttgaattgtgacttgcaccttttgttcaaagtatttcctttaggcattgtaattgtgaacagctcttacttgtgccagtgacagatgcagtggtctcctttccccagttgaagcagtgcatacgcagtagctattatttgtgttatctttatttctcttcattgttagaaaccaaagtcttctctgctggctggggctgagagagggtctgggttatctccttctgatcttcaaaacaagagagagaccttgaatacactgactcttccaccctttttttttctgggaaaggagagcaagaggtcccgagtcccctcctagtctttcatcctgaatttgcacagaggaaagcgggtgcccggcatggccatcctgatgttgctggcgggatccccatgcaccttgtccttctccactgatactggcagctcggctcctggacccaagatcccttgagtggaattctgcagtgcaagagcccttcgtgggagctgtcccatgtttccatggtccccagtctcccctccacttggtggggtcaccaactactcaccagaagggggcttaccaagaaagccctaaaaagctgttgacttatctgcgcttgttccaactcttatgcccccaacctgccctaccaccaccacgcgctcagcctgatgtgtttacatggtactgtatgtatgggagagcagactgcaccctccagcaacaacagatgaaagccagtgagcctactaaccgtgccatcttgcaaactacactttaaaaaaaactcattgctttgtattgtagtaaccaatatgtgcagtatacgttgaatgtatatgaacatactttcctatttctgttctttgaaaatgtcagaaatatttttttctttctcattttatgttgaactaaaaaggattaaaaaaaaaatctccagactcaagttgct

SEQ ID NO: 613 - DNA, 5304 bp, Homo sapiens
  source 1..5304: mol_type = genomic DNA
gcagaagtctgggcagctgcgggaggagaggtttgggaggcgcgggagatgtccaccctgggctggtggcgccgccgggcgccgggcgccatgagggtgcgctaggcggctgttcgtgcccgaggctgcgcagcactgaggtgagctttgccttcttgatcttccgtccttcttggagacgactggcgagaggaagagggactaggtccaaacgctaggtggctgggtccagccggagacccgcaccaaggaggagatcatcgagctcttggtccttgagcagtacctgaccatcatccctgaaaagctcaagccttgggtgcgagcaaaaaagccggagaactgtgagaagctcgtcactctgctggagaattacaaggagatgtaccaaccagaagacgacaacaacagtgacgtgaccagcgacgacgacatgacccggaacagaagagagtcctcaccacctcactcagtccattctttcagtggtgaccgggactgggaccggaggggcagaagcagagacatggagccacgagaccgctggtcccacaccaggaacccaagaagcaggatgcctccgcgggatctttcccttcctgtggtggcgaaaacaagctttgaaatggacagagaggacgacagggactccagggcttatgagtcccgatctcaggatgctgaatcataccaaaatgtggtggacctcgctgaggacaggaaacctcacaacacaatccaggacaacatggaaaactacaggaagctgctctccctcggagtgcagcttgctgaagacgatggccactcccacatgacgcagggccactcatcaagatccaagagaagtgcctacccaagcaccagtcgaggtctaaaaactatgcctgaagccaaaaaatcaacccaccggcgggggatttgtgaagatgaatcttcccacggagtgataatggaaaaattcatcaaggatgtgtcacgcagttccaaatcgggaagagcaagggagtcaagcgaccggtcacagagattccccagaatgtcagatgataactggaaggacatttcattgaacaagagggagtcagtgatccagcagcgggtttatgaagggaatgcatttaggggaggctttaggtttaattcaacccttgtttccagaaagagagttcttgaaagaaagaggcgctatcattttgacacagatgggaagggctcgattcacgatcaaaaaggctgtcccaggaagaagccctttgaatgtggtagtgagatgagaaaagccatgagcgtgagcagcctgagcagcctcagctccccctcctttaccgagtcacagccaattgattttggggcaatgccatatgtatgtgatgagtgtgggaggtcgttcagtgtcatctcagaatttgttgagcaccagatcatgcatactagagagaacctctatgagtatggtgagtcctttatccacagtgtggctgtcagtgaagttcagaaaagtcaggttggagggaaacgttttgaatgtaaggactgtggagagaccttcaataagagtgccgccttggctgaacatcggaagattcatgctagaggttatcttgtggaatgtaagaatcaggaatgtgaggaagccttcatgcctagccccacctttagtgagcttcagaaaatatatggcaaagacaaattctacgagtgcagggtgtgtaaggaaaccttccttcatagttctgccctgattgagcaccagaaaatccactttggggatgacaaagataatgagcgtgaacatgaacgtgaacgtgaacgtgagcgcggggaaacctttaggcccagcccagcccttaatgagtttcagaaaatgtatggtaaagagaaaatgtacgaatgtaaggtgtgtggggagactttccttcatagctcatccctgaaagaacatcagaaaatccatactagagggaacccatttgaaaacaagggtaaagtgtgtgaggaaacctttattcctggtcagtcccttaaaaggcgtcagaaaacttacaataaggagaagctctgtgactttacagatggccgggatgccttcatgcaaagctcagagctcagtgagcatcagaaaattcattctcgaaagaacctctttgaaggcagagggtatgagaaatctgtcattcatagtgggccattcactgaatctcagaagagtcatactataacaagacctcttgaaagtgatgaggacgaaaaggcgttcaccattagctctaacccctatgaaaaccagaagattcccactaaggaaaatgtctatgaggcaaaatcatatgagaggtctgttattcatagcttagcctctgtggaagctcagaaaagtcacagtgtagcagggcccagtaaaccaaaagtaatggcagagtctaccattcagagcttcgatgctatcaaccatcagagagttcgtgctggagggaacacctctgaaggaagggaatacagtaggtctgttatccatagcttagtggcttccaaacctccaagaagtcacaatggaaatgaattggtggaatctaatgagaagggagaatcctccatttatatctcagaccttaatgataagcgacagaagattcctgccagagagaacccttgtgaagggggcagtaagaatcgcaactatgaagactctgtcatacagagtgtattccgtgccaaacctcagaaaagtgttcctggagagggatctggtgagtttaagaaggatggcgaattctctgttcccagctcaaatgtccgtgaataccagaaggctcgtgctaaaaagaaatacattgagcataggagcaatgagacctctgtaattcactctctgccttttggtgaacaaacatttcgccctcgagggatgctctatgaatgtcaggagtgtggggagtgctttgctcatagctctgacctcactgagcaccagaagattcatgatagggagaagccctctggaagcagaaactatgaatggtctgtcattcgcagcttggcccctactgaccctcaaacaagttacgcccaagagcagtatgctaaagagcaagcgcggaacaaatgtaaggacttcagacaattttttgctaccagcgaagacctcaacacaaaccagaaaatctatgaccaagagaagtctcatggcgaggagtctcaaggcgagaatactgatggggaggagacccacagcgaggagacccatggtcaggagacaattgaagaccctgtcattcaaggctcagacatggaagaccctcagaaggatgaccctgatgacaaaatctatgaatgtgaggactgtggcctgggctttgtggatctcacagacctcacagaccatcagaaagtccacagcaggaagtgcctggttgacagtcgggagtacacacattctgtaattcacacccattccatcagcgagtatcagagagattacactggagagcagctgtatgaatgtccaaagtgtggggaatcttttattcatagctcattccttttcgagcatcagagaatccatgaacaagaccagttgtattccatgaaggggtgtgatgatggttttattgccctcttgcccatgaagccacggaggaatcgtgctgcagagaggaatcctgctcttgctgggtcggccattcgatgccttttgtgtggacaaggcttcattcatagctctgcccttaatgagcatatgagacttcatagggaagatgatttactggagcagagccagatggctgaggaagctatcattccaggcttagccctcactgagtttcagagaagtcagaccgaagagagactctttgaatgtgcagtctgtggagaatctttcgtcaacccagcagaacttgcagatcacgtaactgttcataagaatgagccctatgagtacgggtcctcctatactcacacctcatttcttactgagcccctcaaaggagctataccattctatgaatgcaaggattgtggtaagtcctttattcatagcacagtcctcactaaacataaggagcttcatctggaagaagaagaagaagatgaagcagcagcagctgcagcagcagcagcccaggaagttgaagccaatgtccatgttccacaagtagttctgaggattcagggcttaaacgtagaggctgctgagccagaagtggaggctgccgagccagaagtggaggctgctgagccagaagtggaggctgctgagccaaacggagaggctgaagggccagatggagaggctgcagagcccattggagaggctggacagccaaatggagaggccgagcagccaaatggggatgctgatgagccagatggtgcaggtattgaagacccagaagaaagagctgaagagccagagggaaaagctgaagagccagagggagatgccgacgagcctgacggtgtgggaattgaagacccagaagaaggtgaagatcaagagattcaggtagaagaaccatactatgactgccatgaatgcacagaaaccttcacttccagcacagcattcagtgaacacctgaaaactcatgccagcatgatcatatttgagcctgcaaatgcctttggggagtgctcaggctacatcgaacgtgccagcaccagcacaggtggtgccaatcaagctgatgagaagtacttcaaatgtgacgtctgtgggcagctcttcaatgaccgcctgtccctcgccagacaccagaatacccacactggctgagggcatggggtaaaggttagaaaaccttcacctaggacttgacccttaccaaaccacagagaatccaaaccaatccatgataatgtcagtaggagacttaaccttagtgtgttacacacctgacttaacatctctaaactcagattgaaaagagaccgaatgtgcagattccacagtcttaagctttccccttcagatgtcagtgtctgcatgtgggaaagccatagcacacatcttacctttccaagtaatcagattgagaaaaccctatgagtattccagactacagagtttgcccaaatcaactgtaaatgacacttgtgtaacgtatatatagtgtttcatgaggtgtatataaaatagcaaattatgacagaacagtgatcacatatatttggatttatatgatatacagttacagtttactctgcagaggtaccttacctggtattctttgaattttttttttttttggaggaggaagagagcaacaaatttgattatatttttaagtgtcttagatcctg

SEQ ID NO: 614 - DNA, 2163 bp, Homo sapiens
  source 1..2163: mol_type = genomic DNA
ggatcctggaggtgggggctgtgccctgagggagggcacagggaaccgggatggggctgggggacagcgagtgctgggaagtgtgcgagatttcactccggggctcgggtcgagctaccccgtgcttcaggcggtcctgcgcctcctctccccaagacccttcggggacacagcactgcagacccgccggagacaacttgtgcgggagcccggagtcctcggaataacacttggtaagtgttaccgcgcccttcttcccttacgccagtccgtagttcgtggtccttcgccggtgtccccggagcccagcggctgtggatggcagaagcccagagtgggactggtcagctgcaggagcagaagaaaggtcttctgatagccgtcagcgtctccgttgataaaatcatctcgcatttcggggccgcccggaacttggtgcagaaggcccagttgggtgatagccggctgagcccggatgtggggcacctggtgctgaccaccctctgcccggccctccacgccctggtggcggacgggctgaagcctttccggaaggacctcatcaccgggcagcgcaggagcagcccctggagcgtggtggaggcgtcggtgaagccaggctccagcacccgctcccttggaaccctgtatagccaggtcagccgtctagccccgctgagcagcagccgtagccgcttccatgcctttatcctgggcctcctcaacaccaagcagttggagctgtggttttccagtctccaggaagatgcaggcctgctctccctcctgtacctgccaacaggatttttctccctggcccgcggtggttgtccctccctgtccacagagctgctgctcctgctgcagccattgtcggtgctcactttccacctggacctgctctttgagcaccaccaccacctgcccctgggcccacctcaggcccctgcccctccaggcccacctccagctctgcagcagactatgcaagccatgctgcactttgggggccggctggcccagagccttcgggggacttccaaggaagctgcttcagacccctctgactctccaaaccttcccacaccagggagctggtgggagcagttgacccaggcctcccgggtctatgcctctgggggcactgagggctttcctctttcccgatgggcaccggggcgtcatgggactgcagctgaagaaggtgcacaggagagacccctgcccacagatgagatggcaccaggcaggggcctctggttgggaagactatttggagtgcctgggggccccgcagaaaatgagaatggagccctaaagtccaggagaccatctagctggctgcccccgacagtgagtgtgttggctcttgtgaagcggggggcacctcccgagatgccttctcctcaggagcttgaggcctcagcacccaggatggtgcaaacccatagggcagtgcgggctctctgtgatcacactgctgcaagacctgaccagttgagcttccggcgtggggaagtgctgcgtgtcatcaccacagtggatgaggactggctccgctgtgggcgggatggcatggagggtctggtgcctgtggggtatacctcccttgttctgtagccctgggaccctttcctgcgtatgtgtctccttcctgtcacctgggaatggaatggccagtgaacaccatcccagaagcattttccctctgcaaaatgacgtttcttcccacgtctgtttctgctaatatttaaaataaactttccttcttccctcctatacccacctgtaaggtgaaatctgctcttcttccaaatatataaaaaaggaattgccctccaggtaatccctttcctttttcccgtctatataagggaatgtcttccttcctatctatctgcaaaatggaaatctagacctccttcttcatccataagtggactgtgccagtacaatacatgcctcagcccccaagcctagaaggacctctagtctccttcctgtgtggaatcttccccactccatccctcccaagttgcctgtattgataatgtactcactcatgctgtactaggtgctgaagcctggacacccttggtgggtgggcctgtggtgatggtttgcatccttcctcctttgtcccaataaagtatgggagttgaa

SEQ ID NO: 615 - DNA, 4487 bp, Homo sapiens
  source 1..4487: mol_type = genomic DNA
tggccgccgcggctgccgctgctgctgaggcggaggccgcggaggccgcggaggcggaggccgaggccccggcgcagcggggcgcgccccgggcccaggcccggccccagccgccgctgcggagcccgccgggaccccccggagcgcggccacggcgcagccgctgccatggcccagacactgcagatggagatcccgaacttcggcaacagcatcctggagtgcctcaatgaacagcggctgcagggcctgtactgtgacgtgtcagtggtggtcaagggccatgccttcaaggcccaccgggccgtgcttgctgccagcagctcctacttccgggacctgttcaacaacagccgcagcgccgtggtggagctgccggcggctgtgcagccccagtctttccagcagatcctcagcttctgctacacgggccggctgagcatgaacgtgggcgaccagttcctgctcatgtacacggctggcttcctgcagatccaggagatcatggagaagggcaccgagttcttcctcaaggtgagctccccgagctgcgactcccagggcctgcatgcggaggaggccccatcgtcggagccccagagccccgtggcgcagacatcgggctggccagcctgtagcaccccgctgcccctcgtgtcgcgggtgaagacggagcagcaggagtcggactccgtgcagtgcatgcccgtggccaagcggctgtgggacagtggccagaaggaggctgggggcggcggcaatggcagccgcaagatggccaagttctccacgccggacctggctgccaaccggcctcaccagcccccgccaccccaacaggctccggtggtggcagcagcccagcccgccgtggctgcgggagcagggcagccagccggtggggtggcagcagcagggggtgtggtgagtgggcccagcacgtcggagcggaccagcccaggcacctcaagcgcctacaccagcgacagccctggctcctaccacaatgaggaggacgaggaggaggatggtggcgaggagggcatggatgagcagtaccggcagatctgcaacatgtacaccatgtacagcatgatgaacgtcggccagacagccgagaaggtggaggccctcccggagcaggtagcccccgagtcccgaaatcgcatccgggttcggcaagacctggcgtctctcccggctgaacttatcaaccagattgggaaccgctgccaccccaagctctacgacgagggcgacccctctgagaagctggagctggtgacaggcaccaacgtgtacatcacaagggcgcagctgatgaactgccacgtcagcgcaggcacgcggcacaaggtcctactgcggcggctcctggcctccttctttgaccggaacacgctggccaacagctgcggcaccggcatccgctcttctaccaacgatccccgtcggaagcccctggacagccgcgtgctccacgctgtcaagtactactgccagaacttcgcccccaacttcaaggagagcgagatgaatgccatcgcggccgacatgtgcaccaacgcccgccgcgtcgtgcgcaagagctggatgcccaaggtcaaggtgctcaaggctgaggatgacgcctacaccaccttcatcagtgaaacgggcaagatcgagccggacatgatgggtgtggagcatggcttcgagaccgccagccacgagggcgaggcgggtccctcggctgaagccctgcagtaacccgcccagcctcccgcggggccacacacttcccctcccaacacacacacacacctgccatcttggtcatgagctactgtctgtccctccccaggacccgcggtgggtgctgcatgttcccggccctctgcccctcctgtcctaccccctttccccaccgagagctgggccgggagaggaccgcagggcaggtggcgtgaggtccgtgttgccttctttaacacacactcgtgcagtgggggagttctggctccccaacctaacccctagccgtcatctccacactcaccaggcccaccaggggagggggctggcctgggggtcttgggaaggcccctccccaggccctaggccacctcgcggaagccttcagcctccgcccctcactgcagccccttgggacttgaggggggccccaggggttctcaggacccctcccaccacctcccagtgcttccacgtctccaaaagcgccttcctgtcaccctcgtctatccctgcgcctgggggctggggtaggcgaggccgtggggactacccattttatagctggggaaacaggctccgagaaattgcacaaccgacctcaggtggccggcagtggcgtgcctggtgccctttctcctcttccgcctctgttgctccctttggtcctctggggcctcagagaggcaggtcctaaaggagggggggtctcctgggggcagaccgagggtctcggaggatagaatgagaggtttccagggctggcagagtgtgtgcgtgtgtgtgtgcagaagttttgctttcaaacaaatgaagatacaagaggcagtaggacctgggttggaacccaggggagcagactggggggctgttgcccctccctccatctccccacacccaccccaccccacagcagggctcctggcccccacccccctgtacataatttttaaaacctttttttagcgaatgaaatattgaagtataagattccttttatttttcaaaccaatggggctgtgtctattgtccccctcggtccccaggggtggggggccttggaaggcagggcggtgttggggggctggggggcaggctgaatgtgtgtgtgtgggtgtgtatgtgtggagtgtgtgtgtgtgtttccatggtaggactccagtcccagctgctgcctaggctcctgtgggtcctgtgggtccccctcccctgttcaccttccccaacagggctatagtttaagggtgtcccaggccttggctggttggctgggcccagctcctgggggctgggcagggcagggcagggccgggtccacttccattgttagcagttgtttgcagaattttctcttttaccattcctctctttttgttctcgcccagagtgggtggttttttgttgttgttttagattttcatgtgaaggcagttttttttcttttttaactccccatccccctatgcagggtgtcatttcaccatccacatccacatccttgtttgtgtttctggccctcgtcctccctgcctctcatctgcctccccaacccccacctacccactgctcccaggggtctctccaggggcagggggattttaggagatggggtgggggccagcccctactggacccttgtaatctgatttggagaccatccccccgatgggaccagcagccccgccggcccactgggggtccctcttaacatctgcttgttgcgggggtcagtcatgagtgccagggtctggctggggtcttggcactgtcttcctggccggggcctgaaaccttagcccccagccggcctgagtgggggatattgacacccccagctaaagcacaagcaccttagtcacccctcctctccccccgcctcctggcctgccaccccaccccagcgtttaccccaaagcacaatgccctggtcacttggcaagcggctgggcctgacggaggccgaggggcagaccggggctccagccagacccctgaaaggaaggtgctcccccacttccaggccttagttggggtgggggggccagctcctgggcctggggtcttctcacccccacccccttgtcctgggtaggcccctgcctgcccctctctgccttttcctcgggtgtccctcctcgagcccctgtggcattggcttgggtggcagagcccacttgtttcagggaccccaggaggtgccccctggctcccaggactgtgtgtgggtccggggggtgggggggtggggagaagggtcgggcagggggtgcaggggaggaaactcctcaccaggagagccaaagacagggttgtgccttaccccaggagccacccctgtaccccccttgccctgccattcaccctccacccctacccctgggcggcctgctgctttttccttctcttcctcccctgccctgagctgcatggttcccccaccctgggcagccaggaaggaatctgaatggagaatcaccaaccaccagagaaaaaagactgtggggccctcccctgccaactccccttccctggccgcccactcaacccacacctctttcacgcaggacaggctgcccaccctgtccacgtgaagtgccaacgccctccccaccctgggccgagcccccacccctccctgggcccccaagtgagattgcacatttaactactgtaaggagaggagcggcgttggcaaatgtgaaccatgagaatatcagtgatactgatgagaataaactaaacgcctttgt

SEQ ID NO: 616 - DNA, 2044 bp, Homo sapiens
  source 1..2044: mol_type = genomic DNA
ggtccgagttcggaatttcggttcaaggcccagttcctcggattgttcctgcgcaacttcagtttcccttccaggcacgggcaatgagtgtttggccgcgacgagttggaaagcccggatgcgtccttcggttgggcggggtgtctcagtgacgtcactgggggtataaaagggcctgggtggcgggcgcctgggcagagcgtcctagcagtgtcactgcgtgggttggtttgtgtagagaggcgtgagcgagcccgttgtccggagtgcacctgctgcctgttctgtccctcccgggagcccccgccgctgtcgccgtcgagtcgccatggaagtgcagaaagaggcacagcgcatcatgaccctgtcggtgtggaagatgtatcactcccgcatgcagcgcggtggcctgcggctgcaccggagtctgcagctgtcgctggtcatgcgcagcgcccgggagctctacctctcggccaaggtggaggccctcgagcccgaggtgtcgttgccggccgccctcccctctgaccctcgcctgcacccgccccgagaagccgagtccacggccgagacagcgacccccgacggtgagcacccgtttccggagccaatggacacgcaggaggcgccgacagccgaggagacctccgcctgctgtgccccgcgccccgccaaagtcagccgcaaacgacgcagcagcagcctgagcgacggcggggacgctggactggtcccgagcaagaaagcccgtctggaagaaaaggaagaagaggagggagcgtcatccgaagtcgccgatcgcctgcagccccctccggcgcaagcggagggcgcctttcccaacctggcccgcgtcctgcagaggcgcttctccggcctcctgaactgcagccccgcggcccctccgacggcgccgcccgcgtgcgaggcaaagcccgcttgccgcccggcggacagcatgctcaacgtgctcgtgcgggccgtggtggccttctgaggaccccgagcggcgctgccggagcccagagcgcgcgtcgaaccgtcggcccgagggcgcagacctgaggcgaggccacccccctccatcctgggggaagcgcccgcgaaaaccgtggagagaagccgccgcccgggctgctgagaggcccggagagggactctgtccccggggagccatcgccttcagtgtgcagggacggcaccgaggagtctgagccgggggcgcgggcgccttccgcagagacctgcgcccacaggtgctgtcttagtggactgggacgtgaacctttcgctctccttctggactgggagaagggaggcttgggtgttgtgttttttgttttgtttgtttgtttgtttttaaagatctcctcagggtcggacttcattttgtactgtgggctgtgctggccctttcaaggtttttcaagagttggttttgcgtttccaacctcggagaattccaggcactccccttccccctccgctgacatacttgtataagcggtcatcgttgcgtcatggggcaggcgtggggagcttcctgtcgccttgcgtgggtgtggggcctgggaggaggtcctggggcgtgcacccgccctgggcagtggggaggagagtggcctgagttacttcacccccgcgtgctgctggttaatgtcccgcgtctctgcaccttcgggtgggagcggggactgatctactttcacattctcaagtttttctcatctgcattagaggtgcccagtaggttcccaggttccagcgtgcccctccctcagacacacggacacaatcagccgagaagttcctggtctgaatcacgagaatgtggaggggtggggggtgtcagtggaaaggcataaggctgagctgagaccagttgctggtgaaactgggccaatctggggaggggaacatccttgccagggagtttctgagggtctgctttgtttacctttcgtgcggtggattctttttaactccgtctacctggcgttttgttagaaatgtcagataggaaaataaaaaccatttgagt

SEQ ID NO: 617 - DNA, 1751 bp, Homo sapiens
  source 1..1751: mol_type = genomic DNA
gtacactgtctctacaggccaggaaagagttgtgtgtctttggggtcccttccgctccgcctagggttcccggccaggccgagagaccaagcagggaccatgcgcgtgttggtacccccggctgagcgcagccaggacacacgcgttggggccccagcatggcgcgaggcagctcaggccatggcgaggaccgcgcacattctgaccgatcgctgcgggcaggaggcggtgaccatgtggcagcccaaggacagcgtgctggacccgaacgtggcccaccacctcggccgcgccgcctacatccagccctggcgcttccgcgtggagatgatcaaaggcggcggcaccttggagaagccgccgccaggcgagggcgtcacgctgtggaagggcaagatgaagccgcccgcctggtacgcccgcctgccgctacccttgcaccgcaaagcgcgcgccctgcagaccaccgaggtggtgcacgcgcacgcgcgtggagcgcgcctcaccgccgcccgcctcggccgcgcgcagcaccagattaacgggcgggtgcgacagctgctgcgccagcgcgaggtcaccgaccacaggctcagcgaagtgcgcaagggtctgcttattaaccagcagagcgtcaagctgcggggctacaggcccaagtctgagaaggtccctgacaaagctgacagtatgcttacatgggagaaagaggagctgaaaagcatgaagaggaaaatggagagagatatggaaaaatcagaggtcctactcaagaccctggcctcctgccgagacactctgaacttctgcttcaaggagcggctccaagccgtggacctcatgaaccagcctctggacaaggttctggagcaggccagacgccactcatgggtgaacctctcccgagcccccactccacgcacacagggtcagaaaacgcctcctccagaccctgtgggcacctataacccagcgtgcgccttggcgctaaacgaagccaagcggttgttggtcgagtccaaggacaccttggtagaaatggcaaagaacgaggtggacgtccgggagcaacagctgcagataagcgaccgtgtgtgtgcctcgctggcgcagaaggcgagcgagaccttggagctgaaggaaagattaaatatgacgttaggactgatgaggggaactatcctccggtgtacgaaatataaccaagagttgtacaccacccacggtctcatcaagggtcctctgtcgaaagttcacctggagaccgcagaaaagctggacagacccctggttcgcatgtaccagagacacgtgggcacccaactcccggaggctgcgcgcctcgcacagggcaccgacaagctgcagtgccacatcacgtacctggaaaagaacctggacgagctgctcgccacgcacaagaacctcagctggggcctcaactgcaagaacatcgggcatgaggtggacggcaacgtggtgcgcctgcgcctgcgccagcggcaaccgcacgtgtgctacgagcaggcgcagcgcctggttaaggactgggacccgcgcacgccgccgccgcgcagcaagagcagcgcggacccctagtgaccccagcgtcccccgccccagccagctgattggatgctggctgggacctcggagagcagacacagccccatggccctccctctcccctgacgcaccctccctccaagcaccctctaggagaattataattaaaaataacaataattatc

SEQ ID NO: 618 - DNA, 2057 bp, Homo sapiens
  source 1..2057: mol_type = genomic DNA
actgcagggccaggattctggaacttgggttgcctgatagaccctatacaaaagatgtagtagggaaaaggagcgacagctggctaaaggggccccccacaaccctccccgacaccctaggaaagcagcctctctccgctgtcccagggtgccatggagatggagagcgcggcggcctccacacgtttccaccagcctcacatggagaggaagatgagtgcgatggcctgtgagatcttcaacgagcttagactagagggcaagctctgcgacgtggtcatcaaggtcaatggctttgagttcagtgcccataagaacatcctctgtagctgcagttcctactttagagctttgtttacaagtggctggaacaacactgaaaagaaggtatacaacatccctggcatttctcccgacatgatgaagctaatcattgagtatgcatacacccggaccgtgcctatcacaccggacaatgtggagaaactgcttgctgctgcagaccagtttaacatcatgggtatcgtcaggggttgctgcgagttcctcaagtcagagctgtgcttggataattgtatcggcatctgtaagttcacggactactactactgtcctgagctgaggcagaaggcctacatgttcatactgcacaactttgaggagatggtgaaagtctcggcagaatttttagagctctcggtcactgaacttaaggatatcattgagaaagatgagctcaatgtcaaacaggaagatgctgtatttgaggccattttaaagtggatttctcatgacccccaaaatagaaagcagcacatttcaattttgcttcctaaggttcgcctggccctaatgcatgctgagtacttcatgaacaatgttaagatgaatgactatgtcaaagacagtgaggaatgcaaaccagtcatcattaatgccctaaaggccatgtatgacctcaacatgaatggaccctctaattctgatttcaccaacccactcaccagaccacgcttgccctatgccatcctctttgcaattggtggctggagtggtgggagccccaccaatgccattgaggcatatgacgctcgggcagacagatgggtgaatgttacttgtgaggaagagagtccccgtgcctaccatggggcagcctatttgaaaggctatgtgtatatcattggggggtttgatagtgtagactatttcaatagtgttaagcgttttgacccagtcaagaaaacttggcatcaggtggccccgatgcactccagacgttgctatgtcagtgtgacagtcctcggcaattttatttatgccatgggaggatttgatggctacgtgcgtctaaacactgctgaacgttatgagccagagaccaatcaatggacactcatcgcccccatgcacgaacagaggagtgatgcaagcgccacaacactttatgggaaggtctacatatgtggtgggtttaatggaaacgagtgcctgttcacagcagaagtgtataacactgaaagtaatcagtggacagtcatagcacccatgagaagcaggaggagtggaataggcgtgattgcttatggagaacatgtatatgcggtaggtggctttgatggagctaatcgacttaggagtgccgaagcctacagccctgtggctaacacttggcgcacaatccccactatgtttaatcctcgtagcaattttggcatcgaggtggtggatgacctcttgtttgtggtgggtggctttaatggttttaccaccacctttaatgttgagtgctatgatgaaaagaccgatgagtggtatgatgctcatgacatgagtatataccgcagtgctctgagctgctgtgtagtaccagggctggccaatgttgaggaatatgcagctagacgggacaacttcccaggattagcactgcgagatgaagtaaaatattctgcttcgacaagtaccctacctgtatgagcctcttcatttagctaataaaaagtctaagcaataagaattaattctttttttaaaaaaatgcagtgtttaaactt

SEQ ID NO: 619 - DNA, 1765 bp, Homo sapiens
  source 1..1765: mol_type = genomic DNA
agatttgttgcaagctgtgggaggaaggagagttcttcttccaggtggtttcctgcagactgcctgctagggctcagaggaccagcttcttccctgctgtctcctgagcccagtccctcttggccatcacattccccttgccctatggcggccctcacagacctctcatttatgtatcgctggttcaagaactgcaatctggttggcaacctctcagagaagtacgtcttcatcacaggctgtgactctggcttcgggaacctgctggccaaacagctggttgatcggggcatgcaggtgctggctgcttgcttcactgaggagggatcccagaaacttcagcgggatacctcctatcggctgcagaccaccctactggatgtcaccaagagcgaaagcatcaaggcggcggcccagtgggtgagggacaaagtgggcgaacaaggcctctgggccctggtgaacaatgctggtgtgggcctgcccagtggtcccaacgaatggctgaccaaggatgactttgtgaaggtgattaatgtgaacctggtgggactgatcgaagtgacccttcacatgctgcccatggtcaagagagcccggggcagggttgtcaacatgtccagctctggtggtcgtgtggctgtcattggtggtggctactgcgtctccaagtttggcgttgaggccttctctgacagcataaggcgtgagctctactactttggggtgaaagtctgcatcattgagccagggaactatcggacagccattctcggcaaggagaacctggagtcacgcatgcgaaagctttgggagaggctgcctcaggagacccgggacagctacggagaggattatttccgcatctatactgacaagttaaaaaacataatgcaggtggcagagcccagagtcagagatgtcatcaacagcatggagcatgctattgtttcccggagccctcgcatccgctacaaccctggcctggatgccaaactcctctacatccctctggctaagttgcccacccctgtgacagatttcatcctaagccggtaccttccaaggccagcggacagtgtctaaactggggaggatcaatgggtcagtggagcctagaagtgggggaggaaggaaggaccgtggggtcacaaaaggtggtatcggttatcctgggggcattggctgcaaaggaagcttggctcagctgacacccactgctgtcgaatttaccagtaacttctaacagaaggtgaatgcctcttcccaccctctgggaccccacagaaacctgaggtggtctttgcaggttcagcgatctgcagcaatagctccaaggacgtctgtcacccaatcaggatacagctttttctggtcctggaaaagtcatggagaagaaaaccagctcctgtggaatcatgagcccctttcagttatcactgccactgagaaatactgtgggataatcttgcctccaggagaatctaaccaccttcctaatgggtccctcaatatgcataacttcattcacataacccattactgaagtatgcggtagggcagatagggagtgcaagattaaatcagacaaaagtttaaaatattttctttctttttagattcttctatctataggttattgggatccacatgaaataacattcatttatttaatcaccattaatttttcaaatatttattgagtgcctactacctaccgggcactttgtaggtgctgggggaatataaagatgattaaatcatg

SEQ ID NO: 620 - DNA, 2091 bp, Homo sapiens
  source 1..2091: mol_type = genomic DNA
tccattcggacgtctccatcctcagaacctcctctcttccccaaaaagcaccatgacttgtggatcttactgtggtggccgcgccttcagctgcatctcggcctgcgggccccggcccggccgctgctgcatcaccgccgccccctaccgtggcatctcctgctaccgcggcctcaccgggggcttcggcagccacagcgtgtgcggaggctttcgggccggctcctgcggacgcagcttcggctaccgctccgggggcgtgtgcgggcccagtcccccatgcatcaccaccgtgtcggtcaacgagagcctcctcacgcccctcaacctggagatcgaccccaacgcgcagtgcgtgaagcaggaggagaaggagcagatcaagtccctcaacagcaggttcgcggccttcatcgacaaggtgcgcttcctggagcagcagaacaaactgctggagacaaagctgcagttctaccagaaccgcgagtgttgccagagcaacctggagcccctgtttgagggctacatcgagactctgcggcgggaggccgagtgcgtggaggccgacagcgggaggctggcctcagagcttaaccacgtgcaggaggtgctggagggctacaagaagaagtatgaggaggaggtttctctgagagcaacagctgagaacgagtttgtggctctgaagaaggatgtggactgcgcctacctccgcaaatcagacctggaggccaatgtggaggccctgatccaggagatcgacttcctgaggcggctgtatgaggaggagatccgcgttctccagtcccacatctcagacacctccgtggttgtcaagctggacaacagccgggacctgaacatggactgcatcattgccgagatcaaggcacagtacgatgacattgtcacccgtagccgggctgaggccgagtcctggtaccgcagcaagtgtgaggagatgaaggccacggtgatcaggcacggggagaccctgcgccgcaccaaggaggagatcaacgagctgaaccgcatgatccagaggctgacggctgaggtggagaatgccaagtgccagaattccaagctggaggctgcggtggctcagtctgagcagcagggtgaggcggccctcagcgatgcccgctgcaagttggccgagctggagggtgccctgcagaaggccaagcaggacatggcctgcctgatcagggagtaccaggaggtgatgaactccaagctgggcctggacatcgagatcgccacctacaggcgcctgctggagggcgaggagcagaggctgtgcgagggcgtcggctcggtgaatgtctgcgtcagcagctcccgcggtggcgttgtctgtggcgatctctgcgcctccactactgcccctgttgtctccaccagagtcagtagcgtccccagcaacagcaacgtggtggtgggcactactaacgcctgcgccccctccgcccgggttggcgtctgcggcggcagctgtaagaggtgctaggaggctgccgcctccgccagcgcctgtcgccgtcactctccacccagccagtacctcgcgccaccagaacgcgccgcccgcgccggcctcccaatagccgccgcccgctgcctgcactctaagcgccctccccaccgctccgctccgggagccatccccggtcgcaggagtccggggagggccgggaggcgccatggtctctctctgtagcctttcctggtagtcaatttgttgtcccgaggattcatctttttcttccgcctgccttctgttttttttgctgtatacattggtcttgcctgagctcttccccaaagcttggaggaacgggggaggcccgggaatgtccctgtctgcacgacctgggactctgcccatgtgcttttgcctgtggaatggagacgcggaccctggatagtggttctatgactctgcgagggacaggcccacgcgtgtggggagaacatctcccttccggggctgccctcaagagcttctgaaaaactaatgactctgctgccttctcctttgtctttgtttcactctgtgtttccaataaactcattgtagcgaatcaa

SEQ ID NO: 621 - DNA, 1291 bp, Homo sapiens
  source 1..1291: mol_type = genomic DNA
ggctgctatagagccgggtgagagagcgagcgcccgtcggcgggtgtcgagggcgggttgcctcgcgctgacccttcccgccctccttctcgtcacacaccaggtccccgcggaagccgcggtgtcggcgccatggcggagctgacggctcttgagagtctcatcgagatgggcttccccaggggacgcgcggagaaggctctggccctcacagggaaccagggcatcgaggctgcgatggactggctgatggagcacgaagacgaccccgatgtggacgagcctttagagactccccttggacatatcctgggacgggagcccacttcctcagagcaaggcggccttgaaggatctggttctgctgccggagaaggcaaacccgctttgagtgaagaggaaagacaggaacaaactaagaggatgttggagctggtggcccagaagcagcgggagcgtgaagaaagagaggaacgggaggcattggaacgggaacggcagcgcaggagacaagggcaagagttgtcagcagcacgacagcggctacaggaagatgagatgcgccgggctgctgaggagaggcggagggaaaaggccgaggagttagcagccagacaaagagttagagaaaagatcgagagggacaaagcagagagagccaagaagtatggtggcagtgtgggctctcagccacccccagtggcaccagagccaggtcctgttccctcttctcccagccaggagcctcccaccaagcgggagtatgaccagtgtcgcatacaggtcaggctgccagatgggacctcactgacccagacgttccgggcccgggaacagctggcagctgtgaggctctatgtggagctccaccgtggggaggaactaggtgggggccaggaccctgtgcaattgctcagtggcttccccagacgggccttctcagaagctgacatggagcggcctctgcaggagctgggtatggctgcaagactagaaaccaggactagaaactgggggagtagggaggcatgcctaggaaaaggagggatgcaaagagaaggggctttgtgaacatggtgcaaggccaggaattttgggagcaaaaaccaagtatccttgtggttcaagcctgttttcttccatcttcaggactcgtgccttctgctgttctcattgtggccaagaaatgtcccagctgagggcctttgtcccattgtccctctgtgaccccttcatctttgataaagcactgacatctccttcctaataaatagaccctgagttctgtaca

SEQ ID NO: 622 - DNA, 636 bp, Homo sapiens
  source 1..636: mol_type = genomic DNA
gagcctccggccgcccgccgggtttgtcccgcgatccccgaccatgcccgccgacctcagcggtacttggaccctgctcagcagcgacaacttcgagggctacatgctggccctaggtattgactttgccactcgtaaaatagccaagttgctgaagccacagaaagtgattgagcagaatggggattcttttaccatccacacgaacagcagcctaaggaactactttgtgaaatttaaagttggagaagaatttgatgaagataacagaggcctggacaacagaaaatgcaagagtttggttatctgggacaatgacaggctcacctgtatccagaagggagaaaagaagaacagaggctggacccattggatcgaaggagacaaactccacctggaaatgttctgtgaaggtcaagtgtgcaaacagacattccagagagcctgatccacatccagcagcagagcccacttgtggctgcagctttatgccaaattatattgcagactgaacagacgtttatctatcccatttggcgacgaggactcgtggctggagagagccacacagcgtgtaacctgaagtcatctagattatggggaaactgctcagcttcaataaacctgtccaaatga

SEQ ID NO: 623 - DNA, 2182 bp, Homo sapiens
  source 1..2182: mol_type = genomic DNA
tgggcggggttatataagccagcggcgggcggaaggcggggcgtgggggtctgtggctgctgggctggcggggcgcaggccgcgggacccgagcccggggaagcgagagagcggaggcgccgaggatccgattcactccctggggagacctatgggccgaagccgtgtaaatgcgttttaagcagaggcctcggctccgcaactgccactcctcctcggggtgttgcacaagtttcgaggtcaccggcgaccccccctagcagcgcgcctggctctggcccccgcgaaggaggacggagtttggagcttgcggcccccacccaccgcgtggcgtccccaggcacgcctagaattctagcacctcaggatcagtccagcccccatttacaattggggaaactgcggctccgaaagggtcagagggtacccgaggtcaagcagtagagagcggactcgaacttaagctcttgctcttaggctgagacgccttgatgtggccaccggctaccctctagtgtgttgcatactttctaaggcggcggctgcagcagcggctccatccagcccgtcagctcctcctgcaaggcatggctggctacctgagtgaatcggactttgtgatggtggaggagggcttcagtacccgagacctgctgaaggaactcactctgggggcctcacaggccaccacggacgaggtagctgccttcttcgtggctgacctgggtgccatagtgaggaagcacttttgctttctgaagtgcctgccacgagtccggcccttttatgctgtcaagtgcaacagcagcccaggtgtgctgaaggttctggcccagctggggctgggctttagctgtgccaacaaggcagagatggagttggtccagcatattggaatccctgccagtaagatcatctgcgccaacccctgtaagcaaattgcacagatcaaatatgctgccaagcatgggatccagctgctgagctttgacaatgagatggagctggcaaaggtggtaaagagccaccccagtgccaagatggttctgtgcattgctaccgatgactcccactccctgagctgcctgagcctaaagtttggagtgtcactgaaatcctgcagacacctgcttgaaaatgcgaagaagcaccatgtggaggtggtgggtgtgagttttcacattggcagtggctgtcctgaccctcaggcctatgctcagtccatcgcagacgcccggctcgtgtttgaaatgggcaccgagctgggtcacaagatgcacgttctggaccttggtggtggcttccctggcacagaaggggccaaagtgagatttgaagagattgcttccgtgatcaactcagccttggacctgtacttcccagagggctgtggcgtggacatctttgctgagctggggcgctactacgtgacctcggccttcactgtggcagtcagcatcattgccaagaaggaggttctgctagaccagcctggcagggaggaggaaaatggttccacctccaagaccatcgtgtaccaccttgatgagggcgtgtatgggatcttcaactcagtcctgtttgacaacatctgccctacccccatcctgcagaagaaaccatccacggagcagcccctgtacagcagcagcctgtggggcccggcggttgatggctgtgattgcgtggctgagggcctgtggctgccgcaactacacgtaggggactggctggtctttgacaacatgggcgcctacactgtgggcatgggttcccccttttgggggacccaggcctgccacatcacctatgccatgtcccgggtggcctgggaagcgctgcgaaggcagctgatggctgcagaacaggaggatgacgtggagggtgtgtgcaagcctctgtcctgcggctgggagatcacagacaccctgtgcgtgggccctgtcttcaccccagcgagcatcatgtgagtgggcctcgttccccccggagaatcccagcggggcctcagagatgcatctgggagaggtggggaagatggcaggcaagggtacccttggccaggactctggtgcccaccctgccacccccgcgctccacctgcagtgtttctgccctgtaaataggaccagtcttacactcgctgtagttcaagtatgcaacataaatcctgttccttcca

SEQ ID NO: 624 - DNA, 1472 bp, Homo sapiens
  source 1..1472: mol_type = genomic DNA
ccgcaggcgggcctcgcgggtccgggagcgcggcggagacgatgcctgagatcagagtcacgcccttgggggccggccaggacgtgggccgaagctgcatcctggtctccattgcgggcaagaatgtcatgctggactgtggaatgcacatgggcttcaatgacgaccgacgcttccctgacttctcctacatcacccagaacggccgcctaacagacttcctggactgtgtgatcattagccacttccacctggaccactgcggggcactcccctacttcagcgagatggtgggctacgacgggcccatctacatgactcaccccacccaggccatctgccccatcttgctggaggactaccgcaagatcgccgtagacaagaagggcgaggccaacttcttcacctcccagatgatcaaagactgcatgaacctcctggagaccttctgggagcgcatgaacctgaaggtgcccatctacttctccacggggctgaccgagaaggccaaccactactacaagctgttcatcccctggaccaaccagaagatccgcaagactttcgtgcagaggaacatgtttgagttcaagcacatcaaggccttcgaccgggcttttgctgacaacccaggaccgatggttgtgtttgccacgccaggaatgctgcacgctgggcagtccctgcagatcttccggaaatgggccggaaacgaaaagaacatggtcatcatgcccggctactgcgtgcagggcaccgtcggccacaagatcctcagcgggcagcggaagctcgagatggaggggcggcaggtgctggaggtcaagatgcaggtggagtacatgtcattcagcgcacacgcggacgccaagggcatcatgcagctggtgtcctcagagcaagccctcaaagagctgggtctggctgagcaccagctgcgcttcacctgccgcgtgcacctgcatgacacacgcaaggagcaggagacggcattgcgcgtctacagccacctcaagagcgtcctgaaggaccactgtgtgcagcacctcccagacggctctgtgactgtggagtccgtcctcctccaggccgccgccccttctgaggacccaggcaccaaggtgctgctggtctcctggacctaccaggacgaggagctggggagcttcctcacatctctgctgaagaagggcctcccccaggcccccagctgaggccggcaactcacccagccgccacctctgccctctcccagctggacagaccctgggcctgcacttcaggactgtgggtgccctgggtgaacagaccctgcaggtcccatccctggggacagaggccttgtgtcacctgcctgcccaggcagctgtttgcagctgaagaaacaaactggtctccaggctgtcttgcctttattcctggttagggcaggtggtcctagacagcagtttccagtaaaagctgaacaaaag

SEQ ID NO: 625 - DNA, 4267 bp, Homo sapiens
  source 1..4267: mol_type = genomic DNA
tgagcgggcactcttctgcggcaagcaggtctaggaattcgcctggttcccacctcgcgtcccttgccttccttcctagtctacccactgtagtgccccctgcgtcccgctccctcctagccgactcagagcacaagaaggattgccacggtttccattgcagcagccgtggcgcctctgaccctttttttatatcgcggcgacggcgggctgtcgtcacgacgacgtgcggacgcagcggcgggggcctttcagcttatgtggagaagtcgctgtgaagccacctataaatccatttactgaatttatggagaaggctgtaaatgatggaagtcattcagaagaactcttttgccatcttaaaactatatcagagaaagaagatttaccacggtgtaccagtgaaagtcatctcagctgcctgaagcaggacattctaaatgaaaagactgaattggaagcaacacttaaggaagcggagttggtaactcattctgtagaattgcttttgccactatttaaggacaccattgaaaagattaattttgaaaatgcgaatctttctgcattgaatttgaagatttctgaacagaaggaaatattaataaaagaattagacaccttcaaaagtgtaaaactagctttagaacatcttcttagaaagagagactacaaacaaacaggagacaatttatccagcatgttgctagaaaatctaactgataatgaaagtgaaaatactaatcttaagaagaaggtatttgaaaaggaggcccatatccaagaactttcttgtttgtttcagagtgaaaaggcaaatactttgaaagcaaaccgtttttcccaatcagtaaaagtagtacatgaacgactacagatccaaattcataaaagggaagccgagaacgataagttgaaagaatatgtaaagagcttagaaaccaagatagccaagtggaacctgcaatcaagaatgaataagaatgaggctatagtgatgaaagaagcaagtaggcaaaaaactgtagctttaaaaaaggcatctaaagtttacaaacaaaggcttgaccattttacaggagctattgaaaagcttacttcccaaattagagatcaggaagccaagttgtctgaaacaatttcagcttccaatgcctggaaaagtcattatgagaaaattgtgatagaaaaaaccgaattggaagtacagattgaaacaatgaaaaagcaaatcattaatcttttggaagatctgaagaaaatggaagaccatggaaaaaattcatgtgaagaaattcttagaaaagttcactcaattgaatatgaaaatgaaactctgaatcttgagaatacaaaattaaagactacacttgctgctttgaaggatgaagttgtatctgttgaaaatgaactctcagaattgcaagaagtagaaaaaaaacagaaaacccttattgaaatgtataaaactcaggtacaaaagttgcaagaagcagctgaaatagtaaaaagcagatgtgaaaatttgctacataaaaataaccaaataacaaaaaccaaaaataaaaatgtagagaagatgagaggccagatggagtctcatctgaaggagttagagcgtgtctgcgattccttgacggcggcggaacggaggcttcacgagtgtcaggagagtctgcagtgctgcaaggggaagtgtgcagaccaggaacacaccattagggagcttcagggccagattttgaagcagtgggaagaatattctgtcttggcatgggttgatggaaatcacaatcttctgacaaagctttctctggaagaggaaaactgtcttattcagctgaagtgtgaaaaccttcaacaaaaattagaacagatggacgcagaaaataaagagcttgagaagaagctggcaaaccaagaagaatgtcttaagcacagcaatcttaagtttaaagagaaatctgcagagtatacagcattggccagacaactggaagctgctttagaagaaggaagacaaaaggttgctgaagaaatagagaaaatgtcatctagagagagtgctttacaaattaaaatattagatctggaaactgagcttagaaagaaaaatgaagaacaaaatcaacttgtttgcaaaatgaacagtgatccagagactccatgaaatctatttttttaattcccaagtgtctaaaaagttgaaaacctaaaagattcaagagttaaatgatttttggcatgcacaatttgattttattgccatcaaaagtttcatgacaacttagtcagaacaaaacgtcgatcacctttaatttagcacaggccttccatttatttctaaacttttttttaactcaccatttgactttctgatattgtaaaatgtgtgtgctgtttttttgtgtaattgaagcctctgaaaaaataaatgaggtgggttttgctgtaatgtccctagtacttggctaaagctagtaaaataaatagatcccattcacaattgccacaaagagaataaaatacctaggaatccaaattacaaggaatgtgaaggacctcttcaaggagaactacaaaccactgcttaaggaaataagagaggacacaaacaaatggaaaacattccatgcttatgaataagatgaaacaagatcatgaaaatggctatactccccaaagtaatttatagattcagtgctatccccatcaagctaccattgactttcttcacagaattagaaaaaactacttcaaatttcatatggaaccaaaaaagagctcacataaccaagacaatcctaagcaaaaagaacaaagctgtaggcatcacgctacctgacttcaaactatactacaaggctacagtaaccaaaatagcatggtactggtgccaaaacagatatatagaccaatggaacagaacagaggcctcagaaataactccacacatctacaaccatctgctgtttgacatacctgagaaaaacaagaaatggggaaaggattccctatttaataaatggtgttgggaaaactggctagccatatgcagaaaactgaaactggatcccttccttacaccttatacaaaaattaactcaagatggattaaagacttaagtgtaagacctaaaaccataaaaaccctagaggaaaacctaggcaataccattcaggacataggcatggacgaatacttcatgactaaaacaccaaaagtaatggcaataaaagccaagattgacaaatgggatctaattaaactaaagagcttctgcacagcaaaagaaactatcatcagagtgaacaggaaccgacagaatgggagaaaatttttgcaatctatccatctgacaaagggccaatatccagaatctacaaagaacttaaacaaatttacaagaaaaaaaaccccatcaaaaagtgtgcaaagaatatgaacagacacttctcaagagaagacatttagtcagccaaaaaacatatgaaaaaaagctcatcactggtcattcagagaaatgcaaatcaaaactacagtgagataccatgtcacaccaattagaatggtgatcattaaaaagacaggaaacaacagatgctggagaggatgtggagaaataggatgcttttacactgttggtgggagtgtaaattagttcaaccactgcggaagacagtgtggcgattcctcaaggatctagaaccagaaataccatttgacccagcaatcccattactgggtatatacccaaaggactataaatcatgctgctatagagacacatgcacacgtatatttattgtggcactattcacaatagcaaagacttggagccaacccaaatgcccatcaatgatagactgaataaagaaaatgtggcacatacaccatggaatactatgcagccataaaaaaggatgagttcatgtcctttgcagggacatggatgaagctggaaaccatcattctcagcaaactaacacaagaacagaaaaccaaacaccgcatgttctcactcataagtgggagttgaacaatgagaatacatggatacagggcagggaacatcacacaccagggcctgtcagggcgtggggggctaggggagggataacattagaaattcctaatgtagatgacgggttgatgagtgcagcaaaccaccatggcacgtgtatacctatgtaaccaacctgtacgttctgtacatgtatcccagaacttaaagtataataaaaattaaaaaaaataaagatctga

SEQ ID NO: 626 - DNA, 1637 bp, Homo sapiens
  source 1..1637: mol_type = genomic DNA
gggaagtgaatcaggcgccgggtagtgggttgctgggctgggcttgctgaggtagaggcagcgccaagaagaggcctttgccgctggtcgggattgggatgtcgaagaacacagtgtcgtcggcccgcttccggaaggtggacgtggatgaatatgacgagaacaagttcgtggacgaagaagatgggggcgacggccaggccgggcccgacgagggcgaggtggactcctgcctgcggcattccatcacaggaaacatgacagctgccctacaggcagctctgaagaacccccctatcaacaccaagagtcaggcagtgaaggaccgggcaggcagcattgtcttgaaggtgctcatctcttttaaagctaatgatatagaaaaggcagttcaatctctggacaagaatggtgtggatctcctaatgaagtatatttataaaggatttgagagcccgtctgacaatagcagtgctatgttactgcaatggcatgaaaaggcacttgctgctggaggagtagggtccattgttcgtgtcttgactgcaagaaaaactgtgtagtctggcaggaagtggattatctgcctcgggagtgggaattgctggtacaaagaccaaaacaaccaaatgccaccgctgccctgtgggtagcatctgtttctctcagctttgccttcttgctttttcatatctgtaaagaaaaaaattacatatcagttgtcctttaatgaaaattgggataatatagaagaaattgtgttaaaatagaagtgtttcatcctttcaaaaccatttcagtgatgtttataccaatctgtatatagtataatttacattcaagtttaattgtgcaacttttaacccctgttggctggttttttgttctgttttgttttgtattatttttaactaatactgagagatttggtcagaatttgaggccagtttcctagctcattgctagtcaggaaatgatatttataaaaaatatgagagactggcagctattaacattgcaaaactggaccatatttcccttatttaataagcaaaatatgtttttggaataagtggtgggtgaataccactgctaagttatagctttgtttttgcttgcctcctgattatctgtactgtgggtttaagtatgctactttctctcagcatccaataatcatggcccctcaatttatttgtggtcacccagggttcagagcaagaagtcttgctttatacaaatgtatccataaaatatcagagcttgttgggcatgaacatcaaacttttgttccactaatatggctctgtttggaaaaaactgcaaatcagaaagaatgatttgcagaaagaaagaaaaactatggtgtaatttaaactctgggcagcctctgaatgaaatgctactttctttagaaatataatagctgccttagacattatgaggtatacaactagtatttaagataccatttaatatgccccgtaaatgtcttcagtgttcttcagggtagttgggatctcaaaagatttggttcagatccaaacaaatacacattctgtgttttagctcagtgttttctaaaaaaagaaactgccacacagcaaaaaattgtttactttgttggacaaaccaaa

SEQ ID NO: 627 - DNA, 3525 bp, Homo sapiens
  source 1..3525: mol_type = genomic DNA
aatctctactcggcccgcaccagcagcgctggcgtcagggcgcggtgggggcaagacgggtgactggcagcagggcggtgccgggccgagaagggcgcctcacctggcgcctcctgccttcctttccacctcaggttgcagagagccgccagggcaggtggaagggccacgccccgctcccgtgagggtcaccgagagacgttgggggtggggcagggaccccaaccctagaccagtcctgtagggcacaatgtctgaacaagagcgtatacaggaatgtctgcggaaggaaataaggtcacttctcatttccaccaaagatggtttgagcccacaggagttggagaaggagtaccttttgatggttggcaaccatctaccactccgaatccttgggtatcggtccactatggagctggtattggacatgcctgatgttgttcgtgtctgccccggtgcaggtggtactgtaatactgaaagccattccagatgaatctaccaaaggaatagcaagcttagttgcaaaacagaggagcagccataagcttcgaaactcaatgcataagggaagacctagtatttattctggaccgagatctcatcggcgagtaccttaccgaggaagggttgcccctattcttccagctgttgtgaagagtgagttgaaggacctgttggcgttatctcctgttcttctttctgattttgaaaaggcatttgccaaaagatttggacgatcattccaatacatgcaatatggatttctctctatgtttgaagtgcttaatgcggcttcagatgtcatttctgtagagcagaccagagcaggttctttgttgatgctaaagaagagtgtaacagaggaaaagccgagaggatgtccagcaggtaaaatttttacccagccatttagaatgaaacaagggtcatactccacaggctttccggtagcaaagccatgcttttcacaacccacttcaaacatggaaccaccgaagcaaataatgagcatggaaaagacttccaagttaaatgtagtggagacttcaagactgaatcacactgaaaaattaaaccagctggagaacacattcaaatcagttattgcacagattggacctggaggaactatcagttcagaactaaaacataagataaaatttgttgtatctaagttcccagagggtttgtttatttctaaactgcttggagagtatgaggtaatttttaaagagcaactatcaccaaaaaaattaggcttcttaaatgtgacagaacttgttggagctcttagtgacattctccatgttgagttcaggaaaggacaccaagacttactagtgtttgatgcggataagaagcctctaccacctgttcagtcagataagaaaatagaagccaaagcttgtgtctccagtccacctagaaattcattgtctactgctgctgtcaaagagactgtatggaattgcccttcaaaaaaacaaaaagagccacaacagaagatttgcaagaagcctaatctggtggtaaagcctttacagctgcaagtagaaacaaacaaatcagagctcaacttggcaatggcaaatcatgacatcccgccagacgctgtgccgaacaagaaattatgcagactcccaccattagacaccagttccctcataggggtctttgtggagtatatcatctctcctagtcaattctacatccggatctatagcagggattcgtcagagttactcgaagacatgatgattgaaatgcggcgctgttattctaatcagctggtttctgatcgatatgtcatgccagaatgttttattcagccgggacatctctgttgtgtaaggatttctgaggataagtggtggtatcgggtcattatccatcgagtccttgagaaacaggaagttgaagtgttctacccagactttggaaatattggaattgttcagaagtcctccctgaggttcctcaagtgctgctacacaaagcttccagctcaggctatcccttgttctttggcttgggtgagaccagtagaggaacactggacatcgaaagctattttgcagttccagaagttgtgcggtttgaagccattagtgggggtagtggatgaatatgtagatggaatccttaacatttttttgtgtgacacatcctcaaacgaagatgtctatttccatcatgtcttgagaacagagggccatgctattgtatgccgagaaaatatctcttctaagggtttcagtgagctcaaccctttagctttatacacgacatccagtggagggccagaggacattgtcttgacagaactgggttatccttcccagcagcactattttaatgaagaccgaaagataagtccacagtcaaaagagagtgagttacgtatcttggatgagatccccactggaatgccatgcctggagtcagtgaccataggtgatgatatttgggatgagaactggttacctctacaggctaagatgggaaaaggaggtgatgctgcctcccatctatttactgcaagccttggtggaaagaatcagtattcatcatgtaaagaaatgccacagaaggactggtgtttttctacccctaaagatacatgggatgattcttggcagccttcaggccttgtaaatggaacgaaagtagaagttcataagccagaagtactgggtgctcaggaaaaaaatactggcacaaacaggactcaaaagcaactagacataaatggttcttcagattcttccacactgcccaaattggaagaattctgtacctctcttacccagtcagagcagtcagcagacgggagccagtctgaacccaacaacagtcagactcagccaaagcaaattcagctttccacagcagcaccctgttcaacaactgcagtggatgattccgcagaaaagccctctggttctgtggaaagctcaccagagatcctaaagaatgaagatttttctagcagccgtgctattacattgtacaaagacaagcgtcaagaatctgtagaccagctgtctttgattttgtcttatgagtgccagatttctcagaagctctacattcctcgaagtacagccactgctgccttaggtgctgccgcacggttagctacatccaggagcctcctacactggtaccccagtgtgaaaaggatggaagcatgagggagggagggaggagggagaaaaacagaatccagccgcttaggctttgatgaactcccaggccaaaatgaggagttattgaagcaaaatagtatcttgatcattgatacttttgtctttctgtgactatatgttagctttattatgctaacagtctactttgatgtgtaagtaagtattgatatttactgttaatcttgatttttcttgattttattctgtgtcattttgttcacctttgtttttaatgtagtttaaaggaatttgtttttttgtgtttgtttttcttgtacattatcatgactgataaatgaaaattgaaaaactaa

SEQ ID NO: 628 - DNA, 5448 bp, Homo sapiens
  source 1..5448: mol_type = genomic DNA
ttcaaattctcccaagctggaggtagtggagcaaacaagatcagcaacaatgagggagcagctgcaccactttgtgttactctctgatggccagcacagggctgcaagtagtggctgcaaaaaccagacaaatagatggaaatccaggaactagaggaaattcaggcctgccaggggctctgggaagtgtttgttactctctcagaaagagccagggattatctgcacaaaactggaaggtttattgtgattggcgggattgtctcccctgtccacgactcctatggaaaacagggcctcgtgtcaagccggcaccgtctcatcatgtgtcagctggccgtccagaattctgattggatcagggtggacccttgggagtgctaccaggacacctggcagacgacctgcagcgtgttggaacaccaccgggacctcatgaagagggtgactggctgcatcctctccaatgtcaacacaccttccatgacacctgtgatcggacagccacaaaacgagaccccccagcccatttaccagaacagcaacgtggccaccaagcccactgcagccaagatcttggggaaggtgggagaaagcctcagccggatctgctgtgtccgcccgccggtggagcgtttcacctttgtagatgagaatgccaatctgggcacggtgatgcggtatgaagagattgagctacggatcctgctgctgtgtggtagtgacctgctggagtccttctgcatcccagggctctggaacgaggcagatatggaggtgattgttggtgactttgggattgtggtggtgccccgggatgcagccgacacagaccgaatcatgaatcactcctcaatactccgcaaatacaaaaacaacatcatggtggtgaaggatgacatcaaccatcccatgtctgttgtcagctcaaccaagagcaggctggccctgcagcatggggacggccatgttgtggattacctgtcccagccggtcatcgactacatcctcaaaagccagctgtacatcaatgcctccggctagcagcccctcgtcctccggcaacacaatggcccctccatctttgtcagccccctgtttctctcctgcctctctgtttctccatctcctcgtcttgactgttttccctacttgctgacttaaccccccatagtgtgggggacctgcagagaaccatggcattccctattccacagtcatctttggacagactttcctctagtctccgggttgggggtgggtgagggaatggggtgggagtcgggggaagtgcagtccttggagatgtactggtgtccgtctcccagcatgctctagagaggcggctctggtgcccatcctcccagcacgctctggggaggcggctctggtgcccatcctcccagcatgctctagagaggcggctctggtgcccctcctcccagcatgctctggggaggcggctctggctcttgccttcccagcatgccctttactacaaagggctatttttcttttctttcttttgtttatttatttttctttgttcactccctgtagaacttggatgaaatcagtgtccatggttctttatgtttgtagtcttgatgtgctcctgtggtattacttcccctctgataggacattgtagccagcctcagcactcagtgagttcatcagggccacacccagtagagaaggccaagcaacctccacttcttcagcaccacacacacgcacacacacacacacgcacacatgcgtgtgcacccgcgcacgcacatacacacacacatatagcagtagcagcagcagcagcagcagcagcaacctttgatcaggagtgagattttcgggttctgaaacctgggacacgagtctgtgaatagtcggttttctcagaataatttgaatctgttttcttagtttcaaatgaccatttccctgatgctctgagcttatgatcacacagagccagtccatcctcatttcctggtggcatctgttcatttacctttgtggactgtagctgatggcacagtgcgggttccctaccagccaggggtttccaagggacctttggaggccatgcttagacacattcctgtacctgagaacaaccacataggcaggaccagatccacatcgtgcagtcgtgtcataaaaaaacaaaacaaaacaaaaaaacactaggagtccactcaaccctggaggtctttgctaattggaattatgtattgtctgttgggctgggaaatgtctctttcatattgtaagtccaggatgaactaggagaaagcaatttgttgccctgatgataactgatgattttcaccctctctagctgaggtaactcagacagtgcatgaggtcagtttcttcttgagaagcagtgccttggtcttgtttctgtggttggttctagcccctgcagagcctgggagctgcaggaactgtctgagaaaatctccctaataggggagtgggttcccagaagggagatctgggaggggtcaggagccactaagttgcttcactccttttttctctaattttctaccttcctctctgttcctgcagacagttttgccagctttgcttctggttactagggtctcatgcgtgtcctgcttggagagccataaggaaattgctgtcttgtgctttgtgtctctcatccagtctctggctcttgggattctggtctttgagaaatagtccctgagtattaggatacttttatcaaaatctagtaccagctacggccagaaagggccaggtgggacctgaaagcaaagacaatgttctttaccacacgtttcacatctgcaacatccttcaattgcgggaaaaggaacttgatttaacagaagaacatggtagagcagcatccagaaagtctgttattcctcttggattttttgaaataatcttcagaggaaggaaggaaaatcctattttggggtatcagtgtttgactagggatcatgaaataataaactgaaaaaaactttagagttcagttgatccaacactttcctttaaaagttgagggagcagaggcccatgggattaaatggctggtccaggtcagccagcaggtgtagggcctgacaagaacatattgtttccctgacccctaggccgtcacaccacaccctccatttcctcatgttgctgaccaggtgcccatatgatttctacacttcccaagccttaccctggcatctttcttttaaattatatctgtcccaggtgctctccacacataggatggtaatgccagtcccaggggagggtgtgatagtaaggaaggccactgttaggtttcctttagaaataaagagatctcagcagcttggaagaaatcccagaagcggactccatcaatccaagaaagagttgctttgtggaaggtgaaggaagacccacagagtgctcaggatgatgctattgctggagagcgaaagatggaacagccttgtccaggcagaacagtcataagccaggaaatgaaacaaaggaaaacaggtgcctgaatttcctggggaaacatggcttgtttaaggacttggagttatggatggaatttatgggacccacgtgagcagacctgaggaaggctcgatttcttttgtttcttggtccactctgtcactctgctctggtcaagccccatttggtctacagcccatgagaaggaatgaggctggttctgcactctcagcatgcagtccgaaagcatgtgggagtggggagggaaagtgagatgaattaagacaaagaacaggtgccatagaagtagatttctaggaatgaagtggggcagatcttatctttgtggattacaggcactgtactaaaaacaggtttcctatttaatataaaaagaaagtgaatcttcttttggatagaatcatccattcccatcgccgcaccccctaccccccaaacacacacacacacacacacacacacacacacacacacacacacacacacgccctactcttcatttgctaggggaaggtcacagcacaactaaatccaggacaggacattgtgaccatgacccagccacagtcaataccagaaagatgattcagagtctgaagtggtgccccaggtgccaacaggataacctctaccccccgactttgtctctggggtcctgttccttcctgcaaagcccaatccaagactggcatggctcagaggttgtgagaaaggcatggactggaacaatcatgtccagaggggtctggagctttgtttcctgttcaccagcaaaaaatgtctctcccatttttctgaaagtggctgatgtaagaacaggcagaaggaaaaccctttttgtcaataactctgtccttaaggaatggtcctctgggagggctgtgctgctagtgggtacctcagtcacacacccccaaccccaggcagcctctagagccttcttgctttcattttccttgaatgtacataggaacaagggggaaagtctcttactgaagtgcctgaaacccaaagctagagcttctagagacgccgttcttcctgtctcagcttggccagcctttcaacaatgttctctagtttcaagctccagcttctcagaaagaattaaagaacttgctgttcaaattaagtagaaagtgagactcaataataactgaactacagcaaaaggcagagaattacagggagaaaaaacttgtacttaccagcccaattctactctcctcaaactgacacacacacacacacacacacacacacacacacacacacactcttttaggggactaagagagagaagcatgttattacattttactcatccaaacagtaatgcaaaaataaaacggtagaatatgaaaagctcaggatctctcccaaggctacctactgcaggagggccaacaggtgagatgggaagaatggaaacagggaccgattttgtagctcatacaattaggacaccttaggaatagcattgtagtaatggtgatgaatatgctctgccaaattcatccagtctgcaccatcttatagctgcccagcacactcgactgttcatgtggtctctttgtagtgtgagtttggagtgtcctattagcctgttctggttaggaatgagttaacggctctttccctcaaccttagtctagtcccagggctgaggattcagctggatccacatggtcttgagggttggcatgaggagggggaagcttttttgaatcgctttttgatcacataatctgccattttaagagtaagatttgctttatggaaatcaattcattaataaaaaatgatattcaagttgcaataccatttcacagtgaaatattttgagtacaattttgttgctagaatagtcatgggcaagagttttatgcaaaatgtttcaattatgttaataaataagacaatgctacaaga

SEQ ID NO: 629 - DNA, 1265 bp, Homo sapiens
  source 1..1265: mol_type = genomic DNA
gctgcgggcctccgacggcgggaggacagcgctgcgaggaggcgcccgggacagtcatggagcgccgcctgggagtgagggcctgggtgaaggagaaccggggctccttccagcccccggtctgcaacaagctcatgcaccaggagcagctcaaagtcatgttcatcggaggccccaacaccaggaaggactatcacatcgaagagggtgaagaggtattttaccagctggagggagacatggttctccgagtcctggagcaagggaaacaccgggatgtggtcattcggcagggagagatattcctcctgcctgccagggtgccccactcaccacagaggtttgccaacaccgtggggctggtggttgagcgaaggcggctggagaccgagctagatgggctcaggtactatgtgggcgacaccatggacgttctgtttgagaagtggttctactgcaaggacctcggcacgcagttggcccccatcatccaggagttcttcagctctgagcagtacagaacaggaaagcccatccctgaccagctgctcaaggagccaccattccctctgagcacacgatccatcatggagcccatgtccctggatgcctggctggacagccaccacagggagctgcaggcaggcacaccactcagcctgtttggggacacctatgagacccaggtgatcgcctatgggcaaggcagcagcgaaggcctgagacagaatgtggacgtgtggctgtggcagctggagggctcctcggtggtgacaatggggggacggcgcctgagcctggcccctgatgacagcctcctggtgctagctgggacctcgtatgcctgggagcgaacacaaggctctgtggccctgtctgtgacccaggaccctgcctgcaagaagcccctggggtgaccctcttgccatggcctgaagcagccacaggtgtgccaagcaccctcgagtgccatccctgccaaacaactctcccagcccccactacctctctgtgtactgccgctgtgtcccccacagacctgcacattgttgtcacccaccctcctgcccttctcagcccagatgccatgcccctgggcgggcagcagctccccatcttctctggcagactcagcccactgccttgccagtcttgccaggtggtctacccccggccccgctcctgcccattcctctgtccctgcagactcagtgcagcacttccacaccaagaaggccctcaataaaggcttcctgaggaacgca

SEQ ID NO: 630 - DNA, 6866 bp, Homo sapiens
  source 1..6866: mol_type = genomic DNA
cggagggagtaggagagcccggggcttcggcaggcagagcaggcctctcccctccgtcctcgtcgtcctcgtcctcctcctcctcctcctcctccgtggtggtagtggtgggacttcccccggctgctgcccctcccgccgccgctgctgtcccccaccgaagtagcggccacagcctggtcagcggcagcatcatgcaggccaatggggcaggaggaggaggaggaggtggcggcggcggcggtggaggaggagggggcggcgggggccagggacagaccccggaactcgcctgcttgtcggcccagaacggggagtcgtccccctcgtcgtcgtcgtccgcgggggacctggcccacgccaatgggctcctgccttccgccccctccgccgccagcaacaatagcaacagcctgaatgtcaataacggggttcccggcggggcggccgccgcatcctcagccaccgtcgcagctgcctccgccaccaccgccgcctcctcttccttggccaccccagaactgggcagcagcctcaagaagaagaagcggctctcccagtcagatgaggatgtcattaggctaataggacagcacttgaatggcttagggctcaaccagactgttgatctcctcatgcaagagtcaggatgtcgtttagaacatccttctgctaccaaattccgaaatcatgtcatggaaggagactgggataaggcagaaaatgacctgaatgaactaaagcctttagtgcattctcctcatgctattgtggtaagaggcgcacttgaaatctctcaaacgttgttgggaataattgtgaggatgaagtttttgctgctgcagcagaagtacctagaatacctggaggatggcaaggtcctggaggcacttcaagttctacgctgtgaattgacgccgctgaaatacaatacagagcgcattcatgttcttagtgggtatctgatgtgtagccatgcagaagacctacgtgcaaaagcagaatgggaaggcaaagggacagcttcccgatctaaactattggataaacttcagacctatttaccaccatcagtgatgcttcccccacggcgtttacagactctcctgcggcaggcggtggaactacaaagggatcggtgcctatatcacaataccaaacttgataataatctagattctgtgtctctgcttatagaccatgtttgtagtaggaggcagttcccatgttatacgcagcagatacttacggagcattgtaatgaagtgtggttctgtaaattctctaatgatggcactaaactagcaacaggatcaaaagatacaacagttatcatatggcaagttgatccggatacacacctgctaaaactgcttaaaacattagaaggacatgcttatggcgtttcttatattgcatggagtccagatgacaactatcttgttgcttgtggcccagatgactgctctgagctttggctttggaatgtacaaacaggagaactaaggacaaaaatgagccagtctcatgaagacagtttgacaagtgtggcttggaatccagatgggaagcgctttgtgactggaggtcagcgtgggcagttctatcagtgtgacttagatggtaatctccttgactcctgggaaggggtaagagtgcaatgcctttggtgcttgagtgatggaaagactgttctggcatcagatacacaccagcgaattcggggctataacttcgaggaccttacagataggaacatagtacaagaagatcatcctattatgtcttttactatttcaaaaaatggccgattagctttgttaaatgtagcaactcagggagttcatttatgggacttgcaagacagagttttagtaagaaagtatcaaggtgttacacaagggttttatacaattcattcatgttttggaggccataatgaagacttcatcgctagtggcagtgaagatcacaaggtttacatctggcacaaacgtagtgaactgccaattgcggagctgacagggcacacacgtacagtaaactgtgtgagctggaacccacagattccatccatgatggccagcgcctcagatgatggcactgttagaatatggggaccagcaccttttatagaccaccagaatattgaagaggaatgcagtagcatggatagttgatggtgaatttggagcagacgacttctgtttaacttaaaattagtcgtattttaatggcttgggatttggtgcaaacaaacatgattgatagctggacagacatgctcgtcatgaaaaaagaaccatttctgaagcccgattggggccaaacatttacaccttgcttcatagtaaccagttgagatgaagcacgtcgttagaacgttgttggacaccatgttgaattattcccccatcggttgtgaagaactgtgctacattcaggcttacccattgaactcagtatatatatttttttccttcctgtcttttgtctggcaggataccattcttgttgctcttctgtgtaatgaagtttaaatgcttgtttggaaaactttatttaacagtttagaaggcttgatagaaagagtgcattagtctgaagagtatacattggataggaaagaatttccttcttttgtttctccaaatctttccgccttatttagcttgagatctttgcagcttggttcatggattctagccttgcccgttgcgcagtatatactgatccagatgataaaccagtgaactatgtcaaaagcactctcaatattacatttgacaaaaagttttgtacttttcacatagcttgttgccccgtaaaagggttaacagcacaattttttaaaaataaattaagaagtatttataggattaaagtgacttcatttgtatacatttggaatctaaaccagcttaaaaacagtttcctcaatgacttagatacacagtataactgatgctcttctggaataccacatgagacatggtcagaaacagtgcttggaaggacattacacaagaaattcagagtaatgctttgaagatttccccccttttgttttattcctgaaggaacatcagtacccgatcttgaagaaattcaagattcaaaaagaattttaaatacaccaacatgagacatcagtagtcagttggttttcagtaaagcttgttccaagttgttctcaacttaggaagtaattttggtgtgatctagcaaaagagtaggaatcagcgatacaaccactttggaagtttatagtataattgaaattattagaagaattcagcaggttacagacatacttaaactgggattaaaacctcatagtcatttttcttaattgcccttaatattttgacatatagggatacataaatttaaagaatattttttctcagttttttcagatattgccatactgaacctcattctaaactggtgctgtggatagtctttccctctcccctcctgttttagtttaaggaaaggtttccttcatggaaaagcacttttaattttgagaatttcacatttaaaataagccaaaagcctgatgttcacattgtgcttttaaactccgtaacagctgaatacaacataacatagtctcccttgaaattccctccctttttcagtagaggataaatagggtgactccagctgttggaatgagaatggggatacccccaaaataagattctggtgaagaaaaagtcttgtactaagttcccctttaggtgtagccaagtctataatataattatgatcatgaatagactccagaatccacaaagagaagagggcttggatgtcaaaaattcttccattgtggggtaggtggtcggggatgggagaaagggaaaagtcagggaaggggagaagaaagaaaaacacatttggccttaaaatagcatgcattctcccagaagcccatagtaaagaaaatgacagatcgtggtcagcagactcttatcaaattggtatgtaaaagatttcttcaagctccattttgcagagaccaccacttagagaatcaaaaaattcctgttttgatacttctaagttaaaatatatgttacagtttatctggtacttcatttttcttaactaaaattactttttactttaagcttgaataaaaatcttcattggtaactgtatgtaattaagtggcaacttctctttacctcagtatagttaaaaaccattcatattttaagtgattcatgtataccctgaagccgttaatacaccccagtctctatggtaacatcactaaatgtgggcatagaaactccacagctgtttacaaatttggttacagtgtgctacggtgcatttgtaacactcagatttgtgcccattcaggggcaatttggcactcagattctactctacttcacctaaccacccctagatctgagttttcagagtgcttctgaagtacagtttaaaaacactttttaaaaagtggagtaaaagtgaggcacattttacaagaacataactcctattaaaacggagtaacaactatgcaaaggtttctatagcagctaggtgagtttgttttccgggtctgtcttaactggcagcttcctgtacatactggtacttatttgctgtaaacgtctgtttcatacatttgccatgcagtgactgtgctcgaaaggtgaaatcaatggtaaagaagcctaggattttatggtatgagaaactgatcgcaggattttctgatccatagctattaattgaaaacttctgatagtgctgtaggctctatagtaggcttaagagtgagtcttatactatgaagccagccacaagatactaacaaatgtataaattgaaaagtaccaatactttttgcacatagatcaaaatagagtggagaatttgggctccaaaaatcaggttagtaggctcatttccatgtgcttaaaaatgtttttgttgttatgcattgattaagggctagagcaaatataaaattaaatgtctttttcctccaaataattggttattaatggtaaaatgttggacttggggattactgagattagtatgtgggtagtaaagaattggagtgggagttagtggggagggatgacaaagcttcagctttggtttttgtatttttttagtcttcataacagctacatttctgttgctcttattggccagataaatgtgttatattaaaccaggtaagtattttaaacagagaacattttatttgcatatatccctacaaattggcccattttattgggtggggggataaaaaagggattccctaactttaaataatcagaatatcctgcaattgaaaggagaaaaaaatccaattttgtcagtattttcttagtctgaaaaaaacagcagtagtaatctggtgaatgttattattaggagtgttctgcctctacagtggcatattccatgacattaatagaaaacccttctttcccacccctccccatcttgacattttcttttttaggatgttggttcctgcaaacaagaactgaccctatcacctctgcctcacagtgggtaaatatatcatacatctcttgaaagggaaaatatccatgtcagtttctttcacagtagaagaatggctgcttttgaatggggaggaaagaagacatttttcttaatatcctttttgtcccatctctaaaatgtataaatattttgatttggttttactttaatttctcattcataatttcgcaactgtccttttgggttgccctccaacacattacttccatttcagaaaccatatctgatttaatataaactgctaacttaagaagaggtgaatttgcatttacacttagacactttctaaaaacagggtgaacttaattgaaatttttcagtgttgttaagctattgttatagtagctgccctatagttacaaaaataaaaactataaaaacccatcccctatctacttaatccagatagcctggatttaacaaaaccaatagtataaaaatgtgtgtgtgtgttctgtgtgtgtgtgagagagagagtacttgattcattaaaaagtcctggaaacagctgttctaggatcttgtcatttttactgaaagtctcgtgcacatgtgaagtgccctctgagtttaaggtttggttaatactggtatatttttataagattgaaattgtgtccccatctttaacttaaacattttcattatcagggtcaatgtgctagaactgaattgtaacatttttaggcacagatggaaaaaaatgttattggctccttgaaaatgtgtgtgtgtggcgaggggaatagatccacaaaagcatgtatgtacttacaaaccaagctgtagagatcaagaaaagaacttaagtgttgatctcaagatttctaaattgtcaagatttacatggcattgtggtggaactagttaacacttagagcttttggtatgtaataactatttgctatggactgattaaatgtttcaaaagattgtgttcttcaattttggtgggttttgatttttgtttttttaactgcctctcagattatatttacttagtttaaatttctttgctttattcattaaagtataaaaacttcaggtctctgatatttattttcacttgtttactaattatttacaaaacaccctttgttgacttttattttataaatgtgtaatgtattaaacgtctttaaatttttgttcaactgaaactacattaactttgatttgctttactgggatttttttttaaagacactttttccatgtcagtgcgcagcacttaaccagtcgtttgtattccctttctttcaatccaataaacagaatgaatacct

SEQ ID NO: 631 - DNA, 5326 bp, Homo sapiens
  source 1..5326: mol_type = genomic DNA
gcgtggtcgtcgccaccgcagccgcccgagaggagctgggggaggacggtggcccgcgaggctcgtcgcagacaacgcggcggcgatgtccgcgagccaggcgagtgccgcggcggcagcggcggggccttgcgcgcggcagggcggcctgggcttcggcctccctccggttccctggaagcgggcccgcgaccagcgcgggagcagcagcagaggcggaggctccagcgcgtctctctcctccccctcagcctgagccgggggaagccaggcggcccgggtgtctggagggggggggtccgctgcccgagaatgggaattctcttcactagaatatggagactgttcaatcaccaggagcacaaagttatcattgttgggctggataatgcagggaaaactaccattctttaccaattttctatgaatgaagttgtacatacatctcctacaataggaagtaatgtagaagagatagtgattaataatacacgtttcctaatgtgggatattggtggccaagaatctcttcgttcttcctggaacacttactatactaacacagagtttgtaatagttgttgtggacagtacagacagagagaggatttctgtaactagagaagaactctataaaatgttagcgcatgaggacctaagaaaagctggattgctgatttttgctaataaacaagatgttaaagaatgcatgactgtagcagaaatctcccagtttttgaagctaacttctattaaagatcaccagtggcatatccaggcatgctgtgctctaactggcgagggattgtgccaaggacttgaatggatgatgtcacgacttaagattagatgatctctactgacctcttctcatagattttgtataaatgaagtgctggactttacctgaaagctgcaaaaattaatggtttagatatatttataataaactgatttaaactttttctataagaagaaaaattaagaccacttatttgaaaacaaagatgaagtctcaccttccagtttgctttctcattagttttttccaaagtaagttattgaagctgtgattgacatttttctcataatgaatcctctcaggacattgtgtagcctatggtaagtacaaagggagaggaagacattttgaattttaagagctttattatcagtttaaccctccctagttgaatgttattttcttcttgttccattaagtcagaatacaaatcagcacagatattcgaatgtttccaatattttaaaatgtaatgttacttatgaaaagtattttgcttaaggttgtgtgtgtattgtgtatatacctcaagttcaagttaatggcattgatttatgttccagacaaaaataacacaaataataatatccttcgttataaccacaatgagataagtattggcattagtgttcagtgccattttatactttctctctgtgttctctgtattgtactaaccaacctcccaaatcgctgagctgcttgtttaaaaaaaaaaaaaaggaaaaggaaaaagcatgacattgtgtatcgattttttgttgttgaccaaaatcacacacatggaaacatgtaattcaacagagtgggaaagctagcagattcttggcttagtattactaataggcaggattgtacaatgagcaactatcagattattcctttcagtggttcttatggcatctaaattactgaataaattattaatccattaatcagtgaatcaaattatgattacaattatcaaatgaatgctcagcattaattgaaaactgttttgtgaaacatgtctacccagaaaagtagcattctataaatactattaaacaacttagctatattatttttaagtattaaattatatgtcaagcagttaaagtgaatttcagagtaaaagtaaggcatgtttctgagcaacattgataatttcttaatttgcaaatttcttcttattttggtacttggaatatagtgtgagattttttatttctaaattttgttgtatcttctattacataaatgcattgacaattataaaatgcaagtgttttttgaatgattttaagaatttggcttaaaaattgattgatacaacgtattatttgtactaagaagtaacttgacccaaaacaccttttatgtttgcttagggtatattttttcagtgtctgaaagtcaaaggtattcctgtcacaactgtaaacaaacttatcctaaatgtgttaaaacatattcttgggtactctatttatgtatctttcatgccttgaaaatctgaaggttaatccaaactcacatgttttagcatatttgagaaaaaaaaactaccttcaatatcagccttttaaatttcatgaagattttggtgaggaataatagtatatagtttaagtattgacaaaactttgaaagtttctttctttaaaatgggaaatactcaatatctaaatccaggtcaggcatgggatatcagtatttaacattggatgttttatgttttatatttataatgttcaaaatgcaagcataacatttaatatttgtccacatggttttacaaaagtaaatcttaaattactaagcttttcccatatgttctcgtactttctcaaatccctataaagaattacttgttatctattaaaaatctcctttacccaaatctgtattatggtttcgccagacaaatattatgtgatgtagcccagaaaatccacaccttttgtcctttttatgttttaatttgaataatcatgtgcttagtcccttggattactgccacatcagtttaacacgatatcagcacattcccttgtcatcatcaaggtgttggctcagatttattcttaattggatgtttaaagcatgtactaccttgttacagttggtttagtgtagtggattattgacatgacatcatgagaagatgtgtaattttataccacatttataaaacatgattttgttttctacccttcaaggtaaacattaaaaataaggtggtacttgtgtacttgtacataaaaccaaaattatagttgggaaaaaaataaatttatatatgaaaatgtcaaaatcattttaaaagtattattttcaaataaaatggagaagctggtgaaaagtcatattggcaatttttatgtagtttaagtggaattaagcagagggagatgcttttgggtttttaatatgccacttctgagtgaaaacatctcgtggagtcattgtgttcagctctgagaagaacaaagattcatagttctgtacatgtggctggatttaaatatcctgtttttgatactaattttgaaagtcatgtaacttcttttgatatctgggcaaaagtaaccatatgctataagcatttgaatatgtttaattttatcataatagcatctgtaaaagtacatcttacacattatatagagggttcttgtttgaaattttcagttctctttatcttcccagtacctcttggtcctcataatgggcaaaggatacaacgaaggcaggttgtataggggttatagtggggaagtggataggggattcattttcttatgtgacattttgccttaagaatataaaagtgctttagcactgatggctggcatttttaatataggcagtgaaagtgactttagaagcatgggatgaaatagagggaagaagagtttttattttctggcctttaaaaagtgcctagtaggtcatttgagacccagagaaatgcacagagcttgagcaaaggcatgaagtccctgacattgttttcctttttgtctcagcatatagtattaagatgcctagaaataggactctattgttccctcttgtataggcactttacatttcttgtcactacagcaaccacatacagtacagacaacctccaaacctgtttatattagtgtaaatagaaaatctatagacaactttctagttttctctggaggcatttttgggaatgtacgtgtaataggctctgctttgtatacaggagataataccacatcatcggttatctccaaactccagtcttctctcaactgcccagttgtatgttgtcatcaatcactttttcaaggctgggtagagacaagtttctcctcgtaactttgacctctcccactctccaaatgtaatctggacctcattgctttcaaggtcagcttccccatagctcaggtatcctttgctctcctgtatcttcatttactattagtgaagagatctctgtcctggaggttattctaaactttctttgtaactattgttatagacaatggtttccaaaccagtggtttctatgtagcttttctagttccttgctatcttctcaccactggcttgaggtagtgatttggactttgctcattagagagcattatcagagatgtggagtccatcagaagaccagcttgcagtgtgtatagcatatagatgccaatattagaattctttaaattatatttaacattttcatgcttcttaatttaacttcacatgttgggaagtagattcagaaagataggagaaatacccagactctaccacttccgtgagctactagttaggcatgggcaggattaagttttatgtgtattatcttcccactaccaagaatggttatgtttcacagaataccagttcagtttgatttggaaaaagatgccaaaccaaatttatatgtagtctataatctaagggcattcttgaaactattgcccacatcccattttttttttcatgtttacttacaaaacagagataaacattagatgtctaaaggagttagtaatgaaaagcctatccttaaaaaataaacctgttgaaatgggctttaaagacatcgaaataatcacttgtcatgcattgactgtaaatgcagatagagaaatatgtctttgaagctccacttacacaaaaataaaacttgtatatcatgctccctcaaagaatgtgcgatagattattttaagaccatgataatagagtaaaaaggaaagaaagccagaaattacaattttggatgctaaaaagtaactttctagttaaccctaaagtcctgtcagattgtgaagaaatgttccaggatacacttggattagttatgcagtatttcttatcaatgtctagcccttgtgtattgttctgaaaactaaagtttaaatctttatgctgttgcttgctagatatcctgttctttggtagaaaattcccatagtctgtactcaagaagtgcctaaaaatggatttgtgttgattttaagcccatctaataaattatatgtattttcta

SEQ ID NO: 632 - DNA, 1775 bp, Homo sapiens
  source 1..1775: mol_type = genomic DNA
gcctttttcttcccccagtactgaaattaagcagcatccaacacaggcctactcttacgacatgtgactttactgttttccgtttttgttgaaagagtcattaacagttaggagttgatggcagtttcaataacaggtcattgccgagaaaaggatagcactataatatgcagaaatctacaaattctgatacttccgtggaaacactgaattctacccgccaaggcacaggagctgtgcaaatgagaatcaaaaatgccaacagccaccatgacaggctcagccaaagtaaatccatgatcctcaccgatgtcgggaaggtcactgaacctatatccagacacagaaggaatcattcacagcatatcttgaaagatgtcattcctccattggaacaactgatggttgaaaaagaaggttatctgcaaaaagctaaaattgcagatggaggaaagaaactaaggaaaaactggtctacttcctggattgttctttctagtcgaagaattgaattttacaaagaatccaagcaacaggctctgtccaatatgaaaactgggcacaaaccagaaagtgtggatttgtgtggagcacacattgaatgggccaaggaaaaatcgagcagaaagaatgtctttcagatcacaacagtatcaggaaatgagttccttctacagtcagatattgacttcatcatattggattggttccacgctatcaaaaatgcaattgacagattgccaaaggattcaagttgtccatcaagaaacctggaattattcaaaatccaaagatcctctagcactgaattgctaagtcactacgacagtgatataaaagaacagaaaccagagcacagaaaatctttaatgttcagactgcatcacagtgcttccgatacaagcgacaaaaatcgagttaaaagcagattaaagaagtttattacccgaagaccttccctgaaaactctgcaagaaaaaggacttattaaagatcaaatttttggctctcatctgcacaaagtgtgtgaacgtgaaaattccacagttccgtggtttgtaaagcaatgcattgaagctgttgagaaaagaggtctagatgttgatggaatatatcgagttagtggcaatctggcaacaatacagaagttaagatttattgtcaaccaagaagagaagctgaatttggacgacagccagtgggaggacatccacgttgtcaccggagcactgaagatgtttttccgggagctgcctgagccgctcttcccttacagtttctttgagcagtttgtggaagcgatcaaaaagcaagacaacaacacaagaattgaagctgtaaaatctcttgtacaaaaactccctccgccaaatcgtgacaccatgaaagtcctctttggacatctaactaagatagtggccaaagcctccaagaacctcatgtccacgcaaagcttggggattgtatttggacctacccttctgcgagctgaaaatgaaacaggaaacatggcgatccacatggtctaccagaaccagatagctgagctcatgctgagtgagtacagtaagatcttcggctcagaggaagactgacagacaagacaagctactgaatacgttcacatctgtcttgatgcctaatatttttacatttctgtaaacatatttctgaaatattttttgcctttcaagcgacagatgcctcattttgtgaaaacttaatgatgattttgtgtttaagttccaaacatttgaataaaataattgacaata

SEQ ID NO: 633 - DNA, 1505 bp, Homo sapiens
  source 1..1505: mol_type = genomic DNA
tcacccaagcgactgggagccgcgtcctgctctgggactgagccgttggagctgccccgctgaccgcactaggctgaccgcaaccggctgaccacacacagtcctcactcccctggccctggtgggcggcaggcaccatggcgcagacagtgccgccctgcgagctgccctgcaaagagtacgacgtggcccgtaacacgggcgcctacacgtcctccggcctggccaccgccagcttccgcacctccaagtacctgctggaggagtggttccagaactgctatgctcgctaccaccaggccttcgccgaccgcgaccagtcggagcggcagcggcacgagagccagcagctggccacagagacccaggcgctggcgcagcgcacgcagcaagactccacgcgcacagtgggcgagcgactgcaggacacgcacagctggaagtcggagctgcagcgtgagatggaggcgctggctgcggagaccaacttgctcctggcccagaagcaacggctggagcgcgccctggacgccacagaggtgcccttctccatcaccactgacaacctgcagtgccgtgagcgccgcgagcaccccaacctcgtgcgcgaccatgtggaaacggagctgctgaaggaagccgagctcatccggaacattcaggagctgctgaagagaaccatcatgcaagcagtgagccagatccgactgaaccgggagcacaaggagacctgcgagatggactggtcagacaagatggaggcctacaacatcgacgagacctgcgggcgccaccacagccagagcaccgaggtgcaggctcatccgtactccaccaccttccaagagagcgcctccaccccggagacccgggccaagttcacgcaggacaatctgtgccgtgcccagcgcgagcgcctggcctcggccaacctgcgggtgctggtggactgcatccttcgcgacacctccgaggacctgcggctccagtgcgacgccgtgaacctggccttcgggcgccgctgtgaggagctggaggacgcgcggtacaagctgcatcaccacctgcacaagacactgcgggaaatcacagatcaggaacacaacgtggcggcactgaagcaggccatcaaggacaaagaggcacctctgcacgtagcccagacccggctgtacctgcgctcgcaccggcccaacatggagctgtgccgtgacgcagcccagttcaggctgttgagtgaggtggaggagctgaacatgtccctcacagcactgcgagagaagcttctagaagcggagcagtccctgcgcaacctcgaggacatccacatgagcctggagaaggacattgccgccatgaccaacagtctcttcatcgaccgccagaagtgcatggcccatcgtactcgctaccccaccatcctgcagctggctggctaccagtgagcagcggcacggtgcttccccccagtcccccaaataaacagcgcgttagctttctgcaca

SEQ ID NO: 634 - DNA, 2336 bp, Homo sapiens
  source 1..2336: mol_type = genomic DNA
gagctacaacagctgagacagaaaagaggtaaggaagtgttgggggctgggacaaccagctccccaacaactcctaggtgtttaaagaaggaggcaggaagacttgtgaagatgggaactatacaagaggcaggaaaaaagacagatgttgggtggagcaactgctacagaggtaaatatgattaactttacattccatctttcgtctgctcccaaacttaacagcaggtaatctgcttctagcaagtggtgaaggtaagagaagcatctgtataggaggcaagagatctgagtccttttgaaggcctatcctctgctctgtatctcaattactgttcttcatttcaattattcttacctactattcagttcccttgatcttttcttcttgggggctgtcttagggtcagggagattgcagaagcaccagaactaggagcagccctgagacatggggagttggagctgaaggaggaatggcaggatgaagaattccctagattgcttcctgaggaggctggcacttctgaagatcctgaagaccctaaaggagattcacaggcagctgcaggtacccccagcactttagccctgtgtggccagcgccccatgcgcaagcgtctttctgccccagagttgcggctgagtctgactaaggggcctggaaatgatggagcttcacccacccagtctgcaccttcctctcctgatggcagttctgacctggagatagacgaattggagacaccttcagactcggagcagctggacagtggacatgaatttgaatgggaagatgaactaccccgggcagagggtctgggcaccagtgagacagctgaaaggctgggccgaggttgtatgtgggatgtgactggagaagatggacatcactggagggtgttccgaatgggaccacgggagcagcgcgtagacatgactgtcattgagccctataagaaagtcctgtctcatggaggttaccacggtgatggcctcaatgctgtcatcctttttgcttcctgttatctacccagaagcagcatccccaactacacctatgtcatggaacacttgtttaggtatatggtgggaactctggagctgctagtagctgaaaattacctgcttgttcatttgagtggaggcacaagcagggcccaagttccacctctaagctggatacgtcagtgttaccgtaccctggatcggcggctacggaaaaacctgcgagccctggtggttgtccatgctacatggtatgtgaaagcatttctggcactgcttcggcccttcatcagttccaaattcacacgaaaaatccgttttctggacagcctgggggagctggcccaactcatatccctggatcaagtccacatccctgaagctgtcagacagctggaccgggatctccatggctcaggagggacatagcacaggactggataaaaggccttagaaccagttagtgatctgcctacacctgaatccctgaaacatctgaactgttttgtaaatcatcttatccccaacctcagtaccaccggatcttcacttctcagtgggattttgtcctttgcatgaccctactttcagcagggctttgaggctgggaaactgatctgctgggtgactttcattccagttgctgggacggaaggctgaatgtagggtcattttgtatgggatatgcagagctctgggtttttttgttttttgttttttgagacggagtctcgctctgtcgccaggctggagtgcagtggtgcgatctcggctcactgcaacctccgcctcccggttcaagccattcttctgcctcagcctcagcgagtagctgagactaccggcgcacgccaccacgcccagctaattgttttgtatttttagtagagacggggtttcaccatgttggccaggatggtctcgatctcttgacctcgtgatctgcccgcctcggcctcccaaagtgccgagattacaggtgtgagccaccgcgctcggccagagctctgggttttaatcctactttagctgtagaaccttgggcaaataacttcatctttttgggtcctaattttcctcctgtctaactggagggactgtgatccttccaccttggatggaagaggcttacctgacagccagcctgcctgctgggagccaggagagtcagctcattaaatcttgaagaaccgctgtatgccctttttccttctaagtcatgtctgctgcctgtgagcctgggaaggagtgctttcaaaacctgtatttttgccctctttagtaaatttagaactgtagaggctaataaactgcgatgagacatttaa

SEQ ID NO: 635 - DNA, 2626 bp, Homo sapiens
  source 1..2626: mol_type = genomic DNA
cctcgatcccctcgccgcggtcccatggaggaggaggcgagccgcagcgccgcggcgacgaacccagggagtcggcttacccgctggccgcctcctgacaagcgggagggatccgcggtggacccagggaagcggaggagcctggcggccaccccctcttcctcacttccctgtactctcatcgctctcggcctccgacacgaaaaggaagcaaatgagctgatggaagatctgtttgaaactttccaagatgagatgggattctccaacatggaagatgatggcccagaagaggaggagcgtgtggctgagcctcaagctaactttaacacccctcaagctctacggtttgaggaactactggccaacctactaaatgaacaacatcagatagcgaaggaactatttgaacagctgaagatgaagaaaccttcagccaaacagcagaaggaggtagagaaggttaaaccccagtgtaaggaagttcatcagaccctgattctggacccagcacaaaggaagagactccagcagcagatgcagcagcatgttcagctcttgacacaaatccaccttcttgccacctgcaaccccaatctcaatccggaggccagtagcaccaggatatgtcttaaagagctgggaacctttgctcaaagctccatcgcccttcaccatcagtacaaccccaagtttcagaccctgttccaaccctgtaacttgatgggagctatgcagctgattgaagacttcagcacacatgtcagcattgactgcagccctcataaaactgtcaagaagactgccaatgaatttccctgtttgccaaagcaagtggcttggatcctggccacaagcaaggttttcatgtatccagagttacttccagtgtgttccctgaaggcaaagaatccccaggataagatcctcttcaccaaggctgaggacaacaagtaccttctaacctgcaagactgcccgccaactgacagtgagaatcaagaacctcaacatgaacagagctcctgacaacatcattaaattttataagaagaccaaacagctgccagtcctaggaaaatgctgtgaagagatccagccacatcagtggaagccacctatagagagagaagaacaccggctcccattctggttaaaggccagtctgccatccatccaggaagaactgcggcacatggctgatggtgctagagaggtaggaaatatgactggaaccactgagatcaactcagatcaaggcctagaaaaagacaactcagagttggggagtgaaactcggtacccactgctattgcctaagggtgtagtcctgaaactgaagccagttgccgaccgtttccccaagaaggcttggagacagaagcgttcatcagtcctgaaacccctccttatccaacccagcccctctctccagcccagcttcaaccctgggaaaacaccagcccaatcaactcattcagaagcccctccgagcaaaatggtgctccggattcctcacccaatacagccagccactgttttacagacagttccaggtgtccctccactgggggtcagtggaggtgagagttttgagtctcctgcagcactgcctgctatgccccctgaggccaggacaagcttccctctgtctgagtcccagactttgctctcttctgcccctgtgcccaaggtaatgatgccctcccctgcctcttccatgtttcgaaagccatatgtgagacggagaccctcaaaaagaaggggagccagggcctttcgctgtatcaaacctgcccctgttatccaccctgcatctgttatcttcactgttcctgctaccactgtgaagattgtgagccttggcggtggctgtaacatgatccagcctgtcaatgcggctgtggcccagagtccccagactattcccatcgccaccctcttggttaaccctacttccttcccctgtccattgaaccagccccttgtggcctcctctgtctcacccttaattgtttctggcaattctgtgaatcttcctataccatccacccctgaagataaggcccacatgaatgtggacattgcttgtgctgtggctgatggggaaaatgcctttcagggcctagaacccaaattagagccccaggaactatctcctctctctgctactgttttccccaaagtggaacatagcccagggcctccaccagtcgataaacagtgccaagaaggattgtcagagaacagtgcctatcgctggaccgttgtgaaaacagaggagggaaggcaagctctggagccgctccctcagggcatccaggagtctctaaacaactcttcccctggggatttagaggaagttgtcaagatggaacctgaagatgctacagaggaaatcagtggatttctttgagctaggagaataagagtctggagactgggagccttcacttcggcctccgattggtggcgcatagggtgtaaccaataggaaacccctaaagggtacttaaaccccagattttgcaactggggctcttgagcagcttgctttagcctgctcccactctgtggaatatacttttgcttcaataaatctgtgcttttattgcttcattgtttca

SEQ ID NO: 636 - DNA, 1914 bp, Homo sapiens
  source 1..1914: mol_type = genomic DNA
agaccccctggcccgtgcgcttcgcaggccagagcccctctctcacccccagcctaggagctccaagctcctcaggccaagggacggattccctggcgtttagccccatctcttctggctgcctgcatacgttgcctgacttataattcttctccacccgcctctccctccggtctctttcggctccctttcttacaattttactcgctagaactggtgagaagttcagaggacaaaggcgctcagaggtgtggaatggacggcggaccacacatgggcacttcctgggacacatccgaactgcctcagggccatcaggcccggctaaggacccggagtctgcggttgcctagaaacgacgctagctgcccacccctcttagttttccgcctccgacttccctaagggcatttccggttccggctgcgggccggtgaagatatggcggcgtctgcgtctgcagctgcaggggaggaggactgggtccttccctctgaagttgaagtattggagtccatctatctagatgaactacaggtgattaaaggaaatggcagaacttcaccatgggagatctacatcactttgcatcctgccactgcagaggaccaggattcacagtatgtctgcttcactctggtgcttcaggtcccagcagagtatccccatgaggtgccacagatctctatccgaaatccccgaggactttcagatgaacagatccacacgatcttacaggtgctgggccacgtggccaaggctgggctgggcactgccatgctgtatgaactcattgagaaagggaaggaaattctcacagataacaacatccctcatggccagtgtgtcatctgcctctatggtttccaggagaaggaggcctttaccaaaacaccctgttaccactacttccactgccactgccttgctcggtacatccagcacatggagcaagagctgaaggcacaaggacaggagcaggaacaggaacggcagcatgctacaaccaaacagaaggcagtcggtgtgcagtgtccagtgtgcagagagcccctcgtgtatgatcttgcctcactgaaagcagcccctgaaccccaacagcccatggagctgtaccagcccagtgcagagagcttgcgccagcaagaagaacgcaagcggctctaccagaggcagcaggagcgggggggaatcattgaccttgaggctgagcgaaaccgatacttcatcagccttcagcagcctcctgcccctgcggaacctgagtcagctgtagatgtctccaaaggatcccaaccacccagcacccttgcagcagaactatccacctcaccagccgtccaatccactttgccacctcctctgcctgtggcgacccagcacatatgtgagaagattccagggaccaggtcaaatcagcaaaggttgggcgaaacccagaaagctatgctagatccccccaagcccagtcgaggtccctggcgacagcccgaacggaggcacccaaagggaggggagtgccacgcccctaaaggtacccgtgacacccaggaactgccacctcctgaggggcccctcaaggagcccatggacctaaagccagaaccccatagccaaggagttgaaggtcctccacaagagaaggggcctggcagctggcaggggcccccaccccgcaggactcgggactgtgttcgctgggagcgctctaaaggccggacacccggttcttcctaccctcgcctgcctcggggccagggagcataccggcctggtactcggagggagtccctgggcctggaatctaaggatggttcctagcaggacttggtggggggaacagggaattggggatgggagggaggcaataaagatatttggccttctttggctttctttgcttagcagcgccta

SEQ ID NO: 637 - DNA, 6395 bp, Homo sapiens
  source 1..6395: mol_type = genomic DNA
atgtctgagagccccaaggacgagggctccgaagagtgtctgtttctgcagcgcctatgggagtggggggcagtggggggaactcagggaagctgcctacaacttgaggccttccccaggctggaggaggaggacagggaaggccgaggggagctgtcctccggctgccatcaccctgatgaggcggccctgccccgggctgtggtctccgcaggggctggcaaccttgcctttgtccagctctctccgtggccaggcctgccatctgcctgcccacactcctccccggcaaagccccttgcaaatgcttgctttggggactggcagctttcgcctctgaatcaggacctagcatcagtactctggggagggggtccaggtgccaaccctgtgagtccctccctgtcccctgacgctgagaaggccctgccaacccccaccatgtgtgaggtgatgcccacaatcaatgagggggaccgcctgggtccccctcatggcgccgatgctgacgccaacttcgagcagctgatggtgaacatgctggacgagcgggagaagttgctggagtctcttcgggagagtcaggagaccttggcggccacacagagccggctccaggatgccatacacgagcgggaccagctccagcgccaccttaactccgccctcccccaggaatttgccaccttaacccgggagctgagcatgtgtcgggagcagcttctagagcgggaggaagagatatcagaactgaaagcagaacggaataacacacggctgcttctggaacatctggagtgcctggtgtcccgccatgaacggtcactgcggatgactgtggtgaagcgccaggcccagtcaccttcgggggtctccagtgaggtggaggtgctgaaggccctcaagtcactgtttgagcaccacaaggccctggatgagaaggtgcgagagcggctccgggcagcgctggagcgagtcaccaccttggaggagcagctggcaggtgcccaccagcaggtgtctgccctgcagcagggggcaggggtgcgggatggagcggcagaagaggaggggactgtggagctggggccgaaacgcctgtggaaggaggatacgggccgggtagaggagctgcaggagctcctggagaagcagaactttgagttgagccaggcccgggagcgactggtcaccctaacaacaaccgtgactgaactcgaggaggacctgggcacggcccgccgggacctcatcaagtcggaggagctgagcagcaagcatcagcgggacctccgggaggctctggcccagaaggaggacatggaagagcggattactacactggagaagcgctacctggctgctcagcgtgaggcaacatccatccatgacctcaatgacaagctggagaatgagctggccaacaaggagtccctgcaccgccagtgtgaggagaaggcccgacacctgcaggagctgctggaggtggcagagcagaagctgcagcagacgatgcgcaaggcagagacgctgccagaggtggaggctgagctggcccagagaattgcagccctcaccaaggctgaagaacggcatggcaacattgaggagcacctgcggcagctggagggacagctggaggagaagaaccaggagctggcacggacggctgtgcaggtgcgccagcgggaaaagatgaatgaggaccacaacaagcggctgtcggacacagtggaccggctgctcagcgagtccaacgagcgtctgcagctccacctgaaggagcgcatggctgccctggaggagaagaacacgttgatccaggagttggagagctcccagcggcagattgaggagcagcaccaccacaagggccgcctgtctgaagagattgagaagctgcgccaagaggtggaccagctgaagggccgaggggggccgtttgtggatggcgtccactccaggtcgcacatgggcagtgcagcagacgtgcggttctccctgggcacaaccacacacgcacccccaggcgtgcatcgccgctactcggcattgagggaagagtctgccaaggactgggagacttctccactgcctgggatgctggccccggcagctggccctgcctttgacagtgaccctgagatctccgacgtggatgaggatgagccagggggtctggtgggctctgcggatgttgtctcccccagcggccactcagatgcccagaccctggccatgatgctgcaggagcagctggatgccatcaatgaggaaatcaggatgattcaggaagagaaggagtccacggagctccgcgcggaggagattgagacgcgtgtaaccagtggcagcatggaagccctaaacctgaagcagctgcgcaagcgtggttccatccccacctctctgacggccctgtccctggccagcgcgtccccaccactcagcggccgctccacacctaagctcacctcccgcagtgctgcccaggacctggaccgaatgggggtcatgaccctgcccagtgacttaagaaagcataggaggaagctgctgtcgccagtgtctcgggaagagaaccgagaggataaagccaccataaaatgtgagacttctcctccttcctcacccaggacgctgcggctagagaagcttggccacccagccctgagccaggaagaaggcaagagtgccttggaggatcagggcagcaaccccagcagcagcaacagcagccaggactccctgcacaagggcgccaagcgcaagggcatcaagtcgtccattggccgcctgtttgggaagaaggagaagggcaggctgatccagctgagtcgggatggagccacaggccatgttctgctaacagactccgaattcagtatgcaggagcctatggtgcctgccaagctggggacccaggcagagaaggaccggcggctaaagaagaaacaccagctgcttgaagatgcccgcaggaaaggaatgccctttgcccagtgggatggtcctactgtggtctcctggttggagctctgggtggggatgcctgcctggtatgtggcagcctgccgggccaacgtcaagagtggtgccatcatgtccgctctgtcggacacagagatccagcgggagatcggcatcagcaatgccctgcaccggctcaagctccgcctggccattcaggagatggtgtcattgaccagcccctctgccccacccacctccaggacttcttctgggaatgtctgggtcacccatgaagagatggaaactctggaaacatctactaaaacaaccctggcctatggggacatgaaccatgagtggattgggaatgaatggctacccagcctggggctcccgcagtaccgcagctacttcatggagtgcctggtggacgcccgcatgctggaccacctcaccaagaaggacctgcgggtccacctgaagatggtggacagcttccatcgaaccagtcttcagtatggcatcatgtgtctgaagaggctgaattatgaccggaaggagctggagaagaggcgagaggagagccagcatgagatcaaggatgtgttagtctggaccaacgaccaggtggttcattgggtccagtctattgggctccgggactacgcaggaaacctgcatgagagtggtgtgcatggagccttgctggccctggacgagaacttcgaccacaacacactggccctgatcctccagatccccacacagaacacccaggcacgccaagtgatggaaagagagttcaataacctgttggccttgggcacagaccggaagctggatgacggggatgacaaggtgtttcgccgcgcgccctcctggaggaagcgcttccggccgcgggagcaccacggtcgcggcggcatgctcagcgcttccgcggagaccctcccggcgggcttccgtgtgtccaccctggggaccctgcagcccccaccggccccgccaaagaagatcatgcctgaagctcactcccactatctctacggacacatgctctccgccttccgggactagccatggcccccagggctggcttcctccttctgggtttcacaggctcctctggccctgacccctcttgctcgttccccttccttccgcagctcctagtctcgtccgtgactttccggttgccctggatctcagaatatattcgtccaccccctcggcaccccattaccccgagtcccaccgtgtgtccgttgtaagtccggtggatgtggctggggtttcctggtattgtggaggcacccaggttgtccatgcttgggattctgggggaaggagagaagggcagctcagggtggatgtgaagccacccttcctcttctggacccagcctggtctgcactgcaacctccaccaggaccaggatcctgggccacaggctgggatggtccttccaagaaagggtcatttcagacgcagccctgcttgggctattcaatcttagggtgtctatccacgtctggctgtgccaaatggtctggcagctggttttggcatccccagcatcaccactctcccaacccatcaccgtgactgcagttcctgcccccattctcttggggtcagggaggggctgggaagggctactgaaggccccattctcccacaggatggtgaggctgggaggaggaagactgaggtagagattccaggccctggcataagctgaatcccaaatttgagtttgggaagaaccagagagaaatggatccctgagctctgagccaagggtgaggatggggaaactctaagctcccacctaataagaagcataggcagaccagccagagggagagccaatggcctctggtagccttaagcccaaagggcagtgggaatgtcccctgccccaaccatcgggtggagctcctgctgggctatggggaagggaggttgtgcggatcttgactctagggcagaacagatctaaccatgcattgctagctctgctcccagcatcccttccccttctctcctcctctgcctcacttctttagtaatcccaaccctataaaaatgaacctaatgggtggattgaatatacattgagcccaaagtcaagtttggggaaaaggcagactaaggcctcctttctctgacctcccaggaagaaaatagcttctcctacagtgattcatgtcccaggtccaggaaatccaatgttggtgaaggcagccactctcttgcttgtccccaaatcacctaaccctcatccagggctattttggtgggcagggactgcctcctcccggaattcctaagatccgcccagctgccaccattttcattgctttccccagcagcatgatgggaacccaagctgagggatacaggtcctgatttggtaggaatattattcccaagaaatacccgctcctcacctactccctcatcctaccaaggtgcctgaaaatgttcaagacttatgttcagggtgggatgatggaaccgagggcttcatcaaagtgagaggaaaggaaaagcatctggcatgtgtttcttggataggggccagtgcagtgccatcctacaggtggctggagcagctgctttgcaacctgatcaccttgagttctgagcagggactaggcttgcaggtgagataatgggccagggcacccagtccagaaggagcaatggcacctgggcagtgccagggcttaaagcccgctgctccttttcggtagaggagaggcccatcactggtgtggtggggtgggctctcccttaggcttgggcaaggcagccacctgcccttgctctcccttagtgttccctggcctccctgccatcaggttgctgggagtggagatggagggattattgagcagaaaatgagttggatggagataaacagctcccatccctgggtaatggatggtaagatgatggagattcctaagattggtggagttgggcaatgcatagccatctgactccttcagggtgctcttgatgggctggctgtaagggagactcagtcccagcctctcccctctacaactcctgccactgttggccatgtcgtaaggcagcagctgtgccaggatagctgggtccattcagagcaccttgagaagtgttgcagggaggtgttaagaagagaactctgtgcaaacagtgatggaaggctgttgtcttggtgtatcccttgcctcatagtcaatatattttttttttggcgagtcaccagtgacccgagccctccacaccagcctcctgtatctcatcaggtcccttctcagtactgtatttgctcagtgcatcaggaatgggtgtatgggtgtgtgtgggtgggtgtgagtgtgggtgtgtacgtaccaataaacaacctggttttaagacaatgt

SEQ ID NO: 638 - DNA, 2190 bp, Homo sapiens
  source 1..2190: mol_type = genomic DNA
ctcgcgtgcgtccgtatccgggagcagccactaggtaactgtagaggccactgcaattaatcggcttgaacagccaggagcggaaacccgagagtcagttcaaccacagccacccgcgtgtgcccgcggaaagccgatggcctactctcgtccggcagcgcactggtttcctgggttaccggcctcagcgctcctcccgctttcttttccgggaggcgacaatctgacgctctcagcgcgtgacgcagcacgctttgatataaatgcagaccgcgcggccgtagcttcctctctgctctcgcggccgactcgcaagatggcgccgcagaaagacaggaagcccaagaggtcaacctggaggtttaatttggaccttactcatccagtagaagatggaatttttgattctggaaattttgagcaatttctacgggagaaggttaaagtcaatggcaaaactggaaatctcgggaatgttgttcacattgaacgcttcaagaataaaatcacagttgtttctgagaaacagttctctaaaaggtatttgaaataccttaccaagaaataccttaagaagaacaatcttcgtgattggcttcgagtggttgcatctgacaaggagacctacgaacttcgttacttccagattagtcaagatgaagatgaatcagagtcggaggactaggcaaaggctccccttacagggctttgcttattaataaaataaatgaagtatacatgagaaataccaagaaattggcttttagtttatcagtgaataaaaaatattatactcttgaacttttgtctcatttttttgagtatgctgtttatatgattttgatttccctctgataactatcaacagtatttaaatagcttatagctggtataattttttcccacgatttccaaaatcttttatgtactcaggtaaaagtagcgttatataggaaatcttttttttagacactctcgttctgtcacccaggctggagtgcagtgactcagcttcctaaatagctggaattacaggtgtgagccaccatgcccggctaattttttgtacttttagtagagtagggtttggccatgttggccaggctggtttcaaactcctgacctcaagtgatctacccacctcggcttcccaaagtgctgattatagctgtgaaccaccatgcccggccaggaaatcttactgtagaacaattttttatatagctgtataaaatgtatatgattgtcttgacagtctcaaatactgtttttaatagcttgtaaatgtaatctcaagtgcttagaacagttcttacatataagttgctctgtagtttgctcttatagttagcccaaagactctgggtgtgaggcctgctgtaaaccaatgttaaactgcttattagaaagccctaaccacctgctttgtaggcaccagaaactcaaaaccaaatctcaactcagctacagaatctactgtggtccttgtctgaaaaaattagttcactcggttggaatcttgtctcagagcatcctcatctctttctcaaaagcccctaccccaacaccggcgtgttggttgtctattgaaacttacaagtggatggaccctttctcccgaataaactggcctttgaaagctctaatcgaaatggtttggcaaaatccatactgcaggagattagggaggacaagaatgatgtgcctttttgtactgctgagcctgatggtggtgccactacttcaggtacttagatgagtcttgatgctaatagaattgtgtcgccaaacatatctggacagttacaacctaatctatgcattaattggtttgggaattgcttgaaattattgtttaattcaatgttttaattcgttttcctaaaaatttaagtgcccccatcatcgtgcaatacctcagtgcagcaactccttgattcttggatgactgaacttcctaacttggctctgccccattgttcccatttttcatgtttttcacaaatagttaaccaggtacctactactgtgcaccgctgcagagcattgaggatgtatgtgatgagtaaaaacacccagcctgctctgctgtgttagtattatgacggaaactgatcaaatcacatgtgaacaaatttactgctacaaaagggagggcttaataaaaggaatttcatctgggaaggcaaa

SEQ ID NO: 639 - DNA, 4306 bp, Homo sapiens
  source 1..4306: mol_type = genomic DNA
gagatgacaatagggagaatggagaacgtggaggtcttcaccgctgagggcaaaggaaggggtctgaaggccaccaaggagttctgggctgcagatatcatctttgctgagcgggcttattccgcagtggtttttgacagccttgttaattttgtgtgccacacctgcttcaagaggcaggagaagctccatcgctgtgggcagtgcaagtttgcccattactgcgaccgcacctgccagaaggatgcttggctgaaccacaagaatgaatgttcggccatcaagagatatgggaaggtgcccaatgagaacatcaggctggcggcgcgcatcatgtggcgggtggagagagaaggcaccgggctcacggagggctgcctggtgtccgtggacgacttgcagaaccacgtggagcactttggggaggaggagcagaaggacctgcgggtggacgtggacacattcttgcagtactggccgccgcagagccagcagttcagcatgcagtacatctcgcacatcttcggagtgattaactgcaacggttttactctcagtgatcagagaggcctgcaggccgtgggcgtaggcatcttccccaacctgggcctggtgaaccatgactgttggcccaactgtactgtcatatttaacaatggcaaaattgagctccgggccctaggcaagatctcagaaggagaggagctgactgtgtcctatattgacttcctcaacgttagtgaagaacgcaagaggcagctgaagaagcagtactactttgactgcacatgtgaacactgccagaaaaaactgaaggatgacctcttcctgggggtgaaagacaaccccaagccctctcaggaagtggtgaaggagatgatacaattctccaaggatacattggaaaagatagacaaggctcgttccgagggtttgtatcatgaggttgtgaaattatgccgggagtgcctggagaagcaggagccagtgtttgctgacaccaacatctacatgctgcggatgctgagcattgtttcggaggtcctttcctacctccaggcctttgaggaggcctcgttctatgccaggaggatggtggacggctatatgaagctctaccaccccaacaatgcccaactgggcatggccgtgatgcgggcagggctgaccaactggcatgctggtaacattgaggtggggcacgggatgatctgcaaagcctatgccattctcctggtgacacacggaccctcccaccccatcactaaggacttagaggccatgcgggtgcagacggagatggagctacgcatgttccgccagaacgaattcatgtactacaagatgcgcgaggctgccctgaacaaccagcccatgcaggtcatggccgagcccagcaatgagccatccccagctctgttccacaagaagcaatgaggactgcccagtggaggaggggcgatgtggctggggagctagggagagactctggaggtggtgggtctctcgggagacccctaatgaggaagttgaggtaatgcttaacattgttgctgtgagaatttactgccctatgtttcccagagccattttggctcaattcaagtctattcaattcaagttaactctagcccagcccagatcaactcctcctacaaatattattggatgataggccctagaacccaataaaggagctccaaatgtcgttgggtggggaagcaaaatgtagagaaacatttaaagcacactgtaataataaatgcaattataaactatatggaggagggtgcagaggagggaatgtgtctggtgtgtgatgtgtgtgtgtgcagtgggggtatcacagagagtatgacatctgagttgagggtagcaggtgcctggagtctcaggtggctgctcacccatctgtgcaggtgtctctggggctgctggtctcacctgtggtctgcagtagacacaattggctgagcaggatatgtgatactgtgtggttggtgtggagttttgaagaaggggctgtgtttgggccacgtaggctctactcagagacctgaaaccacttcagaatggtgcatatgtcgaaagagctggctgggggccttgcccaaaccaactgaggtcttaaagtccagggaaaaaaagtctgggttccaactagaattctagaaatatttctagaacacacagagagggaataagtccctctatcacccttattaccaagccttgtggttccctgtgattttagataatgtctgatatttttctggctatttgcctagtaggatttaaaaaatattttcaaagtgaagctgagagagaatcttggaaacacacatacctgttgatcatgggccctgcagaattggcccttgggggctttatttggttacatgtgcctgggtggtctttaccagcttagactctatcatgggcccccatgaagctccattctcaatactgaataattattacttcccttgttgagtttctttttctgtcatgccctgggggcttctgctcttctcaccagaaagaacatttgaatctggattcttgtacacctgggttagaccctgttcagaggtgtggccaatttatcccgatctcctggaaggctgttgtgatttccatctaagaaatgagggtcttgagaatcaaccagtcccaagattagcctgttatcctgttatctactgagaccccaaatttctcaccaatgttttgggagatcctggaaaagatcccttcagtttggggtgtcaccaagacttctacacaacccaggactaccattgacctcagagctgtaccccacatcttgaagtaaattgatcccaccaggtcccacgtttgttatctctgcctaaatgttagcttctccatcctcaccacatgatgacctgctgtgtccctctgagcactacccagtggctgaaaactctgcaaatgggccacacttttgcaaaatacttgtatctgacacttaggtcttgtttgaagaatttcctttctggaaggttttacaagaagactgatagtctttcaagcccccacatcacaggcttagggacggcactaactttctcccagggatctaactggctagttcaaattatcactcttttaccttcatataaaatgtctcccccaaacctttttcccttctttgtcattgttatctgctaagcccctggtcatttccccatattcgtagtctttttttccatcctatctttctaatatttgttgtctttaacaaactgtgttctgtgtctgtgctcctccttccctctcagaccactggaatgcaagtccttcttccctttggaatgtactctggatcccttcccctgctttgacccccagactttgctccatctattattgcttctccatcctggatccttgacatttgtcaccccactggccttctcaggtgcaatcagtaaaaatgctgagaactcttggatcttaatcttcatgactgagttttttttagttgtatagttatcatctgcctttcttcactttgcatttcttcttgaatccattgcagattgacttccactcccactccttcactaaaagggctcttaccaagatcaaatctaatgggtacattttagttcctatgtgatttggcctttcgatgtcaatcatcactcccagccattgattttggtgacccacttccctgtgatgatcttctgatctagtttctcaggttccttcgctggtcctttttctttccctgcccctgacatattgacatttcctggagttggttttgtccttgattcattctcatgtcattctgcacacagtctctgcatgaactcaggcagacccttcatttaatgaccaccttagggctgatgattctcaaatctgtattccccgatcttgcatttgagctccagccccactcatcctctcggatgttctgcaggcccagcaaactcatcatgtccaaagtgaaactttttctctttcctgtctcctctcctctgatctgttctttcttggaacaccacccaagaacgtcacctcctccatcagattgtgagctcctggagggcaggagctgtgtccttctattcatcttcctatccccagaaccttgcacagatcctggaatgtggtaggtgctcagtaaatgtgtgttgaataaatgaatgaatgaatgaacaaatgaatgaatttgcttacttcaaggcaaaagaaccatgaaactgtattttgagtttctatgttatagcagtcagcaaatcctattaaatactttgtgtttccaagc

SEQ ID NO: 640 - DNA, 6659 bp, Homo sapiens
  source 1..6659: mol_type = genomic DNA
ccggcggcgcgggcgagggtgggaatctttttcgggctcccgggggcggagggaagggagcgcgcgtgcgcgcgcccggccggccgtcgccgcggtgaccgtcctcggagtccgtcggctcgcgccccgcccccgtcgccccctcccctgtcgcgcgctggggctgtttctcgctccttccgagttaccgccgccgtcgccgccgctcctcctctcccggtcctgggtttccttggcgctgcggccgccgctccctctgcgacctgtatgaggaggaggaggaggaggatgtgaagatggcggagctgcagatgctgctggaagaggaaatcccggggggccgccgggccctcttcgacagctacacaaatctggaacgggtggccgattactgcgagaacaactacatacagtcagcagataagcagagagccctagaagaaaccaaagcctacaccacccaatccttagcaagtgttgcctatctgataaacaccttggccaacaatgtcctgcagatgctggatatccaggcatcccagctacgaaggatggaatcttcaatcaatcatatttcacaaacagttgatattcataaagagaaagttgcaagaagagaaattggtattttgactaccaataaaaacacttcaaggacacataagattattgctccagccaaccttgaacgaccagttcgttatattagaaaacctattgactatacaattctagatgatattggacatggagtaaagtggttgcttagatttaaggtgagtacccagaacatgaagatgggtgggctgccgcgtacaacacctccaactcagaagccccctagtccccctatgtcagggaaagggacacttgggcggcactccccctatcgcacactggagccagtgcgtcctccagtggtaccaaatgattacgtacctagcccaacccgtaatatggctccctcgcagcagagccctgtgaggacagcttctgtgaatcaaagaaatcgaacttacagcagcagtgggagtagtggagggagccacccaagtagtcggagcagcagtcgagagaacagtggaagtggtagtgtgggggttcctattgctgttcctactccatctcctcccagtgtctttccagcccctgctggctctgctggcactcctccccttcctgctacttctgcatctgcccctgctcctcttgttcctgctactgtcccttcctccactgccccagacgctgctgctgggggtgcccagacccttgctgatggcttcacttctccaactccccctgttgtttcttccactccccctacaggtcatcctgtacagttctacagcatgaataggcctgcctctcgccatactcccccaacaatagggggctcgttgccctatagacgccctccttccattacttcacaaacaagccttcagaatcagatgaatggaggacctttttatagccagaatccagtttcagatacaccacctccaccgccacctgtggaagaaccagtctttgatgagtctcccccacctcctcctcctccagaagattacgaagaggaggaagctgctgtggttgagtatagtgatccttatgctgaagaggacccaccgtgggctccacgttcttacttggaaaaggttgtggcaatttatgactatacaaaagacaaggaagatgagctgtcctttcaggaaggagccattatttatgtcatcaagaagaatgacgatggttggtatgagggagttatgaatggagtgactgggctttttcctgggaattacgttgagtctatcatgcattattctgagtaaagctcagcagggctgtgcttgcctcacaggaatagtcaggtcttcccagattatctgaaggccctggggattccactccagtaaagtagaatgaaggatacaaatgataaaaattacacttttttttttggtttattccccagtattaaaaacaaagcaagctgagtctgaacaaatggatctttctgccatcatttgtacaatgctgagctgtctggattgaaataaaatgaccatttttatgtatgtcaaaggtataacagcataactgtgtagccaaaacaaaatcagattaagactgattcagaaaaatctgggatctttctcaggaatactgtatacccttgggatttctcctcctgcagaatctgtggcattggatgttcttcattgcctgtgctaaggggttaacctcatggcccagtgggtaccctagccccttcttttcttccacttgtatgaagaggagggaaccaacatttaaataccacacttaaccatttttacaattatttcagatggcttttttcctctgtgacactgtaaattctgcattctctcagcacttgagtgcaccaaacgagtgaatgctgaactcacttgcatcccttcatgtttctgtttgtggattataaggatgatgaaatgtgaaagtctcccaacactctgagggtggtgaacgattgccacccgtttgattttaatgtgctgctgcatgagactgcattgttgctaatggccagtgtacccagatgtgaagtgtggtaggctggttcatatgtggaggtgggtgtgtgaagctagacacgaaggtccctaaggttctgaagagacttgaactgtggaaatgctcttagcaggcatcccgaacccctgcttcggtgctgttttgaggagtaggatcttggagttcagaccaactatgactatcatttccttcactatctagaaaaacgctattctactttggaagagaatagtagttattttcaagtctcctgacagtcactgggagtacaaggtttgctaatgtgctctctggacgttattaatggccagtattagttgctgctgtattactgactcgcttagctgtagaaagggtaatactctcctgattttgtatgattggactcttaagtagctgctgttagtcagaattaaaacccatctcagactaagaatataatgaataagattaataggccaaaatatgtatctaatcacattgataaaaattaatataactgacacaataaaacacatttcccccatctgtacaataaatacagcttcaaattcagtggagtctgtagggcagataactttaatcatcactactgtagtcagtataagaaatgctgaaaaaaatccaggagggcttgtctctttgtgggtggtcactgtgatgttgggccagctcctgttcaggtccagagctgctaacgtgggttctactcagtcccagtgacttggccagaatagagctttgccaggtaactgccctgtgctaggtgaaaggggaaaagcagtagctggatatatttcaaatgaggttttgaacaagttcagaaagtggaacttgattgaaaagtgaacaagtgtagtagtgtgtgagaaaattcagatggtgtcggatgcagaagttaatattccacttaatgttatctgagcattaaaaatcatcagcatttaactgagaccccactatagagtttccttatcaagactttttggttttaaagttgtttttaatgcattgcaagttacaatagctattttgcttttagatttttcccagcactttgtatttattagctttcattaacttgcctccagtatacattccacttcgtgcttttcttaggtcatttctacatcccttattccttgttttcctgcagtgtaatggccctgaatgtcctctgagccttcagctccattatggacccaaactagactatacttggataagttaagctcttcttcgtgtactggtctataattagaaaaactgttttaaattagatgttcccattatttatttaaacagctttttgctgagaaagcttagtggattaatgaggcagagggtgttttgaaatccaataaatagttcccacaggctgggtgtggtggcttatgcctgtaatcccagcactttcggaggccgaggtgggtggatcatgaggtcaataaattgagaccatcctggccaacatggtgaaaccccatctctactaaaaacacaaaaattagctgggcgtggtggcgcacacctgtagtcccagctacttgggaggctgaggcaggagaatcactggaacctgggaggcagaggttgcagtgagccgagattgtgccactgcactccagcctggtgacagagcgagactccatcaaaaaaaaaaaaaaaaagttcccacagctcaccactacagaagcagggaagacaactatgcagaaaacagagttagtggcggtcagcaggaatgcagctggtcttttggacccctacgggatgggggcagtgcagaagacactggtgaagtcctttatactgaagacctgtggttgggagcaggggtagtccatgggtctgctgattttttttccctatttagtactaatgtgtgtgtgatctttgttttacaaacagtaccttttgggttttctgcatattttataatttttgtacagttttgaattctatagattgtcttggaaggatactgtgtgatgggtcaggcacacagtaattggagacttttaatgtatgtaatatttcatagattgcatgctattaatcatctgtgagggtagtattttttgttttattgtaagtttccctctttttttataaattaaaagatggttggtattaggaatttcaaatgaatgcagaaaatcttacatgctgtgtactattaatattataacagacgatccaagtccaaaatctgaccaataaagcaaccattttatcaagatagagggattctaatgggagaggggattcttccctcctgaagtttgtgtgtccagtccccttaaaaaaaatgaatagttgtcttttcttgtcatattaatactcgaaagtccatggtggtattaatgaaagtacactttattgttgcctttgaacttacggccaaggcaataaatcagaaacaaaaatagtgccaatgtgtcaaaatcgacatctgagagattcagcctcccatttggaataaatatgaatcttctaagctatcttgtttaatattttccatcatttagctacttcctatctccctcagaggcgcctgctgttcccattttagagttgacagtggcctgctaattttgctatgttcctaaaagttactgggtgtgagacattttcatcccctcctttttcctactgctggtgtttattatccagctagacaatattttatgcatatttaccgtgatgtctggaccgtacctgtgctccttggcagtttatgttgaagataactaaagatttttctctttgggaggcatcaaaatgatggtagtttgcttttatctttttatgttcattttcttttagtaggtgacctttctgcattaagaactgtttttatcttttactaccttttcttttctcctttgtggagacagcatgacatgtcctgaaggtcacctttgcctttgaaaaaggtttgatggaggaattcacaggtgactgacaagtctttgaaaagaatgggatctgctcacttctggtctttttggccgggaactcctgattggtgttaaggtggtaatttcccccatataagatttagaatcactgagtttgagctagatgaaatttttaaaatttctggttgtctcattagactgatgaggtgagttttcttcttcatatgaacagctagttaataacagcagagttctcactcagtgctcagtacttaattttccactgcaccacaactgtcttaactaaatgtgctgtatttttctttaaaagttaagagttctatttggtgttttcaggaatatacgtgaaaagacatgccatgttttggtaaataccatcagagttgtgtaaaggcgtgtactaagtgcaatcttaatttgtggaaataatcttcatttacccctcctaaaactacactcagtataaacactttcccataaggtgtgtgcagtaaaaatgttatattactccaacactggcaggagcacagcacagcagccttattggagagagccttataaaagtgattaaatggaggcattgagctcattacctttaagtttactttgtgctgacctttgttcctgttttgagaatctcatataattattaaaaaaaaaaaacaattaaaacgaaacggcggggcctagctgtgtataaatgatccttgctgaatatcttaaggttttttgtaagaaaaaagaaaaaccaacaaaaaaagcttattttcacattaaaatgaaacctcttttgcaacttaagaattctatggaaaagcagtttttatcatattttgtgtccatgcaccatttttcttaaaatggcttacaaaaaagaatgtaaacaatttgtgatctggccagttgtacttttagctcccagagggagagttggtggtattatgagttgagtaaaaaccatccaggggaacttgagggagcagtctgttgccagtaatgttccttgtgtgccattaaaccacctccagatgagtggaggaacatcactttttaattttttaattgtatttggaattgttgccgtgtactaagaacttgacctaaataaaatcccacaaagtatattca

SEQ ID NO: 641 - DNA, 1430 bp, Homo sapiens
  source 1..1430: mol_type = genomic DNA
agcagaggacgctgccggcggagacgggaccggaagccgggccgcaggcggccgggcgtattcgccgactcctcccgcttccgctgccgcagccggtcgtaaccaagttgtgtcctgtcagccgctgtccccttcgccgcgatgccgctggagaacctggaggaggagggtctgcccaagaaccccgacttgcgtatcgcgcagctgcgcttcctgctcagcctgcccgagcaccgcggagacgctgccgtgcgcgacgagctgatggcggccgtccgcgataacaacatggctccttactatgaagccttgtgcaaatccctcgactggcagatagacgtggacctactcaataaaatgaagaaggcaaatgaagatgagttgaagcgtttggatgaggagctggaagatgcagagaagaatctaggagagagcgaaattcgcgatgcaatgatggcaaaggccgagtacctctgccggataggtgacaaagagggagctctgacagcctttcgcaagacatatgacaaaactgtggccctgggtcaccgattggatattgtattctatctccttaggattggcttattttatatggataatgatctcatcacacgaaacacagaaaaggccaaaagcttaatagaagaaggaggagactgggacaggagaaaccgcctaaaagtgtatcagggtctttattgtgtggctattcgtgatttcaaacaggcagctgaactcttccttgacactgtttcaacatttacatcctatgaactcatggattataaaacatttgtgacttatactgtctatgtcagtatgattgccttagaaagaccagatctcagggaaaaggtcattaaaggagcagagattcttgaagtgttgcacagtcttccagcagttcggcagtatctgttttcactctatgaatgccgttactctgttttcttccaatcattagcggttgtggaacaggaaatgaaaaaggactggctttttgcccctcattatcgatactatgtaagagaaatgagaattcatgcatacagtcagctgctggaatcatataggtcattaacccttggctatatggcagaagcgtttggtgttggtgtggaattcattgatcaggaactgtccaggtttattgctgccgggagactacactgcaaaatagataaagtgaatgaaatagtagaaaccaacagacctgatagcaagaactggcagtaccaagaaactatcaagaaaggagatctgctactaaacagagttcaaaaactttccagagtaattaatatgtaaagccatgtaactaacaaaggatttgctttagagataattatttggaatttttatagcttacttcacaatgtgcccaggtcagctgtataaaataaatactgcattgttgtttctttcca

SEQ ID NO: 642 - DNA, 1223 bp, Homo sapiens
  source 1..1223: mol_type = genomic DNA
aacgtcgtgcgcatgcgccgacccggcgccattttggtggccgggcgcggaggtgattccacactgaggcgagcgcggcggccggggtggtagtggcagtgttcgtgtgctcaggtctgaatcgccgagggaggaggcggtggaggaagaggtggcggcggtggcggtggtcgtagcggtggcggaggaggcgggtacgaatcagctgcgggcggagacatggccaacatcgcggtgcagcgaatcaagcgggagttcaaggaggtgctgaagagcgaggagacgagcaaaaatcaaattaaagtagatcttgtagatgagaattttacagaattaagaggagaaatagcaggacctccagacacaccatatgaaggaggaagataccaactagagataaaaataccagaaacatacccatttaatccccctaagtacaaacaaaatcccgaaatgttcaaacagacagctcgactttgggcacatgtgtatgctggagcaccagtttctagtccagaatacaccaaaaaaatagaaaacctatgtgctatgggctttgataggaatgcagtaatagtggccttgtcttcaaaatcatgggatgtagagactgcaacagaattgcttctgagtaactgaggcatagagagctgctgatatagtcaagcttgcctcttcttgaggagcaccaacatctgttatttttaggattctgcatagatttcttttaaactggcattcttgcctaatgatgttatctaggcaccattggagactgaaaaaaaaaaatccctgctctgtaaataaagctaattaaacgtctgtgtaaatttaaaaaggggaaatactttaattttttttcttaatagtgtaaaaattccctgagctaagctaaaaccatggaagaaacatgctactttagtgtttagcagtgtaccaagactagcaagagtttgcttcaggattttgttgaataattaagataatattttgagtgtgtcagggccattcaaattgttggtgttgcatcacagctaccttaactgtttttaacatggatcctctgtgcctgtgaatttacttgcatgcttgtacttgacttcttaggatgggtagctgaaaagaccaccattttaagcatttgagaattcttaaatatgaaatttattcagaattgaagatggtgacctattcagagcctttttgtccttgtcaacagactg

SEQ ID NO: 643 - DNA, 2027 bp, Homo sapiens
  source 1..2027: mol_type = genomic DNA
gtcatttgggaaacaaaaggagaattttacagagagagagggatagctaaaactacgtgagcctggcgagggtgcagagcagaaagtagagactgtccgaagactgctatctgggacgagacaagttgttaaagggacaggagagaaagcagagctatttcaagagtgagccacagaagggaatccagaggccatctaagcgaggaagggtctacaggcagtgagtgaaggccaggagcagggcccaggccaggcacgaccaccgaggggatgaacttcacagtgggtttcaagccgctgctaggggatgcacacagcatggacaacctggagaagcagctcatctgccccatctgcctggagatgttctccaaaccagtggtgatcctgccctgccaacacaacctgtgccgcaaatgtgccaacgacgtcttccaggcctcgaatcctctatggcagtcccggggctccaccactgtgtcttcaggaggccgtttccgctgcccatcgtgcaggcatgaggttgtcctggacagacacggtgtctacggcctgcagcgaaacctgctagtggagaacattatcgacatttacaagcaggagtcatccaggccgctgcactccaaggctgagcagcacctcatgtgcgaggagcatgaagaagagaagatcaatatttactgcctgagctgtgaggtgcccacctgctctctctgcaaggtcttcggtgcccacaaggactgtgaggtggccccactgcccaccatttacaaacgccagaagaaacaggatctcactctgttgcccaggctggagtgcagtggcacaaacacaacttactgcagccttgatctcccgagctcaagtgatcctcccatcttagcctcgcagaacactaagattatagatagtgagctcagcgatggcatcgcgatgctggtggcaggcaatgaccgcgtgcaagcagtgatcacacagatggaggaggtgtgccagactatcgaggacaatagccggaggcagaagcagttgttaaaccagaggtttgagagcctgtgcgcagtgctggaggagcgcaagggtgagctgctgcaggcgctggcccgggagcaagaggagaagctgcagcgcgtccgcggcctcatccgtcagtatggcgaccacctggaggcctcctctaagctggtggagtctgccatccagtccatggaagagccacaaatggcgctgtatctccagcaggccaaggagctgatcaataaggtcggggccatgtcgaaggtggagctggcagggcggccggagccaggctatgagagcatggagcaattcaccgtaagggtggagcacgtggccgaaatgctgcggaccatcgacttccagccaggcgcttccggggaggaagaggaggtggccccagacggagaggagggcagcgcggggccggaggaagagcggccggatgggccttaaggcctgcgccgacccgaccctgctcgagagcccgcgctagagtcggggaggatctgcgcagagaccgcagcatcacccaaatcggcgccggccccgggaggatctcaataaagaactcgagcgtcccagacccgtatctcctttcgctgcccaaccccgcagcctgggcttcgaaggcgacccgcccaccatcctgcccttcccagaacctgagaccgtctggggggcggaagccaaatgaacccctattgggcacctctgtgatgccaggagcgaactggtgagcccagcgccctgggaagagggccgagggcggggcggtggtgccgggacctctgaggtcctggggatttggggacccttggggtccacatgcacctggctgacctggctgaaagccgctgtctcggagccccccacagcattttgttcccctcccgctggcccgggggccccaccttcccacgggttcccacgctgctgtgactgccctgcctctacgacaaaagccaacgggtcttcagtacttttattaaaaaatagtcacgcagaca

SEQ ID NO: 644 - DNA, 518 bp, Homo sapiens
  source 1..518: mol_type = genomic DNA
gcagttgttgttggttgggggccttttggccggtgacggagactgcccaggtgtggtcaccatgttcctctccgcggtcttctttgccaagagcaagtcaaaaaacattctggtgagaatggtgagcgaagctgggacaggtttctgcttcaacaccaagagaaaccgactgcgggaaaaactgactcttttgcattatgatccagttgtgaaacaaagagtcctcttcgtggaaaagaaaaaaatacgctccctttaaacggtggattgaaaatgactttgatttataaagagaagactgagggcggggatactgattcagaaatcctgtagcgtgtaataaaagaagaggaaatggcatggaatcactgcctcctgtgatttgaaggccattgtgaaggaaaacaatgcagtgaaagaaagttcttcatattaggacagatatcattgcatcacatttatttatctttctgggtatttttatagcccttaataaaaaatattaaaatagcctgtgc

SEQ ID NO: 645 - DNA, 2919 bp, Homo sapiens
  source 1..2919: mol_type = genomic DNA
atgcggccggagggcgcgggaatggagctcggaggcggcgaggagcgcctgcctgaggagagcaggagggagcactggcagttgctgggtaatttgaagacgacggtggagggtttggtatcaaccaacagccccaacgtctggtctaagtatggtggcttggagcggctttgcagggacatgcagagcatcctctatcacgggcttatccgtgaccaggcgtgccgccgccagacggattactggcagttcgtgaaagacatccggtggctcagtccccactcagcccttcacgtggagaagttcatcagcgtgcacgagaacgaccagagcagtgctgatggtgccagtgaacgtgctgttgccgagctgtggctgcagcacagcctgcagtaccactgcctctcagcccagctccggcccctgctcggggatagacagtatatcagaaaattctacacagatgctgccttcctgctaagtgacgctcatgtcacggccatgctgcagtgcctggaagcagtggaacagaacaacccccgcctcctggctcagatcgatgcgtccatgtttgccagaaagcacgagagcccgctcctggtgacaaagagccagagcctgacagccctgcccagttccacatacacccctccaaacagctatgctcagcattcctactttgggtccttctctagcctccaccaatccgtgcccaacaatggctcagagagaagatctacttcctttccactctctggccctccccggaaacctcaagaaagcagagggcacgtctcaccagcagaggatcaaaccatccaagcccccccagtttcagtctctgcactagccagggattcccctttgaccccaaatgaaatgagctccagtactctgaccagccccatagaggcatcctgggtcagcagccagaatgattccccaggtgatgccagtgaggggcctgagtacctggccattggcaacttggacccccgaggccggactgccagctgtcagagtcacagcagcaatgccgagagcagcagttccaatttgttctcctccagcagctcccagaagccagattctgctgcctcttccttaggggaccaggaaggaggtggggagagccagctgtccagtgtcctccgcaggtccagcttctcagaggggcagacactcactgtcaccagtggggcaaagaaaagccacattcgctcccattcggataccagcattgcctccaggggagctccagaatcctgcaatgataaggcgaagttgagaggccctttgccctactctggtcaaagcagtgaagtcagcacacccagctctctgtacatggaatatgaaggtggtcggtacctgtgctcaggggaaggcatgttccgaagaccatcagaaggacagtccctcatcagctacctctctgagcaagacttcggcagctgtgccgacctggaaaaggagaatgcccacttcagcatctcagagtccttaattgctgccatcgagctaatgaagtgcaacatgatgagccagtgcctagaggaggaggaagtggaagaggaagacagtgatagagagatccaggagctgaagcagaagatccgccttcggcgccagcaaatccgcaccaagaacctgctccccatgtaccaggaggctgagcacggaagctttcgggtcacctccagcagctcccagttcagctcacgtgattcggcacagctctctgactctggctctgctgatgaggttgatgaatttgaaatccaagatgctgacatcagaaggaacacagcctcaagcagcaaatccttcgtttcctcccagtccttctcccactgcttcctgcactccacgtctgctgaggcggtggccatggggctcctgaagcagtttgaggggatgcagcttccagccgcctcggagctggagtggcttgtcccggagcatgatgcccctcagaagctcctgcccattcctgactcactgcccatctcaccggatgacgggcagcacgctgacatctacaagctgcggattcgtgttcgtggcaacttggagtgggccccgccccggcctcagataatttttaatgttcatccagccccaacgaggaaaattgccgtggccaagcagaattaccgctgtgcaggatgtggcatccggactgaccctgattacatcaagcgactgcggtactgtgagtacctgggcaagtacttctgccagtgctgccacgagaatgcccagatggccatccccagccgggttctgcgcaagtgggacttcagcaagtactacgtcagcaacttctccaaggacctgctcattaagatctggaatgatcctctcttcaacgtgcaggacataaacagtgccctctataggaaggtcaagctgctcaatcaagtccggctgctgcgggtccagctgtgtcacatgaagaacatgttcaagacttgccgactggccaaggagcttctggattcctttgacacagtcccaggccacctgacagaggacctccacctgtactcactgaatgacctgactgcgaccaggaagggggagctggggccccggcttgctgagctcaccagggcaggggctacccatgtggagagatgcatgctctgccaagccaaaggcttcatctgtgagttctgtcagaatgaggatgacatcatctttccctttgagctccataagtgccggacctgtgaagagtgtaaagcgtgttaccataaagcctgcttcaagtctggaagctgtccgcgctgcgagcggctgcaggcccggcgggaggcactggccaggcagagcctggagtcttacctgtcagactacgaggaggagcccgcggaagcgctggccctggaagccgccgtcctggaggccacctga

SEQ ID NO: 646 - DNA, 2791 bp, Homo sapiens
  source 1..2791: mol_type = genomic DNA
ctcccgcgcccaggccagcggcgggcccagctcctcccccgactcggtctctctcccctcccctccgcccggcagttcctccctcccgccgccgcctcttcctcggtgaggcgctcttccagcgggcaggcagcatggcggccgtggagacgcgggtgtgcgagacagacggctgcagcagtgaggccaagctccagtgtcccacttgcatcaagctgggcatccagggctcgtacttctgctcgcaggaatgttttaaaggaagttgggctactcacaagttactacataagaaagcaaaagatgaaaaggcgaagcgagaagtgtcttcctggactgtggaaggtgatattaatactgacccatgggcaggttatcgatatactggtaaactcagaccacattatccactgatgccaacaaggccagtgccaagttatattcaaagaccagattatgctgatcatcccttaggaatgtctgaatctgaacaggctcttaaaggtacttctcagattaaattactctcatctgaagatatagaagggatgcgacttgtatgtaggcttgctagagaagttttggatgttgctgccggcatgattaaaccaggtgtaactactgaagaaatagatcacgctgtacacttagcatgtattgcaagaaattgctacccttctcccctgaattattataatttcccaaagtcttgttgtacctcagtgaatgaagtcatttgccatggaataccagacagaaggcccttacaagaaggtgacattgttaatgtggatatcactctttatcgcaatggttatcatggggacctgaatgagacattttttgttggagaagtggatgatggagcacggaaacttgttcagaccacatatgagtgcctgatgcaagccattgatgcagtgaagcctggtgttcggtacagagaattgggaaacattatccagaagcatgcccaagcaaatgggttttcagttgttcgaagctattgtgggcatggaatccacaagctttttcatacagctcccaatgtaccccactatgctaaaaataaagcagttggagtgatgaagtcgggccatgtatttacaattgagccaatgatttgtgaaggcggatggcaggatgaaacctggccagatggttggactgcggtgacaagagacggaaagcggtctgctcagtttgagcacaccctcctggtcacagacactggctgtgaaatcctaacccggcgacttgacagtgcacggcctcacttcatgtctcaattttaatttctcccaagatggcacatctcagtaccttcttactgtgctatgcattttattgagagtacagaaaggaagaggaacctttttttaatcacttgttttgttttgactatagataagaaaggactacagcatttgatgtgtgtcctcaagaacttgtcttgggtctgaaaaagctgagaagaataaaggaaacattgctcaactcttcagccccctccccctgcacacctgttttctcatttgccctttgagcacttttacttaaacttgcttgtagttgcttttatcactgccgcaaaacagccatcaagagccatctgctttccaggtgaacattggaaatgagaatctttgaaacttagcaatatgtgttgcaccagattttttaaattatatatatggaaatatatatgtatacattttaagttctgtatacataattaccaaacactatgtgacctggagtttgtgttgtttctgctctgacaggtttatatgttcttacaaatggatccatagtttgcagtgatttaattcctggttgggatttggcctcccctctcccccatgctaattatttacccttgtaattgtgcatagggaagcactcacccaatgagactttctccaatgtggactctgtgtgtcagtgaatgaatgtagtaaaattcactttggaaggttatcaggcttttaaaaatctagtttatggcaaaaatagccattttccaagtggtggctgactgttgcagggaatgagaatttcataatacactgctatttcagacctctgtttggtcagaaatggaaaagaaaaagccccctttcttcccttttctgttttacttcaagggcataccttggaggtgctcagagaagcgtgaagtttgcactatggtggaggatggggaaagagttctaaagtgtctccagctgtgaacccaggaggtcaagtgggctattaaaatctaacgttgagtaaatgtgatagtgatgagaaaggaattttgtgtactgtaaccttgcagtagagatgcagctgtccttcgtgtgtggaaacacacctctcctttacatagttgggaacctcattagaaatgacctcagctgccccatatctacgttcctttcagcagttgtccaagtaggagtgtatccagtgaagacatatcaaatcacaaagtcattgtcattagagtgtacttgattactgggcatccttgtaatataatttcataccactgacacattatacttgtaagagaacatctttcccagagtgcctcagaccttattgctttaaaatataataatgttttcattacttttattatttgaatgatttagtaaagttgactgaatctggtatagactttgggagtatgtgtgtgaagtttttatcaaactgtaatatttgtgaatggaatgccttgcaatatgaatgttaatataatgtgtaaagggagattaaaaagtttgaatgattatcctaccat

SEQ ID NO: 647 - DNA, 1126 bp, Homo sapiens
  source 1..1126: mol_type = genomic DNA
agcatgcattattaagcgcttgacttgcttccagacaaaggttgtctcaagtttgttgctcaaaccgagttctggagaacgccatcagctcgctgcttaaaattaaaccacaggttccattatgggtcgacttgatgggaaagtcatcatcctgacggccgctgctcaggggattggccaagcagctgccttagcttttgcaagagaaggtgccaaagtcatagccacagacattaatgagtccaaacttcaggaactggaaaagtacccgggtattcaaactcgtgtccttgatgtcacaaagaagaaacaaattgatcagtttgccaatgaagttgagagacttgatgttctctttaatgttgctggttttgtccatcatggaactgtcctggattgtgaggagaaagactgggacttctcgatgaatctcaatgtgcgcagcatgtacctgatgatcaaggcattccttcctaaaatgcttgctcagaaatctggcaatattatcaacatgtcttctgtggcttccagcgtcaaaggagttgtgaacagatgtgtgtacagcacaaccaaggcagccgtgattggcctcacaaaatctgtggctgcagatttcatccagcagggcatcaggtgcaactgtgtgtgcccaggaacagttgatacgccatctctacaagaaagaatacaagccagaggaaatcctgaagaggcacggaatgatttcctgaagagacaaaagacgggaagattcgcaactgcagaagaaatagccatgctctgcgtgtatttggcttctgatgaatctgcttatgtaactggtaaccctgtcatcattgatggaggctggagcttgtgattttaggatctccatggtgggaaggaaggcaggcccttcctatccacagtgaacctggttacgaagaaaactcaccaatcatctccttcctgttaatcacatgttaatgaaaataagctctttttaatgatgtcactgtttgcaagagtctgattctttaagtatattaatctctttgtaatctcttctgaaatcattgtaaagaaataaaaatattgaactcatagcaggagaatagtttttaaaataaatctcgatttgttagca

SEQ ID NO: 648 - DNA, 4128 bp, Homo sapiens
  source 1..4128: mol_type = genomic DNA
ttttccagatctttctcgaacccgcagcttcttgggcagccgttgcccgagtgctgacggaagcggccgaagtccgggcccggagctggctcgggcgcggagcggaggctcgcgcgcctcccgggcagccgagcgcgcaggcgcaggtcccagtaaccgccggttggaggcggccgaaccgcagtagggaaagacccaggctgcgggacgcggtgcaggctgcggcgctgacggcctctgctccttccgcgggtttccgactccctgccctagattttctgcttagcgacttggggtcccctctcgtttgcttctggtaggagtcgcaatcccagcagcaatagcccagaagaggacacggttcccgtaccgaagggttcagtaccagcagcccgaccatcacgcggcgggatgtctgtggttggcattgacctcggctttctcaactgctacattgctgtcgcgagaagtggcggcatcgagaccatcgccaatgagtacagcgacaggtgtaccccggcctgtatatcattgggatcaagaactcgagccattggaaatgcagcaaagagccagatagtcacgaacgtaagaaatacaattcatggcttcaaaaagcttcatgggcgatcatttgatgatcccattgtgcaaactgaaaggatcaggcttccctatgaactgcagaaaatgcctaatggaagtgcaggagttaaggtgcggtacttagaggaagagagaccttttgcaattgagcaagttactggaatgctgttagccaagcttaaagagacttcagaaaatgctttgaagaaaccagtggctgactgtgtgatttcaattcctagcttttttactgatgccgagagaagatctgtgatggctgcagcccaggttgcaggcttaaattgtttaaggttgatgaatgaaactactgcagttgcactggcgtatggaatttataaacaggatcttcccccattagatgagaaaccaagaaatgtagtatttattgatatgggacattctgcctatcaggtcttggtttgtgcttttaacaaaggaaaacttaaagtcttggctactacctttgatccatatttgggtggcaggaactttgatgaggctttagtagactacttctgtgatgagttcaagaccaaatataagataaatgtgaaagaaaactctcgggccttgttgcgtttatatcaggaatgtgaaaaactaaagaagctaatgagtgcaaatgcatcagatcttccattgaacattgagtgtttcatgaatgaccttgatgtttctagtaaaatgaacagggctcaatttgaacaactgtgtgcttcccttttggccagggttgaaccacctttaaaagcagtaatggaacaagctaacttacaacgtgaagacattagtagtatagaaattgtaggaggagcaacacgaattcctgcagtgaaagaacaaatcactaaattctttcttaaagacataagtaccacattaaatgctgatgaagctgttgcaagaggatgtgcgttacagtgtgcgattctctcaccagcatttaaagtgcgtgaattttccataacagaccttgttccctattcaatcacattaaggtggaagacctcttttgaagatggaagtggggaatgtgaagttttctgtaagaaccatcctgccccattctcaaaagtcattactttccacaagaaggaaccatttgaactagaagcattttatactaatttacatgaagtgccttatcctgatgcaagaattgggagcttcactattcagaatgtttttccacagtctgatggtgatagttccaaagtgaaggttaaagttcgtgttaacatccatggaatcttcagtgtggctagcgcatcagtaattgagaagcaaaatttggaaggcgatcacagtgatgctccaatggagacagaaacttcatttaaaaatgaaaacaaagataatatggataaaatgcaggttgatcaagaagaagggcatcaaaaatgtcatgctgaacacactccagaagaggaaattgatcatacaggagccaaaacaaagtcagctgtctcagacaaacaagaccgattaaatcagacacttaaaaaaggaaaagtcaaaagtattgatctaccgatccagagtagcctatgtagacaactaggccaagatcttctcaacagctacattgaaaatgaggggaagatgatcatgcaagataagttagagaaagaaagaaatgatgctaagaatgccgttgaagaatatgtatatgattttagagacaggctgggcactgtctatgaaaaattcatcactccagaagacttgagtaaactgtctgcagtattggaagacacagaaaattggctttatgaagacggagaggaccaacctaaacaagtttatgtggataagcttcaagaactaaagaaatacggccagcctattcaaatgaagtacatggagcatgaagagagaccaaaagccttaaatgacttgggaaaaaagatccaacttgtcatgaaagtgatagaagcttatagaaacaaggatgaaagatatgatcatctggatcctactgaaatggaaaaggttgaaaaatgtatcagtgatgccatgagttggctgaatagtaagatgaatgcacagaacaaactaagtctcactcaagatcctgtggtaaaagtttcagaaatagtagcaaagtcaaaggaactggataatttctgtaaccccatcatttacaagcccaaaccaaaagcagaagttcctgaagacaaaccaaaagctaatagtgaacacaatggcccaatggatggacagagtggaactgaaactaaatcagattcaacaaaagacagctcacagcatactaaatcctctggagagatggaagtggactaagtcttaattttaccttcacattaattcaaaccgtgcaagtaaccacggggtccatcttttacatctggtacacacaacagacgctcagttgttcttaaccacttttgtcatttgttttttggagtagttttgaaaagtgttttatattgagtgcacttctgttcatttccattgctgcttatatgcagtgttagccgaattagatttacaagacaatctaagctttccggataattttatatatcaaacatacaggatggatacatagttggcaacagtctaccttatttaaagcttctactgggataaacctcaattcctttattcaggaaaggatactttattgcattattgttgcagaagcatagatttaattgcatctttattttgaaaaacaaatgaaaattgatggggtttaaagctacagaggcactgacctttttctagttattgtattgctacaatttaaatattaaaacaaataagagctttctcaacaaattagtccatctcattgatgtaccacagaaatccaaagctttgctgtcatcacataaatgaattaaatcacatgtgaaagggaacacacccaattttatgttaaggtgaaaccagcagtttgcttcttttattagtaatgtggattgatgttttctcagagtaactcgttgtcttttcgcttgaaatttttgatcttgtcctgaagactagctgctgctaaaacaatgctagcctaaagatacaggagtctctgacaaaatgactttcatgttaaggggaaatgctgtttatctactcagacatgcatctgtgatgttcatagccttgtttcagttataatagttgtcttgtttttttcttaattgattttgttaataataccttaacacagggtaggaagaagtggcacagtgtattgcattatatacatttatcattgatttacctaatgttaccttgtagattaaacactattaagtggtaatacttgaaaaggagcacttataccataagtcttaggaaataatgtttgtaataaacttaactatgttacatatcaacaggcaaaaatatagaatgttacatagtgttgtgtgattaaattatagttcctgctgttaacattaccttttgaaaccttggctccagttttggtgcttcttatacaaattaaatgcgaaaagggactgtaaactt

SEQ ID NO: 649 - DNA, 1898 bp, Homo sapiens
  source 1..1898: mol_type = genomic DNA
aacggccaccgcagctgccttcggcgccgccagccccgccatggctgcgccctgcgcggaggacccctcgctggaaaggcattttaagggccaccgagatgcagttacctgtgtggacttcagtatcaacacaaagcagctggccagtggctccatggactcatgcctcatggtctggcacatgaagccgcagtcacgcgcctaccgcttcactggccacaaggatgccgtcacctgtgtgaacttctctccttcgggacacctgcttgcttccggctcccgagacaagactgtccgcatctgggtacccaatgtcaaaggtgagtccactgtgtttcgtgcacacacagccacagtgaggagtgtccacttctgcagtgatggccagtccttcgtgacagcctctgacgacaagacagtcaaagtgtgggcaactcatcgccagaaattcctgttctccctgagccagcatatcaactgggtccgctgtgccaagttctcccccgacgggcggctcatcgtgtctgccagtgatgacaagactgttaagctgtgggacaagagcagccgggaatgtgtccactcgtattgtgagcatggcggctttgtcacctatgtggacttccaccccagtgggacgtgcattgccgctgccggcatggacaacacagtgaaggtgtgggacgtgcggactcaccggctgctgcagcattatcagttgcacagtgcagcagtgaacgggctctctttccacccgtcgggaaactacctgatcacagcctccagtgactcaaccctgaagatcctggacctgatggagggccggctgctctacacactccacgggcatcagggaccagccaccactgttgccttttcaagaacgggggagtattttgcttctggaggctctgatgaacaagtgatggtttggaagagtaactttgatattgttgatcatggagaagtcacgaaagtgccgaggcccccagccacactggccagctccatggggaatctgccagaagtggacttccctgtccccccaggcagaggcaggagtgtggagtctgtgcagagccagccccaggagcccgtgagtgtgccccagacactgactagcacgctggagcacattgtgggccagctggatgtcctcactcagacagtctccattctggagcagcggttgacactgacagaagacaagctgaagcagtgtctggagaaccagcagctaatcatgcagagagcaacaccatgatcaggggagcaggaatcaggagctcggtggatttgcaggtggcaggccagggatttgtaccatgggacttgggtaaataaaggggactgaactctgtgggaatcacatccatactggagccctggatttttgcagttctgccctccaccttgctatctgcaccaggaggctctccacctggcagccagaggtccccagtgggccgggctcacacacaaatgatgcttcagacccgaatgagaggaccacattttgcttaatgtaaaggagccacttgaaaatgtctgctccttcggggtcctgagattgtggctccccctctggaggaggtggctccacgatgccttgattttcactcatcatttggacatgtgactggcttttcctacctctgccatggtgtagaaattgattgcacattgattggatgagccgggggttttctctaaatctgactaaaggcccaaagtgggcccatctgagtcaggtttgttgagaacaagccctctcaagtgggtggtggcttttcagtggccctgatttctgttccacacgtgttcactggagccaggtgacttcctccttgcgtgagtgagggcacaggaatctcaaaattaaacctgacttcattgca

SEQ ID NO: 650 - DNA, 4173 bp, Homo sapiens
  source 1..4173: mol_type = genomic DNA
aggtgaaaaattagacgatttcaagaattggagctgaatctgatgttaagtaatggcaacaggtgacttaaaaagaagcttacggaacctagaacaggtgctccgcttgctaaattatcctgaagaggtggactgtgtaggtttgataaagggagacccagcagcatctttgcccatcatcagctattcttttacctcatactcaccttatgtaacagaacttataatggaatccaatgtagagctcatagcaaaaaatgacttgcgctttatagatgctgtctataagcttcttcgtgatcaatttaattataaaccaattttgacaaaaaagcagtttatccaatgtgggtttgcagaatggaaaatccaaattgtttgtgatattttgaattgtgtgatgaaaaagcacaaggaattaagcagtcttcagaagattccatcacaacaaagaaagaaaatcagttctggtaagtcagaacctcctttgggcaatgagaaaatatctgcagaggctgttggcgttgatatcagtggcaggtttatgacctcaggaaagaagaaagctgtggtgattcgtcacttgtataatgaagataatgttgacatttctgaggatacattaagtccaataacagatgttaatgaagcagttgatgtgtctgacttaaatgctactgaaataaagatgcctgaagtaaaggttcctgaaatcaaggctgagcaacaggatgtaaatgttaatcctgagattactgcactacaaactatgcttgctgaatgccaagaaaatcttaagaaactgacttcgatagagaaaaggttagactgtttggaacaaaaaatgaaaggaaaagtgatggtagatgaaaacacctggactaatcttcttagtcgtgtcactcttcttgaaacagaaatgcttttgtctaaaaagaatgatgaatttatagagtttaatgaagttagtgaagactacgcttcttgtagtgacatggaccttctgaatcctcacagaaaaagcgaagtagagaggccagcaagtattcctctgtcctctggctatagtacagcatcatcagattcaactcccagagcctctactgttaattactgtggtttgaatgagatttcagaggaaacaacaatccagaaaatggaaaggatgaaaaaaatgtttgaagaaactgcagagttactgaaatgtccaaatcactacttgtaggattttctacatgaacttttttctaggactttggttactatacatattgtatattttaagaattctttatacaattttaatatactgcaatactgcagtttttgacaatttggattccatttggtatatgaatttttgcattcattattgaataactcttttaatatttttgagcaatgattatactgctttaccttgtgtcactttttttttttttaggaaaaactcatgttccagtatatttctcttacagagtgaagtcattacagcactgtatttctgtgttgacatttgttggcagtgtgctaagtaatgttttttaaagcacaggcttgaggactatggtttacatcctgttggaaacattccaaatgggacttgtgtattatacccaggaggctctcatatataccatcttggcatctgtactgatgaataagttataatgaacagttaaaaatgctcattgaaaattaaataaaacaaaaaggcagttatttcatgcttggtcaaaaacatcaatacctttccaattaacactgagaaattaaggttaagattctccttttgtactgggaaacaggctggaggactatggtcctcaagtttagaccaagaggactatggtctcaaggttcaccatgagaaatgtgttgaacattttagtatgctctattgtataatttttttggagggggggatggagtttcgctgttgttgcccaggctggagtgcaatagcacgatcttggctcaccgcaacctctgcctaccgggttcaagtgattcttgtgcctcagcctcctgagtagctgggattataggcatgcaccaccatgcccagctaattttgtatttttattagagacagggtttctccgtgttggtcaggctggtctcaaactcctgacctcaggtgatctgcctgtcttggcctccggcgtaacactttttaagaccagtgtaacagaaagagaatgtagccattctagccaccgttaaaagatacacagtgaggtgttgtgttttgtttttttaatgatgaaaagttacacattttttggagagaaaagtcttagctgaaggtaaatcaatggaaaaatgaaatttatttttaatattactactatatgaattatctttttttaaacttgtagataaaagtgttccagtaatcagaaaatcctcaagaaaattgacttcattatttggaaggaaaattagtattttttttaatattatatggaccatctgattatattttatttattcatctatttatggtatgtatgtataattctatattacactgtcaaatataaaatattgttatatgagtagaaatcacttaaattttttttgtgtttgtgaatttgaaacagtgtaagaaatcacttttaagaaaacatttttagaattcctttgttttttttttttttctttttgaaacagggtctcactctattgcccaggctggagtgcactggcgtgatctcggctcactgcaccttctgcctaccgagttcaagcgattcttgtgcttcagcctcctgagtagctgggactataggcctgtaccgtcatgcctggctaatttttgtatttttgtagagacagggtttcaccatgttgcccagtctgttctcaaactcgtgagctaaagctactcgcccacctggatgtcccaaagtgctagattccatgggtgagtcaccatgcttggccacatttttagtattctaataaacagttggtcatcagaactttaaaatggtagcctacagaaacatacaattttgaatttaacagagtttcagtaaatatttccagaattaatgaagcatgttagctttaattttttcaattgtgagagaagtacatttataaaaattaagaggttaagaggttatagttataagggaaaaaacttctgtatcgattaactcctaaaatatcagtaccagcatggaattatagcaccaccttgtggttaacatgccagtattttaccttttgttaaaacaagtgatttcccatcaaacaggataatattttttcccttttgaaaaattcaattttaaaaagaaacatttttgaagttttcttatggaagatagaaaaaaagttaagtctctttctaccctttctttttttctttatatagtgcagatatacacacagagaagggacttaaaacatttctaatctcctagtttatatacagtgtgcaaaatataagtaagtatatattgaaaatataaaatatttcatatatgttatcaggtggaaatttagaatccaaattttcttaaactttaataacttgtctaacaactctctaatagggactaaaaatcaactcaatatatcatacatttacacttacaaagagtctttatctagacaacataatttttggaaaaataaagcaaattcaactttattggagttattggacagatcagcaaattgttattttaaaaagttttcttgtttaggcaatttggtaagtggtttctagttataaactagccactgttgattaacttgagaaggtgaagcaggggagttctgaagagattacctagagctacataaccctaagttaagtaaaattttcactttcattcttttcattctctcataaactggttgaaaaaacactgtactaccaacaaaggtgtcagttgcttgtgctgccctgtctatgttatgctctgaataggtctcggtaaagattatatggaaatactataaagaatacataaggtaaaatactagtcagaaagggttcagaagaagttagcatcaactgtatgaaaattctaggtaaagctaagtactattgagttggaaaaaagtaattctatcatgtttgcttgttttcctctactgtttttaatgtgatgttgtaatatattttaaaaataaaacttgaaaacgttggga

SEQ ID NO: 651 - DNA, 6208 bp, Homo sapiens
  source 1..6208: mol_type = genomic DNA
gtgttaggaagcgtgacccgggtgggaaaaccctccgcgtccgccattttggctgcctctgtcggtctgttcagttaccacgtgaaccgccgacggagacccgtagtgggggaggcggcggcagcgttaagtgagaaaggaaaaaagacaacgaggaaaaaggaggtgtccgggtagggcaacgcggcgacacccgaggcctggtggtggcggcggatcgagatattcaaggctgaagcagctacggaacggcagcggcggcggtcggacaaactgactgaccgagccgggtggtggcgggagcagcgggagcagccggaacgatgccggccgtgagcctcccgcccaaggagaatgcgctcttcaagcggatcttgaggtgttatgaacataaacagtatagaaatggattgaaattctgtaaacaaatactttctaatcccaaatttgcagagcatggagaaaccttggctatgaaaggattaacattgaactgtttggggaaaaaggaagaagcttatgaattggttcgtagaggtttgagaaatgacttgaagagtcatgtgtgttggcacgtttatggccttcttcagaggtcagacaagaagtatgatgaagccattaagtgttacagaaatgcactaaaatgggataaagacaatcttcaaatcttaagggacctttccttactacagattcaaatgcgagatcttgagggttacagggaaacgaggtatcagttacttcagcttcgacctgcgcagagagcatcatggattggttatgctattgcttaccatttattagaagattatgaaatggcagcaaagattttagaagaatttaggaaaacacaacagacatcccctgacaaggtggattatgaatatagtgaactactcttatatcagaatcaagttcttcgggaagcaggtctctatagagaagctttggaacatctttgtacctatgaaaagcagatttgtgataaacttgctgtagaagaaaccaaaggggaacttctgttgcaactatgtcgtttggaagatgctgcagatgtttatagaggattgcaagagagaaatcctgaaaactgggcctattacaaaggcttggaaaaagcactcaagccagctaatatgttagaacggctaaaaatttatgaggaagcctggactaaatatcccaggggactggtgccaagaaggctgccgttaaactttttatctggtgagaagtttaaagaatgtttggataagttcctaaggatgaatttcagcaagggttgcccaccagtcttcaatactttaagatcattatacaaagacaaagaaaaggtggcaatcatagaagagttagtagtaggttatgaaacctctctaaaaagctgccggttatttaaccccaatgatgatggaaaggaggaaccaccaaccacattactttgggtccagtactacttggcacaacattatgacaaaattggtcagccatctattgctttggagtacataaatactgctattgaaagtacacctacattaatagaactctttctcgtgaaagctaaaatctataagcatgctggaaatattaaagaagctgcaaggtggatggatgaggcccaggccttggacacagcagacagatttatcaactccaaatgtgcaaaatacatgctaaaagccaacctgattaaagaagctgaagaaatgtgctcaaagtttacaagggaaggaacatcagcggtagagaatttgaatgaaatgcagtgcatgtggttccaaacagaatgtgcccaggcttataaagcaatgaataaatttggtgaagcacttaagaaatgtcatgagattgagagacattttatagaaatcactgatgaccagtttgactttcatacatactgtatgaggaagattacccttagatcatatgtggacttattaaaactagaagatgtacttcgacagcatccattttacttcaaggcagcaagaattgctatagagatctatttgaagcttcatgacaacccccttacagatgagaataaagaacacgaagctgatacagcaaacatgtctgacaaagagctaaagaagctacgtaataaacaaagaagagctcaaaagaaagcccagatagaagaagagaaaaaaaatgcagaaaaagaaaagcagcagagaaatcagaaaaagaagaaggatgatgatgatgaggagataggaggtccaaaagaagaacttattccagagaaactggccaaggttgaaactccattggaagaagctattaaatttttaacaccgttgaagaacttggtgaagaacaagatagagactcatctttttgcctttgagatttactttaggaaagaaaagtttcttttgatgctacaatcagtaaagagggcatttgctattgattctagtcatccctggcttcatgagtgtatgattcgtctctttaatactgcagtgtgtgaaagtaaagatttatctgatacagttagaacagtattaaaacaagaaatgaatcgtctttttggagcaacgaatccaaagaattttaatgaaacttttctgaaaaggaattctgattcattgccacacagattatcagctgccaaaatggtatattacttagatccttctagtcagaagcgagctatagagttggcaacaacacttgatgaatctctcactaacagaaacctccagacatgtatggaggtattggaagccttgtatgatggtagcctaggagactgtaaagaagctgctgaaatttatagagcaaattgtcataagcttttcccttatgctttggctttcatgcctcctggatatgaagaggatatgaagatcacagttaatggagatagttctgcagaagctgaagaactggccaatgaaatttgaacatcactaaacaagcaaatggaatgactttggaccatatctagtatataatatttttgtcacgcacctgctgcattgctctaacttacacagaatgagaggagtaaatgttcttgccttcaaatagtgttttacgttttttatcctgctgaaaaagtatatataaaatatctaacattacaggatagaggttcagtttcttaaaaaattaaagctgctaaaattgagtggttaaaaaagataccttatcctattcctccccacccacccatgtttttaaactaatttatataaaatctggaggctgttacagctaacaaagcaggtgtgtggcagaaatattactttaaatttgtcttgtgagattttactatatctcagacagcataaatgctgttttagcactggattctttcactgagcacaaagagttgttggggctttagcatctgactgattttgttacggggttgattctgaccataggaagtatgcaatgtgaatcactatttacagagaaacctacaacagatgcttgatgttgtagaaactgggacatatagataccaagcaaaattataagaaacctataaggtgttcaatacgcttgtgtttccaaaattcactgtacatgatcagtttggtgttcttgtaccacagtttttaactgaaggaaccagttgtaacagtctcaattttaactaaaacttgaagaactaaaacaacaatgcaaacctttcagcattgtttggccaaacttgttaaaactgtaatgcaagaaccaaatgcactgtgatgtggcaccaactaattagcaagcatgaatttttcacccaagagtgaaaaaaggaaaatctaccatggcttgaagttaaagagcagaactcctgactaccattctatgactgatcaaaagactaatagttaaaaacctcagcaggccttgttcacgatatgcagaaaaaaaagtgctgcagtttagatacctctggaatttttccacagtgtcacaggtttgtaatacttgaagccctacatttctaagaatatatttcttgctcagttgtttcaggcaagcccaagactttgtaatttttaaagggcccaagattttttttttttttttttttttcaaataacagaccagcttctttttcttgcagttacagatgtaatttcctttttgttgtcaaacataaggtaccaaatatgatgcaataaattgttttgaaaaacagttgtgtgaatatttcaactaatctgtgttgggcttctgtgaaatacacaggtggaaacagaggtgcaagccagaggcaatgtaatatgctgtaaggctagtgcagatgggagctttttagaaggggctaagtgctggtgtcagggaaattccataatgaagtagaatgctgctcctgcattaagatttcattgagggcaaggctggtggcaggtactatgaatgtaattcataatttaaaaggaaaactaaaaactattttgatttgggaaaatgagccttaatttgttaaacctatacactgagaactagcctcaggcttaatattctcattgcatttgcaagatctgagcaaataagattaagtaaaacaaatcaattgtatatataattgacctttttgtggaacatgtagtttatagaaagtatactctaaagggaatttgccgaagaccttttactgattgaacagttgtgctacaatcaacttttcatagtacatgacctgcattccacatctcagtctaacagtttagtagtgatgtaaagagaagtacaaaccgaactccagtgctttgttatgttttattaactggccctgtctcaggaacatcttaacagatggcaaaaaaacaaaaactttttttcaactcctatgagtggcaactgaagttcttattgttgggaaagaacactagtcctacctctgccactaatgaggtgtttggaggaggtaccagccatataatagggggtgtatgtgtgaattttgtttaaactctactgtatattgaaatgaaattcatttatttgtcttgacaatgttcaaatgatgtagattgtcttagaatgaatattcataagtactcagaactcttaagatgcagatgccacccgtgaggagctaaattcctaatgtgtattgtattccaacccaattttactggaactattgaataaatcttttattttctttcaggtttacttgatagtggatacattggtgtcagaggaccttgactgggttcattttatgtccagacatcacccctgaaacactgtactgtactatcttgctctgagtagtatcaactggatcgtctcatatttgcctcattcatcctattaatttcaaatgatactgtgggggaaaaacagggttagaaaaacaagtggaaaaaatggagtgatgttgtaatctaaacaagtgccttatgtttattgctaagaactggtgttaccaacccttttgagaagaaagggtctcttgacctgtattaacataggaaagtaaagttctttttgtttttctttatattcagctactcttgtcatttctcgttgaaaaactaaaatctgactaggttagtttactcagctttaattagatagttgagtcatatattttcaacatttttctgtatcgtatttattatgcacaaaaataaagtgtgatctctaatagcatggctaaaggtaatgccaatattagtgaatagctttgctgtgggctttatcaggcccttgtttttcacagtgttgtttgtactccatggtgtattgctattagagctgtgaaatgaaagctgtgactttatgaagagatcaaaaaaagtgtggtccagattcaggtaggttgtggtaagttcagggaagtcttgtatgatttctaagaatatttcagttaccatgtatagtatttgggaaaagctgtaatgtaaaatattggactttgttgcaagataggtatatacttgtgtcagataattaaagccttaaattttgaaatgaatctttgagatttcaaagaaagactgacctttcaaatagaaggcggtctttctattctagctaatgccccacttctttaagttataaacaaagtttcatgataccattctgctatcatctaaactttgctgaactctactgccaacctacattaaaaacaaagtcccacgaaatggctgtgttacaccatagtgagcagaaacttaaattttgttctaattttgatggttgaaaaatttcaacctgtagcaataaa

SEQ ID NO: 652 - DNA, 1872 bp, Homo sapiens
  source 1..1872: mol_type = genomic DNA
gaataaacaccgggtgcctagaggagaagagatggagccccagccttggtcccctttcccacccttcctccccacaaggctgtctgagatgccaccttccacctaaacatcatctcccaaattttaatccttaactttggtctctgacttctgcttgattccacagtctccacccacatttgcacaaaggaccatcacctgtccttcctggaatctctaaagttttctgctttccttctgtcctgatggccagctctgctaagtcagctgagatgcccaccatctccaaaaccgttaaccctactcctgatcctcatcaagaatatctggaccctaggattaccattgccttattcgaaattggatcacattccccttcctcctggggctctctccctttcctaaagaatagcagccatcaagttacagaacaacagactgcacagaagtttaacaatctcttaaaagaaattaaagatattcttaaaaatatggcaggttttgaagagaagatcacagaagcaaaagaactttttgaggaaaccaatattactgaggatgtgtcagcccacaaagaaaatatcagaggacttgacaaaatcaatgaaatgttatcaacaaacctgcctgttagtttagccccagagaaagaagacaatgaaaagaaacaggagatgatattggaaaccaatattactgaggatgtgtcagcccacaaagaaaatatcagaggacttgacaaaatcaatgaaatgttatcaacaaacctgcctgttagtttagccccagagaaagaagacaatgaaaagaaacagcagatgataatggaaaaccagaactctgagaacaccgcacaagtttttgcaagagatttggtaaatcgtttagaagaaaaaaaagtccttaacgaaactcaacaaagtcaggaaaaagcaaaaaacagacttaatgttcaagaagaaactatgaaaattaggaacaacatggagcagttactacaggaagcagaacactggagtaaacaacatactgagctcagtaaactgataaaatcctatcagaaatctcagaaagacataagtgaaactcttggaaataatggagtcggtttccaaacccagccaaataatgaagtgtcggctaagcatgagctggaggaacaggtgaagaaactgagccatgacacctattcattgcagttgatggcagctttgctagagaatgaatgccaaatcttacagcagagagtagagattctcaaggaactccatcatcagaaacagggaactctgcaagagaagccaattcagataaactataaacaggacaagaaaaatcagaagccatcagaagcaaagaaagtagaaatgtataagcagaacaagcaagcaatgaagggtacattttggaaaaaagacagatcctgtagaagcctggatgtttgtcttaataagaaagcttgcaatacccagttcaatattcatgttgcaagaaaagctcttaggggaaaaatgaggtcagctagcagcctaagatagaaaataccaaaagcagatgaaaaggtgaatccttaaaaaactacatctgttacctccaacttgtcagtcatgatcaatcatcaaaccttgggcagatctgctggttcaaccaagaaagagctatagaataaggagattgacacttatattactcattacttcagcagttatgtaagtctggtctttaatgaccattgtgtctacatcaagttcataacttttcacctttacaatctgcttgttttttttgtaattattagatagacagcctagagtgagaagttaaaggtccaattaagtaaagatctaaataaaaaccagaatacaagggaaa

SEQ ID NO: 653 - DNA, 7505 bp, Homo sapiens
  source 1..7505: mol_type = genomic DNA
gttgtgactgaaacccgtcaatatggcggcgatcggccgcggccgctctctgaagaacctccgagtacgagggcggaatgacagcggcgaggagaacgtcccgctggatctgacccgagaaccttctgataacttaagagagattctccaaaatgtggccagattgcagggagtatcaaatatgagaaagctaggccatctgaataactttactaagcttctttgtgatattggccacagtgaagaaaaactgggctttcactatgaggatatcataatttgtttgcggttagctttattaaatgaagcaaaagaagtgcgagcagcagggctacgagcgcttcgatatctcatccaagactccagtattctccagaaggtgctaaaattgaaagtggactatttaatagctaggtgcattgacatacaacagagcaacgaggtagagaggacacaagcacttcgattagtcagaaagatgattactgtgaatgcttccttgtttcctagttctgtgaccaactcattaattgcagttggaaatgatggacttcaagaaagagacagaatggtccgagcatgcattgccattatctgtgaactagcacttcagaatccagaggtggtggcccttcgaggtggactaaacaccatcttgaaaaatgtgatcgattgccaattaagtcgaataaatgaggccctaattactacaattttgcaccttcttaatcatccaaagactcgacagtatgtgcgagctgatgtagaattagagagaattttagcaccctatactgattttcactacagacatagtccagatacagctgaaggacagctcaaagaagacagagaagcacgatttctagccagtaaaatgggaatcatagcaacattccgatcatgggcaggtattattaatttatgtaaacctggaaattctgggatccagtctctaataggagtactttgcataccaaatatggaaataaggcgaggtctacttgaagtgctttatgatatatttcgtcttcctctacctgttgtgactgaggagttcatagaagcactactcagtgtagatccagggaggttccaagacagttggaggctttcagatggctttgtggcagctgaggcaaaaactattcttcctcatcgtgccagatccaggccagacctcatggataattatttggcactgatactctctgcatttattcgtaatggacttttagagggtctagttgaagtgataacaaacagtgatgatcatatctcagttagagctaccatccttttaggagagcttttacatatggcaaacacaattcttcctcattcacatagccatcatttacactgcttgccaaccctaatgaatatggctgcatcctttgatatccccaaggaaaagagactgcgagccagtgcagccttgaactgtttaaaacgcttccatgaaatgaagaaacgaggacctaagccttatagtcttcatttagaccacattattcagaaagcaattgcaacacaccagaaacgggatcagtatctccgagttcagaaagatatatttatccttaaggatacagaggaagctcttttaattaaccttagagatagccaagtccttcaacataaagagaatcttgaatggaattggaatcttatagggaccattcttaagtggccaaatgtaaatctaagaaactataaagatgaacagttacacaggtttgtacgaagactactttatttttacaagcccagcagtaaattatatgccaacctggatctggattttgccaaggccaaacagctcacggttgtaggttgccagtttacagaatttcttcttgaatctgaagaggatgggcaaggctacttagaagatctagtaaaggatattgttcagtggctcaatgcttcatctggaatgaaacccgaaagaagtcttcaaaataatggtttattgaccacccttagtcaacactactttttatttattggaacactttcttgccaccctcatggagttaaaatgctggaaaaatgcagtgtatttcagtgtctccttaatctttgctccttgaaaaaccaagatcacttgctaaaacttactgtttctagcttggactatagcagagatggattggctagagtcatcctttccaaaattttaactgcagctactgatgcctgcagactctatgcaacaaaacatttaagggtattattgagagctaatgttgaattctttaataattggggaattgagttgttagtgacccagctacatgataaaaacaaaacgatttcctctgaagctcttgatatcctcgatgaagcatgtgaagacaaggccaatcttcatgctctcattcagatgaaaccagcgttatcccaccttggagacaagggtttgcttctcctgctgagatttctctccattccaaaaggattttcctatctgaatgaaagaggttatgtagcaaaacaattggaaaagtggcacagggaatacaactccaaatatgttgacttgattgaggaacaactcaatgaagcacttactacttaccggaagcctgttgatggtgataactatgttcgtcggagtaaccaaagattacagcgtcctcacgtctacctgcctatacacctttatggacaactagtacaccataaaacaggctgccatttgttggaagtacagaatattattacagaactctgtcgtaatgttcgtacaccagatttggataagtgggaagaaattaaaaaactgaaagcatctctttgggccttgggaaatatcggctcatcaaattggggtctcaatttgctacaggaagaaaacgtgattccagatatactaaaacttgcaaaacagtgtgaagttctttccatcagagggacctgtgtatatgtacttgggctcatagctaaaaccaaacaaggctgtgatattctaaaatgtcacaactgggatgctgtgaggcatagtcgcaaacatctgtggccagtggttccagatgatgtggaacaactctgtaatgaactttcatctatcccaagcactctaagtttgaactcggagtcaaccagctctagacataatagtgaaagtgaatctgtgccatcgagtatgttcatattggaggatgaccggtttggcagcagctctactagcacatttttccttgatatcaatgaagatacagagccaacattttatgaccgatctggacccataaaggataaaaattcattccctttctttgcttctagtaaacttgtgaagaatcgtatcttaaattcgcttactttgcctaacaaaaaacatcgtagtagcagtgatccaaaaggagggaaattatcatctgaaagtaagacaagcaacaggcgaatcagaacacttacggagcccagtgttgattttaatcatagtgatgattttacacccatatccactgtacagaaaacattacaattagagacttcatttatggggaataagcacattgaagacactggtagtacaccaagcattggagaaaatgacttaaaattcaccaagaattttggtacagagaatcacagagaaaatacaagccgagagaggttagtagtagaaagttcaacgagctcacatatgaagatacgtagccaaagtttcaatacagacactacaacaagtggcataagttcaatgagctcaagtccttcacgagagacagtaggtgtagatgctacaactatggacacagactgtggaagcatgagtactgtggtaagtactaaaactattaagacaagccactatttgacgccacagtctaaccatctgtctctctccaaatcaaattcggtgtccctggtgcctccaggttcttctcatacgcttcctagaagagcacagtcccttaaagcaccctctattgctacaattaaaagtctagcagattgtaactttagttacacaagttctagagatgcttttggctatgctacactgaaaagactacagcaacaaagaatgcatccatccttatctcactctgaagctttggcatctccagcaaaagatgtgctatttactgataccatcaccatgaaggccaacagttttgagtccagattaacaccaagcaggatcgattttaaaaagaagcatgtcgggggaatcaggagcttaagacctacaataacaaacaaccttttcaggttcatgaaagccttaagttatgcatcattagataaagaagatttattgagtcctattaatcaaaataccctgcaacgatcttcctcagtgcggtccatggtgtccagtgccacatatgggggttcagatgattacattggtcttgctctcccggtggatataaatgatatattccaggtaaaggatattccctattttcagacaaaaaacataccaccacatgatgatcgaggtgcaagagcatttgcccatgatgcaggaggtcttccatctggaactggaggtcttgtaaaaaattcttttcacttgctacgacagcagatgagtcttacggaaataatgaattcaatccattcagatgcctctctgtttttagaaagtacagaagacactggactacaggaacatacagatgataactgcctttattgtgtctgtattgaaattctgggtttccagcccagcaaccaactgagtgcaatatgtagtcattcagactttcaagatattccatattctgattggtgtgagcagactatccataatcctttagaagtggttccctctaagttttcggggatttctggatgcagtgatggggtgtctcaagaaggctcagctagcagcaccaaaagcacagaattgttactaggtgttaaaacaattccagatgatacaccaatgtgccgtatactccttcgcaaagaagttctaagattagtcattaatttgagtagttcagtttcaactaaatgtcatgagactgggcttttaacaattaaggagaagtatcctcaaacatttgatgacatatgcctttactctgaggtttcccatttgctgtcacactgcacattcagacttccgtgtcggaggttcatacaagaattatttcaagatgtacagtttctacaaatgcatgaagaagcagaggctgtgttggcaacaccaccaaagcaacctatagttgatacatctgctgaatcctgacctcatatttatgatggatatagatacatactatatatattcatatttgtggatttcctaaaagcctcagaaaatacgactgactaggcagcaaagacaggagtatcttctgtacactgttccgcagttactggtacatgaacagttggaactgctgactttcctaaccaaaacaacttccttctctcctttgttgagccttttgaggggttcatgattcattaccacagttttaagagtttcagttaccattgtatgcaagagccaagcactgaatacctacataggttttctattttctttcattttaaaagcataatgacagtggaacaataatgggatatgcagaagcacccttcacaagttatttctgaatgatttttagggtaaataatacagatgccttgtttgttaactaacttgtggaaagcaggaatcagtgtctctaaggctgcatcctattaccacaatggggtgtgctataactgctggtattagagagggaactttggccctttcacgtttttcttaatgtttgtaacactacttcagaggtttataacctcaaagcagaagaagagcctcaacaacccgggacttataagttatttttatgttactagacttgcataaagattcttgttttccaactcttcattttgttgcaatgtgttattacaggatatatgaaccaattaaggtttttcactacagttcttgaataaaatttaaaaatcattttttattttaattaaaaatatttcccatttatagaatgcatatatttgcaatggacttccactttcatcaactttccatctcatcgctttaaacaggaacttgaacaagcactgttagtttagacctaaaggataggaaagcattaaataatactttggatctcctgaggaaaagataagtttgcttgcaatttacacattccatggggaaagaagagccatatttccttaaaaaaaacattaataaagcttgttattgagaaaaattgtagtgaaaagccttaagtaccaaattttaaagcagcagtaacttaatttttatatcagtgtttttgttttgcacaaactaaatgcagtggtaggtgggtttatgagtatattaattgcctttatccatttgtgaagttaagttgatgagggcaaggtttttgtttgtttaatttgtatatgtctaaaggtatttggaactttttacaggaattaaacatatatgcaaatttgtatataaaaatagcatggccatcatttgaatgcttgtaaatgaaaggattatcttttttgagatctatatataaatagaaatagaaaatccagctggactgattaggattcttttttaattcatttgtgtataacatttttattacaattacacatcagttttgacacagtcatagcaacattaatattttcccatgatgcagatcctttttgtaatgggcttgttctttgagatctctgtaaagaaccctgtgaactagaaaacataactcacagagatacttttttaaaaaatttatttactggaactgaaagttccagttgggatgaagcatttcatctcacttcataacacctctttgactgcacttcagtgaattgttcttatgtgcactgtgtagcaacttacattataacaaagcagataagggctgtaagctgctgcttatgttgaaaagtggttcttcagattttctctcataaaatccagttgaagataaataatttttttatactttatcactgaacccaagtgtttatttaaatgtcaacagtacttctaagaacgttgcctgtcatcgtggtctttggtcttggataactaaactgcctttccagagaaccaaatgtcagagttactagaccaaatagtggttaaaacctccaaaggaagtaatgtaatcttattcataatgggattaacatattttagacattcattttaaacactacctcagttaatatagagtataaaaatctgtggtttaatccctcaaaagttaacagtaattttttttttgtcttacacacacacacaccccctcccccaccatcactatccctgtaccctcaccttggtcatctatcctgaaataaggcttagttagtattggcctgaatgttttgtgtttttttttttgttttttttttttactgttactttgaaaaatatgtatgtataccttatcatatctgcctatatcacttactttggggagatactcagagctttgtggttatcagtatactaaaaaaaaaaaaaa

SEQ ID NO: 654 - DNA, 3793 bp, Homo sapiens
  source 1..3793: mol_type = genomic DNA
tagtcccctggtgaggcttaagctcttgtctgttctggtcttttttttttttttttaacttcctaaaattctccgattctaaaagaaagctcctaaatagaagccaaaaagtagccgcccaacttgaaactccccacaagccgggtaaatagcgcgatacgcagcagctagagttctcgcgtttcccacggcgcaggagcactggagggcccccctccgcccccggccccgccaggaaattagtgcgcatgtgccggtcatccggaagttaccgcagtggccgccggaattaggcgaaaagccggaagtaaacattacgagattggcttggattctgtcggatggacttggggctagctgcggcggggctggaggaggccagataaccatgtcagccacagttgtagatgcagttaatgctgcacccctatcggggtccaaagaaatgagtttggaagaaccaaagaagatgaccagagaggactggagaaagaagaaggagctagaagaacagcgaaaattgggcaatgctcctgcagaagttgatgaagaaggaaaagacatcaacccccatattcctcagtatatttcttcagtgccatggtatattgatccttcaaaaagacctactttaaaacaccagagaccacaaccagaaaaacaaaagcagttcagctcatctggagaatggtacaagaggggtgtaaaagagaattccataattactaagtaccgcaaaggagcatgtgaaaattgtggggccatgacacacaaaaagaaagactgctttgagagacctaggcgagttggagccaaatttacaggtactaatatagctccagatgaacatgtccagcctcaactgatgtttgactatgatgggaagagggatcggtggaatggctacaatccagaagaacacatgaaaattgttgaagagtatgccaaagttgatttggcaaaacgaacattgaaagcccagaaactccaagaggaattagcctcaggaaaattagtggaacaggctaattctccaaaacaccagtggggagaagaggaaccaaattctcagatggaaaaagatcataatagtgaagatgaggatgaagataaatatgcagatgatattgacatgcctggacagaattttgactccaagagacgaattactgtccggaatctcaggattcgagaagatattgcaaaatatttgaggaatttagatccaaattctgcctactatgatccaaaaactagagcaatgagagagaatccttatgccaatgcaggaaagaatccagatgaagtgagttatgctggagataactttgttaggtacacaggagataccatttcaatggctcagacacagttgtttgcatgggaagcctatgacaagggatctgaagtgcatctacaggcagatcctacaaagctagagctgttgtataagtccttcaaagtcaaaaaagaagatttcaaagaacagcagaaagaaagcatcctggaaaagtatggtggccaagaacatttggatgcccctccagctgaattgcttttagcccagactgaagactatgtggagtactcaagacatgggacagtcatcaaaggacaggagcgggctgttgcctgctctaagtatgaggaggatgtgaagatccacaatcacacacatatctggggatcgtactggaaagaaggccgatggggatacaaatgctgtcactcttttttcaagtattcctattgtactggagaagctgggaaggagattgttaactctgaggagtgtattataaatgagataactggggaagaatctgtgaaaaaacctcaaaccctcatggagctgcatcaagaaaaactgaaagaggaaaagaagaagaagaaaaagaaaaagaagaagcatcgaaagagcagttcagatagtgatgatgaagaaaagaagcatgaaaaattgaaaaaggcactgaacgcagaggaggcccgccttcttcatgtcaaggagaccatgcagattgatgagaggaagcggccttacaatagcatgtatgaaactcgagaacctactgaagaggaaatggaggcatatagaatgaaacgtcagaggccagatgaccccatggcctctttccttggacagtagcaactagtcagaagaccatccaagatagatgcagctgatacattcttttcagcttcttattgatgattgtagatagaaaaatccttgtttattcttcttgctgcctggctttaataaatatttcagatgcctcacagtaagttcactcctttccatactgaggaaacaagaaaagaagaagaggcacatgaagtgtgcttttgggaatagaatttaaaattggattaagattttatttccagttttttttatttatttatttttttttttgagacggagtcttgctctgtcgcccaggctgaagtgcggtggcgcgatctcggctcactgcaagctccacctcccaggttcacgccattctcctgcctcagcctccctagtagttgggactacaggcgcccgccaccatgctcagctaattttttgtatttttagtagagacggtttcatcgtgttagccaggatggtctcgatctcctgaccttgtgatccacccgcctcagcctcccaaagtgctgagattacaggcgtgagccaccgcgcctggcctatttccagttttatgtgagtcatgtaaaaaagccttggctctctacctattaagaatgtctctttctctgtatttattaagcttcaaactttattgcttcgatttttgtggccctatatttagtattagcacaccttggttttgagaaaaaaacagggctttgtttttttaaataattactagcaactctgtgactacatttatttttattttttttagagacaggatcttgctatgttgcccaggctagagagcagtggcttttcacagacaaagtcataatgccctgcagtcttgggctcaagcgattctctcttccttggcctctggagtagactaaatgtgttagtctttgaatggaaaacaactattttctcatcattgggtcaatattgactgatcagtagtaggtcttttaccattctggacataagtctaggtgtagaaatcctttcctttatcatagaggatatggtttacattaccgtttgttttcattgtgattgcccctatgtaacaatcatgaatattagattttttaaattgtagaatatcctaatatttatagccagcagctgttactttgtttgtaaaatttgcaaaaaaacaaaacctgaagttggtttattgaaagaattataaggatagcttctagggatattagtaatagattgccatgatcctgaagcctcttctcagaacactgtgaagataatactgacagtagaatcagtgaaaacagcctaacaaaacctctgacatcagtatatcaacttttaacagcccactcactggcttttctaaactaccaaaaaccacctgtaggatactgcattaagtcagcatctcagaaacagtggtgtgagtaactgagtcaaattgtcaagtactttggatatacatagtgtcgagctttagattggtatgaaattaaacagcaatgcaaatagatttaattcctatttactttaagaatgaaaaacaatgttcattttcctacctaaacagggtggttcaacataaaggctgatgttgtgtccgttttgtattttatcttttgttaaagatacataaatgacaatacttaactgtga

SEQ ID NO: 655 - DNA, 4288 bp, Homo sapiens
  source 1..4288: mol_type = genomic DNA
gctggcgagtgtaccctttctgcagaaagtaaaaatggccttattcagtaagttaaatttatgttgctatttctttacgacaccggaaaacaaacatttcaaacaccatgctgagaactcagtccttgttttggggagggatgcacttggaagattcgagctaaggtacaatcctccctaggtatccgcgggtcattgttttcaggacccccacagataccaacatccgccatgctcaagccccttacattatgtgggggtgcacggtgggtccttcccatccgcaggttcggcatccgtggatggggagtggatacagagggcggactatacagcttgaaaggcttccctggaagcaatatgtagagtggattgtggaggagcaagaacagaagcggggaggcttgtccagagcatacaggggaaggatgtacggccaagggaggaatcccagacgaccgcgatacgtgacatatttatgtttgcacgaaaataaagtttggaagaaaagtgttgggggaacaagggattcattttcccggggtagttggaatgcaatgggacgcctcaggccgctgggacaggctggcctccgcgcgggggcgcccgagcagccgagccgccgggccttccggctgccccgccggaagtgctctcctgacccgccgctgtgcagcgcagcgcaccgcgggaagatggcgttggaggtcggcgatatggaagatgggcagctttccgactcggattccgacatgacggtcgcacccagcgacaggccgctgcaattgccaaaagtgctaggtggcgacagtgctatgagggccttccagaacacggcaactgcatgtgcaccagtatcacattatcgagctgttgaaagtgtggattcaagtgaagaaagtttttctgattcagatgatgatagctgtctttggaaacgcaaacgacagaaatgttttaaccctcctcccaaaccagagccttttcagtttggccagagcagtcagaaaccacctgttgctggaggaaagaagattaacaacatatggggtgctgtgctgcaggaacagaatcaagatgcagtggccactgaacttggtatcttgggaatggagggcactattgacagaagcagacaatccgagacctacaattatttgcttgccaagaaacttaggaaggaatctcaagagcatacaaaagatctagacaaggaactagatgaatatatgcatggtggcaaaaaaatgggatcaaaggaagaggaaaatgggcaaggtcatctcaaaaggaaacgacctgtcaaagacaggctagggaacagaccagaaatgaactataaaggtcgatacgagatcacagcggaagattctcaagagaaagtggctgatgaaatttcattcaggttacaggaaccaaagaaagacctgatagcccgagtagtgaggattattggtaacaaaaaggcaattgaacttctgatggaaaccgctgaagttgaacaaaatggtggtctctttataatgaatggtagtcgaagaagaacaccaggtggagtttttctgaatctcttgaaaaacactcctagtatcagcgaggaacaaattaaggacattttctacattgaaaaccaaaaggaatatgaaaataaaaaagctgctaggaagaggagaacacaagtgttggggaaaaagatgaaacaagctattaaaagtctaaattttcaagaagatgatgatacatcacgagaaacttttgcaagtgacacgaatgaggccttggcctctcttgatgagtcacaggaaggacatgcagaagccaagttggaggcagaggaagccattgaagttgatcattctcatgatttggacatcttttaagtacattttcaacagtttgaggactaagcctttctaaaataacattgtaataaaccatttttactgagattgcaacgttttgcactgataaacatgagaatctggaggaaagacaattgttttcttgtttaaaatatgtgtggaaaggaatgcaattgatagaacatttaaagatatatctgacaaaatacttaagagtatatagcacaggatttaatttctcaatctgttgcatgtgctaattatgagtattactagttgataatcagttttgtctaggtcataacataccatttgtaagtttgtttgctttttcaggtttatctttgcagtgaattatgctttgctttaaaacattccgctaaaatcataatgggacatataaattattaagctgttagaaatgcattcaaatttgttttttctgtgttctaagaactcaggcaattttaaggataaaaactaacattggccaggcacggtggctcacgcctgtaatcccaacactttaggagaccaaggcgggcagatcacttgaggtcagaagtttgagaccagccaggccaacatggtgaaacttcatctctactaaaaatacaaaaactagccaggtgtggttctccatgcctataatcccggctactcgggaggctgaggcaggagaatcacctgaacccgggaggcaaaggttgcagtgagctgagatcgtaccactgtactccagcctgggcgacagagcaagactctgtctcaaaaaaaaaaaaaaatacaattaagaggtgtatactgatgattcttcccactcatttgtttgtccagaagtaaataaatgtcggaagttttccaagtaactatttgttttttggggggttttttagttagagtcttgatctgtcacccaggctggagtacagtggcaggatctcagcttactgcagcttccatctcccaggttcaagcgatcatgtgcctaagcctcctgagtagctgggatcacaggtgtgtaccaccacgcccagctgatttttgtatttttagtaaagactttcgccatgttgtccaggctggtctcgaactcctggcctaatgatctgcccacctctgcctcccaaagtgctgggatcacaggcatgagccaccgaacccagccttattctgcttaaatttaacgtgttttttgacttcttaattaacttggtcatatactaaatgtgatctcctgtggattaccacatgcattaaaaaatttttcaagctgggcctagtggcgcacacctgcaatcccaacactttgggaggccaagagaggaagattgcttgagcccaggagtttgagaccaatctaggcaatgtagtgagaccctgtctctaatttaaaaaagaaaaagaaaaaaacattcccagtggcagcctgcctaagactgtcttaccttatgttaaggaagtcaggtatttaaaatgttacatatgccggcgcagtggctcatgtgtgtaatcccagcactctgggaggctgagacaggtagatcatttgaggtcaggagttcaaaaccaacctggtctacatggtgaaaccccatctcaactaaaaatacaaaaaatacaaaaaattagccgggcgcggtggctcacacctgtaatcccagcactttgggaggtggaggcgggtggatcacaaggtcaagagatcgagaccatcctggccaacatggtgaaaccctgtctctattaaaaatacaaaaattagctgggcgtggtggcgcatgcctgtagtcccaactactagggaggctgaggcaggagaatcacttgaacccaggaggtggaggttgcagtgagccgagatcacgccactgcactccagcctggcgacagagcgagactccctctcaaaaaaaaaaaaaaaaatacaaaaaattagccgggcattgtggtgcatgcctgtaatctcagctatttgggaggccgaggcaggagaatcacttgaacccaggaggcagaggttgcagtgagtcgagatcgtgccactgcactccagcctgggtgacagagcaagactttgtctcaaaaataataatagtaaaatgttacatgtgcatgaagttttaaattactcatttttattaatgaagaaaataaggtagtttagacattccaagagttaactatagtttacaaaaatatattaagcaaaaatatgcttgatatattaagcagaaatgttgtatattaagcaaaaatgtaaaattcagcaattataaactgttccttacagacagtgtacttgaagtcttttggtagttctgagaatgtggtcattgaagttggatctaagaggaaagtggttatcggttgctttttatttataaaggatgcaaaaataaaattagatttttggcagtccttaa

SEQ ID NO: 656 - DNA, 1151 bp, Homo sapiens
  source 1..1151: mol_type = genomic DNA
ggagggggcatcagtgtggggtgggagcaggaaggctgttggggaaggaagctgagagatcctctgcaggaggggattatagcagctaagggcacctgccaggctggaggtgtggcctgtctaggggaagggtggtcactgatgtccagcaggagcccttgacaggtagagcccaccacggcatctccaagaccacaccatgttcctgttctcccgtaagaccaggacccctatcagtacctacagtgactcctacagggctcccacctccatcaaggaggtctataaggacccacccctgtgtgcctgggaagccaacaagtttctgactccgggtctgactcataccatggagcgacatgtggatcccgaagccctgcagaagatggccaaatgtgctgtacaggactacacttatagggggtccatatcaggccacccctacttgcctgagaagtactggctttctcaagaggaagcagacaaatgcagcccaaactacctgggcagtgactggtacaacacatggaggatggaaccttacaacagcagctgctgcaacaagtataccacctaccttcctcggctgcctaaggaggccaggatggagacagcagttcgaggaatgcccttggaatgccctcctaggccggagcggctcaatgcctacgagcgcgaagtgatggtgaacatgctgaactcactgtcgcggaaccagcagctgccgcggatcacgccccgatgcgggtgcgtggacccgctgcccggccgcctgcccttccatggttacgaaagtgcttgctcgggccgccactactgtctgcgcgggatggactactacgccagcggggcgccctgcaccgaccgccgcctgcggccttggtgccgggagcaaccgactatgtgtacctccctacgagcaccggcccggaatgcagtgtgctgttacaactcccccgccgtcatactacccatatccgaaccttagatgggacacaagtcacttcaagaagtctggtggtccccagagaaacaactatgttatccatcctgagtttgtgtctgagacctatcccgactatcgttgctggtagagcctgggcttgctgtgccaagggggcagagcaataaataaactcttcaaccccaaa

SEQ ID NO: 657 - DNA, 4653 bp, Homo sapiens
  source 1..4653: mol_type = genomic DNA
agagcgaagctgaggagtccagcgctcgccgacaggggcctgggctgtcccgagccggaatccagatcttacataagatggaagtctctcacactagatactgaacattaaatagaaaatctatttagtaaaatctaagttgccatggaagaaataccagtaaaagttgctgtaagaattagacctctgctttgcaaagaagctcttcataatcatcaagtttgtgtgagagttattccaaacagccagcaagttatcattgggagagatagagtcttcacttttgattttgtttttggcaaaaattccactcaagatgaagtttataacacatgtataaagcccctagtgttgtcactcattgagggctataatgcaactgtttttgcctatggacaaactggatctgggaagacatacaccattggagggggccatattgcttcagttgtggagggccaaaagggtatcattcctcgagctattcaagaaatatttcaaagcatctctgaacatcctagcattgactttaatgtaaaagtatcttatatagaagtgtacaaggaagacctaagagatcttctagaattggagacatccatgaaggatcttcacatccgagaagatgaaaaaggaaacacagtgattgttggggccaaggaatgccatgtggagagtgcaggtgaagtgatgagtcttttggagatggggaatgcagccagacatacaggtaccactcaaatgaatgagcactccagcagatcacatgcaatttttacaatcagcatttgtcaagttcataaaaatatggaggcagctgaagatggatcatggtattcccctcggcatattgtctcaaagttccactttgtggatttggcaggatcagaaagagtaaccaaaacggggaatactggtgaacggttcaaagaatccattcaaatcaatagtggattgctggctttaggaaatgtaataagcgctcttggggacccacgcaggaagagttcacatattccatatagggatgctaaaattacccggcttctgaaagattctctgggaggcagtgctaagactgtcatgatcacatgtgtcagcccctcctcctcgaattttgatgagtccttaaattctctcaaatatgccaacagagcacggaacattagaaacaaacccactgtaaacttcagccccgagtcagaccgtatagatgaaatggaatttgagattaaattgcttcgagaagctttgcaaagccagcaggctggtgtcagccaaactacccagatcaatcgagaagggagtcctgatacaaataggattcattctcttgaggagcaagtagctcagcttcaaggagaatgtctgggttaccagtgttgtgtagaagaagcctttaccttcctggttgacctaaaagatactgtcagactaaacgaaaagcagcaacacaaactgcaggagtggtttaacatgatccaagaggtcaggaaggctgtcctcacctcatttcgaggaatcggaggcactgcaagtctggaagaaggaccacagcatgttacagttctccagctgaagagagagcttaagaaatgccagtgtgtgcttgctgctgatgaagtagtatttaatcagaaggaactggaggtgaaggaactgaagaatcaagtgcagatgatggtacaggaaaacaaagggcatgctgtatctttgaaagaagcgcaaaaagtgaatagactgcagaatgaaaaaataatagaacaacaacttcttgtggatcaactgagtgaagaactaacaaaacttaacctgtcagtgacttcttcagctaaagaaaattgtggagatgggccagatgccaggatccctgaaaggagaccatatactgtaccatttgatactcatttggggcattatatttatatcccatcaagacaagattccaggaaggtccacacaagtccgcctatgtactctctggatcgaatatttgctggatttcgaacacgaagtcagatgctgttgggtcacatagaagaacaagataaggtcctccactgccaattttctgataacagtgatgatgaagaatcagaaggccaagagaaatctggaactagatgtagaagtcgttcatggattcagaagccagactctgtttgttcccttgttgaattgagtgatactcaggatgaaacacaaaagtcagatttggagaatgaagatttaaagattgattgtctccaggagagtcaagaattgaatttgcaaaaattaaagaattcagaacgcatacttactgaagctaaacaaaaaatgagagaacttacaattaacatcaagatgaaggaagatctgattaaagaattaataaaaacaggtaatgatgccaagtctgtaagcaagcagtattctttgaaagtaacaaagctagagcatgatgcagaacaggcaaaagtcgaactgattgaaacacaaaagcagctacaggagctggaaaacaaagatctttctgatgttgcaatgaaggtaaaattacagaaagagtttcgtaaaaagatggatgctgcaaagctgagagttcaggtcttgcagaagaagcaacaagatagtaagaaactggcatcactgtcaatccaaaatgagaaacgtgctaatgagctagagcagagtgtagatcacatgaaatatcaaaagatacagctacaaagaaaactacgagaagaaaatgaaaaaaggaagcaactggatgcagtaattaagcgggaccagcaaaaaatcaaagaaatacaattaaaaacaggacaggaagaaggtctaaaaccgaaagctgaggaccttgatgcatgtaacttgaaaaggagaaaaggttcgtttggaagtatagaccatctccagaaattggatgagcaaaagaaatggttagatgaagaagtagagaaagttctgaaccaacgccaagaattagaggagctggaagcagacttaaagaaacgggaggccatagtttctaagaaggaggctctgttacaggagaagagtcacctggaaaataagaaattgagatctagtcaggccttaaacacagatagtttgaaaatatcaactcgcctgaacttactggaacaagagttgtctgaaaagaatgtgcagctccagaccagtacagctgaggagaaaacaaagatttcagaacaagttgaagtcctccagaaagaaaaggatcagctccagaaacgcagacacaatgtggatgaaaaacttaaaaatggtagagtgttatcacctgaagaagaacatgttcttttccaacttgaagaagggattgaagctttggaagctgcaattgaatacaggaatgaaagtatccagaatcgccagaagtcacttagagcatcattccataacctctctcgtggtgaagcaaatgtcttggaaaagctagcttgcctgagtcctgttgagattagaactattcttttcagatatttcaataaggtggtgaatttgcgagaagctgaacggaaacaacagttatataatgaagaaatgaaaatgaaagttctggaacgggataatatggttcgtgaattagaatctgcactggaccatctaaaattgcagtgtgaccggagactgaccctccagcaaaaggaacacgaacaaaagatgcagttgctattacatcatttcaaagaacaagatggagaaggcattatggaaactttcaaaacatatgaagataaaatccagcagttggaaaaagatctttatttctataagaaaaccagccgggatcataagaagaaacttaaggaactggtaggggaagcaattcggcggcaactagcaccatcagagtatcaagaggctggagatggagtcctgaagccagaaggaggaggcatgctttcagaagaattaaaatgggcatccagacctgaaagtatgaaattaagtggaagagaaagagaaatggacagttcagcaagcagcttaagaacacagccaaatcctcaaaagctctgggaagatatcccagaattacctccaattcatagttctttagcaccccccagtgggcatatgttaggtaatgagaataaaacagaaacagatgataatcagtttacaaaatctcacagtcgactgtcatcccaaattcaggttgtgggaaatgtgggacgacttcatggtgtcacacctgtaaaactgtgtcgaaaagaattacgtcaaatttccgccttggaactatcattgcgacgttccagtcttggagttggcattggatcaatggctgctgattccatcgaagtatctaggaaaccaagggacttaaaaacttagacattgaataatagaacttttagtagatatgtaaaaagattcctttttctaacctgttaaaaactaaagctcaagttcactacctctttcctcagaataaaggaagaaggggaggaaggaatccctaattcttttatatgctatagatgtgtacatcttctatatatatttggggagttttagtttatattcccatagtaatcaaacatgttttccaatacttgataacatttaaatatttataaatacgcttaaatgtttttccaggcatatttgaagattaaaactagtaatagactaaaa

SEQ ID NO: 658 - DNA, 1008 bp, Homo sapiens
  source 1..1008: mol_type = genomic DNA
ggagaagctgggactagcaggcagtttttcatgatttttcctcacactgatcactatccaatcagaacaataaacttctaacactcccttactaaaagaacatggttaagggtgagaaaggccccaagggcaagaagatcaccctcaaggtggccaggaattgcatcaaaatcacttttgatgggaaaaagcgccttgacttgagcaagatgggaattaccaccttccccaagtgtattctgcgccttagtgacatggacgagctggaccttagccggaatcttatcaggaagatccctgactccatctccaagttccagaacctccggtggctggacctgcacagcaactacatagacaagctgcctgagtccattggccagatgaccagcctgctctacctcaacgtcagcaacaaccggctgaccagcaacgggctgcccgtggagctgaagcaactcaagaacatccgcgctgtgaacctaggcttgaaccacctggacagcgtgcccaccacactgggggccctgaaggagctccacgaggtagggctccatgacaacctactgaacaacatccccgtgagcatctccaagctccccaagctgaaaaagctcaacataaagcggaacccctttccaaagccaggtgagtcggaaatattcatagactccatcaggaggctggagaacttgtatgttgtggaggagaaggatctgtgtgcggcttgcctgagaaaatgccaaaacgcccgggacaacctgaatagaatcaagaacatggccacgacgacaccgagaaagaccatctttcccaatctgatctcacccaattccatggccaaggactcctgggaagactggaggtgacttggaacctgaccctgaggcagaagggaaagagagagggagggaagagggcagtgggctacctccacaggaaaccaagggctcccctgtggctgcagcagctctttcagccaagcccataaaactcctttccttactt

SEQ ID NO: 659 - DNA, 807 bp, Homo sapiens
  source 1..807: mol_type = genomic DNA
ggacgaggggcaacgtatataaatgcgcgcaggcgtagttaagagagcgcattttgacttcgaggcaccgccgacgttactgtgtcgccatggggcgccgtccagctcgctgttaccggtattgtaagaacaagccgtacccaaaatctcgtttctgccgaggggttcctgatgccaagatccgcatctttgacctgggtagaaagaaggcaaaagtggatgagttcccactcggtggccacatggtgtctgatgaatatgagcagctgtcttctgaagccctggaggccgcccgtatttgtgccaacaaatacatggtgaaaagttgtggcagagatggctttcacatgcgagtgcggctccatcccttccatgtcatccgcatcaacaagatgttgtcctgtgctggggctgacaggctccagacaggtatgcgaggtgcctttggaaaaccccagggtactgtagcccgggtccacattggtcaagtcatcatgtccatccgcaccaagcttcagaacgaggagcatgtgattgaagccttgcgcagggccaagttcaagttccctggacgccagaagattcatatctccaagaagtggggcttcacgaagtttaatgctgacgaatttgaagacatggtggccaagaagtgcctcatccctgatggttgtggagtcaagtacgttcccagtcatggccccttggacaagtggcgggttctgcactcatgaaggttttggcagtactgtctccttgggccatgctggtctgacttatgcttactaataaattctgtttactggc

SEQ ID NO: 660 - DNA, 5038 bp, Homo sapiens
  source 1..5038: mol_type = genomic DNA
atttcaaaatcttatgtcaaagtaagcgcgcagaaaggggtccttgctcttctacactgagccctacggcccccctgtggggaaatactcctgataatcatctcgaaaattgtttcgaccagcaggggtcactatgaaggctgacttgagcccaagacacaatggggcacggtaaccagactggtccgtaagggttccaggaaggaatgcagtttcaagagaacagtttgaatctttattcgaatttgaattttggtacaatgaagagagtcagctgcaacttgacaatcgaaatcttcagaaaagcgacacaaatacgttcgcctcgaggaatattgggtcttctgcgcggccgtagagctccgccaagtgcgcctgcgcggaggagaagtggcgtcgagtccggccgggcagtagaggaacttgcggtagtgaccctcgggcctcgccatgaagagccgctttagcaccattgacctccgcgccgtactcgcggagctgaatgctagcttgctaggaatgagagtaaacaatgtttatgatgtggataataagacataccttattcgtcttcaaaaaccggactttaaagctacacttttacttgaatctggcatacgaattcatacaacagaatttgagtggcctaagaatatgatgccgtctagttttgccatgaagtgccgaaaacatttgaagagtcggagattagtcagtgcaaaacagcttggtgtggatagaattgtagattttcaatttggaagtgatgaagctgcttaccatttaatcattgagctctatgatagggggaacattgttcttacagattatgagtacgtaattttaaatattctaaggtttcgaactgatgaggcagatgatgttaaatttgctgttcgtgaacgctatccacttgatcatgctagagctgctgaacctttgcttactttggaaaggttgactgaaatagtagccagcgcacctaagggtgaactactgaagagggtgcttaacccattacttccctatggaccagctctcattgaacactgtcttttagaaaatggattctcgggtaatgtcaaagtggatgaaaaacttgaaactaaagatattgaaaaagtacttgtttctctgcagaaagcagaagactatatgaaaacaacatccaacttcagtgggaagggatatatcattcagaaaagagaaataaaaccaagcttggaagcagataaaccagttgaagacatactgacgtatgaggaatttcatcctttcttgttttctcaacattcacaatgtccatatatagaatttgaatcatttgacaaggcggtggatgaattttattccaagatagaaggccagaaaattgacttaaaagctttacaacaggaaaagcaagcattgaagaaattagataatgttcgaaaggatcacgaaaacagattggaagctcttcagcaggctcaggaaatagacaaactgaaaggagagctcatagaaatgaacctacaaatagttgacagagccattcaggtagttcgaagtgctttagctaaccagatagattggacagaaattgggttaattgtgaaagaagcccaggctcaaggagaccctgttgcaagtgcaatcaaagaattaaaactacaaacaaaccatgttacaatgctgctaagaaatccatacttgttatcagaggaggaagatgatgatgttgatggtgacgtcaatgttgagaaaaatgaaactgaaccaccaaaaggaaaaaagaaaaaacaaaagaataaacagctgcagaagcctcagaaaaataagcccttacttgtagatgttgatctcagcttgtcagcatatgccaatgccaaaaagtattatgatcacaagagatatgctgctaagaaaacacaaaagactgttgaagctgctgagaaggcattcaagtcagcagaaaagaaaacaaagcaaacattaaaagaagttcagactgttacctctattcaaaaagcaagaaaagtatattggtttgagaaatttctgtggttcattagctcagagaactatctaattataggtggacgagatcagcaacagaatgaaataattgtgaaaagatacttgacaccaggagacatttatgtacatgctgatcttcatggagctactagctgtgtaattaagaatccaacaggagaacccatccccccacggaccttgactgaagctggcacaatggcactttgctacagtgctgcttgggatgcacgagttatcactagtgcttggtgggtgtaccatcatcaggtatctaaaacagcaccaactggagaatatttgacaacaggaagcttcatgataagaggaaaaaagaattttcttcctccctcatatctaatgatggggtttagcttcctttttaaggtagatgagtcttgtgtttggagacatcagggtgaacgaaaagtcagagtacaggatgaagacatggagacactggcaagttgtacaagtgaactcatatcagaagaaatggaacaattagatggaggtgacacgagcagtgatgaggataaagaagaacatgaaactcctgtggaagtagaactcatgactcaggttgaccaagaggatatcactcttcagagtggcagagatgaactaaatgaggagctcattcaggaagaaagctctgaagacgaaggagaatatgaagaggttagaaaagatcaggattctgttggtgaaatgaaggatgaaggggaagagacattaaattatcctgatactaccattgacttgtctcaccttcaaccccaaaggtccatccagaaattggcttcaaaagaggaatcttctaattctagtgacagtaaatcacagagccggagacatttgtcagccaaggaaagaagggaaatgaaaaagaaaaaacttccaagtgactcaggagatttagaagcgttagagggaaaggataaagaaaaagaaagtactgtacacattgaaactcatcagaacacaagcaaaaatgttgcggctgtgcagccaatgaaacgaggacaaaagagtaaaatgaaaaaaatgaaagaaaaatacaaagaccaggatgaagaagaccgtgaacttatcatgaagttgctggggtctgcaggttcaaacaaagaagaaaaagggaagaaggggaagaaaggaaaaacaaaggacgaacctgtgaagaaacagccccagaaacctagaggtggacagagggtctctgacaacattaagaaagaaactccgttccttgaggttataactcatgagttacaagactttgctgtagatgatccacatgatgacaaggaagagcaagatctggatcaacagggaaatgaggaaaacctatttgattctttgacaggccagccacatcctgaagatgtactactgtttgccattccaatatgtgccccttacaccaccatgacaaactacaaatataaagtgaaacttactcctggagtgcagaaaaagggaaaagctgcaaaaacagccttgaatagtttcatgcattccaaagaagcaacagcaagagaaaaagacttattccgcagcgtaaaggacacagatttatcaagaaacattcctggcaaagtgaaagtgtctgcacccaatcttctgaatgtaaaaaggaaatagctgaaatgaaattctaaaatatttgagaagagccaattttatagccttttggaagttcaaagatgaaagcaccatgtatcaggatttccgcattataaaaatgaactaaacattgccttgctatattcaccaaaaggacttacttcttgttttttcccagttttatatagaggaaacactgtctatgataggatttccaaaagtatttgtggacagttaaatgctaattaatatacatctgtagttattctacattttcttgaaatttgggaggttaataccaagtattcatttcatgatgtaaagaaactgaacagtgaagtggcttgattgcttaaactattgacttggtaagtctactgtatataacatctaatatatatattacaggccaaatgaactaaacattgccttgctatattcaccaaaaggacttaattcttgtttttttcccagttttatatagaggaaacactatgataggatttcctaaagtatttgtggacagttaaatgctaattatatacatctgtagttattctacattttcttgaaatttgggaggttaataccaagtattcatttcatgatgtaaagaaactgaacagtgaagtggcttgattgcttaaactattgacttggtaagtctactgtatataacatctaatatatatatattataggccagctacaaggggtttaaatatttaggattgtgtcttgaaaactaagtattggagtggattttcttctgctttcattgatacttgtcagaaaaaaatattagaccaaaatgtaaaatataagtaataattctcatgactcagcttaatcatttctattcatttgtagaccttcaggtttgatcttaattttttccttgtaatctgattcagttctgtaccattttaatttccacctttagtaattaattaccaatatagcacgttagagtatcttaacctataataccagaagcgcattttaggcttaccactaaagactctaacccacttttcctctgtctcttaacagaatggaaaatgatgtcatcattatttccattccttcatgagctataaaacctattaattaaaaaaaaactttttaattgactggacagcacctgcctgtattcagcatgaccacttgctccagcccctacactgaagcattaaggtcaaagtactgaacagttgttggtccctccacactttgtttttccagcttcgtcataatgtgaatattaatgtttaaaaaaaaaaacctttattatattgtatttacaacactaggttacataactatagactactcttgccattaaaaaaaaaaaaatctataatgttttcaaaaa

SEQ ID NO: 661 - DNA, 1566 bp, Homo sapiens
  source 1..1566: mol_type = genomic DNA
cagtagctcgcgcggtgcctgtcggtagtcgcgtgcggggcggcggggcggcggggcggccggcggcggccatgggagatatcccagccgtgggcctcagctcctggaaggcttctccagggaaagtgaccgaggcagtgaaagaggccattgacgcagggtaccggcacttcgactgtgcttacttttaccacaatgagagggaggttggagcagggatccgttgcaagatcaaggaaggcgctgtaagacgggaggatctgttcattgccactaagctgtggtgcacctgccataagaagtccttggtggaaacagcatgcagaaagagtctcaaggccttgaagctgaactatttggacctctacctcatacactggcccatgggtttcaagcctcctcatccagaatggatcatgagctgcagtgaactttccttctgcctctcacatcctcgagtgcaggacttgcctctggacgagagcaacatggttattcccagtgacacggacttcctggacacgtgggaggccatggaggacctggtgatcaccgggctggtgaagaacatcggggtgtcaaacttcaaccatgaacagcttgagaggcttttgaataagcctgggttgaggttcaagccactaaccaaccagattgagtgccacccatatcttactcagaagaatctgatcagtttttgccaatccagagatgtgtccgtgactgcttaccgtcctcttggtggctcgtgtgagggggttgacctgatagacaaccctgtgatcaagaggattgcaaaggagcacggcaagtctcctgctcagattttgatccgatttcaaatccagaggaatgtgatagtgatccccggatctatcaccccaagtcacattaaagagaatatccaggtgtttgattttgaattaacacagcacgatatggataacatcctcagcctaaacaggaatctccgactggccatgttccccataactaaaaatcacaaagactatcctttccacatagaatactgaggacgcttccccttccttgtttctgctcagcccagatgcacagacactattggcaatgttgaccctcctctgtcatcacagcgccagggcagctgtgcctgggacaggagccacacagtcagagggggatgtaagagccaccttctctgacaaatctggagaattgagtgtgttctaagtgaaggcaatggggtttctccaagacagcctgtgtggcctctactctgaacaaatacactgatgagtcatcagtgaaatttgccttcacattttaagaaaactttatcttatggagttatttaagccatctacagagctgaggaaacagtgtaatgtgtctctgccccattgcgcagctccacccattgtgccccaggccagcccgcgtcacctacacttccttctgtgccctgccagtgacccccaggttattctaaagcagagtccttcccttcccccagtgagaaggaaaatgggataagtctgggacactgtttcagttcaataaagaggcttttttcttccttaaaaa

SEQ ID NO: 662 - DNA, 2314 bp, Homo sapiens
  source 1..2314: mol_type = genomic DNA
cctcgccgacggcccaaggcgttcaggcacgcgctttcggtgctcggagcggaagcagcggcgagaggctcggaggcgcgggggcggccgagcggcgggcgacgggggcgggcgacgggggcgggcgacgcgggccgcggcacgggcggagccggggccatggagccgccgctgccgggctaggcaggtcgtgccccgccgggccggcggcgatgtcgggctaccagcgccgcccgggcgccaccccgctgtcccgagcccggagcctcgccattcccgacgctccagcgttctatgagcgccggtcttgtctcccccagctaaattgtgagcgcccccatggcagggacctggactcccccttcttcggcattcggccggcctttatgtgctatgtgcccagcccggtgctggcttccgtgggagacacagatgacagatttgaagatctggaagaggcaaatccattctcttttagagagtttctgaagaccaagaacctcggcctctcgaaagaggatccggccagcagaatttatgcaaaggaagcctcgaggcattccctgggacttgaccacaactccccaccctcccaaaccggcgggtatggcctggagtatcagcagccatttttcgaggatccgacaggggctggtgacctcctggatgaggaggaggatgaggacaccggatggagtggggcctacctgccgtccgccatcgagcagactcaccccgagagggtccctgccggcacgtcgccctgcagcacatacctttcctttttctccaccccgtcggagctggcagggcctgagtctctgccctcgtgggcgttgagtgacactgattctcgcgtgtctccggcctctccggcagggagtcctagcgcagactttgcggttcatggagagtctctgggagacaggcacctgcggacgctgcagataagttacgacgcactgaaagatgaaaattctaagctgagaagaaagctgaatgaggttcagagcttctctgaagctcaaacagaaatggtgaggacgcttgagcggaagttagaagcaaaaatgatcaaggaggaaagcgactaccacgacctggagtcggtggttcagcaggtggagcagaacctggagctgatgaccaaacgggctgtaaaggcagaaaaccacgtcgtgaaactaaaacaggaaatcagtttgctccaggcgcaggtctccaacttccagcgagagaatgaagccctgcggtgcggccagggtgccagcctgaccgtggtgaagcagaacgccgacgtggccctgcagaacctccgggtggtcatgaacagtgcacaggcttccatcaagcaactggtttccggagctgagacactgaatcttgttgccgaaatccttaaatctatagacagaatttctgaagttaaagacgaggaggaagactcttgaggacccctgggtgttctcagcatgaagctccgtgtataccctgaggtcaccaccgctcgatctaaatgtgcagttgtgtccttaaatatgcagtcttcacccagagtaaagtgttgatcgcaagagtccagtgtcgtgccctcagccagttcttggccaccacaatgggagcagccctggccgagttgtctctgtggtttctatgcagcccttcttggcgaaattcctgcgatcttatagattctaatgagctcttggaagacattgtcataaaagccagtgattttaagaaaaagagtggttctggaatcaatgttttccagtcccatcccagaacatcagttgtaagataagtacaattggttgtccttgatttcataagtagaacaaacactaaatgtgcctctgagatggccaccccgggcagggacctgtgccttccgccgatgctcagggctccctctggctcccgggtcactcttgtggccccagtgggtggtccctgcagtcatggcctgagtgcgcaggggccaccgcgtggctgctgctgtcctcctccgggacccacggggaccaaggtcacacgttccgtgctgtgaagctgtccagatgtgcctctttggctgggggttctggtggacgtttcaagtggcattttgtacaatgcaggttagaattcaggaatttcaagtatgtgcccgggtctgtcaggtcccagttgcctttctgacggcccccctcagagggacggcgatgagcactaaatgcttttttgactattttcctatagattttttttaaaacttttttttcctcctgttccaattgatagctttcttatttaataaattctgtagttcacc

SEQ ID NO: 663 - DNA, 2072 bp, Homo sapiens
  source 1..2072: mol_type = genomic DNA
cggggctcgactctaggagttgggctgaggatttccacccgatcctcgaacctccggcccatctcatggacgcccctcccccttcaaacaccctcccccacatttattcccgcgtctgttttaaagatgggtaaactgaggcacagggagccgggccggggagcactgacagaaccagaagcaggttctgcctcccgtcccctcggagggccgacttgccccttctgggtttcgtcgggggtctcagatacgaggaggcccagctggaagccacctgagggtgtcccccgctaagatgcgcaaatgggaaaagcgaggccggggttggggaaagaacttgcccgagccgcagagcgcgtcagccggggaggtcggggcgggggcgacccgcgcgaccgaggatcgggtatctgggcccggcgcggagcctgcagggcggggccgcggcgcgtgctgatgacgcagtcggcgcggcggccctagcgacgcggttactagggagcggcgagccgagacggctacatggacgccactatcgccccgcaccgtatcccccccgagatgccccagtacggggaggagaaccacatcttcgagttgatgcagaacatgctggagcaactcctgatccaccagcccgaagatcccatccccttcatgatccagcacttgcatagagacaacgacaatgtgcccaggattgtaatattaggtccacccgcctcagggaaaacaacaatagcaatgtggctctgcaaacatctgaacagcagtctcctcaccctggagaacctgatcttaaatgagttttcctatacggccaccgaagccagaaggctttatctgcaaaggaagacagttcccagcgcgctgctcgtccagctgattcaggaacgcctggctgaagaggattgcatcaagcagggctggattctggatggcatccctgagacgcgtgagcaggctctgaggatccagaccctggggatcacacccagacacgtcattgtgctgagtgctccagacacggtcctgatcgagagaaacttggggaagagaatcgaccctcaaactggagagatttatcacaccacctttgactggccacccgaatctgaaatccagaaccgtctcatggtgccagaggacatctcagagctggagacggctcagaaactgctggagtatcataggaacatcgtcagggtcattccctcctaccccaaaatcctcaaagtcatcagtgctgaccagccatgtgtggacgtcttctaccaggctctgacctatgtccaaagcaaccatcgtactaatgccccgttcaccccgagggtgctgctgctcgggcctgtgggcagtgggaaaagtctgcaggccgccctcctggcccagaaatacaggcttgtcaatgtctgctgtgggcaactgctgaaagaggctgtggcagataggaccacgtttggcgagctcatccagcccttctttgaaaaggagatggcagttcctgacagcctcctcatgaaggtgctgagccagcgcctggaccagcaggactgcatccagaaaggctgggtgctacacggcgtcccgcgggacctcgaccaggcacacctgctgaaccgcctgggctacaatcccaacagggtgtttttcctgaatgtgccatttgattccatcatggagcggctgactctgagaagaattgatccagtcactggggaaaggtaccacctcatgtacaagccacctcccaccatggagatccaggctcgcctcctgcagaacccaaaggatgctgaagagcaggtcaagctgaaaatggacctgttctacaggaactcagctgacttggagcagttgtatgggtcggccatcaccctcaatggggaccaggacccatacacagtcttcgaatacatcgagagtgggatcattaatcccctgcccaagaaaatcccctgatgggttcagagccaggagcgctgccccagggaaagagttaatcccctgcccccagccccccagcctcggcacagctcccctaaaaagccaataaagcctgctggatacag

SEQ ID NO: 664 - DNA, 1935 bp, Homo sapiens
  source 1..1935: mol_type = genomic DNA
ggtgggaaaagaggacttattgttgtcatggcccatgagatgattggaactcaaattgttactgagaggttggtggctctgctggaaagtggaacggaaaaagtgctgctaattgatagccggccatttgtggaatacaatacatcccacattttggaagccattaatatcaactgctccaagcttatgaagcgaaggttgcaacaggacaaagtgttaattacagagctcatccagcattcagcgaaacataaggttgacattgattgcagtcagaaggttgtagtttacgatcaaagctcccaagatgttgcctctctctcttcagactgttttctcactgtacttctgggtaaactggagaagagcttcaactctgttcacctgcttgcaggagctgatgcagcagaatgggattggttatgtgttaaatgccagcaatacctgtccaaagcctgactttatccccgagtctcatttcctgcgtgtgcctgtgaatgacagcttttgtgagaaaattttgccgtggttggacaaatcagtagatttcattgagaaagcaaaagcctccaatggatgtgttctagtgcactgtttagctgggatctcccgctccgccaccatcgctatcgcctacatcatgaagaggatggacatgtctttagatgaagcttacagatttgtgaaagaaaaaagacctactatatctccaaacttcaattttctgggccaactcctggactatgagaagaagattaagaaccagactggagcatcagggccaaagagcaaactcaagctgctgcacctggagaagccaaatgaacctgtccctgctgtctcagagggtggacagaaaagcgagacgcccctcagtccaccctgtgccgactctgctacctcagaggcagcaggacaaaggcccgtgcatcccgccagcgtgcccagcgtgcccagcgtgcagccgtcgctgttagaggacagcccgctggtacaggcgctcagtgggctgcacctgtccgcagacaggctggaagacagcaataagctcaagcgttccttctctctggatatcaaatcagtttcatattcagccagcatggcagcatccttacatggcttctcctcatcagaagatgctttggaatactacaaaccttccactactctggatgggaccaacaagctatgccagttctcccctgttcaggaactatcggagcagactcccgaaaccagtcctgataaggaggaagccagcatccccaagaagctgcagaccgccaggccttcagacagccagagcaagcgattgcattcggtcagaaccagcagcagtggcaccgcccagaggtcccttttatctccactgcatcgaagtgggagcgtggaggacaattaccacaccagcttccttttcggcctttccaccagccagcagcacctcacgaagtctgctggcctgggccttaagggctggcactcggatatcttggccccccagacctctaccccttccctgaccagcagctggtattttgccacagagtcctcacacttctactctgcctcagccatctacggaggcagtgccagttactctgcctacagctgcagccagctgcccacttgcggagaccaagtctattctgtgcgcaggcggcagaagccaagtgacagagctgactcgcggcggagctggcatgaagagagcccctttgaaaagcagtttaaacgcagaagctgccaaatggaatttggagagagcatcatgtcagagaacaggtcacgggaagagctggggaaagtgggcagtcagtctagcttttcgggcagcatggaaatcattgaggtctcctgagaagaaagacacttgtgacttctatagacaatttttttttcttgttcacaaaaaaattccctgtaaatctgaaa

SEQ ID NO: 665 - DNA, 1724 bp, Homo sapiens
  source 1..1724: mol_type = genomic DNA
gagaagtgtgggctacccggccactgccctggagctgtggtgactgctgcgtttttctcccatgcacttgcacgtccaggactcctgggagaacttgggccacactccttccttgccctcttgagctcattcgtcaccctgttgggtgagcacagccctagctcaggccactgggcaagccacaccatccaaagaggaggtcctctgccccaggacccccacaccaccccagctccctgtttcgctgaggcctggagcccccatggcctcactgagccgagccctacgtgtggctgctgcccaccctcgccagagccctacccggggcatggggccatgcaacctgtccagcgcagctggccccacagccgagaagagtgtgccatatcagcggaccctgaaggagggacagggcacctcggtggtggcccaaggcccaagccggcccctgcccagcacggccaacgtggtggtcattggtggaggcagcttgggctgccagaccctgtaccacctggccaagctgggcatgagtggggcggtgctgctggagcgggagcggctgacctccgggaccacctggcacacggcaggcctgctgtggcagctgcggcccagtgacgtggaggtggagcttctggcccacactcggcgggtggtgagccgggagctggaggaggagacgggactacacacgggctggatccagaatgggggcctcttcatcgcgtccaaccggcagcgcctggacgagtacaagaggctcatgtcgctgggcaaggcgtatggtgtggaatcccatgtgctgagcccggcagagaccaagactctgtacccgctgatgaatgtggacgacctctacgggaccctgtatgtgccgcacgacggtaccatggaccccgctggcacctgtaccaccctcgccagggcagcttctgcccgaggagcacaggtcattgagaactgcccagtgaccggcattcgtgtgtggacggatgattttggggtgcggcgggtcgcgggtgtggagactcagcatggttccatccagacaccctgcgtggtcaactgtgcaggagtgtgggcaagtgctgtgggccggatggctggagtcaaggtcccgctggtggccatgcaccatgcctatgtcgtcaccgagcgcatcgaggggattcagagtttcactttgttgcccacactggagtacagtggcacagtgtcagctcactgcaacctccgcctcccgggttcaagcaattctcgtgcctcagcctcccatgtagctgggattaaatgtgcccgtcaccacacccggctgatttttttttgtattttagtagagacggagtttcaccatgttgccaaggctggtctcgaactcctgagctcaggcaatccacccatctcggacttccaaagtgctaggattacaggcgtgagccaccatgcttagctgattatgtaaacattgttaatacctgagcaagtagtgtccaactttttgtgtttcttggagttattaacagtttttgtcccagctgctcagtttcttttgtaactgttatgtgtgtgtgtgtaacattatcttcatgccccaaaacccatacccgttatcaatcactccccatttcccaccctgtccccagacttaggcaatcccaaatctgatttctgcctcgatggagtttcctattctggacgtttagtataaatggaatcacatg

SEQ ID NO: 666 - DNA, 5314 bp, Homo sapiens
  source 1..5314: mol_type = genomic DNA
aagcgtcggacgcggcccggcgccgagccatggagcctgagccagtggaggactgtgtgcagagcactctcgccgccctgtatccaccctttgaggcaacagcccccaccctgttgggccaggtgttccaggtggtggagaggacttatcgggaggacgcactgaggtacacgctggacttcctggtaccagccaagcacctgcttgccaaggtccagcaggaagcctgtgcccaatacagtggattcctcttcttccatgaggggtggccgctctgcctgcatgaacaggtggtggtgcagctagcagccctaccctggcaactgctgcgcccaggagacttctatctgcaggtggtgccctcagctgcccaagcaccccgactagcactcaagtgtctggcccctgggggtgggcgggtgcaggaggttcctgtgcccaatgaggcttgtgcctacctattcacacctgagtggctacaaggcatcaacaaggaccggccaacaggtcgcctcagtacctgcctactgtctgcgccctctgggattcagcggctgccctgggctgagctcatctgtccacgatttgtgcacaaagagggcctcatggttggacatcagccaagtacactgcccccagaactgccctctggacctccagggcttcccagccctccacttcctgaggaggcgctgggtacccggagtcctggggatgggcacaatgcccctgtggaaggacctgagggcgagtatgtggagctgttagaggtgacgctgcccgtgagggggagcccaacagatgctgaaggctccccaggcctctccagagtccggacggtacccacccgcaagggcgctggagggaagggccgccaccggagacaccgggcgtggatgcaccagaagggcctggggcctcggggccaggatggagcacgcccacccggcgaggggagcagcaccggagcctcccctgagtctcccccaggagctgaggctgtcccagaggcagcagtcttggaggtgtctgagcccccagcagaggctgtgggagaagcctccggatcttgccccctgaggccaggggagcttagaggaggaggaggaggaggccagggggctgaaggaccacctggtacccctcggagaacaggcaaaggaaacagaagaaagaagcgagctgcaggtcgaggggctcttagccgaggaggggacagtgccccactgagccctggggacaaggaagatgccagccaccaagaagcccttggcaatctgccctcaccaagtgagcacaagcttccagaatgccacctggttaaggaggaatatgaaggctcagggaagccagaatctgagccaaaagagctcaaaacagcaggcgagaaagagcctcagctctctgaagcctgtgggcctacagaagagggggccggagagagagagctggaggggccaggcctgctgtgtatggcaggacacacaggcccagaaggccccctgtctgacactccaacacctccgctggagactgtgcaggaaggaaaaggggacaacattccagaagaggcccttgcagtctccgtctctgatcaccctgatgtagcttgggacttgatggcatctggattcctcatcctgacgggaggggtggaccagagtgggcgagctctgctgaccattaccccaccgtgccctcctgaggagcccccaccctcccgagacacgctgaacacaactcttcattacctccactcactgctcaggcctgatctacagacactggggctgtccgtcctgctggaccttcgtcaggcacctccactgcctccagcactcattcctgccttgagccaacttcaggactcaggagatcctccccttgttcagcggctgctgattctcattcatgatgaccttccaactgaactctgtggatttcagggtgctgaggtgctgtcagagaatgatctgaaaagagtggccaagccagaggagctgcagtgggagttaggaggtcacagggacccctctcccagtcactgggtagagatacaccaggaagtggtaaggctatgtcgcctgtgccaaggtgtgctgggctcggtacggcaggccattgaggagctggagggagcagcagagccagaggaagaggaggcagtgggaatgcccaagccactgcagaaggtgctggcagatccccggctgacggcactgcagagggatgggggggccatcctgatgaggctgcgctccactcccagcagcaagctggagggccaaggcccagctacactgtatcaggaagtggacgaggccattcaccagcttgtgcgcctctccaacctgcacgtgcagcagcaagagcagcggcagtgcctgcggcgactccagcaggtgttgcagtggctctcgggcccaggggaggagcagctggcaagctttgctatgcctggggacaccttgtctgccctgcaggagacagagctgcgattccgtgctttcagcgctgaggtccaggagcgcctggcccaggcacgggaggccctggctctggaggagaatgccacctcccagaaggtgctggatatctttgaacagcggctggagcaggttgagagtggcctccatcgggccctgcggctacagcgcttcttccagcaggcacatgaatgggtggatgagggctttgctcggctggcaggagctgggccgggtcgggaggctgtgctggctgcactggccctgcggcgggccccagagcccagtgccggcaccttccaggagatgcgggccctggccctggacctgggcagcccagcagccctgcgagaatggggccgctgccaggcccgctgccaagagctagagaggaggatccagcaacacgtgggagaggaggcgagcccacggggctaccgacgacggcgggcagacggtgccagcagtggaggggcccagtgggggccccgcagcccctcgcccagcctcagctccttgctgctccccagcagccctgggccacggccagccccatcccattgctccctggccccatgtggagaggactatgaggaagagggccctgagctggctccagaagcagagggcaggcccccaagagctgtgctgatccgaggcctggaggtcaccagcactgaggtggtagacaggacgtgctcaccacgggaacacgtgctgctgggccgggctagggggccagacggaccctggggagtaggcaccccccggatggagcgcaagcgaagcatcagtgcccagcagcggctggtgtctgagctgattgcctgtgaacaagattacgtggccaccttgagtgagccagtgccaccccctgggcctgagctgacgcctgaacttcggggcacctgggctgctgccctgagtgcccgggaaaggcttcgcagcttccaccggacacactttctgcgggagcttcagggctgcgccacccaccccctacgcattggggcctgcttccttcgccacggggaccagttcagcctttatgcacagtacgtgaagcaccgacacaaactggagaatggtctggctgcgctcagtcccttaagcaagggctccatggaggctggcccttacctgccccgagccctgcagcagcctctggaacagctgactcggtatgggcggctcctggaggagctcctgagggaagctgggcctgagctcagttctgagtgccgggcccttggggctgctgtacagctgctccgggaacaagaggcccgtggcagagacctgctggccgtggaggcggtgcgtggctgtgagatagatctgaaggagcagggacagctcttgcatcgagaccccttcactgtcatctgtggccgaaagaagtgccttcgccatgtctttctcttcgagcatctcctcctgttcagcaagctcaagggccctgaaggggggtcagagatgtttgtttacaagcaggcctttaagactgctgatatggggctgacagaaaacatcggggacagcggactctgctttgagttgtggtttcggcggcggcgtgcacgagaggcatacactctgcaggcaacctcaccagagatcaaactcaagtggacaagttctattgcccagctgctgtggagacaggcagcccacaacaaggagctccgagtgcagcagatggtgtccatgggcattgggaataaacccttcctggacatcaaagcccttggggagcggacgctgagtgccctgctcactggaagagccccagaaacacttgactcttctggagatgtgtccccaggaccaagaaacagccccagcctgcaacccccccaccctgggagcagcactcccaccctggccagtcgagggatcttagggctatcccgacagagtcatgctcgagccctgagtgaccccaccacgcctctgtgacctggagaagatccagaacttgcgtgcagcttctcctctcagcacactttgggctgggatggcagtggggcataatggagccctgggcgatcgctgaatttcttccctctgcttcctggacacagaggaggtctaacgaccagagtattgccctgccaccactatctctagtctccctagcttggtgccttctcctgcaggagtcagagcagccacattgcttgccttcataccctggaggtggggaagttatccctcttccggtgctttcccatcctgggccactgtatccaggacatcactcccatgccagccctccctggcagcccatgttctcctcttttctcaccccctgactttccctgagaagaatcatctctgccaggtcaactggagtccctggtgactccattctgaggtgtcacaagcaatgaagctatgcaaacaataggagggtgtgacaggggaaccgtagactttatatatgtaattactgttattataatactattgttatattaaatgtatttactcacactttgcctctaaggagctagagtagtcctctggattaaggtgataaataacttgagcactttccctcaaccagcccttaactagaacacagaaaataaaaccaagactggaaggtcccctctacccctcccaggcccagagctagctgactgtgtatgagcctgggagaatgtgtctcctccacagtggctcccagaggttccacacactctctgaagctccttctcccacactgcacctactccttgaggctgaactggtcacagacaaactgggatccagcacagtccagcagttctcaaaatgaggtcctcaggccacagtgcgtgaga

SEQ ID NO: 667 - DNA, 5919 bp, Homo sapiens
  source 1..5919: mol_type = genomic DNA
gagccgccaccgcggccggagctgtcccttagccagacccggcgagacacgagcggcgggagggaggcggtggcgcgcccggccccgcccgcccgaccaagcgtcggacgcggcccggcgccgagccatggagcctgagccagtggaggactgtgtgcagagcactctcgccgccctgtatccaccctttgaggcaacagcccccaccctgttgggccaggtgttccaggtggtggagaggacttatcgggaggacgcactgaggtacacgctggacttcctggtaccagccaagcacctgcttgccaaggtccagcaggaagcctgtgcccaatacagtggattcctcttcttccatgaggggtggccgctctgcctgcatgaacaggtggtggtgcagctagcagccctaccctggcaactgctgcgcccaggagacttctatctgcaggtggtgccctcagctgcccaagcaccccgactagcactcaagtgtctggcccctgggggtgggcgggtgcaggaggttcctgtgcccaatgaggcttgtgcctacctattcacacctgagtggctacaaggcatcaacaaggaccggccaacaggtcgcctcagtacctgcctactgtctgcgccctctgggattcagcggctgccctgggctgagctcatctgtccacgatttgtgcacaaagagggcctcatggttggacatcagccaagtacactgcccccagaactgccctctggacctccagggcttcccagccctccacttcctgaggaggcgctgggtacccggagtcctggggatgggcacaatgcccctgtggaaggacctgagggcgagtatgtggagctgttagaggtgacgctgcccgtgagggggagcccaacagatgctgaaggctccccaggcctctccagagtccggacggtacccacccgcaagggcgctggagggaagggccgccaccggagacaccgggcgtggatgcaccagaagggcctggggcctcggggccaggatggagcacgcccacccggcgaggggagcagcaccggagcctcccctgagtctcccccaggagctgaggctgtcccagaggcagcagtcttggaggtgtctgagcccccagcagaggctgtgggagaagcctccggatcttgccccctgaggccaggggagcttagaggaggaggaggaggaggccagggggctgaaggaccacctggtacccctcggagaacaggcaaaggaaacagaagaaagaagcgagctgcaggtcgaggggctcttagccgaggaggggacagtgccccactgagccctggggacaaggaagatgccagccaccaagaagcccttggcaatctgccctcaccaagtgagcacaagcttccagaatgccacctggttaaggaggaatatgaaggctcagggaagccagaatctgagccaaaagagctcaaaacagcaggcgagaaagagcctcagctctctgaagcctgtgggcctacagaagagggggccggagagagagagctggaggggccaggcctgctgtgtatggcaggacacacaggcccagaaggccccctgtctgacactccaacacctccgctggagactgtgcaggaaggaaaaggggacaacattccagaagaggcccttgcagtctccgtctctgatcaccctgatgtagcttgggacttgatggcatctggattcctcatcctgacgggaggggtggaccagagtgggcgagctctgctgaccattaccccaccgtgccctcctgaggagcccccaccctcccgagacacgctgaacacaactcttcattacctccactcactgctcaggcctgatctacagacactggggctgtccgtcctgctggaccttcgtcaggcacctccactgcctccagcactcattcctgccttgagccaacttcaggactcaggagatcctccccttgttcagcggctgctgattctcattcatgatgaccttccaactgaactctgtggatttcagggtgctgaggtgctgtcagagaatgatctgaaaagagtggccaagccagaggagctgcagtgggagttaggaggtcacagggacccctctcccagtcactgggtagagatacaccaggaagtggtaaggctatgtcgcctgtgccaaggtgtgctgggctcggtacggcaggccattgaggagctggagggagcagcagagccagaggaagaggaggcagtgggaatgcccaagccactgcagaaggtgctggcagatccccggctgacggcactgcagagggatgggggggccatcctgatgaggctgcgctccactcccagcagcaagctggagggccaaggcccagctacactgtatcaggaagtggacgaggccattcaccagcttgtgcgcctctccaacctgcacgtgcagcagcaagagcagcggcagtgcctgcggcgactccagcaggtgttgcagtggctctcgggcccaggggaggagcagctggcaagctttgctatgcctggggacaccttgtctgccctgcaggagacagagctgcgattccgtgctttcagcgctgaggtccaggagcgcctggcccaggcacgggaggccctggctctggaggagaatgccacctcccagaaggtgctggatatctttgaacagcggctggagcaggttgagagtggcctccatcgggccctgcggctacagcgcttcttccagcaggcacatgaatgggtggatgagggctttgctcggctggcaggagctgggccgggtcgggaggctgtgctggctgcactggccctgcggcgggccccagagcccagtgccggcaccttccaggagatgcgggccctggccctggacctgggcagcccagcagccctgcgagaatggggccgctgccaggcccgctgccaagagctagagaggaggatccagcaacacgtgggagaggaggcgagcccacggggctaccgacgacggcgggcagacggtgccagcagtggaggggcccagtgggggccccgcagcccctcgcccagcctcagctccttgctgctccccagcagccctgggccacggccagccccatcccattgctccctggccccatgtggagaggactatgaggaagagggccctgagctggctccagaagcagagggcaggcccccaagagctgtgctgatccgaggcctggaggtcaccagcactgaggtggtagacaggacgtgctcaccacgggaacacgtgctgctgggccgggctagggggccagacggaccctggggagtaggcaccccccggatggagcgcaagcgaagcatcagtgcccagcagcggctggtgtctgagctgattgcctgtgaacaagattacgtggccaccttgagtgagccagtgccaccccctgggcctgagctgacgcctgaacttcggggcacctgggctgctgccctgagtgcccgggaaaggcttcgcagcttccaccggacacactttctgcgggagcttcagggctgcgccacccaccccctacgcattggggcctgcttccttcgccacggggaccagttcagcctttatgcacagtacgtgaagcaccgacacaaactggagaatggtctggctgcgctcagtcccttaagcaagggctccatggaggctggcccttacctgccccgagccctgcagcagcctctggaacagctgactcggtatgggcggctcctggaggagctcctgagggaagctgggcctgagctcagttctgagtgccgggcccttggggctgctgtacagctgctccgggaacaagaggcccgtggcagagacctgctggccgtggaggcggtgcgtggctgtgagatagatctgaaggagcagggacagctcttgcatcgagaccccttcactgtcatctgtggccgaaagaagtgccttcgccatgtctttctcttcgagcatctcctcctgttcagcaagctcaagggccctgaaggggggtcagagatgtttgtttacaagcaggcctttaagactgctgatatggggctgacagaaaacatcggggacagcggactctgctttgagttgtggtttcggcggcggcgtgcacgagaggcatacactctgcaggcaacctcaccagagatcaaactcaagtggacaagttctattgcccagctgctgtggagacaggcagcccacaacaaggagctccgagtgcagcagatggtgtccatgggcattgggaataaacccttcctggacatcaaagcccttggggagcggacgctgagtgccctgctcactggaagagccgcccgcacccgggcctccgtggccgtgtcatcctttgagcatgccggcccctcccttcccggcctttcgccgggagcctgctccctgcctgcccgcgtcgaggaggaggcctgggatctggacgtcaagcaaatttccctggccccagaaacacttgactcttctggagatgtgtccccaggaccaagaaacagccccagcctgcaacccccccaccctgggagcagcactcccaccctggccagtcgagggatcttagggctatcccgacagagtcatgctcgagccctgagtgaccccaccacgcctctgtgacctggagaagatccagaacttgcgtgcagcttctcctctcagcacactttgggctgggatggcagtggggcataatggagccctgggcgatcgctgaatttcttccctctgcttcctggacacagaggaggtctaacgaccagagtattgccctgccaccactatctctagtctccctagcttggtgccttctcctgcaggagtcagagcagccacattgcttgccttcataccctggaggtggggaagttatccctcttccggtgctttcccatcctgggccactgtatccaggacatcactcccatgccagccctccctggcagcccatgttctcctcttttctcaccccctgactttccctgagaagaatcatctctgccaggtcaactggagtccctggtgactccattctgaggtgtcacaagcaatgaagctatgcaaacaataggagggtgtgacaggggaaccgtagactttatatatgtaattactgttattataatactattgttatattaaatgtatttactcacactttgcctctaaggagctagagtagtcctctggattaaggtgataaataacttgagcactttccctcaaccagcccttaactagaacacagaaaataaaaccaagactggaaggtcccctctacccctcccaggcccagagctagctgactgtgtatgagcctgggagaatgtgtctcctccacagtggctcccagaggttccacacactctctgaagctccttctcccacactgcacctactccttgaggctgaactggtcacagacaaactgggatccagcacagtccagcagttctcaaaatgaggtcctcaggccacagtgcgtgagaacttgcttggctgtttgttaaatgctaattcttgggccccatcagagctactgcatcgaaacctgggggtaaaacccaatattctgcatttcttatcaaactctttgggtgataactaagtgtctgaagaggtgactatttcctgacagaaggacccaaagagggaagcaggacataggtaggcagacagacacagggccctgtgcctcaagacacctgtttattggggacacgactctgcaatagggatgacaggaatcgtaccaaaaatagcgacgtctacagggcccctgatggggctagaagggtacagtgccccccaccctcaccccttgtacaaaaataaactctcacgcctatgga

SEQ ID NO: 668 - DNA, 3389 bp, Homo sapiens
  source 1..3389: mol_type = genomic DNA
cttctcttgtgtaatcagctgcctatttggaaattgggcagggtttgcgactggatgctaatgtcactgactagttttcagcctaccatccagaagtaacatgttcccagctttggaaacgcacctaaagcagactattcctgatccttatgaagactttatgtaccgtcacctccaatattatggctactttaaagctcagagaggcagtttaccaaactctgctacgcatcagcatgttcggaagaataaccctcaatgcctgttgaatggctctcttggggaaaaagatgatttgataccagacaccctgcaaaaggagaagcttctatggcctatcagtttatcttcagctgtgcacagacagatagaagccatcaacagagactttcactcttgcctgggctggatgcagtggcgcggcctcagctcactgcaacctccacctcccagattcaaggattctcctgcctcagctttccgagtagctgggattacagattcacatatgctgagtttaccacatcttaggagcagacagcttctttatgatgagttggatgaagtaaacccacgtcttcgagaaccccaagagctcttttccattttgtctaccaagaggccactgcaggctccaagatggccaattgaatgtgaggtcatcaaggaaaacatccatcatattgagtgggctccacctcaaccagaatatttctatcagcctaaaggaaatgaaaaggtaccagagattgtaggagagaaaaaaggaacagttgtctatcaattagattcagtgcctatagaaggttcctattttaccagttccagagtgggaggcaaacgaggaattgtcaaggaacttgctgtcacgttgcaaggaccagaagataatactctactgtttgaatcaaggtttgagagtgggaatctgcaaaaagctgtcagagtagacacctatgagtatgaactcaccttgcgaactgacctctacactaacaaacacactcagtggttttattttcgtgttcagaacaccagaaaagatgctacctatcgcttcaccattgtcaacttgctaaaacccaagagtctttatactgtagggatgaagccactcttgtactcccaattggatgccaacacccgcaatattggctggaggagagaaggaaatgaaatcaagtactacaagaacaacacggatgatgggcagcagcccttctactgtctcacgtggaccattcagtttccatatgaccaggacacttgcttctttgcacacttctacccatatacatacactgatttgcaatgctacctcctgtcagtggcaaacaaccctatccagtctcagttctgcaagctccaaactttatgcaggagcctagcaggaaataccgtttacttgctcaccatcaccaacccatcccagacccctcaagaggcagctgcaaagaaagctgtggtcttgagtgccagagttcaccctggagaaagtaatggctcctgggttatgaaaggctttttggacttcatccttagcaactccccagatgcccagctcctcagagatatttttgtcttcaaggtgcttcccatgttaaatccagatggtgtgattgtggggaattatcggtgttccttggccggaagggatttgaacaggcattataaaaccattctgaaggagtctttcccttgtatttggtacaccaggaacatgatcaaaagacttcttgaagaaagagaggttctgttgtattgtgatttccatggccacagtcgtaagaataatatcttcctgtatggctgtaataacaacaatcgcaaatactggcttcatgaacgagtctttcctttaatgttatgcaaaaatgcaccagataagttctcttttcacagttgtaattttaaggtccaaaaatgcaaagaaggaacaggacgagttgttatgtggcggatgggaatcctaaacagctacaccatggagtctacctttggcgggtccaccctgggtaataaaagagacacccactttaccatcgaagatctgaagtccttaggttatcatgtctgtgacacccttctggacttttgtgatcctgaccaaatgaagttcactcagtgtctagcagagcttaaggagcttttacgacaggaaatccacaagaaattccatgaacttggacaagatgtagatttagaaggaagttggagtgacatctctttgtctgacattgaatccagcaccagtggctctgacagttctctctcagatggtcttcctgttcacctagcaaacatagcagatgagctgactcagaaaaagaagatgtttaagaagaaaaaaaagaagtcacttcagactaggaaacagcgaaatgagcagtatcagaaaaaaaatttgatgcagaagttaaagttaacagaagatacctcagaaaaggcaggatttgcttctactctgcaaaagcagccaacctttttcaaaaactcagagaattccagttttttaccaatgaaaaatgaaaacccaaggttaaatgagacaaatttaaatagaagagacaaagacacccccctggacccatcaatggccaccctgattctgcctaagaataaagggagaatgcagaataagaagccaggctttacagtatcatgctctccaaagagaaccataaactccagccaagagccagctccaggtatgaagccaaactggcctaggagcagatatcctgccacaaagagaggctgtgctgccatggcggcatacccatccttgcacatatacacatacccgtaggtgagcctgggctgtgccacacaagcacttcatcgggggttttgagattagacacattttataatgggggagatgtatgactgggaactgcatttacttgtggtatactgtgttgtgcactcatgcactgaccttacactttgtacttacactgtgggcatgtggtcaagatgcatacctcatgaattcaactattttttcataaaatgaaattttattatgatgtgtaaaaatgctttatcagaaactgaagtgtgttctcatggcacacttcatggcagcacagatatacctcattttaaccaatagatattctctctaaaattatgtgcaaatcaatttttaaaaatcaaaatctatgttaaacacattttggcagtgtgctataataaaaaaaagtgttgtgtcaaagctttctagtgacggtcagtcctactgctgtatgtcaggtttgctcacaatgaggtattcccacatagaaataacaatgcatgtattacccagaatttaatgttgcgtaccttatgttcaatgaggttttgtaatttttttaggctgatgattaaaattctttctctct

SEQ ID NO: 669 - DNA, 4334 bp, Homo sapiens
  source 1..4334: mol_type = genomic DNA
gtcggtgcctgcagggctctccgtggccgctcgggagaggtgctcttcgctcaggctcccccggagacttgagggggtgcgcgctggcgtgcatggggcctgttctgtccttggtttggggatgctcctaaggggggagaaagggatacctcgggtgcttggaggtcgagagacggatacgtaagtgcgcaagggccactgattagggcacgggaagggctcgctagaatgagctcttaaactggttgggtgtaagcggttttgggctagtctaaaccaaacaactgagaataaacgcggggttcctgcaggttgagagagtacctgtctgcaaatgtccagtagtgatggattgccttgtaggccccagagcaatcggggaagttagcattcttgttcaagaagctgctggttcacttagagctataaaagaatgttgtgagtttggattttcttccaaacgttcaggattgaggttagggctggtggtgagggatcatgtaaagaggtttgagtggctcagccttaggtcccggtgtggaaagcttattcttttggtgtcatcacgtggccgtgggaattatttagaatgtgatctgccctcatgagaagaaaggagctctgaagccgttgcagttcttcctccctatgtggaaaatcgaatttctggaaacatcctccgtattgggagattttgcctatgtaaaggctatccttattggctagcggcactaattactttaaaagtaggatggaagtacaagtatctcaagcatcattgggtttcgagctcacttctgtggaaaagagtttaagggagtggtctagactttccagggaagttattgcctggctgtgtccctctagtcctaattttatacttaactttcccccacctccttcagcctcatctgtttcaatggtgcaactcttttcatccccttttggttaccagtcaccttcaggccattcagaggaggaaagagaggggaatatgaagtcagccaagccccaagtgaaccacagtcagcatggggaaagccagcgggccttgagccccctgcagtctactctgagttctgctgcatctccttcccaagcgtatgagacctatattgaaaatggactcatatgccttaaacacaaaattagaaacatcgagaaaaagaagctcaaactggaggattataaggatcgcctgaaaagtggagagcatcttaatccagaccagttggaagctgtagagaaatatgaagaagtgctacataatttggaatttgccaaggagcttcaaaaaaccttttctgggttgagcctagatctactaaaagcgcaaaagaaggcccagagaagggagcacatgctaaaacttgaggctgagaagaaaaagcttcgaactatacttcaagttcagtatgtattgcagaacttgacacaggagcacgtacaaaaagacttcaaagggggtttgaatggtgcagtgtatttgccttcaaaagaacttgactacctcattaagttttcaaaactgacctgccctgaaagaaatgaaagtctgagtgttgaagaccagatggagcagtcatccttgtacttttgggaccttttggaaggtagtgagaaagcagtggtaggaacgacatacaaacacttgaaggatctactgtctaaattgctgaactcaggctattttgaaagtatcccagttcccaaaaatgccaaggaaaaggaagtaccactggaggaagaaatgctaatacaatcagagaaaaaaacacaattatcgaagactgaatctgtcaaagagtcagagtctctaatggaatttgcccagccagagatacaaccacaagagtttcttaacagacgctatatgacagaagtagattattcaaacaaacaaggcgaagagcaaccttgggaagcagattatgctagaaaaccaaatctcccaaaacgttgggatatgcttactgaaccagatggtcaagagaagaaacaggagtcctttaagtcctgggaggcttctggtaagcaccaggaggtatccaagcctgcagtttccttagaacagaggaaacaagacacctcaaaactcaggtctactctgccggaagagcagaagaagcaggagatctccaaatccaagccatctcctagccagtggaagcaagatacacctaaatccaaagcagggtatgttcaagaggaacaaaagaaacaggagacaccaaagctgtggccagttcagctgcagaaagaacaagatccaaagaagcaaactccaaagtcttggacaccttccatgcagagcgaacagaacaccaccaagtcatggaccactcccatgtgtgaagaacaggattcaaaacagccagagactccaaaatcctgggaaaacaatgttgagagtcaaaaacactctttaacatcacagtcacagatttctccaaagtcctggggagtagctacagcaagcctcataccaaatgaccagctgctgcccaggaagttgaacacagaacccaaagatgtgcctaagcctgtgcatcagcctgtaggttcttcctctacccttccgaaggatccagtattgaggaaagaaaaactgcaggatctgatgactcagattcaaggaacttgtaactttatgcaagagtctgttcttgactttgacaaaccttcaagtgcaattccaacgtcacaaccgccttcagctactccaggtagccccgtagcatctaaagaacaaaatctgtccagtcaaagtgattttcttcaagagccgttacaggctacttcttctccagttacttgtagctcaaatgcttgcttggttactaccgatcaggcttcttctggatctgaaacagagtttatgacctcagagactcctgaggtatttaacgttaatgcacctctgcctccacgaaaagaacaagaaataaaagaatccccttattcacctggctacaatcaaagttttaccacagcaagtacacaaacaccaccccagtgccaactgccatctatacatgtagaacaaactgtccattctcaagagactgcaaattatcatcctgatggaactattcaagtaagcaatggtagccttgccttttacccagcacagacgaatgtgtttcccagacctactcagccatttgtcaatagccggggatctgttagaggatgtactcgtggtgggagattaataaccaattcctatcggtcccctggtggttataaaggttttgatacttatagaggactcccttcaatttccaatggaaattatagccagctgcagttccaagctagagagtattctggagcaccttattcccaaagggataatttccagcagtgttataagcgaggagggacatctggtggtccacgagcaaattcgagagcagggtggagtgattcttctcaggtgagcagcccagaaagagacaacgaaacctttaacagtggtgactctggacaaggagactcccgtagcatgacccctgtggatgtgccagtgacaaatccagcagccaccatactgccagtacacgtctaccctctgcctcagcagatgcgagttgccttctcagcagccagaacctctaatctggcccctggaactttagaccaacctattgtgtttgatcttcttctgaacaacttaggagaaacttttgatcttcagcttggtagatttaattgcccagtgaatggcacttacgttttcatttttcacatgctaaagctggcagtgaatgtgccactgtatgtcaacctcatgaagaatgaagaggtcttggtatcagcctatgccaatgatggtgctccagaccatgaaactgctagcaatcatgcaattcttcagctcttccagggagaccagatatggttacgtctgcacaggggagcaatttatggaagtagctggaaatattctacgttttcaggctatcttctttatcaagattgaaagtcagtacagtattgacaataaaaggatggtgttctaattagtgggattgaaggaaaagtagtctttgccctcatgactgattggtttaggaaaatgtttttgttcctagagggaggaggtccttacttttttgttttccttcctgaggtgaaaaatcaagctgaatgacaattagcactaatctggcactttataaattgtgatgtagcctcgctagtcaagctgtgaatgtatattgtttgcacttaatccttaactgtattaacgttcagcttactaaactgactgcctcaagtccaggcaagttacaatgccttgttgtgcctcaataaaaaagttacatgca

SEQ ID NO: 670 - DNA, 2441 bp, Homo sapiens
  source 1..2441: mol_type = genomic DNA
ccctcatgacgtcagatcgcccccgcccgccgcgcagcttccccgagcgagaccaaaacaggtggaatccgggctggagccggagctccggcggcgcgggtggcggcacgtccctccagacagtaccacaggcacctggagtaccggcatcggtcgctgtggcccccgagtgtccgtcagagcctaggggagcctgccctcccgcgcctcgtcggggcccggccaggcaccttggccgccggcgcacggacgcgggcacgagcactagatcacggctgctggacctcggcacgttgacaagatttctctggggtaccgcggaggattactttgaatttcggtggtcgcctgtggtctggcatatttagaacttaagtctattatttcgggcaccatgactttgaggcttttagaagactggtgcagggggatggacatgaaccctcggaaagcgctattgattgccggcatctcccagagctgcagtgtggcagaaatcgaggaggctctgcaggctggtttagctcccttgggggagtacagactgcttggaaggatgttcaggagggatgagaacaggaaagtagccttagtagggcttactgcggagactagtcacgccctggtccctaaggagataccgggaaaagggggtatctggagagtgatctttaagccccctgacccagataatacatttttaagcagattaaatgaatttttagcgggagagggcatgacagtgggtgagttgagcagagctcttggacatgaaaatggctccttagacccagagcagggcatgatcccggaaatgtgggcccctatgttggcacaggcattagaggctcttcagcctgccctgcaatgcttgaagtataaaaagctgagagtgttctcgggcagggagtctccagaaccaggagaagaagaatttggacgctggatgtttcatactactcagatgataaaggcgtggcaggtgccagatgtagagaagagaaggcgattgctagagagccttcgaggcccagcacttgatgttattcgtgtcctcaagataaacaatcctttaattactgtcgatgaatgtctgcaggctcttgaggaggtatttggggttacagataatcctagggagttgcaggtcaaatatctaaccacttaccagaaggatgaggaaaagttgtcggcttatgtactaaggctggagcctttgttacagaagctggtacagagaggagcaattgagagagatgctgtgaatcaggcccgcctagaccaagtcattgctggggcagtccacaaaacaattcgcagagagcttaatctgccagaggatggcccagcccctggtttcttgcagttattggtactaataaaggattatgaggcagctgaggaggaggaggcccttctccaggcaatattggaaggtaatttcacctgagtctcagggaaccacgaagggatatggcaatgagtagagcatgaaggtagaacagtctatatactcttgtgacacatacaatccctaccttgtgctgccaagtaactcatttttgtgcaattctcagtataagccctttgtcgtttctgtgcctatttaaagtctcctaaaggtgtaattgactaggaaggatgtagttctacactgccatttacctatttaaattcatccttgtgaatatctttgttgttgttgttgagacagagtctcgctctgtcacccaggctggagtgcagtggcgtgatcttggctcactgcatcctccgccttccaggtttaagctattctcctgcctcagttgcccgagtagctgggactacaggcatgtgccaccacgcccagctaagttttgcattatcagtagagacggggtttcaccatgttggccaggctagtttcgaactcctgacctcaagtgatccacctgcttcggcctctgaaagtgctgggattacaggcgtgagacactgcgcccagcctcatccctgtgaatttcttattgtacacaagttctttcactatctgtgtgcagtgctctgaggggacagacaaggcttgggtgtatatgccaaccagatctcattgaagtatcagcttgtttggtactaggtgcaagtgtagcatgtcacatgtgaccatgttggatcattgacaatttttaggtatgtactgacctacatttatgatgaagatcctgagcggaggttaagatattaagttattttccatatgaatcagaattatattgattctgtgcaatcaaaacaaaaggcagaatagaatgctgagattggttaagtttgcaatgaccatcttgaaccacagatttctgctatgtgtcatcaaaacatctagttctgagtaacattttcacgattgttataaaattataggtgtgaacttctaaaataaaggaatgctaataaaatga

SEQ ID NO: 671 - DNA, 3199 bp, Homo sapiens
  source 1..3199: mol_type = genomic DNA
gtgctcgcgccaacccctacgccccagcgcgccttctccacccacgcacgggcctcggacgcatttccagccccggcgttggttgtggatgctggacatccaccgcctccaggcagtttcgccgtcacaccgtcgccatctgtagccaaagcaaaacatatcctaactgagactttgcagctcttgtggccactctgggctcaccgggaacatgagtggaagagcccgagtgaaggccagaggcatcgcccgcagccccagtgccacagaagtggggcgcatccaagcctcgccattgcctagatctgttgatcttagtaacaatgaagcatcctctagcaatggcttcttgggaacaagcaggatctcaaccaacgataaatatgggatatcttctggtgatgctggaagtaccttcatggaaagaggtgtgaaaaacaaacaggactttatggatttgagtatctgtaccagagaaaaattggcacatgtgagaaattgtaaaacaggttccagtggaatacctgtgaaactggttacaaacctctttaacttagattttccccaagactggcagctataccagtaccatgtgacatatattccagatttagcatctagaaggctgagaattgctttactttatagtcatagtgaactttccaacaaagcaaaagcattcgacggtgccatcctttttctgtcacaaaagctagaagaaaaggtcacagagttgtcaagtgaaactcaaagaggtgagactataaagatgactatcaccctgaagagggagctgccatcaagttctcccgtgtgcatccaggtcttcaatatcatcttcagaaagatcctcaaaaagttgtccatgtaccaaattggacggaacttctataatccttcagagccaatggaaattccccagcacaaattatccctttggcctgggtttgccatttctgtgtcatattttgaaaggaagctcctgtttagtgctgatgtgagttacaaagtcctccggaatgagacggttctggaattcatgactgctctctgtcaaagaactggcttgtcctgtttcacccagacgtgtgagaagcagctaatagggctcattgtccttacaagatacaataacagaacctactccattgatgacattgactggtcagtgaagcccacacacacctttcagaagcgggatggcaccgagatcacctatgtggattactacaagcagcagtatgatattactgtatcggacctgaatcagcccatgcttgttagtctgttaaagaagaagagaaatgacaacagtgaggctcagctcgcccacctgatacctgagctctgctttctaacagggctgactgaccaggcaacatctgatttccagctgatgaaggctgtggctgaaaagacacgtctcagtccttcaggccggcagcagcgcctggccaggcttgtggacaacatccagaggaataccaatgctcgctttgaactagagacctggggactgcattttggaagccagatatctctgactggccggattgtgccttcagaaaaaatattaatgcaagaccacatatgtcaacctgtgtctgctgctgactggtccaaggatattcgaacttgcaagattttaaatgcacagtctttgaatacctggttgattttatgtagcgacagaactgaatatgttgccgagagctttctgaactgcttgagaagagttgcaggttccatgggatttaatgtggactaccccaaaatcataaaagtacaagaaaatccagctgcatttgttagagctatacagcaatatgttgatcctgatgttcagctggtaatgtgcattctgccttctaatcagaagacctattatgattccattaaaaaatatttgagctcagactgcccagtcccaagccaatgtgtgcttgctcggaccttgaataaacagggcatgatgatgagtatcgccaccaagatcgctatgcagatgacttgcaagctcggaggcgagctgtgggctgtggaaatacctttaaagtccctgatggtggtcggtattgatgtctgtaaagatgcactcagcaaggacgtgatggttgttggatgcgtggccagtgttaaccccagaatcaccaggtggttttcccgctgtatccttcagagaacaatgactgatgttgcagattgcttgaaagttttcatgactggagcactcaacaaatggtacaagtacaatcatgatttgccagcacggataattgtgtaccgtgctggtgtaggggatggtcagctgaaaacacttattgaatatgaagtcccacagctgctgagcagtgtggcagaatccagctcaaataccagctcaagactgtcggtgattgtggtcaggaagaagtgcatgccacgattctttaccgaaatgaaccgcactgtacagaaccccccacttggcactgttgtggattcagaagcaacacgtaacgaatggtatgacttttatctgatcagccaggtggcctgccggggaactgttagtcctacctactataatgtcatctatgatgacaacggcttgaagcccgaccatatgcagagacttacattcaaattgtgccacctgtactacaactggccgggcatagtcagtgtcccagcaccatgtcagtatgctcacaagctgacctttctggtggcacaaagcattcataaagaacccagtctggaattagccaaccatctcttctacctgtgatggcatgaactactggcatcactagatggacaatccaagaagaaattggtatactttgtgcaaatctgccataagctcaaggctgtgactggggaaaaagattgagcttagttttcatgtctaggaaaaaaagcaaaacaacttaatctgaaacagttttaaaaaatgtgtgttattttgttttaaagagttgtatgcttggggtaaattttcattgtcatatgtggaatttaaatataccatcatctacaaagaattccacagagttaaatatcttaagttaaacacttaaaataagtgtttgcgtgatattttgatgacagataaacagagtctaattcccaccccaaattttgctgaggttttcttaatgttgtagagcattttgtagagtggtttaaatagttgaaaataaagttcagaacatca

SEQ ID NO: 672 - DNA, 8628 bp, Homo sapiens
  source 1..8628: mol_type = genomic DNA
gtgctgtggcggcggcggcggcggtagtggcggcggcggcggtgcctgggcggcagcagcagcagtagcggcagccctgaggacggtgagacggccgcggcggcggcgacagcgcggaagtcgcgcgggacccagagcttcccccctgtcgctagtgctgaggctttcgcctttcctacccagcttcttgctcacggcccgggctgggctgggcagggcaacgcgcccccggggaggggcggagctgtagatatggtgtaagatacttcttcaagattggacagctggggaccttcttctgattaaccttaaaccaacttgtagccatagagacacctcacaaggttcccatttttgttgttgttgttgttgattttctgctcacacctttcctgaccttgcaaccatgtatggaagtgcccgctctgttgggaaggtggagccgagcagccagagccctgggcgttcacccaggcttccacgttcccctcgcttgggtcaccgtcgaaccaacagtacgggagggagttcgggaagcagtgttggaggtggcagtgggaaaaccctttcaatggaaaatatacaatctttaaatgctgcctatgccacctctggccctatgtatctaagtgaccatgaaaatgtgggttcagaaacacctaaaagcaccatgacacttggccgttctgggggacgtctgccttacggtgttcggatgactgctatgggtagtagccccaatatagctagcagtggggttgctagtgacaccatagcatttggagagcatcacctccctcctgtgagtatggcatccactgtacctcactcccttcgtcaggcgagagataacacaatcatggatctgcagacacagctgaaggaagtattaagagaaaatgatctcttgcggaaggatgtggaagtaaaggagagcaaattgagttcttcaatgaatagcatcaagaccttctggagcccagagctgaagaaggaacgagccctgagaaaagatgaagcttccaaaatcaccatttggaaggaacagtacagagttgtacaggaggaaaaccaggtggatgctctccgattgcgtttggaagagaaggaaaccatgttgaataaaaagacaaaacaaattcaggatatggctgaagagaaggggacacaagctggagagatacatgacctcaaggacatgttggatgtgaaggagcggaaggttaatgttcttcagaagaagattgaaaatcttcaagagcagcttagagacaaggaaaagcagatgagcagcttgaaagaacgggtcaaatccttgcaggctgacaccaccaacactgacactgccttgacaactttggaggaggcccttgcagagaaagagcggacaattgaacgcttaaaggagcagagggacagagatgagcgagagaagcaagaggaaattgataactacaaaaaagatcttaaagacttgaaggaaaaagtcagcctgttgcaaggcgacctttcagagaaagaggcttcacttttggatctgaaagagcatgcttcttctctggcatcctcaggactgaaaaaggactcacggcttaagacactagagattgctttggagcagaagaaggaggagtgtctgaaaatggaatcacaattgaaaaaggcacatgaggcagcattggaagccagagccagtccagagatgagtgaccgaatacagcacttggagagagagatcaccaggtacaaagatgaatctagcaaggcccaggcagaagttgatcgactcttagaaatcttgaaggaggtggaaaatgagaagaatgacaaagataagaagatagctgagttggaaagccttttttctaggcaagtgaaagaccagaataagaaggtagcaaatctgaagcacaaggaacaggtggaaaaaaagaagagtgcacaaatgttagaggaggcgcgacgacgggaggacaatctcaacgacagctctcagcagctacaggacagtctccgtaagaaggatgacaggattgaagagctggaagaagcactaagagaaagtgtacagataactgcagagcgggaaatggtgctagcacaagaggaatcagccaggaccaatgctgaaaaacaggtggaggagttactgatggccatggagaaggtaaagcaggaactagaatccatgaaagcaaagctgtcctccacccagcagtctctggcagaaaaggaaactcacttgactaatcttcgggcagagagaaggaaacacttagaggaagttctggagatgaagcaagaagctcttctggctgccattagtgaaaaagacgccaatatagctctcttggagctttcgtcctctaagaagaagacccaagaggaagtggctgccctgaagcgggagaaggatcgtctggtacagcagcttaagcagcagacgcaaaatcgaatgaagctaatggccgacaactacgaggatgaccacttcaaatcctcccattccaatcaaacaaatcacaagccctccccagaccaggatgaggaggagggtatatgggcatagccaatcagaggcttagttcagccattttgttcagaacgatcatccagcccctcttagaacttgaccaaaatagaagtaaattaaagttgtacattggacacctgacaaccctctgccatgaccgagaccccctgatcctccgtggactcactccaccagcttcctataacttggacgatgaccaggcggcttgggagaatgagctgcagaagatgacccgggggcagcttcaggatgagttagagaaaggtgaacgggacaatgcagaactgcaggagtttgccaacgccattcttcagcagatagcagaccattgtcccgacatcctagagcaagtggtcaacgccctggaagagtcctcttgaccctgctttatggggaagcctgaggtagtcaacccaggagccaagaaaagagaactacgaggaacaggtgcccggaaccttcttggcaccaaacactacaaacttcatcccaacttgctcacttgaagaagtgtgattccagcaccgtttctacatctgccatcttactctgcctttctgctttggatgtggtctctacactaaccttcttgatgtccagggtagataaagggtcgaatctctctgaagaactgccacctggtcatcagcagtggagaactgtgggagctggtggctctgccctgacagagagccatggagcagaggagcctctcacctcctgtcctctgacatgagaatgaaaccaggaatggacttggagttcaacaggctgagaggatgcctccaatggaccagagagctgagtgttctaatatcacaataggtgctttctcctaaaagggcaaaaaacaatctcaaaaagattagaaaaagagaaggggggaagggaagagaaaatcgactcttctttttactgtctcttctgcttactttccacatgagatgctttgtaccggggagctgtgagcaggcctcacgatggcttgggagcactcgttctcccaaggtctgagtcttcatccagccctgcctgtctgtcgcagccttcctcactctgttcctcggccagttaacaagaagatggtgtgaggtgttctccaccagtctctcctgtttgagactgttgacgttatcatactgaggtgttagatcaaatatctctaattgaagaacatgtgaggttgaaagagcaccagccagggcaacatagcgtgaccctgtctctacaaaaaattaaaaagagaacatacaaagttgacatatgagaccctgttgtccccgcctgcagctttgccccagtaacagatgcccgttgctcttgggctggtttcccctgaacacctccaagaggctgcctgccttgccagcacccgtgtcctgagctcctgcagcccagtggctgctgaagttgtgatccctcactcaccctgctagctttgcccttgactcgtcttctctgaacctcagcctcgtgcattgcctggaaccttcttctagcataaatgaaggtttttcctcctacacacattccttcctcggttatttcattcagagaatatttatgaaatgcctactgtgtgcaagtcatccatccttgaaaaggccacttctcagtgagggagagatgtagtggattctgtgagacatacctgctggagttgaagcagtaaatagcatgtccttcccctccccgatcttaaggtgtgttttctagaaaagttccctaatggaattcatgagtttgggggtctcagtcacccgcttgcctgtaggattccatttgatgattctggatttttgctgtttgttattgcccttagaggggctctgagtatctacttgtgggtggccatttcctgacatctgcatgtacctcgtggaattcagccagcttcatgttgcaaatcagaaagctgaccccaagactgcaaatcaatgaaggtattggcattgttaaggacgtagcgtagacaacagcagtcataaataattaggcaggaacttaacccaaatctagttctttgaccacctctaccaccagaacccagcagacactcacatctcctgataagagttgctggactcgatgtttttgttttgcattttctcctctccttccccacttactcagagaatttaaagtctgtagagtcagcacagccccatcagtccaggaacttcccaccaccagcccttgactgtcccattaactgacatggtcagatttccagctccccctactccctgctgtgaaacaatccctctccctgtgagaggaaactgtggagcgtttcttatcgaaggttaaatggactctgctcataaacctcttactgagatgcttcctgatagccaggctggccagagaggggtgcaggggttagatagtaagtggtggtcgtttgtggtcagttacctcaattctgttcattgcagtgcccgtaaaccatgtagaaagctcccagcactgaaaggcaggagtgttagcatctcgctttatccaccataacgtaaagaactgcggtgtgataacagccttcacggggccacggtggaaccaagacagcaggcgaggccatgcctaaacaagtggtctggcacgggcactggccagctgctctctccaagcaggtggcccagatcccacccacgtggactttctcatcaggtgcagcgcctgccactctcagccactgggtgtgtcactctcctcttcatctcagcattctccatcacttcccctccagaaaaacggatggaaggaagccctctgtgacactgcttctgagaagaagcatttccgggaccgatatcatctgtctggtctctgtgaacagcaaggaatcttcttgaccgttcttgggcactggaggctggctaggagttcagtaataaacgtggccttcgtgctgtagggcagagtggatgcagtttgtagctttcagagtgtctcattgagtctagatcattgaaccaacacttaaccaaatgtcccactcccatcacactaggacttgtcattccatgcccctctcctagtggtcatggtttcatatgggcatacaactgctactgaagttatatagccttgaaaactcagtgcaggttgcccttaattttccccaaacccctccatcggcaagtctagttgccctttagcacctaaagatctgcaccccaaaccaatgtcaccataaagagggcacgaagaagagtgggtgtgatcccaacggggttttgtaactgaagaagcccagtgtgagcttctcatcttttcatatacctctaacccccggtactcattgaatcattgatgaggtatctcaattgagatttgcaaggactttgataccatttgaaatggaaaaattttgaacgggctttaacatgtttaagaaatatggatggggccggccacagtggctcacgcctgtaatcccagaactctggaaggctgaggcaggcggatcacctgagatcaggagttcgaggccagcctggccaagatggcaaaaaccccgactctactaaaaatacaaaattagccaggcgtggtggcgtacgcctgtaatcccagctactcaggaggcaggagaatcgcttgagcctgggaggcagaggctgcggtgagccgagatcgtgtcactgcactccagcctgggtgacagagactccatttaaaaaaaaaaaaaaaaaatatatatatatatatatatatatatatatggatgggaatcaccaaattcatctcagctctaaccttttaacctttgtccttgcactttacaatctaaagatctacctgtggctctcagacttcctcacacttgggttttagaaataacttgtaaagcagactggacccaaggccgccttcagtgtcaagaagggcattgtgacttgcccctcaatttctgtccattgaagtctggttttccatgaggaacttgcgggctcacccacccccagagtgagagaagaggaaggcgaagtcatcacagacacggtcttagccacctgctgaactaatccctccgctattgagggtcagggttgtgaggcaaccatcatgtgtcaccccaaaatataaatgtttctgagccgcccatccactggcatttggatttgctgccagagtcctgttcctcccagaaccatcccgccctcctgttgaccatgttacttgagtgtaggcccggtgtcaagaccctcagagtctttgaggaaagagccaagcagagaagaccgctgcgtggagtgtgacaccacatggcatttctcaagcccagcggaccctgtgtcagcaaataccagtaatttaacatctgctcctggcctcctcttcacctgcctgggttcggaactgaggaggaaggatgagaagagactgcaatgcagcaggcaccctctgcagagtgaggccgcccgtccatcactgccagccctgggctgctcaggaggggacgtgaaccactcaaaggaatgtcttaaagaggatctggagtttcccccatgcaaattagggaagaattaggcaagaaaagacatacattacagggaaatccttctgaacaaaatggctgtcttcacctactcttcttgcaagaaaagacatacattacagggaaatccttctgaacaaaatggctatcttcacctactcttcagcaaaaaccgtctccagactttttagtgtcaaaaatgtaaccaactgtctcctgattttttccaatgtgtttggcaagtgctgtggccctgttgtaggtacttctcctgactcttgggggagaagtggttttagggattgatttgggggagcgggtttttgtcccatcccacctcctctcttctttctctgcttgtcgatattgtctgtgtgattcagagaattggggcagttacattgtgtctgttgttgagattattaaaagattaaaacgtagttgtagaaatgaaaaattaaacagctgtgttttaaaaatgcaaaccaatatcttgttaataaaggaattcaagctatggggcagccacactcccctcctcccaggctggcataggtggccctgggctggcggcttaggaagcatggagcacacttagggtagtgcctgcctgggcaagagacacctgccgagcaaaaggaacgagaatctggggctcagagcctcgcagttgtgccaggattttcctatacatgttcaggacctctgggtagaggtttcacagtttgtgaccccataaccaccctcacccgacgtgggttctagctcagtgtgcctaatactgcatggtaacctgggcttgaccctgaagcccctgcctggcaggccacaggacctctcctgcccacttggtgctatctcttccagtgaccacccagcacgggtgagcactggccagcctggagcctgcaatccaggtggaacagactgtcctccatgtcagttccttctggcttcaggccctcaattatttccctttgagcttttttagaccctagatctcctaggcccaggctctctcttgaccccagagaagccactgtcaggaaaggaagtgaaccctactgaagccagagaattcaccccggccaaagcaggccctctgggtccagcccctcattccacaccacgccagtattgcatccatctactgcagctacacatcctgagggcagcaccacccactctggcctgctggcccatcgcaggactagcccaggcacctgccgggcattgcaggatatccagtggggcctgtgactgctccctgatgcgtcagaagagaagtgttgcactttagtggaggagctgaggagcacctgcccccttgtagcttgagttccttttggtaacagtagcagcctccatggtggtgtctgggatgcacgtgcacccgctgccttcagctgtatgtgtgtgttcctgctggagttgtgttactgacaggataatgacattacaaagaaattgtgttatattcaactttgccttgataattattgtaaacactttgttcattttttcttttttattcacaaactaaatccaccaggaaattataaagttattt

SEQ ID NO: 673 - DNA, 4848 bp, Homo sapiens
  source 1..4848: mol_type = genomic DNA
cggtcactccaggctgcctcgctgcgccgctggcggtgggcgtggcgctgccggcggctaggcgcggacgccggaggaggtgtccccgggtttaggggtgttcggccaggggcggggctgccgggcccgggcgactgccggagctgcggaagtcgtggaagcgtcggcgacgcatcgcgcgatggcgcgggcgggacagtgcttgtgaaactgaacacaacaaaagtatggatatgggaaaccaacatccttctattagtaggcttcaggaaatccaaaaggaagtaaaaagtgtagaacagcaagttatcggcttcagtggtctgtcagatgacaagaattacaagaaactggagaggattctaacaaaacagctttttgaaatagactctgtagatactgaaggaaaaggagatattcagcaagctaggaagcgggcagcacaggagacagaacgtcttctcaaagagttggagcagaatgcaaaccacccacaccggattgaaatacagaacatttttgaggaagcccagtccctcgtgagagagaaaattgtgccattttataatggaggcaactgcgtaactgatgagtttgaagaaggcatccaagatatcattctgaggctgacacatgttaaaactggaggaaaaatctccttgcggaaagcaaggtatcacactttaaccaaaatctgtgcggtgcaagagataatcgaagactgcatgaaaaagcagccttccctgccgctttccgaggatgcacatccttccgttgccaaaatcaacttcgtgatgtgtgaggtgaacaaggcccgaggggtcctgattgcacttctgatgggtgtgaacaacaatgagacctgcaggcacttatcctgtgtgctctcggggctgatcgctgacctggatgctctagatgtgtgcggccggacagaaatcagaaattatcggagggaggtagtagaagatatcaacaaattattgaaatatctggatttggaagaggaagcagacacaactaaagcatttgacctgagacagaatcattccattttaaaaatagaaaaggtcctcaagagaatgagagaaataaaaaatgaacttctccaagcacaaaacccttctgaattgtacctgagctccaaaacagaattgcagggtttaattggacagttggatgaggtaagtcttgaaaaaaacccctgcatccgggaagccaggagaagagcagtgatcgaggtgcaaactctgatcacatatattgacttgaaggaggcccttgagaaaagaaagctgtttgcttgtgaggagcacccatcccataaagccgtctggaacgtccttggaaacttgtctgagatccagggagaagttctttcatttgatggaaatcgaaccgataagaactacatccggctggaagagctgctcaccaagcagctgctagccctggatgctgttgatccgcagggagaagagaagtgtaaggctgccaggaaacaagctgtgaggcttgcgcagaatattctcagctatctcgacctgaaatctgatgaatgggagtactgaaataccagagatctcacttttgatactgttttgcacttcatatgtgcttctatgtatagagagctttcagttcattgatttatacgtgcatatttcagtctcagtatttatgattgaagcaaattctattcagtatctgctgcttttgatgttgcaagacaaatatcattacagcacgttaacttttccattcggatcattatctgtatgatgtggtgtggtttgtttggtttgtccttttttttgcgtttttaatcagaaaacaaaatagaggcagcttttgtagattttaaatgggttgtgcaagcattaaaatgcaggtctttcagaatctagaactaggcataaccttacataatactaggaaaattatgagaaaggggaaatttttggttaaataagagtaaggttcaaacacaagcagtacatgttctgtttcattatgctcgatagaaggcttttttttcacttataaggcctgattggtcctacccagcttaacggggtggggtttttttgtttgttcagacagtctgttcttttgtaaacatttttagttggaaaaacagcatctgcattttccccatcctctacgttttagagaggaatcttgtttttgtgtgcaacataagaaaattatgaaaactaatagccaaaaaacctttgagattgcattaaagagaagggataaaggaccagcaataataccttgtaagttgcttttgtttgtaaaatctgagcttatagttttccttagtgagtaaattcataaggatgggaacatttaaattaagttaatgggcctttaaaaaaaaaaaaaggaaacactcatacctgtagttggaggatgaatactggagacgggttaccaatgtcaggttatactaaaactaaatcagaaagtctgaatgtagcacataatggttctcttctgttgtccaaggctgtaaaatggacagccttgtcacacctccccggtgctgttttacaacgtgagggtagacgctgtcagtaacccagagggaccaggccttcctaggttttctaggcagtcagctgttaaccactcacttagtaaatgtcataactacacctgctccaggaccaatcagtgaaacctgctcggaattaaaggcttcctctgggtgcctgctgaacaactgagctcatgtcatgggcatgtggtggtttctctgttgcctgaaagagccattaaagtcagtcgtgcgtgaagcatctctcttctaaaggatgtgtatttccataaatgctttctgaggatccggtacaaaatgatttcccaaagttctgaagtgccttgagaacatgtgggtccgagtgttataacagactcctcccccgggtcaccttttgcctggtcatcctgttagagtacatctttggaaatccagggtaatattctctttcagagatgctcattgtgtaactctgtgtagggagatagtcactttaaacagctcaaagtagctagctaaaggagtagccttaaatacctaaaagatgacagaagcatagcccttaacaaatcttcagcttgtctctcagtatttcccaatcatgaaaatcccttgctatgtctttcctactagaaatgttctagaatcgctggacggtggggtcagagggcagtcggtatttaggccgtgagcttcccatactactgcaggtccaactcctggcaaccgcgggctcaaggcaggtcattggaatccacgttttggccacagtagttgtaggattgcttttctgtatcataattttagaatgctcttaaaatcttgaggaagagtttttattttttatttatttttgagatggagtctctgttgcccaggctgcagtgcagtggtgccatctcagctcactgcaacctccacctcccaggttcaagcgattctcctgcctcagccacctgagtagctgggagtacaggcatgtggcaccatgcctggctaatttttgtatttttaatagagttgagatttcaccatgatggtcaggctggtctcgaactcctgacctcgtgatccgcccgcctcggccccccaaagtgctgggattaacgggtgtgagccacggcgcccagcccaggaagagtttttaaattagagctctgtttaattataccactgggaaatcatggttacgcttcaggcatattcttccccagagtactacttacattttaaatttcattttgtaaagttaaatgtcagcattccctttaaaagtgtccattgttctttgaaagtagacgtttcagtcattcttttcaaacaagtgtttgtgtaccttttgccaagctgtgggcatcgtgtgtgagtacagggtgctcagctcttccaccgtcattttgaattgttcacatgggtaattggtcatggaaatgatcagattgaccttgattgactgtcaggcatggctttgtttctggtttcaatctgttctcgttccttgtaccggattattctactcctgcaatgaaccctgttgacaccggatttagctcttgtcggccttcgtggggagctgtttgtgttaatatgagctactgcatgtaattcttaaactgggcttgtcacattgtattgtatttttgtgatctgtaatgaaaagaatctgtactgcaagtaaaacctactccccaaaaatgtgtggctttgggtctgcattaaacgctgtagtccatgttcatgccaaaaatggctgggaacgtttgctttatttacattcagtcagcgttgctttcagatcacactttatccacacaggaaagccagtcagcctataatgaagtagttattaaaataaatgtaatgaatatgtctacaaagtatagtttagtggtttattttgctaaaatgcacatatatttgatataatttagtttgagaagttcagctagtttttctcctttgtttgactttgtcaatttctatctggtttttaagggtctgagcttagcttgtgcatgcaaggttttgggtttttttattttttttttgagcacagcttttcaccttttaatttgttgggtatttttctcttaataagagaaatattggccatcgatttttacatataatacaagtgtgtttttccagtacattggttcctgtcccctctctgtgaactgtttgagtattggaacagtatgtcttcaataattcaatgttactttgagatacatgtgttaatatacccttagttattcttgaaataaaaccagtctcttacgcttgcagtggagaaaggc

SEQ ID NO: 674 - DNA, 4469 bp, Homo sapiens
  source 1..4469: mol_type = genomic DNA
gcagtcgctgccgaccggctggctgggccttgcggcgtgaggaccccggcggcgccgcagtcccgcgagccatggcccagtccggcggggaggctcggcccgggcccaagacggcggtgcagatccgcgtcgccatccaggaggccgaggacgtggacgagttggaggacgaggaggagggggcggagactcggggcgccggggacccggcccggtacctcagccccggctggggcagcgcgagcgaggaggagccgagccgcgggcacagtggcaccactgcaagtggaggtgagaacgagcgtgaggacctggagcaggagtggaagcccccggatgaggagttgatcaagaaactggtggatcagatcgaattctacttttctgatgaaaacctggagaaggacgcctttttgctaaaacacgtgaggaggaacaagctgggatatgtgagcgttaagctactcacatccttcaaaaaggtgaaacatcttacacgggactggagaaccacagcacatgctttgaagtattcagtggtccttgagttgaatgaggaccaccggaaggtgaggaggaccacccccgtcccactgttccccaacgagaacctccccagcaagatgctcctggtctatgatctctacttgtctcctaagctgtgggctctggccaccccccagaagaatggaagggtgcaagagaaggtgatggaacacctgctcaagctttttgggacttttggagtcatctcatcagtgcggatcctcaaacctgggagagagctgccccctgacatccggaggatcagcagccgctacagccaagtggggacccaggagtgcgccatcgtggagttcgaggaggtggaagcagccatcaaagcccatgagttcatgatcacagaatctcagggcaaagagaacatgaaagctgtcctgattggtatgaagccacccaaaaagaaacctgccaaagacaaaaatcatgacgaggagcccactgcgagcatccacctgaacaagtccctgaacaagagagtcgaggagcttcagtacatgggtgatgagtcttctgccaacagctcctctgaccccgagagcaaccccacatcccctatggcgggccgacggcacgcggccaccaacaagctcagcccgtctggccaccagaatctctttctgagtccaaatgcctccccgtgcacaagtccttggagcagccccttggcccaacgcaaaggcgtttccagaaagtccccactggcggaggaaggtagactgaactgcagcaccagccctgagatcttccgcaagtgtatggattattcctctgacagcagcgtcactccctctggcagcccctgggtccggaggcgtcgccaagccgagatggggacccaggagaaaagccccggtacgagtcccctgctctcccggaagatgcagactgcagatgggctacccgtaggggtgctgaggttgcccaggggtcctgacaacaccagaggatttcatggccatgagaggagcagggcctgtgtataaataccttctatttttaatacaagctccactgaaaaccaccttcgttttcaaggttctgacaaacacctggcatgacagaatggaattcgttcccctttgagagattttttattcatgtagacctcttaatttatctatctgtaatatacataaatcggtacgccatggtttgaagaccaccttctagttcaggactcctgttcttcccagcatggccactattttgatgatggctgatgtgtgtgagtgtgatggccctgaagggctgtaggacggaggttccctgggggaagtctgttctttggtatggaatttttctctcttctttggtatggaatttttcccttcagtgactgagctgtcctcgataggccatgcaagggcttcctgagagttcaggaaagttctcttgtgcaacagcaagtagctaagcctatagcatggtgtcttgtaggaccaaatcgatgttacctgtcaagtaaataaataataaaacacccaactgggagtgctgactttgaggttatagattgtgcctgacaaaagtctgtgcctgtctgacagagctgtgggtggtatgtcatgaggccctgaggagcttagcagagacatctttcttttctttaagagaacatttaaaaatttttttatttgtacacatttatgggctacatgagaaactttgttacatgtttataatgcatagtgatcaagtcagggcatttagggtttctcactgtaccccagggcagccccagggctctccttgggcttctggcagcctgagtggtgtctcatcacagggaattttactgagcaaaggcagcttggcgtatactgagggtgtacagtccaggacccacagcattgatctcacctgggaacttattagaaatccagattctcaggccaaccctaggcccactgaattagaaagtctgggagaaaggcctggaatttgggttttaacaaacgctgcaggtgattctgatgcacgctggagaaccactggatggacaaaggctgcaggacttgaggtcagtccatttgacccccaatctctcactattttgtgaccttgggaaggttactaagccccgtgaacctcatcatctccctgtgaattgctttgttacgatgtccatgtctggaatgcagctggccctccataaatgttagctctctttccttctcacttgggttaatgtttgttatcatcaggagctgccttggtgtagcagaaagagcattggcctagattccagtgttggcttatgctctggctatttggcaggatttaatagagcttgttaataattattgaacagtgattaggtgccagggactatgctaagagctttccatgcattatctcatttaatctgcccaaaaactacaagagaaatgttcaggtattatctctattttattccagaaaaaaacagactttacttgggtaattaacttgtctaaggcttaacagctaaattggtagagttgggcttgaaactagtggtctggctttggagcccacactgtttaaccactaagtggtactcaacatttctgatctttactatccatattcaaaaaagaatccaccataaaaggtgctaatatttattcagcaccttcctacgtgctaggcattgggttagacacatttcacttactctcagtgtccatcataaggaattattatgccagtatcacacatgcagctgctgaagtaggaaaataatatcccaaacttgtgaaaatggacaaagatagtatatcctaaatgatatggctctatacaaattagcaggtgattgtgatctggatagtaagatgctttgtcccttaagatgcagaagagttcgtgttaactggcaaatgcctccagcaatgttctggatttgccatttccagcactaccagctgtaggtagcctgaaggcttgtgcctagaccaccaggactcctgaccttgggcaatgtcagggccccctccagccccgccctatgcttccctccctgactctgctcccatcaccccctgcctgctccttccctgcagccactccacctgctccttggccatcgggccatctgggcttcaccagctcttcttggcctgtgacattcaaggctgttccaccctattatgcctgttacacaagtcacagctctatttttagattaaccctcgtggatcatagttacttttaaaaatacctacaccctcacctttacatgtgaatacagatgaacttggccttcctttggtcgtattgccctgtgtgacattataaaagaaccctgaagtgggggtcagcagatctgaggtcgagtcgtggcttttctactaagcaactgtgaccttcagcaagtcatttattttattggttcacagttcttcccacaaaccagtggataacaagaagatgttccttaaataaggtcatatatgtgcaagtgctttctgaatggaaaagtgctttgcaggcattagtcactacttatcctgctgtctgatcatcacctccaaaggcaagcctccttttgctgcaattcttaaccctggcctcacattagagtcacctaaagagcttttaaaaactgcctatggggctgggcacggtggctcacgcctgtaatcccagcacttcaggagactgaggcgggcagatcatgaggtcaggagattgagactatcctggctaatgtggtaaaaccctgtctctactaaaaatacaaaaaaattagccgggcatggtggcacgcacctgtaatcccagctacttgggaggcggaggcaggagaattgcttgaacctgggaggcggaggttgcagtgagccgagatcacgccgctgcattccagcctgggcaacagaatgagactccatctcaaaaaaataaaaataaaaataaacaaa

SEQ ID NO: 675 - DNA, 1006 bp, Homo sapiens
  source 1..1006: mol_type = genomic DNA
cggggtgggattccaacccagaagcgggcatttggagccctcatgcttcaccctagctccctgaaacaagcacggaggatggctctgagcagcgaggaaagtgctggaagcaagcaggccgagcgcgtccctggctggggacgttaatcattaccggagggcggcccgagcgcggccccgccccgggacggcagcctgcgcgcccggccgccgcctgccctctccgctggccacctgctgccgcccgcgccatggctggcaaagcacacaggctgagcgctgaggagagggaccagctgctgccaaacctgagggctgtggggtggaatgagctggaaggccgtgatgccatcttcaagcagtttcatttcaaagacttcaacagggcctttgggttcatgacaagagtggccctgcaggctgagaaactggaccaccatcctgaatggtttaacgtgtacaacaaggtccacatcacgctgagcacccatgagtgtgccggcctttcagaacgggacataaacctggccagcttcatcgaacaagtagcagtgtccatgacatagaccctgcccttcctctttgaattcttccgggggaaggggtgactgaactgggagtccagggagggagctgaggagcccttaccctcccaccactcccctcccaagacccagccgccgccgttgagggctgagtccttgctgtgggatgtgccagtgtccccaccaacaccaggaatttagaccttttccctgcaccactctcttcatcctgggggctctgttacactaatttgaataaactctcccctttctttgcaacttcccagcaacaataatgattttcttgccaggccgtctcttgctccctaattcatttcccaggaagctgtgatacagggtgaaataaagtcttgtcttagaaaccaggaccctaaaccccacactatgtaatagaaacacatgtgtttttatgtctcaaataaaactattatatcacttgg

SEQ ID NO: 676 - DNA, 1176 bp, Homo sapiens
  source 1..1176: mol_type = genomic DNA
aggtggcagcgcttgcagtcgggctacggaggccgggttgccagattacgggaaagccatttaagaagttcctggaataatattagtcagagtaatataggatctgcaggaagtgtctcaagatagttggaaaagaagaatttctagactcttcatcaagatcttcatttatacagctgttaaatccaaggctactttggtgaaagcatgaataaaaatacatctactgtagtatcacccagtctacttgaaaaggatcctgcctttcagatgattacaattgccaaggaaacaggccttggcctgaaggtactaggaggaattaaccggaatgaaggcccattggtatatattcaggaaattattcctggaggagactgttataaggatggtcgtttgaagccaggagatcaacttgtctcagtcaacaaggaatctatgattggtgtatcatttgaagaagcaaaaagcataattaccggagccaagttgagtactaggttagaatctgcttgggagatagcattcataagacaaaaatccgacaacattcagccagaaaatctgtcatgtacatcacttatagaagcttcaggagaatatggacctcaagcctcaacattaagtcttttttcttctcctcctgaaatactaatcccaaagacctcatccactcccaaaacaaataatgacattttatcttcttgtgagataaaaactggatacaacaaaacagtacagattccaattacttcagaaaacagtactgtgggtttgtctaatacagatgttgcttctgcctggactgaaaattatgggctacaagaaaagatctccctaaatccctctgttcgctttaaggcagagaaactggaaatggctctaaattatcttggtattcagcccacaaaggaacaacaccaagccctgagacagcaagtacaagcagactcaaaagggacagtgtcttttggagattttgtccaggttgccagaaacttgttttgcttgcagttggatgaagtaaatgttggtgcacatgaaatttccaatatattagattcacagcttcttccttgtgattcttcagaagcagatgaaatggaaaggctcaagtgtgaaagagatgatgccttgaaagaagtaaatacacttaagtggccagggcagaattag

SEQ ID NO: 677 - DNA, 1660 bp, Homo sapiens
  source 1..1660: mol_type = genomic DNA
cggcggatgtttacggcggccgaggttggagcggcgctgctcggccgcggacacacgagggacgcgcccgaggagctgcaggtggcagcccaggcggtccgaacccgtcggccggccgagcctggagtattgcctaagtgtaatcttgaacatgggcggtgctgtgagtgctggtgaagacaatgatgagctgatagataatttgaaagaagcacagtatatccggactgagctggtagagcaggctttcagagctatcgatcgtgcagactattatcttgaagaatttaaagaaaatgcttataaagacttggcatggaagcatggaaacattcacctctcagccccgtgcatctactcggaggtgatggaagccctagatctgcagcctggactctcgtttctgaacctgggcagtggcactgggtatctcagctccatggtgggcctcattctaggtccttttggtgtgaaccatggggtggaacttcactcagatgtgatagagtatgcaaagcagaaactggacttcttcatcagaacaagtgatagttttgacaagtttgacttctgtgaaccttcctttgttactgggaattgcctggagatttctccggattgttctcagtatgatcgtgtatactgtggggctggcgtgcagaaagagcatgaagagtacatgaagaatcttctcaaagtgggagggatccttgtcatgccactggaagagaagttgactaagataacacgcacaggtccttcagcttgggaaaccaaaaagattcttgctgtttcttttgctcctctgatccagccctgccattcagagtcaggaaaatcaagacttgtccagttacggtctccctcttttgtccaaggctggagtgtggtagtgctatcacagctgactgcagcctcaaccttccaggctgaagcgatcctcccatctcaatctcctacgtggctgacactacaggtgcttgccactatgcccaactaacatttggaattttcgtatacgtggattctagaggggtgacagcgaaacctgcaggacaaattcgagcatcttaaaatgattcaacaggaggagataaggaagctcgaggaagagaaaaaacaactggaaggagaaatcatagatttttataaaatgaaagctgcctctgaagcactgcagactcagctgagcactgatacaaagaaagacaaacatcgtaagaagcaatagtttctcttactattctgagagccttatcattctacatcccatcttcctgtgagattgtctttgtagcatttaactctaattgcagttctctttttaaaaattggcttgcttattgtatattttccccaactaaagcgtgaactcctagcagggcgtggtggctcatgcctgtaatctcagcactgtgggaggccgaggtgggtcgactacctgaggtcaggagttcgagaccagcctgaccaagatgatgaaacgctatctctactaaaaatacaaaaattagctaggcgtggtggctgggacctgtaatcccagctacttgggaggctgaggcaggagaatcacttgaaccctggaggtggaggttgcagtgagccgagatctcaccattacactccagcctgggtgacaagagcaaaactccatctc

SEQ ID NO: 678 - DNA, 1973 bp, Homo sapiens
  source 1..1973: mol_type = genomic DNA
agccgccgcctcgccgcttcccctcgtcggagcggccgctcgtccgcccggcttgaggcccgcggggagcgcggcgcaattcgtcggcccgcgggggggcggcctcccggcatcttcgcggcgaccaaggactaccaggaaggggagcggctgggatggcgcgtccgcggccccgcgagtacaaagcgggcgacctggtcttcgccaagatgaagggctacccgcactggccggcccggattgatgaactcccagagggcgctgtgaagcctccagcaaacaagtatcctatcttcttttttggcacccatgaaactgcatttctaggtcccaaagacctttttccatataaggagtacaaagacaagtttggaaagtcaaacaaacggaaaggatttaacgaaggattgtgggaaatagaaaataacccaggagtaaagtttactggctaccaggcaattcagcaacagagctcttcagaaactgagggagaaggtggaaatactgcagatgcaagcagtgaggaagaaggtgatagagtagaagaagatggaaaaggcaaaagaaagaatgaaaaagcaggctcaaaacggaaaaagtcatatacttcaaagaaatcctctaaacagtcccggaaatctccaggagatgaagatgacaaagactgcaaagaagaggaaaacaaaagcagctctgagggtggagatgcgggcaacgacacaagaaacacaacttcagacttgcagaaaaccagtgaagggacctaactaccataatgaatgctgcatattaagagaaaccacaagaaggttatatgtttggttgtctaatattcttggatttgatatgaaccaacacatagtccttgttgtcattgacagaaccccagtttgtatgtacattattcatattcctctctgttgtgtttcggggggaaaagacattttagccttttttaaaagttactgatttaatttcatgttatttggttgcatgaagttgcccttaaccactaaggattatcaagatttttgcgcagacttatacatgtctaggatccttttatcaaggcagttatgatcatcgttttcctgccttgaccccaccatcatcaaacactcagttaaatataaattaacattttttagatgaccactcaacataatgcttaagaatggaatttcctctctgtgacagaacccaggaattaattcctaaatacataacgttggtatattgaagacgaaattaaaattgtccttcagttttgaggccatgtgtaaagtttaaccatattgtaaaatatctattccgtattagaaatagctagttgacagcttatacttctcaaaattcatattgttatgtacacaaactaagtttctatatgtgaagttagtgagtctttttgtgttactccaaaataaaggcaatgatttatttttttcccagtgccaatacaattttgagctaagcactcaaggtggatactttacattttaaagctggaatcagcaacagccctatgggaaaccagacaaagcattgacttttaaatgtagacttttaaaataaactgttttcttttggaactacaattagaatagttaatattcatccttaaaccattattatgtgtacattattgttgctattgtgataatagagaattttatttatttttatgccagcttatattgtgagaacacatttagtcagtttgggttttatcaatcctgttaatgcttgtccttggaacatctttcgcgtattcacggtttgtagttgaaaagtttactgtaaaaaaatcaaaaacaaaaaaatgtattgtttttacagaataaatttattggaatgtgtactgggagtaagatttgaggttgtaagcaaactaagttagtgtaatttggcttcatatatgtaacgtgaggtattaatgtaattcatatattaaagcaaaaattgttcacagc

SEQ ID NO: 679 - DNA, 1020 bp, Homo sapiens
  source 1..1020: mol_type = genomic DNA
cctggttgctgggtgcaaagtgctgggttctgggtttctggattcgcgggccgttcacacgtagcctgtgccggctcctcgggtgagtccgtccgcgcgcggtgccccgggacggcctaggctgccgggggtccggggccccaggcattccgggctgcagattgacggggatcccggatgcaccgcgcgcccccgcgccctcaccgacgggtccagacctggtgggaagaaggtgcggggacgggtccctgaggatcccgatgcctacgagccaagatgctcagctttataggtgtgacctacacatgtgacttcacctcagttttgtgatccgtaaaatggacaaattcgaagctacttcacagtgctgttgagaggattaaatgaaacaatgcttgtaaagctctttgcaggagggagcctcggaagcagggcctggccggcagagcacacctgctgtcaccagggaccacaggcagcatgaagacccccgtggagctggccgtcagtgggatgcagaccctcggccttcagcaccgctgccgaggtggctaccgggtcaaggccaggacgtcatatgtggatgagactctgtttggcagcccagcaggcacccggcctaccccaccggacttcgatccgccctgggtggagaaggctaacagaaccagaggcgtgggcaaggaggcatcgaaggccttgggggcaaaggggagctgtgagaccaccccctcaaggggcagcacccccaccctcacaccaaggaagaagaacaaatacagacccatcagccacaccccgtcttactgtgatgagtcgctgtttggctcccgatctgaaggcgccagcttcggggccccgcggatggcgaagggggatgccgcaaagctccgtgctctcttgtggacgccaccacctacccccaggggtagccactcgccccgccccagggaggcaccaccaccagtgccccccacacaaatgggcctcaggatctcaggccttccacgtcaggggtga

SEQ ID NO: 680 - DNA, 1301 bp, Homo sapiens
  source 1..1301: mol_type = genomic DNA
agaatggcctcggacacccaggcagtccctgacgtgtcggggaggagccgggcgcggaggtacgctgagtggagctcggggctgcgtaggggagctgagccgagcggctgggcgggcctggccgggccggcggaggggagacgtcggttgagcggcggcgaacatgcgcttttgacacattggaggctttcttgatcatggatggtgaagatataccagatttttcaagtttaaaggaggaaactgcttattggaaggaactttccttgaagtataagcaaagcttccaggaagctcgggatgagctagttgaattccaggaaggaagcagagaattagaagcagagttggaggcacaattagtacaggctgaacaaagaaatagagacttgcaggctgataaccaaagactgaaatatgaagtggaggcattaaaggagaagctagagcatcaatatgcacagagctataagcaggtctcagtgttagaagatgatttaagtcagactcgggccattaaggagcagttgcataagtatgtgagagagctggagcaggccaacgacgacctggagcgagccaaaagggcaacaatagtttcactggaagactttgaacaaaggctaaaccaggccattgaacgaaatgcatttttagaaagtgaacttgatgaaaaggaatctttgttggtctctgtacagaggttaaaggatgaagcaagagatttaaggcaagaactagcagttcgggaaagacaacaggaagtaactagaaagtcggctcctagctctccaactctagactgtgaaaagatggactccgccgtccaagcatcactttctttgccagctacccctgttggcaaaggaacggagaacacttttccttcaccgaaagctataccaaatggttttggtaccagtccactaactccctctgctaggatatcagcactaaacatcgtgggggatctcttacggaaagtaggggctttagaatccaaattagcagcttgcaggaattttgcaaaggaccaagcatcacgaaaatcctatatttcagggaatgttaactgtggggtgctgaatggcaatggcacaaagttctctcgatcagggcatacatctttcttcgacaaaggctcctcctccagctgtgcgatccgagcttccagacgccgcttctcatccagcagcgcggacctggcggggagaggaggaggggacggttcaatcccagctcagcacagcacaggagcctcagggaaggctcctccacccaccctgttgctggaaacctga

SEQ ID NO: 681 - DNA, 2382 bp, Homo sapiens
  source 1..2382: mol_type = genomic DNA
caggtctcccaggcttcctcagcgtcgacgccggggagcgccctggggttgggagcgcccggggcccgcgaaggaggaggtggctcaggtgtcagggcgcaccgtgggaaccggccccgggggaggcgtggaaacgcggggcctgggactcgaccagcctctcccgtgcggatcgcaaaatctcggagctgaaacagcccgttgttcgcagcctccctctgacccgccaccctgcacattgttttccattcgcccgggtcgcgggtgggaggagaggcacgccggggttctggagcttggccgcgcgccaggcttgtggccttcgtccccctggggccactggggcggccacgcctctccggcgggaggagagaacgcgtgggtccgggtggctgctccggcccttccgcctccagctcggccatggggtcgcgcagctcccacgccgcggtcattcccgacggggacagtattcggcgagagaccggcttctcccaagccagcctgctccgcctgcaccaccggttccgggcactggacaggaataagaagggctacctgagccgcatggatctccagcagataggggcgctcgccgtgaaccccctgggagaccgaattatagaaagcttcttccccgatgggagccagcgagtggatttcccaggctttgtcagggtcttggctcattttcgccctgtagaagatgaggacacagaaacccaagaccccaagaaacctgaacctctcaacagcagaaggaacaaacttcactatgcatttcagctctatgacctggatcgcgatgggaagatctccaggcatgagatgctgcaggttctccgtctgatggttggggtacaggtgacagaagagcagctggagaacatcgctgaccgcacggtgcaggaggctgatgaagatggggatggggctgtgtccttcgtggagttcaccaagtccttagagaagatggacgttgagcaaaaaatgagcatccggatcctgaagtgactccgtttgtgccttgggcttgctcctgcaaccagtatctccttggaattcatccaaagcccccatggacgcatggacgcagggcgacaataaactgtattttcgtttctaactctatttagggccaagagaagaaagctggaaggatgtgtactaaagtctagctcagcagtccccaacctttttggcatcagggacagtttttccacggatgggtgacaggggatggttttgggatgattcaagtgcattacatttattgtgcactttatttctattatgattacattgtaatatataatgaaataattatacaactcaccataatgtagaatcagcaggagccctgagcttgttttcctgcaattagacggtcccatatgggagtgatgggagacagtgacagatcatcaggcattagattctcataaggagtgcacaatctagatcctttggtgtgcagttcacagtaggatttgggctcctatgataatctaatgccactgctgatctgacaggaggcagagctcaggcggtaatgcaagcaatggggagtggctgtaaatatagatgaagcttcagctcgcctgccgctcaccttgtgctgtgcagcccggttcctaacagaccacagaccccacaccaggtctatctcatttggtctcagagctgtgaatcagccagcaatattttagttgcaaatcactgaaaacccaactcaaagtgacttaagtcagaaagaaattttatgaattcaggtaattaaaaagtccagaagtatctgcctttaggcacagctggatccaagggcacaaatgatgtcatcaggctccagttattctccatctcccagctcagctttttctgtctgtaagcctgattttcaggaaggctctttcctagtgatggagatgaccaccatcagctccaggcttctatcctgctaacccagtaacccagtgggaagagatttacttattccaataattccaagtggagagtgtcattgacccgtttggggtctcatctctacttctaggggaatgaaacactctgagtggccaggcctgtgtcatgtgctaattcctagagccagggaaataaggtctgaggattcaggatggggtgaaaggtggttgcttaaaggaaaatgaaatacaattagcagaataaggggaaacgagtggtctgctctgctcgggcaaaacaagagatgcccattactgtgagggacccttgaagtctggactcttaaatgggtttttgctgatttcctgggtgcatgctaggatgatggggcttgatgcagtagggaagagacgatgtaaaaataataaacaatatataccttcctagagtgtgaatgca

SEQ ID NO: 682 - DNA, 4072 bp, Homo sapiens
  source 1..4072: mol_type = genomic DNA
acccgcgcgcggaggagccggggagtcagcgcttcttccctccctccccctctcccctccccgctccctgcccccctccccaagaatgttccgctacgagtctttggaggattgtcctctggatgaagatgaagatgcatttcagggactgggagaagaagatgaagagattgatcaattcaatgatgatacatttgggtcaggtgcagttgatgatgattggcaggaagcacatgagcgcctggctgaattggaagaaaagctaccagtggcagttaatgaacaaacaggcaatggagagagagatgaaatggacttgttgggtgaccatgaggagaatctggcagaaaggctcagtaagatggtgattgaaaatgaactagaagatccagctattatgagggcagtgcagaccaggccagttttacaaccccaaccaggaagtctgaattccagtatctgggatggatctgaagttctgaggcgaatccgaggaccactgcttgctcaggaaatgcctacagtgtctgtattagaatatgctttgcctcagaggcccccccagggtccagaagatgatcgggacctttctgaacgagcattaccaaggcggtcaacttcacctatcattggcagtcctcctgttagagctgtccccataggcaccccacctaaacagatggctgtacccagcttcacccaacagattctgtgtccgaagcctgtccatgttcggcccccaatgccacctcgttatcctgctccctatggtgagaggatgtctccaaaccagctctgcagtgtcccgaactcttccctcctgggtcacccttttcctcctagtgttcctcctgttctcagccccctccagagagcacagcttcttggaggagcacagctacagcctggacggatgtctcccagccagtttgcacgggtccctggatttgttggtagtccacttgctgccatgaatcccaagttgctacaagggcgagttgggcagatgcttcccccagcaccaggcttccgtgccttctttagtgctccaccctccgctacaccacctccacagcagcaccctcctggcccaggaccccacctgcaaaacctaagatctcaggccccaatgtttagaccggacacaactcacctccatccacagcaccgtcgactcttgcatcagagacagcaacagaatagaagtcagcatcggaatctcaatggtgcgggagatagaggaagtcaccggagcagtcatcaagatcatctccgaaaggatccatatgccaatctcatgttgcagcgggaaaaggattgggtctctaaaatccagatgatgcaactgcaaagcactgatccctacctggatgatttttattaccagaattactttgaaaaactggagaaactgtcagctgctgaagaaatacaaggtgatggccctaagaaggagcgcaccaagcttatcacccctcaggtggccaaactggagcacgcctataagccagtgcaatttgagggctctttgggaaagcttaccgtttctagtgtgaataatccccgaaaaatgattgatgctgttgtgacatctcggagtgaggatgatgagacaaaagaaaaacaagttcgagacaagaggagaaaaacccttgttataattgagaaaacctacagcttactccttgatgtggaggactatgaaagacgttatctcctaagtctggaagaagagcgacctgccctaatggatgacagaaagcacaaaatttgtagcatgtatgacaacttaagggggaaattgcctggacaagagaggcctagtgatgaccactttgtacagatcatgtgtatccgaaaagggaagagaatggttgcccgtattcttcctttcctctccacagagcaagcagctgacattctcatgacaacagccaggaacctccctttccttatcaagaaggatgcacaagatgaggtgctgccatgcttactgagtcccttctctctccttctctatcatcttccatcagtgagtatcaccagccttttgcgacagctaatgaacctacctcaaagtgcagctacaccagcactctccaatcctcacctcactgctgtgctccagaacaagtttggcctgtcactgctcctcatcctcctgagccgtggtgaagacctacagagttcagaccctgctacagaatcaacacaaaataatcagtggacggaggtgatgttcatggcaacacgagaacttctgcggattccccaagcagccctggccaagccaatctctatacctacaaacctagtgtccctcttttctcgctatgttgaccggcagaaactgaacttgctggagacaaaactgcagctagttcaggggatacgataaaagatctccaaatgtgtcctgtacctccttttggctgccacctgcactgctgccatcaccaatggagtgtttttaatgagggaaggaaggtagctttttccccaaagcaaagtcttgtgggatcgattcctgtttacaggggttgtctctctaaatgtcagatatttccccactgctctatgaaatttggctgggtgatacttctgctggtttctttaccttctgtgttacagttctgcatgtcctacttttactcagttctgttttgcattttctttgccctagagacacaagtgtaatctctccctttatccctccactactccacctcagagtagattgtagcctgccaaaggattccttccctcatcctattgaagttgttttttcattgccccatattaatatgactatagaagagccaattaagtagaaatcaagatatacacacacacatagatacacacacacacaccccatacatgtatttatgtggtcttcagagggtccttaaagaatgaattttagattgaaaaatatttagttgtctcattacctcttctaaacacaaaccagctgatgtattttaatctgtttctgttctatcttgtaattaatttggtgggttctacttgttttaacataaataaagagtatgcagcacgtttaataaaatcagaactcttaattggcttatgcccaggtctaggctgagaagtcctttttcttcttcccacctttatttccttagtttctgtccaccttaatcgaaacaacacatggttatgtctttttcctgctacaactacagggtacttgagcctttcccctcaagtgcattcgaagtcacccaggatgatcctcactagtagcctgctttggcagtgtggctttttgcacacttgccctgtcttcctgagactacttcagtaagccatgcttccttcttccccacttttatttggtgtcatgaatagaaacttccaaatgtaaccatggaagctaagtttggcctgctttgctttttagtctccacaccatgggcagaactgctgtctttactacttcatctcacccaagtcccgttcccaggcagccaggggcctgggtttgaataattgcagggccagcctgccatgatctttctcacttactcctctcccattcagcaatcaaccagactaaggagttttgatccctagtgattacagccctgaagaaaattaaatctgaattaattttacatggccttcgtgatctttctgctgttcttactttttcgaatgtagttggggggtgggagggacaggttatggtatttaaagagaataaacattttgcacatacatgtattgtacaacagtaagatcctctgttaaaaccagctgtcctgttctccatctccatttcttcccatgctgtaaccccaggctccaccagctgttccccagtgatgttacctagcttccctctaccgttgtctactgaccatttccactacatgcctttcctaccttcccttcacaaccaatcaagtgaatacttgattattatctcttccttactgtgctttatcttttttgtttggattggttctaattaatgaaaataaaagtttctaaatttacatttttatagggtattgtaaataaaaacaaattgtatacttaaaaa

SEQ ID NO: 683 - DNA, 3727 bp, Homo sapiens
  source 1..3727: mol_type = genomic DNA
gccgggtttgggggttgggacctccggctgcaggtccgcctgggccagacgcgcgagcgcaagcagcgggttagtggtcgcgcgcccgacctccgcagtcccagccgagccgcgacccttccggccgtccccaccccacctcgccgccatgcgcctccgccgcctagcgctgttcccgggtgtggcgctgcttcttgccgcggcccgcctcgccgctgcctccgacgtgctagaactcacggacgacaacttcgagagtcgcatctccgacacgggctctgcgggcctcatgctcgtcgagttcttcgccccctggtgtggacactgcaagagacttgcacctgagtatgaagctgcagctaccagattaaaaggaatagtcccattagcaaaggttgattgcactgccaacactaacacctgtaataaatatggagtcagtggatatccaaccctgaagatatttagagatggtgaagaagcaggtgcttatgatggacctaggactgctgatggaattgtcagccacttgaagaagcaggcaggaccagcttcagtgcctctcaggactgaggaagaatttaagaaattcattagtgataaagatgcctctatagtaggttttttcgatgattcattcagtgaggctcactccgagttcctaaaagcagccagcaacttgagggataactaccgatttgcacatacgaatgttgagtctctggtgaacgagtatgatgataatggagagggtatcatcttatttcgtccttcacatctcactaacaagtttgaggacaagactgtggcatatacagagcaaaaaatgaccagtggcaaaattaaaaagtttatccaggaaaacatttttggtatctgccctcacatgacagaagacaataaagatttgatacagggcaaggacttacttattgcttactatgatgtggactatgaaaagaacgctaaaggttccaactactggagaaacagggtaatgatggtggcaaagaaattcctggatgctgggcacaaactcaactttgctgtagctagccgcaaaacctttagccatgaactttctgattttggcttggagagcactgctggagagattcctgttgttgctatcagaactgctaaaggagagaagtttgtcatgcaggaggagttctcgcgtgatgggaaggctctggagaggttcctgcaggattactttgatggcaatctgaagagatacctgaagtctgaacctatcccagagagcaatgatgggcctgtgaaggtagtggtagcagagaattttgatgaaatagtgaataatgaaaataaagatgtgctgattgaattttatgccccttggtgtggtcactgtaagaacctggagcccaagtataaagaacttggcgagaagctcagcaaagacccaaatatcgtcatagccaagatggatgccacagccaatgatgtgccttctccatatgaagtcagaggttttcctaccatatacttctctccagccaacaagaagctaaatccaaagaaatatgaaggtggccgtgaattaagtgattttattagctatctacaaagagaagctacaaacccccctgtaattcaagaagaaaaacccaagaagaagaagaaggcacaggaggatctctaaagcagtagccaaacaccactttgtaaaaggactcttccatcagagatgggaaaaccattggggaggactaggacccatatgggaattattacctctcagggccgagaggacagaatggatataatctgaatcctgttaaattttctctaaactgtttcttagctgcactgtttatggaaataccaggaccagtttatgtttgtggttttgggaaaaattatttgtgttgggggaaatgttgtgggggtggggttgagttgggggtattttctaattttttttgtacatttggaacagtgacaataaatgagacccctttaaactgtcttattttccaccagattgagaaccagatgttctctacacactatcactgttcaatagagctttcttcagtgatggaaatgctctgtaatctacactgttcagtacaggtagctacggagcatctgaaatatggctagaaactacatttttgttttgattaatttaaatagccatacagttgctaccatactggtcacggcagctgtagactgactgggtccatagttcatcacctcaaaattctttcaaaatttattatctctttctctccttacatgtttatttcccaggcctaccctggtgattagaacagctgaagggcctttcttgttaggctgtccatgccctaaggatgggttcctgtttatccttgccacgcagctgagcttactgcatgtttatatctcccaaggactgttctctgctcagaaatgccctgtcaagggtgtggcatcacgcagtttcatccaagttgtttcaggaattgctgacactgctgggtgcagttctatcccctaaagcctagggtgtggccctttaacttccccttcagtagaactgggaaaggcagtaccattcctagttatgagtgaagcatccactttcttttgtaacaatgaggaacagaaaggataagactgaagagtgatcttttgtccaactaaaccatttatctccttttgtaggtaaattcaaatcctgcccagttatagttttcagtcactggagaattccaggtaggagccctactttaggtgatcctaggaactcctatgttcagaaaagaattttcttcctactatataattacagtatttagctgtcaattttaagatgaatttggtagagccttatagtaaagtatgtatcttggtcacacacaaagcttggaaaaagtaaaagatgtctaaaccataatcttgtaactcataacatctgggctggggcccggggatctaattgtttagagagccccaaaagtggctcagatgtaaagccagggttaagaaccatctgccttggaagatttaagggaaacatataaacttgtacaaaggacacagaagcagtcagttttaattttttagccatgttggtaaaagttcattttcagtacatgggtaacacccaggccctttcccattatatccaggtatgctacaagttcttttaactcttatcagaagttattattactgtttccttagagaggctaccaggctaaaattcacttagtttggtttgtctaatgtcctcattattttatcctgaagatgatgtcatttctcaggacttgaaaatgacttggctgaactaaaggtaaaaaagccaagcctctgtcacttttcctagactcctaggcacagctatggagtctttgcacagtgcccataccctaaaaattaataatgaaaaccaaacctcaagaacctagagcagctctctacttgccaccatggactccagtggtcagcataagaaaagcagatagttgcattctatttagtttatagctgctttgttcctttgtgtttcactaagcagaggctcaaaaattcccttgataacttcagctgcccctgttcttttcctcaaactccaggatgagacctttaatgtgggacaatttctggtgaaggtactcacagcgacgcttttcttctctgtaacttgggtactgctgcagagaaaaagcatccatgtcaaaaagtaaaaattctcattctaccttgc

SEQ ID NO: 684 - DNA, 4436 bp, Homo sapiens
  source 1..4436: mol_type = genomic DNA
cctgccgccagaggctccgggttcacttccggcgtgcctacgcctcctcttgcgctgtcctgttaatggcgggcagtagccgctgaggggattgcagataaccgcttcccgcacggggaaagtctaccctgcctgccactttctgctcgccgtcagcgccggagctcgccagcatgtctgtggtaccgcccaatcgctcgcagaccggctggccccggggggtcactcagttcggcaacaagtacatccagcagacgaagcccctcaccctggagcgcaccatcaacctgtaccctcttaccaattatacttttggtacaaaagagcccctctacgagaaggacagctctgttgcagccagatttcagcgcatgagggaagaatttgataaaattggaatgaggaggactgtagaaggggttctgattgtacatgagcaccggctaccccatgtgttactgctgcagctgggaacaactttcttcaaactacctggtggtgaacttaacccaggagaagatgaagttgaaggactaaaacgcttaatgacagagatactgggtcgtcaggatggagttttgcaagactgggtcattgacgattgcattggtaactggtggagaccaaattttgaacctcctcagtatccatatattcctgcacatattacaaagcctaaggaacataagaagttgtttctggttcagcttcaagaaaaagccttgtttgcagtccctaaaaattacaagctggtagctgcaccattgtttgaattgtatgacaatgcaccaggatatggacccatcatttctagtctccctcagctgttgagcaggttcaattttatttacaactgaattcctgcgcagtggagaagtaaaagaagccgcttgtctctgtgagcacagctatatacagtgtagaataaatgtggtagaaaagtttttttggttttatctcttttgcgatccctaaattgccacctttctattgtttgaatagtaaaattaatatgaagaactagatagtggtgtaaacaaatgtgataatgtttatttactttcggttctgctcatacttttttgtacaacattaaagaaaatggactttttttattttaatttctcattaaacttctaaaattcttataggtgaggatcatttttccccccaccttaggatggtgaatgttgcaacacaatgacaggtttaagtcagtcaagtttattggacccttgctttgataccattcttgggcacatactccaagattgtattagatttttgtgatgaagagcttccattacttctgaaaactatatttatctgagtgagtccaaggtgcaactcctaaatgaattgtgttgcagagaactcccagtataattcactgaccagtacattttataaccatccaggccttggtttgcaagcaacagaccttaaacatacaggaaactattaaaattggctcgatcagtagtcataggaattggtataagaagagactcatttagagctcagagttttcttcacataatgggggtattaattatttgtgctgttgcgaaattatgtgtcttattcttaaagccatggtaaaaatagggatctgtgaaggaaatttctaaaattggatgtattaggttttgaactctgagattgcacaaatattcaattaacttgaagttgtgtacatagagaagaaaatttggttttagcaaatgacagagccttcaaaaatatttttggaataatgtgaatcaaccgaaaactgggggcaaggcagaggacaggttttctcaggttaagagaaaaacgaaattttaaaaactttaaaaaatactgataaattcggatcaaatttgggggaataaaaaatattagagcaaaggagtttgctggttgtgtcattatttaatgatcaaagtatagcatgtatgccttattacagacttgttgactataggcttaatgtaaaaaggaatcttgccagatgtagctacttaaggaaaaaagggtttttaatagaaatgaacttttgattagtatggtgccagtcacagggctattttcctgaatattgggtgatgtcaaaggtatatgatacttgaggaaatcaggccaagtgtagctgagcaattaataaacactcaagtttttttagttggggtcatgtcaaaccctcacatggtggttaagtagtgactaactgtgcatgtccttcatggtaggtgagcaccagtctccatgatcaaaaatgccccagtttcctttgaaaaagccactagttctgtgaattgtccttttccctcctgcccctaacagtcctacccctctagcctacattagcatatttctcatgtaatgtattttgctggtaagctcatccattagctgcgtccttcagctattcctttagattggaggaagtggatatgaagatggattgattcagctcaccttccatgattgcttttgagggaaaagctacagtggccacatttcagatgttcacttttgcaatttgtggagggtggagagaggtagacttttgttgtgtgttttataaagtactctcagtaaggagtgtttgagttgaagagtcatctgattcgaggccactcatgttctttgtaacttaaactttgaccaagaaattcttcacttctcacttcttcacttcttcccaatatacagtaagtacgtgagccagtcatccatacactaaggcctagttgagaaaaacctttgattcaggatggctgggttactaaccttgaaatgtaagagatctggttttgaatgtaaaagttgcaacacacaaacggaagtcttaaaaactttttgctctggtcagttacaggtggatccccaataatctgtttttggttttctgatggaaataatagaattaggggaaatcaaatctggttggtaggtgtctacagtattagaagagggtataagggcactgtttaacactaagttctaatacttccagaaactgtgcattccagatctacatactaaatgctcttatcattttgaaatgggctcttgattaatagacccatattttttagtggcttctatgttgtatatttgtctaaaatgaaagctcttttgcgttctaaaactacaatatatgtcatcttattttccctgagtatccaagtatagtgcagattctatgtaaaactactaaatgacactggaatatgtttagtagattagggggaaaaactataaaggtttatacaattgtttgtagttacatttaggatggacttatccctttggagaagagtgaagtttgttttttcgccatgtgatgaagaccactgtgattttttaaaaaagtagataatacttaaaatggcgtaataattctgcacttgaatttgtactgttaacagcacatttggaagattttaaaactttttattgtcttataaatagcattcacttattattttggatatttaagggttccattaagttaacactgtatttggacaaagtgtgaccaaattagccagtctgttttcttccatgtttaattagaagtgagaggtagaagtacttcaaattcaacaggccagcaagcaatcggcttaaaattccctttcttaaatgttgtgctcttatgttctcggctttttaatgactttatttttacagtacttgttcagtcacttgagatgaaatgcttggggtagcttttccatcctcaaacttaatgtttttactagttcatagtgtttggaacagtatatgccaatcactgagactgcatcagagtttgcaattttgtatgtttcattgccaaagaaggcttagtggttgttgactgtagtataagtcagctttctgtagcataagatttgattttcccatacttacttcacttgttatacatcactgattatttgggttaaactggactcatttcaagcagtttgcttttgttcaaatcgtgatgagaaacctaatactgtaatttgatttgagccataaaacacattttaatattagcttgtattatagttattaagcttgtttttgtggaaaaaaacttactaaaacctaggtaactctagattaggccagttcaggtgtattttgtatcttagtaatggatcatatcgtaaaaatagagataagttgggaagatatattgattatgctgttctgttgagggaaaggtcatgtatttagaaatttaaacttttggttattgtgttcacatcatagtattcaagcatcatttatagtttggttttgagaacttttctggtattacgtttatggcaaatgtataaaagaaacaagttttggttatatttttatatttgtaaagtaagtttggttaaagtgatcactgttctttttttattttattgtcatttcaataaaaaatatttgaaagagaa

SEQ ID NO: 685 - DNA, 3497 bp, Homo sapiens
  source 1..3497: mol_type = genomic DNA
tcaaaatttcaacgatactgaatgagtcccgcggcgggttggctcgcgcttcgttgtcagatctgaggcgaggctaggtgagccgtgggaagaaaagagggagcagctagggcgcgggtctccctcctcccggagtttggaacggctgaagttcaccttccagcccctagcgccgttcgcgccgctaggcctggcttctgaggcggttgcggtgctcggtcgccgcctaggcggggcagggtgcgagcaggggcttcgggccacgcttctcttggcgacaggattttgctgtgaagtccgtccgggaaacggaggaaaaaaagagttgcgggaggctgtcggctaataacggttcttgatacatatttgccagacttcaagatttcagaaaaggggtgaaagagaagattgcaactttgagtcagacctgtaggcctgatagactgattaaaccacagaaggtgacctgctgagaaaagtggtacaaatactgggaaaaacctgctcttctgcgttaagtgggagacaatgtcacaagttaaaagctcttattcctatgatgccccctcggatttcatcaatttttcatccttggatgatgaaggagatactcaaaacatagattcatggtttgaggagaaggccaatttggagaataagttactggggaagaatggaactggagggctttttcagggcaaaactcctttgagaaaggctaatcttcagcaagctattgtcacacctttgaaaccagttgacaacacttactacaaagaggcagaaaaagaaaatcttgtggaacaatccattccgtcaaatgcttgttcttccctggaagttgaggcagccatatcaagaaaaactccagcccagcctcagagaagatctcttaggctttctgctcagaaggatttggaacagaaagaaaagcatcatgtaaaaatgaaagccaagagatgtgccactcctgtaatcatcgatgaaattctaccctctaagaaaatgaaagtttctaacaacaaaaagaagccagaggaagaaggcagtgctcatcaagatactgctgaaaagaatgcatcttccccagagaaagccaagggtagacatactgtgccttgtatgccacctgcaaagcagaagtttctaaaaagtactgaggagcaagagctggagaagagtatgaaaatgcagcaagaggtggtggagatgcggaaaaagaatgaagaattcaagaaacttgctctggctggaatagggcaacctgtgaagaaatcagtgagccaggtcaccaaatcagttgacttccacttccgcacagatgagcgaatcaaacaacatcctaagaaccaggaggaatataaggaagtgaactttacatctgaactacgaaagcatccttcatctcctgcccgagtgactaagggatgtaccattgttaagcctttcaacctgtcccaaggaaagaaaagaacatttgatgaaacagtttctacatatgtgccccttgcacagcaagttgaagacttccataaacgaacccctaacagatatcatttgaggagcaagaaggatgatattaacctgttaccctccaaatcttctgtgaccaagatttgcagagacccacagactcctgtactgcaaaccaaacaccgtgcacgggctgtgacctgcaaaagtacagcagagctggaggctgaggagctcgagaaattgcaacaatacaaattcaaagcacgtgaacttgatcccagaatacttgaaggtgggcccatcttgcccaagaaaccacctgtgaaaccacccaccgagcctattggctttgatttggaaattgagaaaagaatccaggagcgagaatcaaagaagaaaacagaggatgaacactttgaatttcattccagaccttgccctactaagattttggaagatgttgtgggtgttcctgaaaagaaggtacttccaatcaccgtccccaagtcaccagcctttgcattgaagaacagaattcgaatgcccaccaaagaagatgaggaagaggacgaaccggtagtgataaaagctcaacctgtgccacattatggggtgccttttaagccccaaatcccagaggcaagaactgtggaaatatgccctttctcgtttgattctcgagacaaagaacgtcagttacagaaggagaagaaaataaaagaactgcagaaaggggaggtgcccaagttcaaggcacttcccttgcctcattttgacaccattaacctgccagagaagaaggtaaagaatgtgacccagattgaacctttctgcttggagactgacagaagaggtgctctgaaggcacagacttggaagcaccagctggaagaagaactgagacagcagaaagaagcagcttgtttcaaggctcgtccaaacaccgtcatctctcaggagccctttgttcccaagaaagagaagaaatcagttgctgagggcctttctggttctctagttcaggaaccttttcagctggctactgagaagagagccaaagagcggcaggagctggagaagagaatggctgaggtagaagcccagaaagcccagcagttggaggaggccagactacaggaggaagagcagaaaaaagaggagctggccaggctacggagagaactggtgcataaggcaaatccaatacgcaagtaccagggtctggagataaagtcaagtgaccagcctctgactgtgcctgtatctcccaaattctccactcgattccactgctaaactcagctgtgagctgcggataccgcccggcaatgggacctgctcttaacctcaaacctaggaccgtcttgctttgtcattgggcatggagagaacccatttctccagacttttacctacccgtgcctgagaaagcatacttgacaactgtggactccagttttgttgagaattgttttcttacattactaaggctaataatgagatgtaactcatgaatgtctcgattagactccatgtagttacttcctttaaaccatcagccggccttttatatgggtcttcactctgactagaatttagtctctgtgtcagcacagtgtaatctctattgctattgccccttacgactctcaccctctccccactttttttaaaaattttaaccagaaaataaagatagttaaatcctaagatagagattaagtcatggtttaaatgaggaacaatcagtaaatcagattctgtcctcttctctgcataccgtgaatttatagttaaggatccctttgctgtgagggtagaaaacctcaccaactgcaccagtgaggaagaagactgcgtggattcatggggagcctcacagcagccacgcagcaggctctgggtggggctgccgttaaggcacgttctttccttactggtgctgataacaacagggaaccgtgcagtgtgcattttaagacctggcctggaataaatacgttttgtctttccctccctga

SEQ ID NO: 686 - DNA, 1596 bp, Homo sapiens
  source 1..1596: mol_type = genomic DNA
agtgctccgcgcgctcttgacgtccggagcccctggagtaggcgcttccggccattcatactgcagtcggtcagtgttcggttgaaggattctgtgtgctgtcggacccagagggtgacggcgccgctaggatgaagctcgtgagatttttgatgaaattgagtcatgaaactgtaaccattgaattgaagaacggaacacaggtccatggaacaatcacaggtgtggatgtcagcatgaatacacatcttaaagctgtgaaaatgaccctgaagaacagagaacctgtacagctggaaacgctgagtattcgaggaaataacattcggtattttattctaccagacagtttacctctggatacactacttgtggatgttgaacctaaggtgaaatctaagaaaagggaagctgttgcaggaagaggcagaggaagaggaagaggaagaggacgtggccgtggcagaggaagagggggtcctaggcgataatgtctctcaagatttcaaagtcatatgagatttgggatattttttgtacaggttgtgtttgtttatgtcagtttttaataaacataaatgtgggacagagctgtctatttagtatatcaaagttttagtagtttcctccacattcacgaaattaccacagtgagagctaagcatttctactgggcagtttcatttttagttgatcaggttttaagtttttgaactaaaatttttctttttctttttatgatgaataaggttaaaataaaagccttagacaaattaaatttggcagagtttaattgagcaaaggacaattcacaaatcaggtagcccctgaaccataataggctcagaggcttcagcccagctgcatagttgaagatttatggacagaaggaaagtgatgtatggaaaatggaagtgagatacagcaacagccggattagttacagttcagcgtttgccttatttgaatatggtttgaacagttcgctgtctttggttggctgaaacttagtgattgccacaagagtagggtaccgtctgtttacacgtccagttaggctacagttctatgtactgagaaacctttaagctgaacttgagatatgtaaagagactttaggctaaacttaacaatatatataggatatatacccttctacttcacatgcactgaatatgcattttattgctttactcttcattctgtggcacctacccacaggggaagtaagaagtttgttttggtatttcggaaactaaagtccttatgggatggggtctagaattgattctcctttcctgagttttactccacggagtcttaggtacctggtaaaaagttgtcttctaaattaagggtcattgctttgttgtctagctgctaatgtcttacttttgtttcttttgctttttaatcagttcttaataggatatagttttatgttttccaagttataacttggagttaatggtcactagattatcagttatgagcagtgttaaaatctcctattaatgtgtaatgtacctgtcagtgcctcctttattaaggggttctttgagaataaaagagaaaagacctactttatttgacagc

SEQ ID NO: 687 - DNA, 1316 bp, Homo sapiens
  source 1..1316: mol_type = genomic DNA
gtacaacttccggctgtaaagatggcggcttcctagtgagtcggcggctgatttagaaggaggttcaggctacggtgagccgaagccacacaggagccatggaagtggcagagcccagcagccccactgaagaggaggaggaggaagaggagcactcggcagagcctcggccccgcactcgctccaatcctgaaggggctgaggaccgggcagtaggggcacaggccagcgtgggcagccgcagcgagggtgagggtgaggccgccagtgctgatgatgggagcctcaacacttcaggagccggccctaagtcctggcaggtgcccccgccagcccctgaggtccaaattcggacaccaagggtcaactgtccagagaaagtgctccaaaaccaacgccctcaatgtctcccagaagatgattgagatgttcgtgcggacaaaacacaagatcgacaaaagccacgagtttgcactggtggtggtgaacgatgacacggcctggctgtctggcctgacctccgacccccgcgagctctgtagctgcctctatgatctggagacggcctcctgttccaccttcaacatcagtggggcctcacctgcccgccagcagaaaactgagcttccggtcacagagaacgtgcagacgattcccccgccatatgtggtccgcaccatccttgtctacagccgtccaccttgccagccccagttctccttgacggagcccatgaagaaaatgttccagtgcccatatttcttctttgacgttgtttacatccacaatggcactgaggagaaggaggaggagatgagttggaaggatatgtttgccttcatgggcagcctggataccaagggtaccagctacaagtatgaggtggcactggctgggccagccctggagttgcacaactgcatggcgaaactgttggcccaccccctgcagcggccttgccagagccatgcttcctacagcctgctggaggaggaggatgaagccattgaggttgaggccactgtctgaaccatccctgtacatctgcaccttcttgtgcaaggaagtccttggcctaaagccttggttctcaaactgggttccttgggacctccggggtgggggggttccaggaggcacgtagggtaccttgcagggtcctaggagggaaacccaggattccaggagggatcccaggaactgtgggcacccattttctgtgtctcccagcccatttccactcctagtttgtcatggataatttttgttcttccctgtgtgatttttgccatcaaaataaaaatttgagactcgtt

SEQ ID NO: 688 - DNA, 1823 bp, Homo sapiens
  source 1..1823: mol_type = genomic DNA
gtggagctggggtcactgcgcggtgggaccatggcctcggagaagccgctggcggcagtcacttgtacagcgccggtcaacatcgcggtcatcaagtactggggcaagcgcgatgaagagctggttctgcccatcaactcctccctgagcgtcactctgcaccaggaccagttaaaaaccaccacaacagccgtcatcagcaaggacttcaccgaggaccggatttggctgaatggccgggaggaggatgtggggcagccgcggctgcaggcctgcctgcgggagatccgctgcctggcccggaagcggaggaactcacgggatggggacccgctgccctccagcctcagctgcaaggtgcacgtggcatcggtgaacaacttccccacggctgcgggcctggcctcctcagcggcgggctatgcctgcctagcctacaccctggcccgtgtctacggcgtggagagtgacctctcagaagtggctcgccggggctcaggcagcgcctgccggagcctgtatgggggctttgtggagtggcagatgggagagcaggccgacgggaaggacagcatcgctcggcaagtggcccccgagtcacactggcctgaactccgcgtgctcatccttgtggtgagcgctgagaagaagctgacaggcagtaccgtgggcatgcgggccagtgtggagaccagccccctgcttcggttccgggccgagtccgtggtgcccgcgcgcatggcggagatggcccgctgcatccgggagcgagacttccccagcttcgcccagctgaccatgaaggacagcaaccagttccacgccacctgcctcgacaccttcccgcccatctcttacctcaatgccatctcctggcgcatcatccacctggtgcaccgcttcaacgcccaccacggggacaccaaggtggcgtacacctttgacgcgggccccaatgccgtgatcttcaccctggacgacactgtggctgagtttgtggctgctgtgtggcacggctttcccccaggctcgaatggagacacgtttctgaaggggctgcaggtgaggccggcccctctctcagctgagcttcaggctgcgctggccatggagccgacccccggtggggtcaaatacatcattgtcactcaggtggggccagggcctcaaatcctggatgacccctgcgcccacctcctgggtcctgacggcctgccgaagccagctgcctgactgcctcagcagggaccgcatgccgcttggagaaggggtggcctcgccggagctagggagcggatgtggtgggctggccggactcctgggacatgtgggtggtggcttgaccccgggcccatgggcagcttgctgtggggcagtgcagggagtcctgcggccgcccaggtgtcaggagaggtccccgccgagtgcttcagctgccctaagctgcaccagcgctttgccaagatgggatggggagggggtatgagaactggcagagcctcggtgcagcagggctgaagggctttctcaccccagctctggctatgcccagttctctgagaaaggagctcagtggggaggtggtccctccagcggaccagggaaggggtcaccgtgctgggagcagcctccttgggcctcaggaaaccaccaagtgcctcggatggtggctgcccacggcgcttctgctgagaccctgcccccggcccaggtgtctcggagggtggctgcccacggcctgggtgtggctggaatggtggcaggagtgggcaccagtgcggccccggtggccatggggaataaaccagcattgctgcctccgg

SEQ ID NO: 689 - DNA, 1724 bp, Homo sapiens
  source 1..1724: mol_type = genomic DNA
gaacttttgaatccgccaatcagcgccgcgcgcccccactccgcgggtgcggccgggcgcaggccagggctcgaaggtggggccgcagcggcacggggcggggtctggggcccgccctcccgacacgtggccggggaccgggtatataaggcccttcggggccggccaccctttcactacttctcccccggactccttggtagtctgttagtgggagatccttgttgccgtcccttcgcctccttcaccgccgcagaccccttcaagttctagtcatgcgtgagtgcatctccatccacgttggccaggctggtgtccagattggcaatgcctgctgggagctctactgcctggaacacggcatccagcccgatggccagatgccaagtgacaagaccattgggggaggagatgattccttcaacaccttcttcagtgaaacgggtgctggcaagcatgtgccccgggcagtgtttgtagacttggaacccacagtcattgatgaagttcgcactggcacttaccgccagctcttccaccctgagcaactcatcacaggcaaggaagatgctgccaataactatgcccgagggcactacaccattggcaaggagatcattgacctcgtgttggaccgaattcgcaagctggctgaccagtgcaccggtcttcagggcttcttggttttccacagctttggtgggggaactggttctgggttcacctcgctgctcatggaacgtctctcagttgattatggcaagaagtccaagctggagttctccatttacccggcgccccaggtttccacagctgtagttgagccctacaactccatcctcaccacccacaccaccctggagcactctgattgtgccttcatggtagacaatgaggccatctatgacatctgtcgtagaaacctcgatatcgagcgcccaacctacactaaccttaaccgccttattagccagattgtgtcctccatcactgcttccctgagatttgatggagccctgaatgttgacctgacagaattccagaccaacctggtgccctacccccgcatccacttccctctggccacatatgcccctgtcatctctgctgagaaagcctaccacgaacagcttactgtagcagagatcaccaatgcttgctttgagccagccaaccagatggtgaaatgtgaccctcgccatggtaaatacatggcttgctgcctgttataccgtggtgacgtggttcccaaagatgtcaatgctgccattgccaccatcaaaaccaagcgtaccatccagtttgtggattggtgccccactggcttcaaggttggcattaattaccagcctcccactgtggtgcctggcggagacctggccaaggtacagagagctgtgtgcatgctgagcaataccacagctgttgccgaggcctgggctcgcctggaccacaagtttgacctgatgtatgccaagcgtgcctttgttcactggtacgtgggtgaggggatggaggaaggcgagttttcagaggcccgtgaggacatggctgcccttgagaaggattatgaggaggttggagcagatagtgctgacggagaggatgagggtgaagagtattaacctgtgtgctgtacttttacactcctttgtcttggaactgtcttatttttgttctgtaaatgtctattgccgtaaattgttaataaaattgaagtttcc

SEQ ID NO: 690 - DNA, 2105 bp, Homo sapiens
  source 1..2105: mol_type = genomic DNA
gttgccattaggggactcctgaggtcctatctccaggctgcggtgactgcactttccctggagtggaagctgctggaaggcggaccggccgccatgtccacgttcaggcaggaggacgtggaggaccattatgagatgggggaggagctgggcagcggccagtttgcgatcgtgcggaagtgccggcagaagggcacgggcaaggagtacgcagccaagttcatcaagaagcgccgcctgtcatccagccggcgtggggtgagccgggaggagatcgagcgggaggtgaacatcctgcgggagatccggcaccccaacatcatcaccctgcacgacatcttcgagaacaagacggacgtggtcctcatcctggagctggtctctggcggggagctctttgacttcctggcggagaaggagtcgctgacggaggacgaggccacccagttcctcaagcagatcctggacggcgttcactacctgcactctaagcgcatcgcacactttgacctgaagccggaaaacatcatgctgctggacaagaacgtgcccaacccacgaatcaagctcatcgacttcggcatcgcgcacaagatcgaggcggggaacgagttcaagaacatcttcggcaccccggagtttgtggccccagagattgtgaactatgagccgctgggcctggaggcggacatgtggagcatcggtgtcatcacctatatcctcctgagcggtgcatccccgttcctgggcgagaccaagcaggagacgctcaccaacatctcagccgtgaactacgacttcgacgaggagtacttcagcaacaccagcgagctggccaaggacttcattcgccggctgctcgtcaaagatcccaagcggagaatgaccattgcccagagcctggaacattcctggattaaggcgatccggcggcggaacgtgcgtggtgaggacagcggccgcaagcccgagcggcggcgcctgaagaccacgcgtctgaaggagtacaccatcaagtcgcactccagcttgccgcccaacaacagctacgccgacttcgagcgcttctccaaggtgctggaggaggcggcggccgccgaggagggcctgcgcgagctgcagcgcagccggcggctctgccacgaggacgtggaggcgctggccgccatctacgaggagaaggaggcctggtaccgcgaggagagcgacagcctgggccaggacctgcggaggctacggcaggagctgctcaagaccgaggcgctcaagcggcaggcgcaggaggaggccaagggcgcgctgctggggaccagcggcctcaagcgccgcttcagccgcctggagaaccgctacgaggcgctggccaagcaagtagcctccgagatgcgcttcgtgcaggacctcgtgcgcgccctggagcaggagaagctgcagggcgtggagtgcgggctgcgctaggcgcagtggggtgggccaggccccaggacagccggagctcggcctgcggtgggggcgcttcctgtggacgctgcgcctcccatcgcccgggtgcctgtccttgcccagcgccaccaggctggaggcggagtgggaggagctggagccaggcccgtaagttcgcaggcaggggtgggtgtgggacggggctgcttctctacacagcctccacgctggccttcaccttcacccctgcatcgtcggtgaccctgggaccctccaggcagcgtggcctgtggcaccgtgagggttgggacccaccgaggcgcagaggcggcccgaatgcagccctggttcaggcccggaggagggtttgcgggtagttgcacggacaattcggcggggtgctgcctgttgctgccattagcccaggaggaggtcgtgggacggggagggtgggatggacggcggacaggcagtccccacgctgctgggtggcgccgggcttggtggggtcttccactgtgtgcccttctcgccgaggccggtcccccgggtgtggggtgccctgctgcggactcctccgcgagccccatcgtcgcgcctgtggacgcctaggcaagagcggccctctgcagccaagagaaataaaatactggcttccagat

SEQ ID NO: 691 - DNA, 1912 bp, Homo sapiens
  source 1..1912: mol_type = genomic DNA
attttcttccggtggctggtctccggcggccccgtccccgactgggccccgtgcccccccgcccccgcggccccccgccgccgggccagccgccaccatgaagaaattctttcaggagttcaaggccgacatcaagttcaagagcgcgggacccggtcagaagctcaaagagtccgtgggggaaaaggcccacaaagagaagcccaaccagccagcccccaggccgccccgccagggacccaccaatgaggcacagatggcagccgctgccgccctagcccggctggagcagaagcagtcccgggcctggggccccacatcgcaggacaccatccgaaaccaggtgagaaaggaacttcaagccgaagccaccgtcagcgggagccccgaggccccagggaccaacgtggtatctgagcccagagaggaaggctctgcccacctggctgtgcctggcgtgtacttcacctgtccgctcactggggccaccctgaggaaggaccagcgggacgcctgcatcaaggaggccattctcttgcacttctccaccgacccagtggccgcctccatcatgaagatctacacgttcaacaaagaccaggaccgggtgaagctgggtgtggacaccattgccaagtacctggacaacatccacctgcaccccgaggaggagaagtaccggaagatcaagctgcagaacaaggtgtttcaggagcgcattaactgcctggaagggacccacgagttttttgaggccattgggttccagaaggtgttgcttcccgcccaggatcaggaggaccccgaggagttctacgtgctgagcgagaccaccttggcccagccccagagcctggagaggcacaaggaacagctgctggctgcggagcccgtgcgcgccaagctggacaggcagcgccgcgtcttccagccctcgcccctggcctcgcagttcgaactgcctggggacttcttcaacctcacagcagaggagatcaagcgggagcagaggctcaggtccgaggcggtggagcggctgagcgtgctgcggaccaaggccatgcgggagaaggaggagcagcgggggctgcgcaagtacaactacacgctgctgcgcgtgcgcctccccgatggctgcctcctgcagggcactttctacgctcgggagcggctgggggcggtgtacgggttcgtccgggaggccctgcagagcgactggctgccttttgagctgctggcctcgggagggcagaagctgtccgaggacgagaacctggccttgaacgagtgcgggctggtgccctctgccctcctgaccttctcgtgggacatggctgtgctggaggacatcaaggccgcgggggccgagccggactccatcctgaaacccgagctcctgtcagccatcgagaagctcttgtgaaataaaagcagggttggcctcagccctgtgggtctgtctcatgctctccctgttcctctccccgccaccccagggcctccaagccacctctggaaatacttggctctgccccatgggcacgggaggggcgccagccgtggagctgtggaattgggccccgtggcagagcccccatcccttgggggctgtggggatgcgcccaagcccccgagggagaggcctggggacaccaacaaatctaagccctccctagctgcttggtaactgtgtcatgaagctgccggacagacacacgtggcatctccctgggcaggagagcaggcctgcagcatgggtcctgttcccgtgtgccgtgggtggcagtggctgcacctggcactagggctgctctgtggatgtgggtgacaacggcaggaggggatgctggccttcctgcacatagacctgcagttagtaaatcataagcccaaataaacaggttgtttgaat

SEQ ID NO: 692 - DNA, 2358 bp, Homo sapiens
  source 1..2358: mol_type = genomic DNA
ccagggacagcagcccctccagttggaggaggatcagagggcgtggcagcggctggagcagctcatcctgggacagctggaggagctgaagcagcagctggaacagcaggaggaggagttgggtcgactgcgcctgggcgtgggggcgacggactcagagaaaagggttcagcatctgactctggagaacgaggccctgaagcagagcctgagtctcatgcgggacctcctgctgcactggggccccgggccccccatcagggctccgcaggaggaggcagaggcattgctagagctccagggccggcttcaggaggcccaagacaccacagaagccctccgagcccagctgggggtgcaggaggtgcagctgcagggccttcaaggggccctccagcagctccagcaggagacggagcagaactgcaggcgtgagctacagcagatgcatgggcagctggcaggacttcgggcacggatggccagcctgcgtcagggctgcggggacctccgaggtttggtcagcacctttacccagagctgtcagggttcgctgagtgaggcccggggccaggtgtcctgggccttgggggcactgtcatctggagggcctggcactcagctccctgaggggcagcaagggcccccagccggatgcccagggcggctgccagaactcaagggaaatatccgtgtgctgtgtcggctgaggccagggacatcttctagccttgtgagtgtggagcctggcccagggggcaccgtcaccacctgctaccgggggcgccatcgtcgattccgcctagactgggtcttccctccagacgccagccaggaggaggtcttcagagagctggaacctgcggtgctgtcctgcctccgaggctacagcgtctgcatcttcacctatggccagacaggcaccgggaagacctacagcatggagggccctcctgaggaccccggcatagttcctagggcgctgcagtcgctgttccgggagatgggggccggccggcagcaccgcaggtaccacggccggtgcctgagccctgcggagtctccagagcacccgaggcccggccttcccccatgtcgggctcgctcgcccctctaggcacgctgcacctggtggacctggcgggatccgaacgcgcacggaaggcaggggcggccggcccgccgcggggagacccagacggcgcccggcgcctgcgggaggcccagaccataaaccgctcgctgctggcgctaggaggcgtgatggccgcactgcgggcccaccggccgcacgtgcccttccgcgactcgcagctcacgcgactgctgcagccggcgctgggcccaggcaccaccgcggtgctgctgctgcagatctccacgcggccggaggatctcggggagacagtctgctccctcaagttcgccgaccgagtgggtcaagtggagctggggccagcccggcgccgcagggtcccgcgctcctccgggacgccttcttccctcagcaccgacactccgctcaccgggaccccctgcacccctacgccgtcccctggcagtcctccatgccccagtcccgacaacggctcgggctcggctctcgcgcccgcagagggcctgcccctctagtcctgggtcgcggccctgcccatggggtctcaggccaggtctctgctggcagaggcggtagtaaagtccctgtaccccgtctcccagggcacaagctccctagcctctttggatccattgcccctgagctcccagagtcacccctccacctccgcagccagtgaagtgtgttgtgcctgctgaagtgatcaccccccgcccccagccctgcatcaggccacaggtcttggctttctccttatcaccatttgctgttatcacggcacacagcagggaatcccaggcccccccgccaagtggttacccaagtcaccactcctgacccaaaaatcaggcatggcattaaaacgttgcaaattcctttactgttatcccccccaccaccaggaccatgtagggtgcagtctttactccctaacccgtttcccgaaaaaggtgctacctcctttccagacagatgagagagggcaggacttcaggctggatccaccactgggctctccctcccccagcctggagcacgggaggggaggtgacggctggtgactgatggatgggtagtgggctgagaagaggggactaggaagggctattccaggctcagccctgctcctgcagctttgccgctgagtgtaggaaaaacaggcatgacagaccagggtgagggttgtgcccagctgggccacggccatgcgtggggtggcccaataaacaccgtggactccc

SEQ ID NO: 693 - DNA, 3646 bp, Homo sapiens
  source 1..3646: mol_type = genomic DNA
ggggctgtagggagaggaaggagaaccccggcgtgttgaaggctccgcgaaaccggagcggtgggggactacgcggagggtgggagggattccgagaggagggtcgcgggagccgtgggcgctctcagcccggtgtccgcggtgtaggggttggggcgcgccgggcggcgccgtgagaaacggcgggtctccaggtgcggccgcgggcacctgtttctagtacccccgtccccgcgctcgccttccagccgtgggagccgggccgtgggggcggccgtcgcgagcatgcgcaccggcactgcggcgggcgggcgccgagtctgggcgcggggacgcggggcggcgcgaagcggggccctctgccgccccgcgctcccatgtacgccttttactcgttgctcatctacatcttctacagcctcttccgcagggatggtggcgccgcggcggccgcggagcccggggaccccgcccagagagcccgcaagccccggggtcgccggcgcccagacctgcccgcgccagagctgtggaccgagctgaccggcctggccgccagctccgagcctgaggatgggtcggaaggcgcagccgagggccgcgcggccgcggtgtccctggaagaggccctactgcgcctcgccgagttcctctccgtccagctgggggcggaagagagctgcgggggcccggcggacctgggccagtctggcgaggtcccctcactgttgacagtgaccagtcagctcttggcccttctggcatggcttcgaagccccagggggaggcaggccctgctccaggggactcagccagcccctcgggtccggcccccctctccagatggatccacatcccaagaagaaagcccttcccacttcaccgcagtcccaggcgagccactgggggatgagacccagggacagcagcccctccagttggaggaggatcagagggcgtggcagcggctggagcagctcatcctgggacagctggaggagctgaagcagcagctggaacagcaggaggaggagttgggtcgactgcgcctgggcgtgggggcgacggactcagagaaaagggttcagcatctgactctggagaacgaggccctgaagcagagcctgagtctcatgcgggacctcctgctgcactggggccccgggccccccatcagggctccgcaggaggaggcagaggcattgctagagctccagggccggcttcaggaggcccaagacaccacagaagccctccgagcccagctgggggtgcaggaggtgcagctgcagggccttcaaggggccctccagcagctccagcaggagacggagcagaactgcaggcgtgagctacagcagatgcatgggcagctggcaggacttcgggcacggatggccagcctgcgtcagggctgcggggacctccgaggtttggtcagcacctttacccagagctgtcagggttcgctgagtgaggcccggggccaggtgtcctgggccttgggggcactgtcatctggagggcctggcactcagctccctgaggggcagcaagggcccccagccggatgcccagggcggctgccagaactcaagggaaatatccgtgtgctgtgtcggctgaggccagggacatcttctagccttgtgagtgtggagcctggcccagggggcaccgtcaccacctgctaccgggggcgccatcgtcgattccgcctagactgggtcttccctccagacgccagccaggaggaggtcttcagagagctggaacctgcggtgctgtcctgcctccgaggctacagcgtctgcatcttcacctatggccagacaggcaccgggaagacctacagcatggagggccctcctgaggaccccggcatagttcctagggcgctgcagtcgctgttccgggagatgggggccggccggcagcaccgggtgacactcagcatggtggagatctacaatgaggctgtcagggacctccttgctccagggcctcccgagcgcctggccgtgaggcagggcccagaaggccagggcgggatccaggtggctggcctcacccactgggacgtgcccaacctggagacattgcaccagatgctgaaactggggaggagcaaccgggccaccgccgccaccgccatgaaccagcgcagctcccgctcgcatgccctggtcacgctgacgctgcgcgcggcgtctccaccgcgcgctccaggcaccgcaggcacgctgcacctggtggacctggcgggatccgaacgcgcacggaaggcaggggcggccggcccgccgcggggagacccagacggcgcccggcgcctgcgggaggcccagaccataaaccgctcgctgctggcgctaggaggcgtgatggccgcactgcgggcccaccggccgcacgtgcccttccgcgactcgcagctcacgcgactgctgcagccggcgctgggcccaggcaccaccgcggtgctgctgctgcaggtgggcgccggggcggggcaggtgtgtgcgtgccggtcgccgcccacccgggcccgcccacccgcgcctcttgcccgcagatctccacgcggccggaggatctcggggagacagtctgctccctcaagttcgccgaccgagtgggtcaagtggagctggggccagcccggcgccgcagggtcccgcgctcctccgggacgccttcttccctcagcaccgacactccgctcaccgggaccccctgcacccctacgccgtcccctggcagtcctccatgccccagtcccgacaacggctcgggctcggctctcgcgcccgcagagggcctgcccctctagtcctgggtcgcggccctgcccatggggtctcaggccaggtctctgctggcagaggcggtagtaaagtccctgtaccccgtctcccagggcacaagctccctagcctctttggatccattgcccctgagctcccagagtcacccctccacctccgcagccagtgaagtgtgttgtgcctgctgaagtgatcaccccccgcccccagccctgcatcaggccacaggtcttggctttctccttatcaccatttgctgttatcacggcacacagcagggaatcccaggcccccccgccaagtggttacccaagtcaccactcctgacccaaaaatcaggcatggcattaaaacgttgcaaattcctttactgttatcccccccaccaccaggaccatgtagggtgcagtctttactccctaacccgtttcccgaaaaaggtgctacctcctttccagacagatgagagagggcaggacttcaggctggatccaccactgggctctccctcccccagcctggagcacgggaggggaggtgacggctggtgactgatggatgggtagtgggctgagaagaggggactaggaagggctattccaggctcagccctgctcctgcagctttgccgctgagtgtaggaaaaacaggcatgacagaccagggtgagggttgtgcccagctgggccacggccatgcgtggggtggcccaataaacaccgtggactcccagcaaggctgctgcctggtgtttcgaggctgctgtggtcgcagacagccgcctcgccttggctccctgtcaacaaggtgggggtggg

SEQ ID NO: 694 - DNA, 987 bp, Homo sapiens
  source 1..987: mol_type = genomic DNA
cgccgtgcacgtcttggttcgggccgggcataaaaggcttcgcggcccagggctcacttggcgctgagaacgcgggtccacgcgtgtgatcgtccgtgcgtctagcctttgcccacgcagctttcagtcatggcctccggtaacgcgcgcatcggaaagccagcccctgacttcaaggccacagcggtggttgatggcgccttcaaagaggtgaagctgtcggactacaaagggaagtacgtggtcctctttttctaccctctggacttcacttttgtgtgccccaccgagatcatcgcgttcagcaaccgtgcagaggacttccgcaagctgggctgtgaagtgctgggcgtctcggtggactctcagttcacccacctggcttggatcaacaccccccggaaagagggaggcttgggccccctgaacatccccctgcttgctgacgtgaccagacgcttgtctgaggattacggcgtgctgaaaacagatgagggcattgcctacaggggcctctttatcatcgatggcaagggtgtccttcgccagatcactgttaatgatttgcctgtgggacgctccgtggatgaggctctgcggctggtccaggccttccagtacacagacgagcatggggaagtttgtcccgctggctggaagcctggcagtgacacgattaagcccaacgtggatgacagcaaggaatatttctccaaacacaattaggctggctaacggatagtgagcttgtgcccctgcctaggtgcctgtgctgggtgtccacctgtgcccccacctgggtgccctatgctgacccaggaaaggccagacctgcccctccaaactccacagtatgggaccctggagggctaggccaaggccttctcatgcctccacctagaagctgaatagtgacgccctcccccaagcccacccagccgcacacaggcctagaggtaaccaataaagtattagggaaaggtgtga

SEQ ID NO: 695 - DNA, 1612 bp, Homo sapiens
  source 1..1612: mol_type = genomic DNA
gagcatcaccgcagaaacaaaggctccagcctccggacaccatgtctgtgcgcttttcttctacctccaggagacttggctcttgcgggggcactggctctgtgaggctctctagtgggggagcaggctttggggctggaaacacatgcggtgtgccaggcattggaagtggcttctcttgtgcttttgggggcagctcatctgcaggaggctatggcggaggtctgggcgggggaagtgcttcctgtgctgccttcacagggaatgagcacggcctcctctctggcaatgagaaggtgaccatgcagaacctcaacgaccgcttggcctcctacctggagaatgttcgagccctagaggaggccaacgctgacttggagcagaagatcaaggggtggtatgagaaatttggacctggttcttgccgtggccttgatcatgattacagcagatatttcccaattattgacgaacttaagaaccagataatttctgcaactaccagtaatgcccatgttgtcctgcaaaatgataatgcaagactaacagctgatgacttcagactaaagtttgaaaacgagctagcgcttcaccagagcgtggaggcggacatcaatggtttgcgaagagtcctggatgagctgaccttgtgcagaacggacctggagatccagctggaaactctcagtgaggagctcgcttacctcaagaagaatcatgaggaggaaatgaaagctcttcagtgcgcggctggaggcaacgtgaacgtggagatgaacgcggcccccggggtagacctcacggttctgctgaacaatatgcgagctgagtacgaagccctcgcagagcagaaccgcagggacgcggaggcctggttcaacgaaaagagcgcctcgctgcagcagcagatctctgacgacgctggcgccaccacctcagcccggaatgagcttatcgagatgaaacgcactcttcaaacccttgagattgaacttcagtccctcttagcaacgaaacactccctggagtgctccttgacagagaccgagagtaactactgtgcacagctggcacagatccaggctcagatcggggccctggaggagcagctgcaccaggtcagaaccgagaccgagggccagaagctcgagtatgagcagctccttgacatcaaggtccacctggaaaaagaaattgagacctactgcctcctgatagatggagaagatggctcctgttctaaatcaaaaggctatggaggcccaggaaatcaaacaaaagattcatctaaaaccaccattgtcaaaacagttgttgaagagatagatcctcgtggcaaagttctctcatccagagttcacactgtggaagagaaatccaccaaagtcaacaacaagaatgaacagagggtgtcttcctgaactccagcctctgagacagaatggcccccaaattaaaataccaaaatgaagctagtttcctaaataagggtccccttatttttctgcttttcttccaatgaattaagacaagttatttttagaatagtaccatttctttggctttttctctatggtggtgtttcaataaaagttcttcctgttgcaagtca

SEQ ID NO: 696 - DNA, 1376 bp, Homo sapiens
  source 1..1376: mol_type = genomic DNA
tgaaaatgccgtcggtttcgaaagcggcggcagcggcgctgagcgggtcccccccgcagactgagaagccgacccactacaggtacctgaaggagttcaggacggagcagtgccccctgttttcacagcacaagtgcgcgcagcaccggccgttcacctgcttccactggcacttcctcaaccagcggcgccgcaggcccctccgcaggcgcgacggcaccttcaactacagccccgacgtgtactgctccaagtacaacgaagccaccggcgtgtgccccgacggcgacgagtgtccctacctgcaccggacgacgggggacacagaacgcaagtaccacctgcgttactacaaaacaggaacctgcatccacgagacagacgcacgtggccactgcgtgaagaatgggctgcactgtgccttcgcgcacggccccctggacctgcggccgcccgtgtgtgacgtcagggagctgcaggcccaggaagccttgcagaacggccagctgggcggcggggaaggggtcccggatctgcagcctggggtcttggccagccaggccatgattgagaagatcctgagcgaggacccccggtggcaagatgccaacttcgtgctgggcagctacaagacggagcagtgcccgaagccgccacgcctgtgccgccagggctatgcgtgcccacactaccacaatagccgggacaggcggcgcaacccccggcggttccagtacagctggcagctgggacgccgggtccttaggctgagtcccagggccaacaacccaagggtcgccctgcccagggtgcacacaggaccttcctccaccgcctgagccccagctgtcccctgggtctggcttgtgggtttggcacctcgcagcctgcttgcctctgaagcccctttctcctccttgctccagcccggccttctggttgtgcctggcctggcttgcctcctgtctgcagtttgcacctgagaggggggtgggggggtgcagaccccacagggtgtctggatgcctgggccatggccttggcctccctgaggccctgtctgtgtccagctcttcctttgagcagagagccaccctcgcctcttttgaatgacctggtgctgcctcgcatgccccggagagcacctgtgcttcctttgggaaggacgccccactccttgttgttatgccacgttcagtctccctctgagcagcttccgagtaaaggacctgaacggctgtagaacaaaccacaaattagtgtctgagattttgtcatcgcccgtcatggaaagaaaataaaaattattttttcaacaggcacttaatgtgtcccataaatacaaatcagttacaataaagcagctagagattcca

SEQ ID NO: 697 - DNA, 1271 bp, Homo sapiens
  source 1..1271: mol_type = genomic DNA
ggcgccggcctcggcggctgaggaaagcaggaggaggtggcggcggcgggaagatgacgcgcacctttccggaggatgggggaggtaaccgaggtcctgagccggtacctgaacttgggctgctctttggcgtaaattgcaatcgattagggatcgtttctcagaatcaagttagaagtgagagttcagataagtgaggccgccattgctgctttgaacacctcagaaggggagaatggatttatcaggagtgaaaaagaagagcttgctaggagtcaaagaaaataataaaaagtccagcactagggctccttcacctaccaaacgcaaagaccgctcagatgagaagtccaaggatcgctcaaaagataaaggggccaccaaggagtcgagtgagaaggatcgcggccgggacaaaacccgaaagaggcgcagcgcttccagtggtagcagcagtaccaggtctcggtccagctcgacttccagctcaggctccagcaccagcactggctcaagcagtggctccagctcttcctcagcatccagccgctcaggaagctccagcacctcccgcagctccagctctagcagctcttctggctctccaagtccttctcggcgcagacacgacaacaggaggcgctcccgctccaaatccaaaccacctaaaagagatgaaaaggagaggaaaaggcggagcccatctcctaagcccaccaaagtgcacattgggagactcacccggaatgtgacaaaggatcacatcatggagatattttccacctatgggaaaattaaaatgattgacatgcccgtggaaaggatgcatccccatctgtccaaaggctatgcgtacgtagagtttgagaatccagatgaagccgagaaggcgctgaagcacatggatggaggacaaattgatggccaggagatcactgccaccgccgtgctggccccctggcctaggccaccccccaggagattcagccctcccaggagaatgttgccaccaccgcctatgtggcgcaggtctcccccacggatgaggagaaggtcccgctccccgaggcgcaggtcccccgtgcgccggagatcacggtccccgggccgccgccgccacaggagccgctccagctccaactcctcccgataaacaggccactgaagctctcgcccctgtaacttataccccacccagctcagttttgtcacttttctagccaaaggaagaccagtaggaaagcaaacccttgactctggcaggatttgca

SEQ ID NO: 698 - DNA, 6391 bp, Homo sapiens
  source 1..6391: mol_type = genomic DNA
acagccggtgggctcggtggggctgcagaaggtcggggctgcactgctctcggcccccacacggttggttggttggcgtggtaagtgccctgatccctggtcctgagaactcaggctggcacagggattcccagggcatctaccaccacgcagctggagcagggctgagcccaggagcatggagatggacgcccccaggccccccagtcttgctgtccctggagcagcatcgaggcccgggagaactgtggacaacggaaggctgagccccatccattgagttcctggggccccactggaggggctgctgtggccagggtgcacggtgaggaggcgagcagggtgggtgggggcgagttcccggcctgccctctcttcacagctcctggaggtgatccccgactccatgaggaagcaagaggtgcggacgggcagggaggccggccagggccacggtacgggctccccagccgagcaggtgaaagccctcatggatctgctggctgggaagggcagtcaaggctcccaggccccgcaggccctggataggacaccggatgccccgctggggccctgcagcaatgactcaaggatacagaggcaccgcaaggccctgctgagcaaggtgggaggtggcccggagctgggcggaccctggcacaggctggcctccctcctgctggtggagggcctgacggacctgcagctgagggaacacgacttcacacaggtggaggccacccgcgggggcgggcaccccgccaggaccgtcgccctggaccggctcttcctgcctctctcccgggtgtctgtcccaccccgggtctccatcactatcggggtggccggcatgggcaagaccaccctggtgaggcacttcgtccgcctctgggcccatgggcaggtcggcaaggacttctcgctggtgctgcctctgaccttccgggatctcaacacccacgagaagctgtgtgccgaccgactcatctgctcggtcttcccgcacgtcggggagcccagcctggcggtggcagtcccagccagggccctcctgatcctggacggcttggatgagtgcaggacgcctctggacttctccaacaccgtggcctgcacggacccaaagaaggagatcccggtggaccacctgatcaccaacatcatccgtggcaacctctttccggaagtttccatctggatcacctcccgtcccagtgcatctggccagatcccagggggcctggtggaccggatgacggagatccggggctttaacgaggaggagatcaaggtgtgtttggagcagatgttccccgaggaccaggcccttctgggctggatgctgagccaagtgcaggctgacagggccctgtacctgatgtgcaccgtcccagccttctgcaggctcacggggatggcgctaggccacctgtggcgcagcaggacggggccccaggatgcagagctgtggcccccgaggaccctgtgcgagctctactcatggtactttaggatggccctcagcggggaggggcaggagaagggcaaggcaagccctcgcatcgagcaggtggcccatggtggccgcaagatggtggggacattgggccgtctggccttccatgggctgctcaagaagaaatacgtgttttacgagcaagacatgaaggcgtttggtgtagacctcgctctgctgcagggcgccccgtgcagctgcttcctgcagagagaggagacgttggcatcgtcagtggcctactgcttcacccacctgtccctgcaggagtttgtggcagccgcgtattactatggcgcatccaggagggccatcttcgacctcttcactgagagcggcgtatcctggcccaggctgggcttcctcacgcatttcaggagcgcagcccagcgggccatgcaggcagaggacgggaggctggacgtgttcctgcgcttcctctccggcctcttgtctccgagggtcaatgccctcctggccggctccctgctggcccaaggcgagcaccaggcctaccggacccaggtggctgagctcctgcagggctgcctgcgccccgatgccgcagtctgtgcacgggccatcaacgtgttgcactgcctgcatgagctgcagcacaccgagctggcccgcagcgtggaggaggccatggagagcggggccctggccaggctgactggtcccgcgcaccgcgctgccctggcctacctcctgcaggtgtccgacgcctgtgcccaggaggccaacctgtccctgagcctcagccagggcgtccttcagagcctgctgccccagctgctctactgccggaagctcaggctggacaccaaccagttccaggaccccgtgatggagctgctgggcagcgtgctgagtgggaaggactgtcgcattcagaagatcagcttggcggagaaccagatcagtaacaaaggggccaaagctctggccagatccctcttggtcaacagaagtctgacctctctggacctccgcggtaactccattggaccacaaggggccaaggcgctggcagacgctttgaagatcaaccgcaccctgacctccctgagcctccagggcaacaccgttagggatgatggtgccaggtccatggctgaggccttggcctccaaccggaccctctccatgctgcacctgcagaagaacagcatcgggcccatgggagcccagcggatggcagatgccttgaagcagaacaggagtctgaaagagctcatgttctccagtaatagtattggtgatggaggtgccaaggccctggctgaggccctgaaggtgaaccagggcctggagagcctggacctgcagagcaattccatcagtgacgcaggagtggcagcactgatgggggccctctgcaccaaccagaccctcctcagcctcagccttcgagaaaactccatcagtcccgagggagcccaggccatcgctcatgccctctgcgccaacagcaccctgaagaacctggacctgacagccaacctcctccacgaccagggtgcccgggccatcgcagtggcagtgagagaaaaccgcaccctcacctcccttcacctgcagtggaacttcatccaggccggcgctgcccaggccctgggacaagcactacagctcaacaggagcctcaccagcttagatttacaggagaacgccatcggggatgacggagcgtgtgcggtggcccgtgcactgaaggtcaacacagccctcactgctctctatctccaggtggcctcaattggtgcttcaggcgcccaggtgctaggggaagccttggctgtgaacagaaccttggagattctcgacttaagaggaaatgccattggggtggctggagccaaagccctggcaaatgctctgaaggtaaactcaagtctccggagactcaatcttcaagagaattctctggggatggacggggcgatatgcattgccacagcactgtctggaaaccacaggctccagcatatcaatctccagggaaaccacattggggactccggggccaggatgatctcagaggccatcaagacaaatgctcccacgtgcactgttgaaatgtgatcctggtggacggatcaggagaatgggcagatgctcagctggaagcttttgaacagaaaggccgacttctggggggcctgtctgggagctgggaacgctgcttgctcagcacgagagccgggctctgcagggaggaaggagaggtgctgccggaggaggtcgtgagctcctcttctgctgcaggagtggtccaggcagggggtgacgggtactctgttatggcacagagaagggaggggccacccccaagggactaggggccaaaggcctgaaagctgagcagtacaggaggctggttccagctttacaccctgaggacttcatgtgtccccaacctttaaaaatgtttattactgcccctttccactcacctggttaaaaatcatcccatgctctgagatgagctgccacctcaagcccgtgaggagcatccgtttggtaggggtaacagaggggacccttctttatcttctcaagaagaagatttcagggtatcatccttacagacatgaaaaagctatgggaaaattgtgaagataaatgaaagttttaattctaggattctggaaacagagacagtaagagttctccaaggattttgccttttttgtttgtttttgagatggagtctcgctcttgtcgcccaggctggagtgcagtggcacgatctcagctccctgcaacctccgcctcccgggttcatgtgattctcctgcctcagcctccccagtagctgggaatacaggcacccgccaccatgcccggctaatttttgtagttttagtagagacggggtttcatcatgttggccaggctggtctcgaactcctgacctcaggtgatccatcagcctgggcctcccaaagtactgggattacaggcatgagccaccacacctggccccattttttatttattacaaaatcaaagacatgggtgatgcctggcacatgttgtctggagtctggcacactggttatcaatagcacattcagtgtattcagtgatgtcattctttatttatttttgagacagaatctgtcacccaggctggagtgcagtggcatgatctcagctcactgtaggctctacctcatgggttccagtgattctcctgcctcggcctcccaagtagttgggtctacaggcacgcaccaccacacccagctaatttttgtatttttagtagagatggggtttcaccatgttgatcaggctggtctttaactcctgacctcaagtgatccacccacctcagcctcccaaagtgctgggattacaggtgtgagccactgcacctggcagtgatgtcattccttactaggcttccaaagccactgctgtggccacagcttccatggagacaggcaagctgagcctctatgtggcaccaattcctgcagctgtttgtgttggagggaaaaaaatccaaatggacatcaacagctttcatcaactaaataaccacagaaaatatttatgaagactataaagcaatgattacttttgaattggaaaggaatcactattatttgaaatgtttcttcaaaagtgagcatccggacaggaaccatcatggatgctgaggccatggatgaaggcctactcgggaagatgatatccttgcagtctcaaaacggcaccccacaaaggtgatatcctaatttacaaagggaaaaaggtaccttaatctgaaatctggcaaatgcagcctcaacagaagtgacagaattgaacatcgccaataatgggacacacagacatcacatgcccccagtctgatgcaccacggagtcgtctctgatgtattcttgtcaaaaaatgtttgcctgattctaatcatgaaagaacaattagaaaaaatccaaattgacagatattctgcagaataaatggcctgacctcatcaaaaacatcaatgtcatgaaaaacacaaaacattgcagatagcgtgaaattaaagattacagagatataatttaatgcaagatctctgactggatcctagactgcaggaaaaagtctgctataaagaacatttggatcacttgtagtagctgggaaataaaacaaaacattatttgtaaaaggggggaaatctgaacatgggtcttgcagtatttatgacagtttttgcggggcagagatttctagattgacagctgttttagtactttcaaggtgatgctctgtctgctggtttgcattgtttctgtctgagttaagagactggcagaacacagagttgcagtagccaaacactggagaaagctgggccctacagaaacctaacgctgaagaaacctcaggagccaaactggtggagaaaacaaagagtcctccctctctcccttttcaaataatgatcatacatcttcaagctgtctgaaatggttaaggagttcagtctgtcgtcaggcacacaccagagccagctagcccacacagaccccatcagagcaaaacagacaagagaatttaattcatatccacatagaaaggacttctaggtaggaggtagaccctttagctcccttccaattaaaggagtccccaattctggcacctgagagtcccctgggtctaacagctatgatatttatgtagtgtgttgcttacctaaatgaatacaatttccttccagacacgtgacactgatattaaagtgctaatgagagggatctatttcttcttgtacgctaaaagagaaacagcagttcagatttcccatcagaagtccgaggactttgttcttgataactactaccaataaaaattgagtatttg

SEQ ID NO: 699 - DNA, 2182 bp, Homo sapiens
  source 1..2182: mol_type = genomic DNA
gaccagagcggttgcgggctgagcggtttcgagccggcgtcggggagcggcggtaccgggcggctgcggggctggctcgacccagcttgaggtctcggcgtccgcgtcctgcggtgccctgggatccgccgacatgaatcccatcgtagtggtccacggcggcggagccggtcccatctccaaggatcggaaggagcgagtgcaccagggcatggtcagagccgccaccgtgggctacggcatcctccgggagggcgggagcgccgtggatgccgtagagggagctgtcgtcgccctggaagacgatcccgagttcaacgcaggttgtgggtctgtcttgaacacaaatggtgaggttgaaatggatgctagtatcatggatggaaaagacctgtctgcaggagcagtgtccgcagtccagtgtatagcaaatcccattaaacttgctcggcttgtcatggaaaagacacctcattgctttctgactgaccaaggcgcagcgcagtttgcagcagctatgggggttccagagattcctggagaaaaactggtgacagagagaaacaaaaagcgcctggaaaaagagaagcatgaaaaaggtgctcagaaaacagattgtcaaaaaaacttgggaaccgtgggtgctgttgccttggactgcaaagggaatgtagcctacgcaacctccacaggcggtatcgttaataaaatggtcggccgcgttggggactcaccgtgtctaggagctggaggttatgccgacaatgacatcggagccgtctcaaccacagggcatggggaaagcatcctgaaggtgaacctggctagactcaccctgttccacatagaacaaggaaagacggtagaagaggctgcggacctatcgttgggttatatgaagtcaagggttaaaggtttaggtggcctcatcgtggttagcaaaacaggagactgggtggcaaagtggacctccacctccatgccctgggcagccgccaaggacggcaagctgcacttcggaattgatcctgacgatactactatcaccgaccttccctaagccgctggaagattgtattccagatgctagcttagaggtcaagtacagtctcctcatgagacatagcctaatcaattagatctagaattggaaaaattgtcccgtctgtcacttgttttgttgccttaataagcatctgaatgtttggttgtggggcgggttctgaagcgatgagagaaatgcccgtattaggaggattacttgagcccaggaggtcaaagctgaggtgagccatgattactccactgcactccagcctgggcaacagagccaggccctgtatcaaaaaaaaaaaaaaaaagaaaagggaaaaaagaaagaaagcagcagcatgatcctgacatgacagatgtgggagacccacagcctgcagacactgtgggctggaaggtgggaagggaggggccggtggaggtggagctgtttgaaagtgacacagcagcagtagaagcagtggtgggcgaagcccaggtgaccctcagaacgttgcacaagaacatcagggaaaagaaccagaatcctttaaggaaaatgttcttcatgtatgagagactaaagtgatttttctaagaaagttcagcccttctctgacttacctggacatttctagatacttccaaaggaccctctgggaatccatagcttcctaatctggagatgggaggtcataagggagacgctgtggggttccttgaagtttcttgggttcacagaggagccccctcacttggtgttctcccgtgagccagcctccacctgccaaagacactctggtcctcgtatagtgagtaatggggctcagggcctctccaacaacagagaggagctgatgctgtagggctgaccccgtgacttcctgagtcctcaccctgtccagtgctttgagattcttcccacctccccatcctcaccagccggatcgggcgctgtgcagtgtggtcagcatggtgaagaaagtcatttcctcggtgggcagtattcctctttatctctcattacactggaaatgttatttctgctgtatcatccgtgctcaacgttttagtctgtcaggctcaccttctctctggaaagaatttgcttaacttgacattccatgtgccgctaataaaatatattttg

SEQ ID NO: 700 - DNA, 1513 bp, Homo sapiens
  source 1..1513: mol_type = genomic DNA
gcccgggctacacgttaaaaacactaaggggagcgcgcgaagctgaacttggcgctcgatgggggccgttagccgccctagagcgcgcggagccgcagaggcgtagctggactacaacgcagtgcatctcgggaggccaactcgactggactgggtgagaggacagaggtggctcgatgggcggcccgaaggccggggatcatggcgggaaggcgggcccagacaggttcagccccgccccgacccgccgctccccaccccccggcctcgcgtgccttcccgcagcactgccgtccccgggatgctgagcgcccaccgtctccccgcagccccctcatgcccggctgcgagctgcccgtgggcacctgcccggacatgtgcccggccgccgagcgcgcccagcgcgaaagggagcaccgcctgcaccgcttggaggtggtgccgggttgccgccaggacccgccccgcgcggatccgcagcgcgcggtgaaggagtacagccgacccgccgccggcaagccccggcccccgcccagccagttgcgtccgccctccgtgctgctggccaccgtgcgctacctggccggtgaggtggcggagagcgccgacatcgcccgcgccgaggtggccagcttcgtggcagaccgcttgcgagctgtgctcctggacctggcgctgcagggagcgggcgacgccgaggcagctgtggtgctggaggcggcgctggccacgctgctgaccgtagtggcgcggctcgggcccgacgcggcgcggggacccgcggacccggtgctgctgcaggcccaggtgcaggagggcttcggctcgctgcggcgctgctacgcgcggggcgccgggccgcacccccgccaacccgccttccagggcctctttctgctctataacctgggctcggtggaagccctgcatgaggttctacagctgcctgctgccctgcgcgcctgcccgcccctccgcaaggccttggcggtagatgctgccttccgagagggcaatgctgcccgcctgttccgtctgctccagaccctgccctacctgccaagttgcgctgtgcagtgccatgtgggccatgcccgccgggaagccctggcccgcttcgctcgtgcctttagcacccccaagggccagaccttgcctctgggcttcatggtcaacctcttggccctggatggactcagggaagcacgggacctgtgccaggcccacgggctgcccttggacggagaggagagagttgtgttcctgaggggtcgctacgtggaggaagggctaccgcctgccagtacgtgcaaggtgttagtggagagcaaacttcgaggacgtaccctggaggaggtggtcatggcagaggaggaagatgagggcacggacagacctgggtccccagcctgaggagggagcgtgagcctcccagagccccaggactgggccagagcacttaggtttctttttccatggtttccaggtaataaaaggaacttgttttgttggt

SEQ ID NO: 701 - DNA, 1153 bp, Homo sapiens
  source 1..1153: mol_type = genomic DNA
cgcttcccctcggctttcttctcgtcggtgttcccggctgctatagagccgggtgagagagcgagcgcccgtcggcgggtgtcgagggcgggttgcctcgcgctgacccttcccgccctccttctcgtcacacaccaggtccccgcggaagccgcggtgtcggcgccatggcggagctgacggctcttgagagtctcatcgagatgggcttccccaggggacgcgcggagaaggctctggccctcacagggaaccagggcatcgaggctgcgatggactggctgatggagcacgaagacgaccccgatgtggacgagcctttagagactccccttggacatatcctgggacgggagcccacttcctcagagcaaggcggccttgaaggatctggttctgctgccggagaaggcaaacccgctttgagtgaagaggaaagacaggaacaaactaagaggatgttggagctggtggcccagaagcagcgggagcgtgaagaaagagaggaacgggaggcattggaacgggaacggcagcgcaggagacaagggcaagagttgtcagcagcacgacagcggctacaggaagatgagatgcgccgggctgctgaggagaggcggagggaaaaggccgaggagttagcagccagacaaagagttagagaaaagatcgagagggacaaagcagagagagccaagaagtatggtggcagtgtgggctctcagccacccccagtggcaccagagccaggtcctgttccctcttctcccagccaggagcctcccaccaagcgggagtatgaccagtgtcgcatacaggtcaggctgccagatgggacctcactgacccagacgttccgggcccgggaacagctggcagctgtgaggctctatgtggagctccaccgtggggaggaactaggtgggggccaggaccctgtgcaattgctcagtggcttccccagacgggccttctcagaagctgacatggagcggcctctgcaggagctgggactcgtgccttctgctgttctcattgtggccaagaaatgtcccagctgagggcctttgtcccattgtccctctgtgaccccttcatctttgataaagcactgacatctccttcctaataaatagaccctgagttctgtaca

SEQ ID NO: 702 - DNA, 825 bp, Homo sapiens
  source 1..825: mol_type = genomic DNA
cacacacacatctgcacctcaaccacagactacacttgctgaactggctcctggggccatgaggctgtcactgccactgctgctgctgctgctgggagcctgggccatcccagggggcctcggggacagggcgccactcacagccacagccccacaactggatgatgaggagatgtactcagcccacatgcccgctcacctgcgctgtgatgcctgcagagctgtggcttaccagatgtggcaaaatctggcaaaggcagagaccaaacttcatacctcaaactctggggggcggcgggagctgagcgagttggtctacacggatgtcctggaccggagctgctcccggaactggcaggactacggagttcgagaagtggaccaagtgaaacgtctcacaggcccaggacttagcgaggggccagagccaagcatcagcgtgatggtcacagggggcccctggcctaccaggctctccaggacatgtttgcactacttgggggagtttggagaagaccagatctatgaagcccaccaacaaggccgaggggctctggaggcattgctatgtgggggaccccagggggcctgctcagagaaggtgtcagccacaagagaagagctctagtcctggactctaccctcctctgaaagaagctggggcttgctctgacggtctccactcccgtctgcaggcagccaggagggcaggaagcccttgctctgtgctgccatcctgcctccctcctccagcctcagggcactcgggcctgggtgggagtcaacgccttcccctctggactcaaataaaacccagtgacctca

SEQ ID NO: 703 - DNA, 3282 bp, Homo sapiens
  source 1..3282: mol_type = genomic DNA
ctggtctgcggctgagatacacagagcgacagagacatttattgttatttgttttttggtggcaaaaagggaaaatggcgaacgactcccctgcaaaaagtctggtggacatcgacctctcctccctgcgggatcctgctgggatttttgagctggtggaagtggttggaaatggcacctatggacaagtctataagggtcgacatgttaaaacgggtcagttggcagccatcaaagttatggatgtcactgaggatgaagaggaagaaatcaaactggagataaatatgctaaagaaatactctcatcacagaaacattgcaacatattatggtgctttcatcaaaaagagccctccaggacatgatgaccaactctggcttgttatggagttctgtggggctgggtccattacagaccttgtgaagaacaccaaagggaacacactcaaagaagactggatcgcttacatctccagagaaatcctgaggggactggcacatcttcacattcatcatgtgattcaccgggatatcaagggccagaatgtgttgctgactgagaatgcagaggtgaaacttgatgaaactgagtatgagtacagtgggagtgaggaagaagaggaggaagtgcctgaacaggaaggagagccaagttccattgtgaacgtgcctggtgagtctactcttcgccgagatttcctgagactgcagcaggagaacaaggaacgttccgaggctcttcggagacaacagttactacaggagcaacagctccgggagcaggaagaatataaaaggcaactgctggcagagagacagaagcggattgagcagcagaaagaacagaggcgacggctagaagagcaacaaaggagagagcgggaagctagaaggcagcaggaacgtgaacagcgaaggagagaacaagaagaaaagaggcgtctagaggagttggagagaaggcgcaaagaagaagaggagaggagacgggcagaagaagaaaagaggagagttgaaagagaacaggagtatatcaggcgacagctagaagaggagcagcggcacttggaagtccttcagcagcagctgctccaggagcaggccatgttactggagtgccgatggcgggagatggaggagcaccggcaggcagagaggctccagaggcagttgcaacaagaacaagcatatctcctgtctctacagcatgaccataggaggccgcacccgcagcactcgcagcagccgccaccaccgcagcaggaaaggagcaagccaagcttccatgctcccgagcccaaagcccactacgagcctgctgaccgagcgcgagaggttcctgtgagaacaacatctcgctcccctgttctgtcccgtcgagattccccactgcagggcagtgggcagcagaatagccaggcaggacagagaaactccaccagcagtattgagcccaggcttctgtgggagagagtggagaagctggtgcccagacctggcagtggcagctcctcagggtccagcaactcaggatcccagcccgggtctcaccctgggtctcagagtggctccggggaacgcttcagagtgagatcatcatccaagtctgaaggctctccatctcagcgcctggaaaatgcagtgaaaaaacctgaagataaaaaggaagttttcagacccctcaagcctgctgtaaggattgatctgaccgcactggccaaagagcttcgagcagtggaagatgtacggccacctcacaaagtaacggactactcctcatccagtgaggagtcggggacgacggatgaggaggacgacgatgtggagcaggaaggggctgacgagtccacctcaggaccagaggacaccagagcagcgtcatctctgaatttgagcaatggtgaaacggaatctgtgaaaaccatgattgtccatgatgatgtagaaagtgagccggccatgaccccatccaaggagggcactctaatcgtccgccagactcagtccgctagtagcacactccagaaacacaaatcttcctcctcctttacaccttttatagaccccagattactacagatttctccatctagcggaacaacagtgacatctgtggtgggattttcctgtgatgggatgagaccagaagccataaggcaagatcctacccggaaaggctcagtggtcaatgtgaatcctaccaacactaggccacagagtgacaccccggagattcgtaaatacaagaagaggtttaactctgagattctgtgtgctgccttatggggagtgaatttgctagtgggtacagagagtggcctgatgctgctggacagaagtggccaagggaaggtctatcctcttatcaaccgaagacgatttcaacaaatggacgtacttgagggcttgaatgtcttggtgacaatatctggcaaaaaggataagttacgtgtctactatttgtcctggttaagaaataaaatacttcacaatgatccagaagttgagaagaagcagggatggacaaccgtaggggatttggaaggatgtgtacattataaagttgtaaaatatgaaagaatcaaatttctggtgattgctttgaagagttctgtggaagtctatgcgtgggcaccaaagccatatcacaaatttatggcctttaagtcatttggagaattggtacataagccattactggtggatctcactgttgaggaaggccagaggttgaaagtgatctatggatcctgtgctggattccatgctgttgatgtggattcaggatcagtctatgacatttatctaccaacacatatccagtgtagcatcaaaccccatgcaatcatcatcctccccaatacagatggaatggagcttctggtgtgctatgaagatgagggggtttatgtaaacacatatggaaggatcaccaaggatgtagttctacagtggggagagatgcctacatcagtagcatatattcgatccaatcagacaatgggctggggagagaaggccatagagatccgatctgtggaaactggtcacttggatggtgtgttcatgcacaaaagggctcaaagactaaaattcttgtgtgaacgcaatgacaaggtgttctttgcctctgttcggtctggtggcagcagtcaggtttatttcatgaccttaggcaggacttctcttctgagctggtagaagcagtgtgatccagggattactggcctccagagtcttcaagatcctgagaacttggaattccttgtaactggagctc

SEQ ID NO: 704 - DNA, 2901 bp, Homo sapiens
  source 1..2901: mol_type = genomic DNA
tggcgaggttagggcccgcgttgcgacgtggtgcagcgcatattttcacaagtgggtctcccttgtccgggactatggccaccgactcgtgggccctggcggtggacgagcaggaagcggctgtcaagtcgatgaccaatttgcagatcaaggaagagaaagtcaaagcagataccaatggtattatcaaaaccagtaccactgccgagaaaacagatgaagaggagaaagaggacagagctgcccagtccttactcaacaagctgatcagaagcaaccttgttgataacacaaaccaagtggaagtcctgcaacgggatccaaactcccctctgtactcggtgaagtcgtttgaagagcttcggctgaaaccacagcttctccagggagtctatgccatgggcttcaatcgaccctccaagatacaagagaacgcattacccatgatgcttgctgaacccccacagaatctgattgcccagtctcagtctggcactggtaaaacagctgcctttgtcttagccatgctcagccgagtggagccatcagacagatacccccagtgtctgtgcctctccccaacatatgagctggcgcttcaaacaggaaaagtgattgagcagatgggcaaattttacccagaactgaagcttgcctatgccgttcgaggcaataaattggaaagaggccagaagatcagtgagcagattgtcattggcacccctgggaccgtgctggactggtgctccaagctcaagttcattgatcccaagaaaatcaaggtgtttgttctggatgaggctgatgtcatgatagccactcagggccaccaagatcagagcatccgcatccagaggatgctgcccaggaactgccagatgctgcttttctccgccacctttgaagactctgtgtggaagtttgcccagaaagtggtcccagacccaaatgttatcaaactgaagcgtgaggaagagaccctggataccatcaagcagtactatgtcctgtgcagcagcagagacgagaagttccaggccttgtgtaacctctacggggccatcaccattgctcaagccatgatcttctgccatactcgcaaaacagctagttggctggcagcagagctctcaaaagaaggccaccaggtggctctgctgagtggggagatgatggtggagcagagggctgcggtgattgagcgcttccgagagggcaaagagaaggttttggtgaccaccaacgtgtgtgcccgcggcattgatgttgaacaagtgtctgtcgtcatcaactttgatcttcccgtggacaaggacgggaatcctgacaatgagacctacctgcaccggatcgggcgcacgggccgctttggcaagaggggcctggcagtgaacatggtggacagcaagcacagcatgaacatcctgaacagaatccaggagcattttaataagaagatagaaagattggacacagatgatttggacgagattgagaaaatagccaactgagaagctccaccagccactgatgccagccctggcactgcccctgcacaggagacaagtgcatttagggcacaggccccgacatcaccccaaggacaacggcagaagtagagagaaactacctacctcacttcaaattatgtttggacttgacaaaaataggtgcaaatgatggggggcaatagaagaaaaaatttgcattttggaaaattgggtcctttccccacttttttaaagccacattcccccatctttataataatctggtcacagtggtagtcgctggccccaggaccccctcctgattttggctaggcatcgtggaaccagctccagcccctgaagaaacgatagatgtgcaggttgtgcggaagaggctgagtggaaaatggtgtgagccccaccgctgtgcatcgaatgagggaagtggcagcagagaggccagagctgccccctctctgtctcttcaatggacccttcacaagtgtttctcctgcccttggggctgtcttccttctcctgaaatccagagactttcttgctcatcccttctccctttcacttctgttctctgctgcagaaagcagacttgcatatccctgatgagcagctcggctacttttgtaaacttcagatttggagagaaacacgaaagtctgaatcctgaccccttgagagagagtgatctggcgagggccgatgaaggggctgggcctggtcttgccttctcttctctcggttgctccctctgcctaggcccctggtactcagtcacggcagccaggagaccccaggtgagtttctgagcgcatacgtagttggttcttacccccaggtgtcacacggggccgagagctgagcaagaatttggaatggaagttatgaccaagggaattatgctgttcatttataatagtggacattatggagagctctgattcctacataatatgaataaggatggataggccgggcgtggtggctcatgcctataatcccagcacgttgggaggctgaggcgggcggatcggttgagctcaggcgttcgggaccagcctggccaacatgatgaaaccccgtctctaccaaaaatagaaaaaaatatagccgggcctggtggcgcacgcctgtagtcccagctactcgggaggctgaggtaggaggatcgcttgagcctgggtagaggctgctgtgagctgaaatggcgccactgcactccagcctgggtaacagagcgagaccccgactcaataaataaataaggatggataaattgtagcgtatgcaccattcattatgctaagacattttaaagtaattatgagaaacgctctactaatgatttgtttttatttgtatttttctgcttattagacaaatatatactcatttt

SEQ ID NO: 705 - DNA, 2995 bp, Homo sapiens
  source 1..2995: mol_type = genomic DNA
agaatgatgatgtcgcacgctgggtgggaactgacgtcacctgtgctcaccgccgcttccggtccgcgtgaggtgcattctcgcgccggtggcgaggttagggcccgcgttgcgacgtggtgcagcgcatattttcacaagtgggtctcccttgtccgggactatggccaccgactcgtgggccctggcggtggacgagcaggaagcggctgtcaagtcgatgaccaatttgcagatcaaggaagagaaagtcaaagcagataccaatggtattatcaaaaccagtaccactgccgagaaaacagatgaagaggagaaagaggacagagctgcccagtccttactcaacaagctgatcagaagcaaccttgttgataacacaaaccaagtggaagtcctgcaacgggatccaaactcccctctgtactcggtgaagtcgtttgaagagcttcggctgaaaccacagcttctccagggagtctatgccatgggcttcaatcgaccctccaagatacaagagaacgcattacccatgatgcttgctgaacccccacagaatctgattgcccagtctcagtctggcactggtaaaacagctgcctttgtcttagccatgctcagccgagtggagccatcagacagatacccccagtgtctgtgcctctccccaacatatgagctggcgcttcaaacaggaaaagtgattgagcagatgggcaaattttacccagaactgaagcttgcctatgccgttcgaggcaataaattggaaagaggccagaagatcagtgagcagattgtcattggcacccctgggaccgtgctggactggtgctccaagctcaagttcattgatcccaagaaaatcaaggtgtttgttctggatgaggctgatgtcatgatagccactcagggccaccaagatcagagcatccgcatccagaggatgctgcccaggaactgccagatgctgcttttctccgccacctttgaagactctgtgtggaagtttgcccagaaagtggtcccagacccaaatgttatcaaactgaagcgtgaggaagagaccctggataccatcaagcagtactatgtcctgtgcagcagcagagacgagaagttccaggccttgtgtaacctctacggggccatcaccattgctcaagccatgatcttctgccatactcgcaaaacagctagttggctggcagcagagctctcaaaagaaggccaccaggtggctctgctgagtggggagatgatggtggagcagagggctgcggtgattgagcgcttccgagagggcaaagagaaggttttggtgaccaccaacgtgtgtgcccgcggcattgatgttgaacaagtgtctgtcgtcatcaactttgatcttcccgtggacaaggacgggaatcctgacaatgagacctacctgcaccggatcgggcgcacgggccgctttggcaagaggggcctggcagtgaacatggtggacagcaagcacagcatgaacatcctgaacagaatccaggagcattttaataagaagatagaaagattggacacagatgatttggacgagattgagaaaatagccaactgagaagctccaccagccactgatgccagccctggcactgcccctgcacaggagacaagtgcatttagggcacaggccccgacatcaccccaaggacaacggcagaagtagagagaaactacctacctcacttcaaattatgtttggacttgacaaaaataggtgcaaatgatggggggcaatagaagaaaaaatttgcattttggaaaattgggtcctttccccacttttttaaagccacattcccccatctttataataatctggtcacagtggtagtcgctggccccaggaccccctcctgattttggctaggcatcgtggaaccagctccagcccctgaagaaacgatagatgtgcaggttgtgcggaagaggctgagtggaaaatggtgtgagccccaccgctgtgcatcgaatgagggaagtggcagcagagaggccagagctgccccctctctgtctcttcaatggacccttcacaagtgtttctcctgcccttggggctgtcttccttctcctgaaatccagagactttcttgctcatcccttctccctttcacttctgttctctgctgcagaaagcagacttgcatatccctgatgagcagctcggctacttttgtaaacttcagatttggagagaaacacgaaagtctgaatcctgaccccttgagagagagtgatctggcgagggccgatgaaggggctgggcctggtcttgccttctcttctctcggttgctccctctgcctaggcccctggtactcagtcacggcagccaggagaccccaggtgagtttctgagcgcatacgtagttggttcttacccccaggtgtcacacggggccgagagctgagcaagaatttggaatggaagttatgaccaagggaattatgctgttcatttataatagtggacattatggagagctctgattcctacataatatgaataaggatggataggccgggcgtggtggctcatgcctataatcccagcacgttgggaggctgaggcgggcggatcggttgagctcaggcgttcgggaccagcctggccaacatgatgaaaccccgtctctaccaaaaatagaaaaaaatatagccgggcctggtggcgcacgcctgtagtcccagctactcgggaggctgaggtaggaggatcgcttgagcctgggtagaggctgctgtgagctgaaatggcgccactgcactccagcctgggtaacagagcgagaccccgactcaataaataaataaggatggataaattgtagcgtatgcaccattcattatgctaagacattttaaagtaattatgagaaacgctctactaatgatttgtttttatttgtatttttctgcttattagacaaatatatactcattttaaaaa

SEQ ID NO: 706 - DNA, 4533 bp, Homo sapiens
  source 1..4533: mol_type = genomic DNA
aatgaggacgcgtggacgcgcggcacgccggtcctggctacaggcgcggcgtttgaagaaaaactgtcactgaagagtcatggtggggcccgggcctaccgctgctgccgctgtcgaagagcggcagagaaagcttcaggagtaccttgcagccaagggaaaactgaagagccaaaacaccaagccttatctaaaatccaagaataattgccagaatcaaccaccttctaaatctactattagacccaaaaatgatgttaccaaccatgttgttttgcctgtcaaacctaaaaggtccatcagcattaaactccagcccagaccacctaatactgcagggtcccagaagccgaagttggagccaccaaaacttctgggcaaaaggctgacttcagaatgtgtttcttctaacccatactctaagccttctagcaagagttttcaacagtgtgaagctggatcgtccacaacaggagaactgtcaagaaaacctgtggggtcacttaatatagagcaattgaaaactacaaagcagcagttaacagatcaaggaaatggtaaatgtatagactttatgaataatatccatgttgaaaacgaatctttggataactttctaaaagaaacaaacaaagagaacttgctcgatatcttaacagaacctgagaggaagccagatcctaaattatataccagaagtaagccaaagactgactcttataatcaaaccaagaacagtttagttcctaaacaagccttgggcaaaagttcagttaatagtgctgttctgaaagatagggttaataaacaatttgttggagaaacacaaagcaggactttcccagtaaaatcacagcaactctctagaggagcagatcttgcaagaccaggagtaaaaccctcaaggacggttccctctcactttattcggacccttagtaaagttcagtcatcaaagaaaccagtagtcaagaacatcaaagatataaaggttaataggagtcaatatgaaagaccaaatgaaactaagatacggtcataccctgttactgaacagagagtgaagcacaccaaacccagaacataccccagtttgcttcagggtgaatataacaacagacatccaaacatcaagcaagatcagaagtccagccaagtttgtatacctcagacatcatgtgtactgcaaaagtcaaaagccataagccagaggcctaatttgacagttggcagatttaattcagccattccaagcacccctagcataagaccaaatggaaccagtggtaataaacataacaataatggctttcagcaaaaagcacagactttggactccaagttgaaaaaggctgttccccagaaccattttctgaacaagacagctcccaaaactcaagctgatgtcacaaccgtaaatgggacccaaacaaacccaaatattaaaaagaaggcaacagcagaggatcgaaggaaacaactagaagaatggcagaaatctaagggaaaaacctataaacggcctcctatggaacttaaaacaaaaagaaaagtaataaaggaaatgaatatttcattctggaagagcattgaaaaagaagaggaagaaaagaaagcacaactcgaactgtccagtaaaattaacaacactctgacagaatgtctgaacctcatcgaagggggtgtaccttctaatgaaatacttaacatattgtccagcattcctgaagctgaaaaatttgctaaattctggatctgcaaagcaaagttgttggcaagtaaaggcacctttgatgttattgggctatatgaagaggccattaaaaatggggcaacaccaatacaagagttgcggaaagttgttcttaatatcttgcaagactcaaacagaaccacagaagggattacttctgactctttagttgctgaaactagtataacatcagtggaagagctggccaagaagatggaatctgtgaagtcttgtctttctccaaaagagagggaacaagtcacggcgacaccccgaatagccaaggcagaacagcataattatcctggtatcaaattacagattggtccaatccctagaataaatgggatgccggaagtgcaagacatgaaatttatcactcctgtacggcgttcgtcgaggattgagcgagcagtgtcccgctacccagaaatgctgcaggaacacgatttagtagtggcttctcttgatgaactgttagaagtggaagaaacaaaatgttttatattccgtagaaatgaggcgctgcctgtaacattggggtttcaaacccctgaatcataatttcttgatgctttttttaaaaaaggtgtttcagaaccaacataagacaagaaatattcttgtccaagtgacctggaaaaaaagagaggcatcatggatgcagattatggacgctcaggacttaagtaattcactgggcttactctcaaattttctctccccatgggaaaatctttgctttatgtgtttaagaccagtttgccagttttacagtatacataaatttcaaacttttgaatatttaccctacaactatgataaatatttatactttattgatctactttaatcccaacatagttttttatatcagaaggttggtcccacaatataatgggacttttctttctgcatccaccttagcagagggcaagttctttcatcgtggaagatctgaactttgacgctagcttgacaggctgaatggaccttgacagatggccaagtcaaaacccctcattttacagatgagtttatgctagctgtgcctttgctcagagatcataaatttatgtgtgatctttgactttcatcacagtatccttgtaaatgagagagaattcttgttttttctatgccaggtctcctcagatgaaacacaatcctgaattggcatggtcgtctagcttttatattcaaacctagttttgcatttgttactcagaaacacttcaagtaacaaaaggggggcaggggagaggggtggggagtggacacttgcttcttcagttctttgctcagctagggtatagctggcctgagaaggcagtgcaagccccagagactgttgtaggttgctttttcttcctcctgggcaactatttgtggaaaggttttaccttagtcattatgtaaatataattgtgtagaaaaacctagtcaacacattttaaattttagctttcttaatatttaagtattatcttaaaacaacattaaatttctattagttcctgcttgtttatcttatttattatagaaaaccatgataatggctttgcatagagaattaggagtttgtctaaggatataccagttggctgtcctaagaaacaaggagcattcattaccaaggagaatggactttgatcaaaggtctatcagcctcatccaggaactagatttttttaagggaagcagatctatttctgaaagtcagatttataataaagctcaaaaaactgagctataaacctgtaataccagcagactttcaataagagactcttacaactcaattgtggaaaaactaataattaaaaatgggcaaaggacctgagcagacatttctccaaagaagacataagaaatggccagtaggtatagatatgaaaaggtgttcagcatcattaatcataagaataatgtaaattaaaaccactgtgagctatcacctcacatctataagaatggctattaacaagacatgagataaatgttgatgagattgtggagaaaagagaaccctagtacactgtttgtgggcgtgtagactggggcagccgttatggaaaacggtatggaggctcctaaagaaattaaaaatagaactgttatctgaccctcttctgagtaagtatgtacccaaagaagatgaaatcaccagctgggcgcagtgactcacacctgtaatcccagcactttggagtgggtgaatcacctgaggtcaggagttcaagaccagcttgaccaacatggtgaaaccccgtctctactaaaaatacaaaaagtaggcgggcatggtgacgggcacctgtaatcccagctacttgggaggctgaggcagaagaatcacttgaactcgggaggtggaggttgcagtgagccaaaattgcgtcactgcactccagcctgggttacagagcaagactccatctcaaaaaaaaaaaagatgaaatcatcacctcataaagatatctgcactcacatgtttgtggcagtgttattctcaatagccaagatgtggaaacaacctaaatgcccatcaatggacaaataaagaaaatacggcatatgcatgccgtggaatagtattcatccttggaaaagagggagttcttgccatttgccacaacatagatggacctggagaacattatgctaagtgaaataagccagacccaaggaaaaatactgcatgatctcacatatggaatatttaattttttaagaaagagctcaagtacacagagaaagtgcttaccacagattgggga

SEQ ID NO: 707 - DNA, 1667 bp, Homo sapiens
  source 1..1667: mol_type = genomic DNA
gagcgacgcgtacgtctacctgcctgccttacagggcacctaggagggaccccttcctggcccatccgcgccgcgcaggcgcacgcccacgcagcgcctagacgcccgagccgagcgtcccgtctcctagtaaccagccgctagcccccttttccacgactcatttcttaatctctgcctgaggctgccgcacctggatggaacgcgcatgcgcaaggctgtctctcgcagccccgccttccctcagcttgaaacacctgctgcttcgcggcggtggctttgtgccacttttcccagggcttgggcatcattctggacccatgttcggtgaaccggttactctcagagctgctttcgggcgcagctcctgctgcagccagggcccgttttaagagaggcttccaggtccagccctcccgctgcagcctgcagggagcgagccggcctgtcccgatgacatagacactaggtttttacagcaattctctgatgaccttgatatggtagaacgctgtgtatttcaagagtaagctctcgtttgaggagactaacaattcctgttttcgccagatttcttcttgaatggcaacctaaatgccagtccaaagaggcccccaatagacttgttcacccttcatgtcctcaactctggggaagttaagtaatcaagttgaagaaacacttccactacttaaaaaggtacctgcaaattactttcacatttgttcagctatcctaatgggattttcacttagtaaatctgctactcaggtatctgctatacatatggattcaaaagtggatgatcacttaatacgagggactgaaaaaagcaggttggaaccagcgactcagttatttcaaaacaccaagaaaataagattagaagacacaaatcaagaaaactttacaaggattgaagggactggcacaggatctctttctgggaaagccttgggttcagtggtatatgtcaaagaaagtgatggactagaaatgacagatgtggaatgaagcaatttgtacgtattaccaaagaaaccaaaaactgcctttgactaaggggggtgttgaaagagaacttaaccttattaggaaaccctgacaaaatgatggaagactattgccttattttgcactatttgtgaatcatcttacactgcatttttttatgatgcttattcaaaaggcagttgctttagggtgaaaaagccttccaagattcaaagcagatttctctggtattatattatatccttcttaaaaaccagagtttttaagtaacagtatttgaatggcatcaaaacattttcattttaatgtatttctttaacaagtggttaaaaaaagtgtccaagcagccgggcgcagtggctcacacctgtaatcccagcactttgggaggccaaggcgggtcaatcacctgaggtcaggagttcgcaaccagcctggccaatatggtgagaccccatctctactaaaaatgcaaaaagttagccaggcatggtggtgggcacctgtgatcccagctacctgggaggctgaggaaggagaatcgcttgaaccctggaggcggaggctgcactgagctgaggtcatgccattgtactccagcctgggcaacaagagcaaaactccgtctcaaaaaaaaaaaaaaaaaaaaaaaa

SEQ ID NO: 708 - DNA, 5833 bp, Homo sapiens
  source 1..5833: mol_type = genomic DNA
agatttaatccagagactgacttcactatagaacccacagttgtatcaatggttggggaaagatagtggcaacaggcaaaggagaaacagctctgacatacaaagaaaatgagtatgctaaagccaagtgggcttaaggcccccaccaagatcctgaagcctggaagcacagctctgaagacacctacggctgttgtagctccagtagaaaaaaccatatccagtgaaaaagcatcaagcactccatcatctgagactcaggaggaatttgtggatgactttcgagttggggagcgagtttgggtgaatggaaataagcctggatttatccagtttcttggagaaacccagtttgcaccaggccagtgggctggaattgttttagatgaacccataggcaagaacgatggttcggtggcaggagttcggtatttccagtgtgaacctttaaagggcatatttacccgaccttcaaagttaacaaggaaggtgcaagcagaagatgaagctaatggcctgcagacaacgcccgcctcccgagctacttcaccgctgtgcacttctacggccagcatggtgtcttcctccccctccaccccttcaaacatccctcagaaaccatcacagccagcagcaaaggaaccttcagctacgcctccgatcagcaaccttacaaaaactgccagtgaatctatctccaacctttcagaggctggctcaatcaagaaaggagaaagagagctcaaaatcggagacagagtattggttggtggcactaaggctggtgtagtccggtttcttggggagaccgactttgccaagggggagtggtgtggcgtggagttagatgagccacttgggaagaatgatggcgctgttgctggaacaaggtattttcagtgtcaacccaaatatggcttgttcgctcctgtccacaaagttaccaagattggcttcccttccactacaccagccaaagccaaggccaacgcagtgaggcgagtgatggcgaccacgtccgccagcctgaagcgcagcccttctgcctcttccctcagctccatgagctcagtggcctcctctgtgagcagcaggcccagtcggacaggactattgactgaaacctcctcccgttacgccaggaagatctccggtaccactgccctccaggaggccctgaaggagaagcagcagcacattgagcagctgctggcggaacgggatctggagagggcggaggtggccaaggccacgagccacgtgggggagatagagcaggagctagctctggcccgggacggacatgaccagcatgtcctggaattggaagccaaaatggaccagctgcgaacaatggtggaagctgctgacagggagaaggtggagcttctcaaccagcttgaagaggagaaaaggaaggttgaggaccttcagttccgggttgaagaagaatcaattaccaaaggtgatcttgagacgcagaccaaactggagcatgcccgcattaaggagcttgaacagagcctgctctttgaaaagaccaaagctgacaaactccagagggagttagaagacactagggtggctacagtttcagaaaagtcacgtataatggaactggagaaagacctagcattgagagtacaggaagtagctgagctccgaagaaggctagagtccaataagcctgctggggatgtggacatgtcactttcccttttgcaagagataagctctttgcaagaaaagttagaagtcacccgtactgaccaccagagagaaataacttctctgaaggagcattttggagcccgggaagaaactcatcagaaggagataaaggctctgtataccgccacggaaaagctttccaaagagaacgagtcattgaaaagcaagctggagcatgccaacaaagagaactcagatgtgatagctctatggaagtccaaactggagactgccatcgcatcccaccagcaggcgatggaagaactgaaggtatctttcagcaaagggcttggaacagagacggcagaatttgctgaactaaaaacacaaatagagaaaatgagactagattaccaacacgaaatagaaaatttgcagaatcaacaagactctgaacgggctgcccatgctaaagagatggaagccttgagggctaaactgatgaaagttattaaagaaaaggaaaacagtctggaagccatcaggtcgaaactggacaaagcagaagaccagcatctcgtagaaatggaagacacgttaaacaaattacaggaagctgaaataaaggtaaaggagctagaggtactgcaagccaaatgcaatgaacaaaccaaggttattgataattttacatcacagctcaaggctactgaagaaaagctcttggatcttgatgcacttcggaaagccagttccgaaggtaaatcggaaatgaagaaacttagacagcagcttgaggcagctgagaaacagattaaacatttagagattgaaaagaatgctgaaagtagcaaggctagtagcattaccagagagctccaggggagagagctaaagcttactaaccttcaggaaaatttgagtgaagtcagtcaagtgaaagagactttggaaaaagaacttcagattttgaaagaaaagtttgctgaagcttcagaggaggcagtctctgttcagagaagtatgcaagaaactgtaaataagttacaccaaaaggaggaacagtttaacatgctgtcttctgacttggagaagctgagagaaaacttagcagatatggaggcaaaatttagagagaaagatgagagagaagagcagctgataaaggcaaaggaaaaactggaaaatgacattgcagaaataatgaagatgtcaggagataactcttctcagctgacaaaaatgaacgatgaattacgtctgaaagaaagagatgtagaagaattacagctaaaacttacaaaggctaatgaaaatgcaagttttctgcaaaaaagtattgaggacatgactgtcaaagctgaacagagccagcaagaagcagctaaaaagcatgaggaagaaaagaaagaattggagaggaaattgtcggacctggaaaagaaaatggaaacaagccacaaccagtgtcaggagctgaaagccaggtatgagagagccacttctgagacaaaaaccaagcatgaagaaatcctacagaacctccagaagacgctgctggacacagaggacaagctgaagggcgcacgggaggagaacagtggcttgctgcaggagctggaggagctgagaaagcaagccgacaaagccaaagctgctcaaacagcggaagatgccatgcagataatggaacagatgaccaaagagaagactgagactctggcctccttggaggacaccaagcaaacaaatgcaaaactacagaatgaattggacacacttaaagaaaacaacttgaaaaatgtggaagagctgaacaaatcaaaagaactcctgactgtagagaatcaaaaaatggaagaatttaggaaagaaatagaaaccctaaagcaggcagcagctcagaagtcccagcagctttcagcgttgcaagaagagaacgttaaacttgctgaggagctggggagaagcagggacgaagtcacaagtcatcaaaagctggaagaagaaagatctgtgctcaataatcagttgttagaaatgaaaaaaagagaatccaagttcataaaagacgcagatgaagagaaagcttccttgcagaaatccatcagtataactagtgccttactcacagaaaaggatgccgagctggagaaactgagaaatgaggtcacagtgctcaggggagaaaacgcctctgccaagtccttgcattcagttgttcagactctagagtctgataaggtgaagctcgagctcaaggtaaagaacttggagcttcaactcaaagaaaacaagaggcagctcagcagctcctcaggtaatacagacactcaggcagacgaggatgaaagagcccaggagagtcagattgatttcctaaattcagtaatagtggaccttcaaaggaagaatcaagacctcaagatgaaggtggagatgatgtcagaagcagccctgaatgggaacggggatgacctaaacaattatgacagtgatgatcaggagaaacagtccaagaagaaacctcgcctcttctgtgacatttgtgactgctttgatctccacgacacagaggattgtcctacccaggcacagatgtcagaggaccctccccattccacacaccatggcagtcggggtgaggaacgcccatactgtgaaatctgtgagatgtttggacactgggccaccaactgcaatgacgacgaaaccttctgatgaagcctccagtggagaactgggcttgctcagacgcactcgcattgacacaacgtaacaccagcattgtgtgtgcagacttcaggagaactcatgttattttttaaccccgtcaacaaatctaggaaaatattttgatcttcaacaaattgccctttagtctccccgtatgagttagaataataaatatttagtaggtgagttttcacctcgaattttgttttcttgatttttacgtttgaagacattgcaccagatgccattacatttattggccccccgaccttgtagaaaaacccctaccctcacaataccttatttaagtaactttaaattatgccgttacttttcatatttgcactaagatatttccaggctgcatttgtatatttagattttttggttaagctttgacactggaatgagttgaaaaaatgtgccattttgcattttcatctactcatttaaagtattttattcttattcaaagaaatatctgagctctttgcactacctgttatcagtagtgcctttacttcaggcttgataatacttaggtgtgattataaaatcatgaagcaggtaaagggaggggcaagcccccaaactgctgtggggacattttataatctatatgctgcacccacttaatctactgtggtgttttgtttattagttttgcataatttcagcttctatatattgtatgtatatattttttaaaaatctatattttgggaaaaaaacatacacaatgtgtctttctttttggacatttacctttttgaaaaagaaaacacttaaaatgatcattaggacataacagactaggccagacatagcatcttgtggctttgcaaccattttcatttgtttgttttccttttatttcttcaccagatttaaataactggaggaattttctccaatttttttttccttctctggcaggtatccccagcagtcaattaacaataagccagtataaaacacctaaataaccaatctacaatctcccttcacaagtttttttactgtttttagatgaatgtacgatgagaaattcaacgttaataattctggattttcttatcacaaaaaagaaaatgaaggacctcaaagcacctgaacagtttatcgaccagtttgaatctatttatcttcatttgaatgtcttctagaatatgtaaaaagtcataaaatgtatcttccatgctacatgtacaataagaacttctataattgtatatatgcctttgatgtattttcccctcaagattatcaactgtgtgttcgacagtgaatattcaatctggtaccagttgaaatttttggttataaatgtaatacgaattgtttcacaaacagaaaacatgtaaagcagtattaaaatttggccaaacaagtgttctgtatctactttaataaatggttattcttt

SEQ ID NO: 709 - DNA, 1147 bp, Homo sapiens
  source 1..1147: mol_type = genomic DNA
gcgcgcagtttcccgcatgctcagtagctgaggtagggatgccatccttctcaaaagacttattgacagtgccaaagctcggtactggacacaacgagggacctgggtctacgataacgcgcttttgctcctcctgaagtgtctttggtccaacgttgttccagagtgtaccatggcttccagtaacactgtgttgatgcggttggtagcctccgcatattctattgctcaaaaggcaggaatgatagtcagacgtgttattgctgaaggagacctgggtattgtggagaagacctgtgcaacagacctgcagaccaaagctgaccgattggcacagatgagcatatgttcttcattggcccggaaattccccaaactcacaattataggggaagaggatctgccttctgaggaagtggatcaagagctgattgaagacagtcagtgggaagaaatactgaagcaaccatgcccatcgcagtacagtgctattaaagaagaagatctcgtggtctgggttgatcctctggatggaaccaaggaatataccgaaggtcttcttgacaatgtaacagttcttattggaattgcttatgaaggaaaagccatagcaggagttattaaccagccatattacaactatgaggcaggaccagatgctgtgttggggaggacaatctggggagttttaggtttaggcgcctttgggtttcagctgaaagaagtccctgctgggaaacacattatcacaactactcgatcccatagcaacaagttggttactgactgtgttgctgctatgaaccccgatgctgtgctgcgagtaggaggagcaggaaataagattattcagctgattgaaggcaaagcctctgcttatgtatttgcaagtcctggttgtaagaagtgggatacttgtgctccagaagttattttacatgctgtgggaggcaagttaaccgatatccatgggaatgttcttcagtaccacaagggtgtgagccaccgcacctggcctaaaccagatttctttagggcacaattttttctggaatctcactcttgtttttcaaattttaaaaacgtttctactccaattaagaatatatatgatgttattatatatgcttatgaaacagatttatga

SEQ ID NO: 710 - DNA, 547 bp, Homo sapiens
  source 1..547: mol_type = genomic DNA
gctgcaggaaaggtaggacctgatggctccaggccctcggaggctcagaggcgcagggctgagccatgggaacgaagcgcgaggccatcctgaaggtgctggagaacctgacaccggaggagctcaagaagttcaagatgaagctggggacggtgccgctgcgcgagggctttgagcgcatcccgcggggcgcgctcgggcagctagatatcgtggacctcaccgacaagctggtcgcctcctactacgaggactacgcagccgagctcgtcgtggccgtgctgcgcgacatgcgcatgttggaggaggccgcacggctgcagcgggctgcgtgagggccactctgagctggaggcgggtcaaggcaaaaggagtaatgcaacgcctgtgaagccagccccacgcgcgcaccagtcgcgtaagacaacagcagtgtctccacctcggggaccaaggacgcctccgtgcctccagaccccgcctcctccagcccctgcacctgtcatttattcttccactgcccaataaatattcatggcagacttta

SEQ ID NO: 711 - DNA, 1109 bp, Homo sapiens
  source 1..1109: mol_type = genomic DNA
tttctacccgaccgcattttacgtggtgctgcatttccggtagcggcggcgggaaatcggctgtgggagagaggctaggcctctgaggaggcgaatccggcgggtatcagagccatcagaaccgccaccatgacggtgggcaagagcagcaagatgctgcagcatattgattacaggatgaggtgcatcctgcaggacggccggatcttcattggcaccttcaaggcttttgacaagcacatgaatttgatcctctgtgactgtgatgagttcagaaagatcaagccaaagaactccaaacaagcagaaagggaagagaagcgagtcctcggtctggtgctgctgcgaggggagaatctggtctcaatgacagtagagggacctcctcccaaagatactggtattgctcgagttccacttgctggagctgccgggggcccagggatcggcagggctgctggcagaggaatcccagctggggttcccatgccccaggctcctgcaggacttgctgggccagtccgtggggttggcgggccatcccaacaggtgatgaccccacaaggaagaggtactgttgcagccgctgcagctgctgccacagccagtattgccggggctccaacccagtacccacctggccgtgggggtcctcccccacctatgggccgaggagcaccccctccaggcatgatgggcccacctcctggtatgagacctcctatgggtcccccaatggggatcccccctggaagagggactccaatgggcatgccccctccgggaatgcggcctcctccccctggatgcgaggccttctttgacccttggccacagagtatggaagtagctccgcagaggcgtgggctcgattcctcagggccacgttaccacagacctgtttgtttcttatgctgttgttcgtggagtctcatgggattgtctggtttccttacagggccccctcccccgggaatgcgcccaccaaggccctagactcatcttggccctcctcagctccctgcctgtttcccgtaaggctgtacatagtccttttatctccttgtggcctatgaaactggtttataataaactcttaagagaacatt

SEQ ID NO: 712 - DNA, 3650 bp, Homo sapiens
  source 1..3650: mol_type = genomic DNA
ggggcgcggggcgcgggggctgtagggagggggaccagtggcagagggaccttaggtgatccttagaaataaaggctagcttctgttcgaccttggagtagggcgaagaggtgtagacaggcctggagaagcgaggtaaaagcctgagtaaaagcaagaagttggagaatatgagatacatctcatctctagtaaatacttaaatgacttcccctcctcccggagtcaagcacaattcggggatgcaatgacggacgtaggtgaagacactgcgggaacttacagacaaaactggtttgtggcctgtttgattcctgtcagaggtttgctgacccaagacagtatcgaaaatgcatattaagtcaattattctagagggattcaagtcctatgctcagaggaccgaagtcaatggttttgaccccctcttcaatgctatcactggcttaaatggtagtgggaaatccaacatattggactccatctgctttttgctgggcatctccaacctgtctcaggttcgggcttctaatttacaagatttagtttacaaaaatgggcaggctggtattaccaaagcctctgtgtcaatcacttttgataattctgacaaaaagcaaagtcctttaggatttgaggttcatgatgaaatcacagtaacaaggcaggtggttattggtggtagaaataaatatttaatcaatggagtcaatgccaacaacaccagagtacaggatctcttctgttctgttggccttaatgttaacaaccctcactttctcatcatgcagggccgaattacaaaagtattgaatatgaaacctccagagattttatccatgatagaagaagcagctggaaccaggatgtatgaatacaaaaaaatagctgcacagaaaactatagaaaaaaaggaggctaagctgaaagaaattaagacgatacttgaagaagagattactccaaccattcaaaaattaaaagaggaaagatcgtcctacttggagtaccaaaaagtaatgagagaaatagaacatttgagtcgtttatatattgcttatcagtttttgctggctgaagataccaaagtacgctcagctgaggaattaaaagaaatgcaagataaagttataaagcttcaggaagaattgtctgagaatgataaaaaaataaaagcacttaatcatgaaatagaagaattggaaaaaagaaaagataaggaaactggaggtatacttcgatctttagaagatgctcttgcagaggctcagcgagttaatactaaatctcaaagcgcatttgatctcaagaagaaaaatctggcatgtgaggaaagcaaacgcaaagagctggaaaaaaatatggttgaggactcaaaaactttagcagcaaaggaaaaagaggttaaaaagataacagatggactgcatgcccttcaagaagcaagtaataaagatgctgaagctctggcagctgcacagcagcacttcaatgctgtttccgctggcctgtccagtaatgaagatggagcagaagcaactcttgctggtcaaatgatggcctgtaaaaatgatataagtaaagctcagacagaagccaaacaggctcagatgaagttgaagcatgctcaacaggaattaaagaataaacaagctgaagttaagaagatggatagtggctacaggaaggatcaagaagctctagaagctgtaaaaagacttaaagaaaaacttgaagctgaaatgaaaaagctaaattatgaagaaaataaagaggaaagccttttggaaaagcgcaggcagctgtctcgtgatattggtagattgaaagaaacatatgaagctctattagccagatttcccaatcttcgatttgcatacaaggatccagagaagaactggaatagaaattgtgtgaaaggacttgtggcttctctgattagtgtgaaagacacttctgcaaccacagctttagaattagtggctggagaacgactctacaatgttgtagtagacacagaagttactggtaaaaagctactagaaaggggggaactgaaacgtcgatacactataattccactcaataaaatttcagccagatgtattgcaccagaaactctgagagttgctcagaatcttgttggccctgacaacgttcatgtggctctttccttggttgaatataaaccagaacttcagaaagcaatggagtttgtctttggaacaacatttgtttgtgacaatatggataatgccaaaaaagtggcctttgataagaggataatgactagaactgtaactctcggaggtgatgtgtttgatcctcatgggacattgagtggaggtgctcgatcccaggcagcttccattttaaccaagtttcaagaactcaaagatgttcaggatgaactgagaatcaaagagaatgagctgcgggctctagaagaggaattagcaggtcttaaaaacactgctgaaaagtatcgccaactaaaacagcagtgggagatgaaaactgaagaggcagatttattacaaaccaagctccagcaaagctcatatcacaagcaacaagaagaattagatgcccttaaaaaaaccattgaggaaagtgaggagactttgaaaaacactaaagaaatccaaagaaaagcagaagaaaaatatgaagtattggaaaataaaatgaaaaatgcagaagctgaaagagagcgagaactgaaagatgctcagaaaaaactggattgtgccaaaacaaaggcagatgcatctagcaagaagatgaaagaaaaacaacaggaagttgaagctatcactctggaactggaagagctcaagagagagcatacatcttacaaacaacagcttgaagctgtaaatgaagctatcaaatcctatgaaagtcagattgaagtaatggcagctgaggtggctaaaaataaggagtcagtaaataaagctcaagaagaggtgaccaagcaaaaagaggtgataacagcccaagacactgtaattaaagctaaatatgcagaagtggcaaaacacaaggagcaaaacaatgattctcagcttaaaattaaggaattagaccacaacatcagcaaacataaacgggaggctgaagatggtgctgcaaaggtatccaaaatgttgaaagattatgactggattaatgcagagagacacctctttggccaacccaatagtgcctatgatttcaaaactaacaaccctaaagaagctggtcagagacttcagaagttgcaagaaatgaaggagaaactaggaagaaatgtcaatatgagagctatgaatgtattgacagaagctgaagagcgatacaatgacttgatgaagaagaagagaattgtagaaaatgacaaatccaaaattcttacaactatagaagaccttgaccagaagaaaaaccaagccctaaatattgcatggcaaaaggtgaacaaggactttgggtctattttttctactcttttgcctggtgctaatgctatgcttgcaccaccagagggtcaaactgttttggatggtctggagttcaaggttgccttgggaaatacctggaaagaaaacctaactgaacttagtggtggtcagagacaaaaacagcagaaccatactacaggttaa

SEQ ID NO: 713 - DNA, 552 bp, Homo sapiens
  source 1..552: mol_type = genomic DNA
ggaggccgctgggacgcggttcagctcattccctgaggccggcccgcgtcccgtcaggcgccgcgcggggttagcgcggggtcagcggaggtcagcgggggtcagcagcagcggctccgagggcgcggcggacgcaggatgtacacgctgctgtcgggcttgtacaagtacatgtttcagaaggacgagtactgcatcctgatcctgggcctggacaatgctgggaagacgaccttcctggagcagtcgaaaacccgatttaacaagaactacaaggggatgagtctatccaaaatcaccaccaccgtgggcctaaacatcggcactgtggatgtgggaaaggctcggctcatgttctgggacttaggagggcaggaagagctgcagtctttgtgggacaaggacaagacaaagtgtggggacctggggaccctgcactcctccaaagtgagtgcctcctttcggctcagagaccttgctgctgaccaccacaggacacagaaatggcaaagaccagatgtggggacggcaggatggctgcctctcccctga

SEQ ID NO: 714 - DNA, 1426 bp, Homo sapiens
  source 1..1426: mol_type = genomic DNA
gaggaaagaggcgcgttcctagccgcgggactgggtgacccgcctctcccccaaattagctgcttggaaagaggaccaaagacgtctaaaaagtcatttggaaatatctctaaatatttgttaccatgtataagctgctaaagagaaattgggcccaacaaaactaattgaataattgaggcagatttgtgtgtatcatcaaattctatccagaagttgaagaatctgaatttaaagattgtgtgcatttaataagaggatgacctttcagtttaatttcactatagaagaccatctggaaaatgaattaacacccattagagatggagctttgaccctggattcctcaaaagagctgtcagtctcagaaagtcaaaaaggagaagagagggacagaaaatgttctgcagaacaatttgacttgcctcaggatcacttgtgggaacataagtcaatggaaaatgcagctccctctcaagacacagacagtccactcagtgcagccagcagttcaaggaacttggagccacatggaaaacagccctccttgagagctgccaaagagcatgctatgcctaaagatttaaagaagatgttagaaaataaagtcatagaaacattaccaggtttccagcatgttaagttatcagtagtgaaaaccatcttgttgaaagagaacttccctggagaaaacatagtttcaaaaagcttttcttctcactctgatctgattacaggtgtttatgagggaggcttaaaaatctgggaatgtacctttgacctcctggcttatttcacaaaggccaaagtgaaatttgctgggaaaaaagtcttggatcttggttgtggatcaggtttactaggtataactgcattcaagggagggtccaaagaaattcactttcaagattataacagtatggtgattgatgaagtaaccttacctaatgtagtagctaactccactttggaagatgaagaaaatgatgtaaatgagccagatgtgaaaagatgcaggaaaccaaaagtaacacaactatataaatgccgatttttttctggtgagtggtctgagttttgtaagcttgtactaagtagtgaaaaactttttgtaaaatatgatctcattctcacctcagaaaccatttacaacccagattattatagtaatttgcaccagactttccttagactgttaagtaaaaatggacgtgtacttttggccagcaaagcacattattttggtgtaggtggaggtgttcatctctttcagaagtttgtagaagaaagagatgtttttaagaccagaatactcaaaataattgatgaaggattgaagaggttcataattgaaataacttttaagtttcctggttaattaacattcactgagtatccaaaatgaaataaacagaaggaccaaaaa

SEQ ID NO: 715 - DNA, 6111 bp, Homo sapiens
  source 1..6111: mol_type = genomic DNA
gcgctcccgcttgccgcagcctgcgtcgtctgccgccaccgcgcgccttcactgacctacaccaccgccgccgccgccgccgccgccgggctcgctggctggcccggtgcgggcggcggactcccgccggagaggactgccagcgccgccgccgccgccgcttcggcccgggcccgggccccgaccccgtcccgggccccagcgccggccgcccgcccggtcgggcgatgaagtgtcactatgaggcgctgggggtgcggcgcgacgccagcgaggaggagctcaagaaggcctatcggaagctggccctgaaatggcacccggataaaaatctggataatgccgcagaagcagctgaacaatttaaattaatccaagcagcatatgatgtgttgagtgaccctcaggaaagagcatggtatgataatcatagagaggccctacttaaaggtgggtttgatggcgaatatcaagatgacagcttagatttgctacgctatttcaccgttacctgttattctggttatggagatgatgaaaagggattttacacggtgtatcgtaatgtttttgaaatgattgccaaggaagaactagaatctgtgttagaggaagaggttgatgatttcccaacttttggagactcccagagtgactatgatacggtagtccatcctttctacgcttattggcagagtttctgcactcaaaagaattttgcatggaaggaagaatatgatacacgacaggcttcaaaccgctgggaaaaacgagccatggaaaaagaaaacaaaaagattcgggacaaagcaaggaaagagaagaatgagcttgtccgtcagctggtagctttcattcgtaaaagagataaaagagtgcaggcgcatcgaaaacttgtggaagaacagaatgcagagaaggcgaggaaagccgaagagatgaggcggcagcagaagctaaagcaggccaaactggtggagcagtacagagaacagagctggatgactatggccaatttggagaaagagctccaggagatggaggcacggtacgagaaggagtttggagatggatcggatgaaaatgaaatggaagaacatgaactcaaagatgaggaggatggtaaagacagtgatgaggccgaggacgctgagctctatgatgacctttactgcccagcatgtgacaaatcgttcaagacagaaaaggccatgaagaatcacgagaagtcaaagaagcatcgggaaatggtggccttgctaaaacaacagctggaggaggaagaagaaaatttttcaagacctcaaattgatgaaaatccattagatgacaattctgaggaagaaatggaagatgcaccaaaacaaaaagtcaagtatttgacatttcgatttatatttgctcttaggctttctaaaaaacagaagaaaaagaaacagaaaccagcacagaattatgatgacaatttcaatgtaaatggacctggagaaggagtaaaggttgatccagaagatactaacttaaatcaagacagtgccaaagaattggaagatagtccccaggaaaatgtcagtgtcacagagatcattaaaccatgtgatgatccaaaaagtgaagctaaaagtgttcctaaacccaaaggaaagaaaaccaaagatatgaaaaaacctgtcagagtacctgctgaaccacaaacaatgagtgttcttatcagctgtacaacctgccatagtgaatttccatctcggaataaactttttgaccatctaaaggccacaggtcatgcaagagcaccttcatcatcgtctttaaacagcgcaacaagtagtcaaagcaagaaagagaaacgtaaaaacagatagagattctgcctgtgcttttgtttgactgtctctagattttgaaaccaaaaaactgaactgaaatcatctaaagagttaaaatttcagtgatctgcaattaattacattgtggaagattattttttatcttgtaaaaacacttttttggtttaatatatatttttaaaacatttcactagtgattgaattctacttttgccatctgaattgacttgaatgtcttaaaacaggtaaatactgtaaagtgtgtattcttgatgtttattggctcatgtggacagaaatgtacagggagaattacattattttaacacacagaagtgcaactttctgctttattttctgaatttcacattacttttacttaatgcttttgtgttttgttaatacttcataatatgtgaaaaactcggatcttttaaaaagcatcatagatcatttttccatatgacactggttccgattttaaaaattatttttaaataaccgattattgattactgtattttttttctcaagaacagtgataggtagaaactaattgaacatttggtagtctttcaagaatagtgtctcttcaaggttttacttgatttaatttgatattttactggtttaccagtaaggtgtattgttcagttttttgctccgatttgaattgtggaggtggaagcaaattagtttacatggcatgtcctccctaggcacagtgacagctgtaaagtatgacggaacaaggtagcagatggtacagaatttatactatttaagaagagatgtggtgttcttcattgagtttttttcttcactattttcagaagtttttgttcttttttttttttccatcactcagtggagaaaagctttgttaatgaaagattttgtgatagagctgatgcttatacatctattctataacagtgatgaatattaacacaaaggaaatatggagaactgttataactgagtgttagaacagtcgtgtacattgatcagtattgagtccatttttaggatggattagtcagttcttttcattggtcttgaaagtaattttggctggtcgcggtggctcacgcctgtaatcccagcactttgggaggccgaggcgggcggatcacgaggtcaggagatcgagaccatcccggctaaaacggtgaaaccccgtctctactaaaaatacaaaaaattagccgggcgtagtggcgggcgcctgtagtcccagctacttgggaggctgaggcaggagaatggcgtgaacccgggaggcggagcttgcagtgagccgagatcccgccactgcactccagcctgggcgacagagcgagactccgtctcaaaaaaaaaaaaaaaaaaaaaaagaaagtaattttaaactcactggcttgaaatgtgtgctttctgtacaatgaagttattgctttccatatatccttgaatcttcagattaacgaaatgaacaaattttcggttacagatcagctctcaaacactaaagtccttaatggcaaggtcttttctgatagcttcatggatagtattgatgatcagatttcttctgtgttattgtcttaaaaataagcatttgaaccttaatttaaattcttttcttttccatttagagatatgtttttttctttaccttcatacctttctatttcttgctaatttctatcactaattccttataattgtccctgctccccttcttgatctcttcagggggaatactaggcagttttgtatcttctgatctcgtaccctgagacttcatctgaatgtgctctgccgccttcttatctgaactagatgaattggccataattatgaataggaatattaatgaaccagaggacatactagtcacatgttattatacactaaaaaataggaagtcatcttgaaaggcagttaatgtactgcaaatgtccctatgacttctttgctttctcttataccaaacatgcaggtatttaatttgtttaatgagggttgagtggagttatgtgtcgcttttattcggattgacgaaaatcaaccataattttcaagggatcttcatgggttgtgactggaagctgaccttagtcttgcgtctcatcctttatgatgttgagaaatcatctaatttctcagaactttttcttatctctaacacagttattaccataataatattgtctccatttatcatacaggatcattatgaaagtaaaatgaagtagtatatatgaaaatgctttttaaacacaaaagctttatacaaaatattgttgaatttaaataaggtaaatcttttttagtttatatatttgcagactatacatgttggattaaatgggcaattaagttttataggaatttgcttcctaagtctacttttgaagaggaaaacaggaacgtaccatatattttgctaagggtaaaatatttttggtgaattgcagacatttaatttcacttgtctgaggtaaaacaataaactaaaatacatgggcatgcatcttacactgatcttattagaggtcagtgctaagtacccatcttgattgaagttagctcagatgtggagattcatagaatgagggtccaggagaagaaagttaggggaaatctcattttctttctgtaattcattcagtggtgccaaagctgggggttccctacaatggctatttagactttccctgcttcaaaataagagcagtatccttagctctagccaagcatttttctaattcctgcctttggtcacaaagaaggaaaagcagagctgtgaatgagttagtggaggtcaagtcacatcagagttcatgacctagtgattgctggtgaagtaatattggaattttggtaccatgagaagacttataaaggatttcatcagaagttttcattttttctaaatcctcccctacaaaattttcagattggaaattactcttgtatttgtagaagattgtctctaaaattgtggtttaactcacgcaggaagtaaaattcctatagcaagacatagtttcattttagaggacccccaaaatcccgtgaattctctggtgatgattctagcctaaccttcaacataaaataatgaagagaacttttaaacttttttatgaattcctaaacattaccatttatgtggcagaagttctgttccctataatctgcaatgctgaagtatctctattcaattcccttccttatctgttaaatttaatgtctttatactaaaaatataggctcttgggattggagaggaaaaattagaggtgattttcagatttcttgttctatggaagaggaagctgagctcagggagatatgagctccacagccacagctggttaggggcggctgccagtagaacagggcagatgcctggactcccaactcagtaggccttctgttacacctcaaaatgtgttacatgggaagaaaaagattaagaaaaagcaagataattttgaagaaggacgagaggaagaggcatgaacttgtcctaacaatgtcaaagaatattttaaaggtataccagttaaagtagtgtgtggctggtgccagtagaggtcagtcaagggatccctgacgagaataaagagcccagaaacaggtccatgtttatatgggaacttgatttttgacagatacggcaagctctatggggaaaacaatatgtactaccttatacccttccccaaaaacaaagggattaaagacctaaatatgaagacaaaacttttaaatgagaatctataaggttattttcatgattttgcaaatgggaaggatttctttaaagcaagacacaaaagcatacacaggaaaaaatgatgcataaaaacatggcttctgtagaacaatagagactgtaaaagaacaagctacagacaaggaaatgtttgcaatgcatggaactgtcaaaggattcgtatctggaatacattaaagaagcaaaagaacctcatacaaaagtcattgagtaaatgacagccatgcattagaacagcaattctcaaaacttttggtctcaagatccctttacactcttcaaaagtgagaaccccaaagagttttcatgtatgtgggttaaatctattgatattttctgttagaatttaaaaattatgttaaaaaaataagaagaatgactatttttcaaaacaaaaaatgagaagagtggtattgttttacatttttacaaatctctttaacatttagcttaataaaagatagctggcctctc

SEQ ID NO: 716 - DNA, 1885 bp, Homo sapiens
  source 1..1885: mol_type = genomic DNA
cggcgtccccggggcccactcccgagcgcaggcgggcagccaggcgggcggcgcggcgcgggccggcaggaagcgtattctgggcacggggcgccgggcgggccggctgcgccgagcggcagtggtgggataccacccaaggcctcgcgcggcgccgcccgtcgaggggcgggcggcggcgtagccactgggccgtcgaagagcgcaggaggccggtgggccgggccgggccgcgcggcgcagccatgcctggctttacgtgctgcgtgccaggctgctacaacaactcgcaccgggacaaggcgctgcacttctacacgtttccaaaggacgctgagttgcggcgcctctggctcaagaacgtgtcgcgtgccggcgtcagtgggtgcttctccaccttccagcccaccacaggccaccgtctctgcagcgttcacttccagggcggccgcaagacctacacggtacgcgtccccaccatcttcccgctgcgcggcgtcaatgagcgcaaagtagcgcgcagacccgctggggccgcggccgcccgccgcaggcagcagcagcaacagcagcagcagcagcaacagcagcaacagcagcagcagcagcaacagcagcagcagcagcagcagcagcagcagtcctcaccctctgcctccactgcccagactgcccagctgcagccgaacctggtatctgcttccgcggccgtgcttctcacccttcaggccactgtagacagcagtcaggctccgggatccgtacagccggcgcccatcactcccactggagaagacgtgaagcccatcgatctcacagtgcaagtggagtttgcagccgcagagggcgcagccgctgcggccgccgcgtcggagttacaggctgctaccgcagggctggaggctgccgagtgccctatgggcccccagttggtggtggtaggggaagagggcttccctgatactggctccgaccattcgtactccttgtcgtcaggcaccacggaggaggagctcctgcgcaagctgaatgagcagcgggacatcctggctctgatggaagtgaagatgaaagagatgaaaggcagcattcgccacctgcgtctcactgaggccaagctgcgcgaagaactgcgtgagaaggatcggctgcttgccatggctgtcatccgcaagaagcacggaatgtgaactggtgccccggcagcctgctggactcccagaccccatccagccaggggaccgcaggccattgttgaactcctctatactcctgggcactggttgacagtactgaggcttaaggcagctggactctcttgctggtgacctggcatcctcaattgtttcctcctgaagtggaagctggggccttagactctgccctggtgacaccagcaattatgactttgtctacccttcctccccagttattgttgcagattctggttaagcagaggcttcagaaccactgaacttgaaacttaccctctagggatgcaggtgggatgtccagggactataggtttgggaaaaccataccttaaggttggtcagcagtcagacaactctaatgtgtgtagtgataagagattcaagtaacatcagttctcctccttttcatgcttttccttcccaggtgcagcctgtgattctgatggggactggtaaatctgtgcctctgcctcctaggacttattttcccaggaggccatttacaaggggatctggatgacctgctgatggagatccagcttgccagggacttaggtttatcctgttttgtttgctactggttacaaattctattttctgtacaattagtcagactaaagttttcactgtgtttgtttggcaaaacaaattaaacaaaaagtaaggttttt

SEQ ID NO: 717 - DNA, 4865 bp, Homo sapiens
  source 1..4865: mol_type = genomic DNA
acgcgcatggaacgcagcgaaggactatggcaggggagaacttcgctacgccgttccacgggcacgtgggccgcggcgccttcagcgacgtgtacgagcccgcggaggacacgtttctgcttttgaacgcgctggaggcagcggctgccgaactggcaggagtggaaatatgcctggaagtagggtcagggtctggtgtagtatctgcattcctagcctctatgataggccctcaggctttgtacatgtgcactgatatcaaccctgaggcagcagcttgtaccctagagacagcacgctgtaacaaagttcacattcaaccagttattacagatttggtcaaaggcttgctaccaagattgaccgaaaaagttgatcttctggtgtttaatcccccctatgtagtgactccacctcaagaggtaggaagtcacggaatagaggcagcttgggctggtggcaaaaatggtcgggaagtcatggacaggttttttcccctggttccagatctcctttcaccaaaaggattattctatttagttaccattaaagaaaacaacccagaagaaattttgaaaataatgaagacaaaaggtctgcaaggaaccactgcactttccagacaagcaggccaagaaactctttcagtcctcaagttcaccaagtcttagcatacagtgtgtgcccagaactactggaaactgaatgcatttagcatattttgaaactgaagtcattcattaggtaacaaggaattttatcagaaatttgtcattaaaaaaaggtagaaaggtggaacattccctttcagtcaggcctatagaattatttgcacaagtacaagtaaatatgtgtattatatttatagtttgcattttaaatataaaaattatgtatgaaatatttatttcagcattatgtggtaaggcaatggaattgatctggcaaatgtcttttttttcataccagtccataaaggcagtttgctttcagatggcagggccagcaacacaccttcattgtcgtatctccggtgtgtatcagctctccaactctatgtcataattcagttcatggggatcttgattacctttcccttccacaaaatattacactgattggttatatcgatgacattatgctgatttgacctagtgagcaagaagtaggaactacattagacttagtggaaagacatttgcatcagagggtaggaaataaatatgactacaattcaagggccttctaccttagtgaaattggtagggatccagtgacatggggcatgttaggatatttcttctacggtgaaggataagtacttgcatcttgctgctcttaaaaccaagaaagaggcacaatacttagtgggcctctttgggttttggaggcaacattttccaatttcattatgttataccagcctgtttaccaattgactcaaaaagctgctagttttgagtagggcccagaacaagaaaagagtctgcaacaggtccaggctgctgtgcaagctgctctgccacttgggtcatatgatccagcagatccagtggtgtttcagtggcagtggcagatagggatgctgtttgaagcttctggcaggtccctataggtgaatcttggtttaggattttagagcaaagccgtgccattaccaacaaataactagtctctttttgagaaacagctcttggcctgctactgggccttagtagagactgatacttaatgagtcaccaagttaccgtgcaacctgagcttcccatcatgaactggatgttatctgagccaccaacgcacaaagttggatatgcacagcaacactctgtcatcagatggaagtggtatacacatgattgggcctgagaggccctgaaggcacaaggaagttacatgaagaagtaggccaaatttccgtagtccccacttctgctacctgccttctctcttccagcctgcatcggtggcttcatggggacttccctgtgatcagctgacagagaaagagaagacttaggcctggtttacagagtgttctgtatgatatgcaggtaccaccctaaagtggatagctgcagcactacatctcacctctgggctaccttgaaggacagtggtgaagggaaatcctcctggtggacacaactttgagcagtccccctgttgactttgcttagaaggaaaaatagccagatattcaattatatgccaattcataggccgtggccagtggtttggctggatggtcagggagttcaatataactggaaaattggtgacaaagaaatttggagatgaagtatgtggatagacactgaatgggcaaaaagggtgaagatatttgtgccccatgtgaatgctcaccaaagggttagcaaaaaaggattttaataaagtggacaagataacctgttctgtggatactagtaggcctctttctccagccacacctgtcatcacccaattgtttcatgagcaaagtagccatggtgacaagaatagaggttatgcatgggctcagcaacgtggacttctactcaccaaggctgacctggccaaggctatctctgagtgcccagtctgccagcaacagagaccaacactgagcccctgatatgacaccattccccagggtcatcagtcagttgcctagtggcaggttcattacattgatccacctctatcattgaagggatagtgttttatccttactgaaatagatcttactctggatacagattcactttcccttcgcgcagggtgtctgctaaaactaccatccgtggacttacagaatgtctcatctatgaccatggtattccacacagcattacaagaaactcagttcacagcaaaagtgtggcagtgggcccatgatcatggaattttcttaccatgttccctactatcttgaatcaactggctacatagagcagtggaatggcattttgaagacagtaataacaccagctatatagcagtgccttgtagggctgggacaaggttctctagaagactgtctatgctctgaatcaacatccagtatatggtgcatttctcttatgactgggattcacaggtccaggaatcaaggggtcagaataggaaggacaccattcgctattagccctggtgacccactagcaaaatttttgcttcctgttcccatgacttatgcactgctggcctagaggtcttacatagggtggaatattttccactgagagacgcaatcatgatttaattgaactggaagtttaagactgctcctcagccatttggggcttcttatgcctctaactcaatagacaaatgagttacagtgctggctgggtgattgttcctgactaccaagtagaaactggactaccccgaatggtggtaaggtaaagtatgttgggaatacacaggattccttagggcatctcttagtgttatcatgccctgtgattaaggtcaatggaaaactacagcctaattcagacaggaccactaatgatccagacctttcaggaatgaaggtttgggtcaccaccaggtaagtaccatgaccagatgaagtgcttgctgaaggcaaagggaatacagaataaatggtggaataaatactagctttgatcatatgaccagttacagaaacacagactgtgattgtcataagtatgtcctccatattttgctataactacattttgtgtgtgtgtagctttgttttcttctcatttccttattctgtaacataagatgcattgattttatagcatagtgtttaaatattgttaatttttttaactggctccagtgttcaaccttgattaattttacatcatagtatttaagttatgggatatcaaggagagagtaaacatcacatgaagactttaccacctcttctgggaaacgggttaaagtgtttctggtggaatgctggattgttaatcgtgttagatggaattatgaccttgttgttgtctttatgtggcagttaagtatggtttaaagagatgtttatgggtgccaagttgacaagggtaaacttgtgatggttaattttatatgtcaacttgaataggccacagggtgccaaatatctgtttaaacattattctgaagtgtcttgagtgtgtttacagacaagatttgcatttgaactgggggactcagtaaaggagatagccatccccaaggtgggtggacatcatccagtttgttgagggcgtaaataaaataaaaggcagaggaaggaagaattccccccccttttttttcctgcctcattgtttgagctgtgacatctcatcttctgtcctcagatggatttacatcactggcttccctggttctcaagcctttggattcagactgaattataccacaggccttcctgggtctccagcttatagatgacagatcatgggacctcttagcctccataatcatgtaagccactttcttgtagtactggtaaaagatatattaaaccaatctataaaacagatagctatgaaagagaaaggtgacaggcacaagcctaggcaaatagagaagggttcctggacagcctctgacttgcctaggtcattgtgcacacgtggcttgcctgaatgaacatgcccactgtgaaagattccatttctcaacacatgtgcagtaagggaaataaatcaatgtggctcaaactaaccgcccacacatggggtggagccacaaggagtttgctccttatgcaggggagaagccgtgcctcttcagctcgtgtgtggtggcctggcattcaatttgtgaggtgtaaaacctgcatgaaggacccctctttttgtggagagctttccttttgcctaataaattctgccctcctcgcc

SEQ ID NO: 718 - DNA, 3847 bp, Homo sapiens
  source 1..3847: mol_type = genomic DNA
gaagctgcgctggggccgggctctgagaggaccggcgcagccgcggggagcctttgaggccctccctcggtgttttttcccagggcgtgggcttgccccgcgcgtgtctgtggagggcggaaacagcggaggggccagtctcctggcgaaggggcctaatccttgcccgccatgtccgggggcttcgagctgcagccgcgggacggcggtccccgggtggccctggcgcccggggagacggtgatcggccgcgggccgctgctgggaataacagacaagagagtatccagaagacatgccattcttgaggtggcaggtggtcagctgcgaatcaaaccgatacacacaaatccatgtttttaccagtcttcagagaagagtcagctcttaccattgaagccaaatctatggtgctatttgaatcctggagacagcttttctttgttagttgacaaatacattttccgcattctctctataccctctgaagtggaaatgcaatgtaccttaagaaacagtcaagtgcttgatgaagataatatattgaatgaaacaccaaaatcccccgtgattaatttacctcatgagactactggtgcctcacaactggaaggaagcacagaaatagccaagacccagatgactcccacaaatagtgtgtctttcctaggtgaaaatagagactgcaataagcagcagccaatccttgccgagaggaaaagaatccttccaacttggatgttagcagaacatttaagtgatcaaaacctttcagtaccagcaatcagtggaggtaatgtaatccagggaagtggaaaagaagaaatctgcaaagataaatcccagctaaacacaacccagcaaggaagaaggcaattaatttcatcaggaagttcagaaaatacatcagcagaacaagacacaggagaagagtgcaaaaatactgatcaggaagagtctaccatttcatccaaggaaatgccacaatcattttctgcaatcacattaagtaacacagagatgaataatattaagactaatgcacagagaaacaaacttccaatagaggaacttggtaaagtttctaaacataaaattgccactaaaagaacaccacataaagaagatgaggcaatgagctgttctgaaaattgttcgagtgcccagggcgactcacttcaggatgagtctcaagggtctcattctgagtccagctctaatccctccaatcctgaaactttgcatgcaaaggcaactgattcagttctacaaggttctgaaggaaacaaggtcaagaggacatcctgcatgtatggggcaaactgctataggaagaatcctgttcattttcaacattttagccatcctggtgatagtgattatggaggtgtacaaatcgtgggccaagatgagactgatgaccggcctgaatgtccctatggaccatcctgttataggaagaatccccagcacaagatagaatatagacataatacgcttccagtgagaaatgttttagatgaagataatgataatgttgggcaacccaatgagtatgacctgaacgacagctttctagatgatgaggaagaagactatgagccaacagatgaagattctgactgggaaccaggaaaggaagatgaagagaaggaagatgtggaagagcttttgaaagaagcaaaaaggtttatgaaaagaaaatagtaactaacttctgtagtcatatctgccttacatttactttttctttgtgggaaaacatttatgaactaaggaggtacttaagtgacagttattttccttcttttgatagttaatgacttttactactgactctttacaaatgagacattgaaacgtcagccttcagtataatagatggaattttttgttgccttgccttttctttcctacttaaagcatctggaaataggaagacagagaaggtagagtaaaaatggatattttttatgtactttgtatattggtaataaaaagtaaaagccataggttgcataaaactttggtctttttaaatttttttccaaagattatggagtactctgcaagtataaccaggcaaagtacatgaaaacatgcctcttttcattgttactgaagtaattctgtaagcagaaccaggctttaaaaaatgcagccattacataatggcgttttttttctagtaccttagatgtgagctttgcaatttcacttactacttttatccttcaaaacttgggaagattggttccaaatgggtactgaaaatagattcaactaggctgtagaagagaaatgttcaccatgtagggaatgttattttgtgttccacatctgcaatttactgtatgtttgaatttaaaagtaaaaaaactcaaaaaacttgaccttttttttcaaactaaagtcctagctgattattttaactctcagtgtgctgtctttatattaagaatagagaaacgacataactttctcaaatggcattagttttgccttagtttttttgacctcagatgaaagtagcaagttgtttgccagttgaaagttcaagattctggcctcccatatcaagaagaaaccacttattctccagttttacaaagtatctttctgtatttctgttctaaaactactttaagccctataatgctcttcatattacgtgactttgaattgttaaaatgtagtttagaatctttaataacagttgggttgtgtacacagagcaggagatatttattgaaatcataaatcactaagccaaaagaatctttgttaaatgctattattttctactctaaaggaacctaaaaatttatatcttaaaagatcaaaacatatttataataatattttctcattgctttaaaatatatctcccagtaattatacaatatttaatatttacttaaactggaacaagaataagataaacatttctctagactataacctattattctgatttttatctcttattgttatttgggaactatttttccccttataatgtccctttagccttggtagtataacaaatctacgaatgtaatatttaacttattctcatccctgccactaacttaatccttgaagtgttacataatctactcctaggtatatacccagaggaattgaaaacatttccacataaaaactgtacacaatgtcaatagaagcattattcttaacagccaaaaagtataaacacccaaagtctatcaactatcaactgggtgaatggataagcaaaacgtggtatatctgtgcaatggaatattatttggtcataaaaaggaataaagtactgatacatgctacaagatagatgaaccttgaaggcaagtaaaagaagccagacacaaaaggccacatactgtatgaactcatttatatgaaatttccaaaacaggcaaatccataaagacagaaagcaaatttgtggttgccagggacttggggaggaagaatggggagtgactgctaatgagtataggatttccttttgagtgataaaaatgttctaagattagatggcagtgatggttgcacaactctgtaaatatattacaaacaatgcattgtacactttcaaagggtagatttcattgcacgtgaactatatatttcaataaatctgtcacaaaaaagtaatgcaaagggtaataccagtcttttagaaggaaaaaaatatttaatatcaaaggatattcttcgtagtaatgtaatagttcatggtagctgcttttaacgatacagttttaatgcaactttcataatcatcctgaagacacttttgagtataactattgtataaataaatgtatagcttaattga

SEQ ID NO: 719 - DNA, 1432 bp, Homo sapiens
  source 1..1432: mol_type = genomic DNA
gaagggggcggggccgaggctggcgggcgcggggaaaatggcggcggcggcggcggcggctgcagctacgaacgggaccggaggaagcagcgggatggaggtggatgcagcagtagtccccagcgtgatggcctgcggagtgactgggagtgtttccgtcgctctccatccccttgtcattctcaacatctcagaccactggatccgcatgcgctcccaggaggggcggcctgtgcaggtgattggggctctgattggcaagcaggagggccgaaatatcgaggtgatgaactcctttgagctgctgtcccacaccgtggaagagaagattatcattgacaaggaatattattacaccaaggaggagcagtttaaacaggtgttcaaggagctggagtttctgggttggtataccacaggggggccacctgacccctcggacatccacgtccataagcaggtgtgtgagatcatcgagagccccctctttctgaagttgaaccctatgaccaagcacacagatcttcctgtcagcgtttttgagtctgtcattgatataatcaatggagaggccacaatgctgtttgctgagctgacctacactctggccacagaggaagcggaacgcattggtgtagaccacgtagcccgaatgacagcaacaggcagtggagagaactccactgtggctgaacacctgatagcacagcacagcgccatcaagatgctgcacagccgcgtcaagctcatcttggagtacgtcaaggcctctgaagcgggagaggtcccctttaatcatgagatcctgcgggaggcctatgctctgtgtcactgtctcccggtgctcagcacagacaagttcaagacagatttttatgatcaatgcaacgacgtggggctcatggcctacctcggcaccatcaccaaaacgtgcaacaccatgaaccagtttgtgaacaagttcaatgtcctctacgaccgacaaggcatcggcaggagaatgcgcgggctctttttctgatgagggtacttgaagggctgatggacaggggtcaggcaactatcccaaaggggagggcactacacttccttgagagaaaccgctgtcattaataaaaggggagcagcccctgagcacccctgctggtggctctgtcctctgttaggcaccacactggttggtcaacttggatgttcatcgaggctcattctggccttgctcagaagcccttctgatgctcttcagtgagggaggcactaccatttgaagtgaccccatgtcagtcacatggactggtctttagcaaagtccaaggctgcctgcttccacctaagtggtctctgttctacactttaatgtcaccctctacatcatcttacctagcccacccaaccttataaacatgataattgactactttcctgagctaaa

SEQ ID NO: 720 - DNA, 5586 bp, Homo sapiens
  source 1..5586: mol_type = genomic DNA
cgcggcttgcaaggcgcctgcgactcggtcccaggtcggcgggcggcgcacggcgggctcgcgcgggggccccggcgcgccgggcggcgcagtacgcagcgcgcggacccacgccacggccaggagcccagagcagcgcggccacactgcccaggggtcggccctcggccccggcgctcggagcgcggcggctgcctgggctttaatggctgctccgcggagcagcgcctagggctggaaggcggctgcggctcaggaagtcacccgagcaagcctccttcggggccggccgcacccgccgcggcgcgctccatgggggcgcgctccccccgggcggcccgctgacccgggacgccggggcccgctcgctcgccggccgcgcgtcccggccatgaactgagcccgcgggccagccccgcgcctgctccgcccgcgcctttcttctcgcgcctcctccgcccgccgccggcgggcccggctccccgggggctgcggcgccccgggctcggcggcccgcgggccccggggcgcggggcggcggcggcggggggcgcgcggctccgggcgcggcgcctgcaccatgaactaccagcagcagctggccaactcggctgccatccgggccgagatccagcgcttcgagtcggtccaccccaacatctactccatctacgagctgctggagcgcgtggaggagccggtgctgcagaaccagatccgggagcacgtcatcgccatcgaagatgccttcgtgaacagccaggaatggacgctgagtcgatctgtcccggagctcaaagtgggaattgtgggtaacttggccagcggcaagtctgccctggtgcaccggtacctgacgggcacatatgtccaggaggagtctccggaaggtggcaggttcaagaaagagattgtcgttgatggacagagctatctgctgctgatcagagatgaagggggccccccggaggcgcagtttgccatgtgggtggacgctgttatatttgtcttcagcttggaggatgaaataagtttccagaccgtttaccactactacagtcgaatggccaactatcggaacacgagcgagattcctctggttctggtgggaacccaggatgccataagttctgctaacccgagggtcatcgatgacgccagggcgaggaagctctccaacgacctgaaacggtgcacgtactacgagacgtgtgctacatacgggctgaatgtggagagggtcttccaggacgttgcccagaagattgttgccacaaggaagaagcagcagctgtccataggaccctgcaagtcgctacctaattctcccagccattcctccgtctgttccgcgcaggtgtctgccgtgcacatcagccagacaagtaatggaggtgggagtttaagcgactattcctcctccgttccatcgactcccagcaccagccagaaggaacttcggatcgatgttcctcccactgccaacacgcccacgcccgttcgcaagcagtctaagcgccggtccaacctgttcacctctcggaaagggagcgacccagacaaagagaagaaaggcctggagagtcgtgcggacagcattgggagcggccgagccatcccaattaaacagggcatgctgttgaagcgaagtggcaaatcgttgaataaagagtggaaaaagaaatatgtcaccctgtgtgacaatggcgtgctgacctatcatcccagtttacatgattacatgcagaatgttcatggtaaggagattgaccttctgagaaccactgtgaaagtcccagggaagaggccaccccgagccacgtcagcctgcgcacccatctccagccctaaaaccaatggcctatccaaggacatgagcagtttacacatctcacccaattcagggaatgtcactagtgcatctgggtctcagatggcaagcggcatcagcctggtctccttcaacagccgacccgacggcatgcaccagcgctcctactcagtctccagtgccgaccagtggagtgaggctacggtcattgcaaactcggccatcagcagtgacacagggctgggtgactccgtatgctccagccccagtatctccagcaccaccagccccaagctcgacccgcccccctcccctcacgccaacagaaagaagcaccgaaggaagaaaagcactagcaacttcaaagccgacggcctgtccggcactgctgaagaacaagaagaaaattttgagtttatcattgtgtccctcactggccaaacatggcactttgaagccacgacgtatgaggagcgggacgcctgggtccaagccatcgagagccagatcctggccagcctgcagtcgtgcgagagcagcaagaacaagtcccggctgacgagccagagcgaggccatggccctgcagtcgatccggaacatgcgcgggaactcccactgtgtggactgcgagacccagaatcccaactgggccagtttgaacttgggagccctcatgtgcatcgaatgctcagggatccaccggaatcttggcacccacctttcccgagtccgatctctggacctggatgactggccagtcgagctcatcaaggtgatgtcatccatcgggaacgagctagccaacagcgtctgggaagagagcagccaggggcggacgaaaccatcggtagactccacaagggaagagaaggaacggtggatccgtgccaagtacgagcagaagctcttcctggccccgctgccctgcacggagctgtccctgggccagcacctgctgcgggccaccgccgacgaggacctgcggacggccatcctgctgctggcacacggctcccgggacgaggtgaacgagacctgcggggagggagacggccgcacggcgctgcatctggcctgccgcaaggggaatgtggtcctggcgcagctcctgatctggtacggagtggacgtcacggcccgagatgcccacgggaacacagctctggcctacgcccggcaggcctccagccaggagtgcatcgacgtgctgctgcagtacggctgccccgacgagcgcttcgtgctcatggccacccctaacctgtccaggagaaacaataaccggaacaacagcagtgggagggtgcccaccatcatctgaggaacagccgtgcccgcctgctcgccgcacctgggacgcggcagcctcgccgcattctcgctcagaagtcgcagcacgtgagtcccgtcgcatcccctccctcttcctggtggccacctccctcccgcccacccactctcaccccaaacaaaatcacaaaacctggacatccctcaaggggcgaagaggcggccgggagactgcagaagtggctccttttcataaactcccctaaaccacacacaggagagagcgacgggcctcggccctttgatgatagcacatggcgcaggacccttgtcctggtggcacaagggatggggacgcgagggggaggggaggcgaggaacaaggagaaggggcaactttccttaactggcagttgagcacatagtacatttcccctctaccaaacggaacacttggattccatctcttctctgaggagctcgacggcataaatcagaagcaagcacagagtttgtcaggtttgaagcccctatgatggtgtgtgtcaaatcagttgtagctaatctgtccagggagaatactggcttcattacacttgtacagccgagttcttcccgcattactgctgtttaatagaacgtgattagtcatcgccgagaagaaagcatattagccgaggaggtagtcacgcggcacgcgccggtgattgccacgatgtgattgcaatactcttagaagcaccatattatcccagacatgttctttcaagcccttggagccctctctaaattcactgtcatcatttagtatctgtttaatttttcagtccaaagagaggaaatcagtcgctgagtattatttgactccggtctccttggtgcaaaaacaaaatgggaaaaataaataagaataactcagaaactcaaaaggaaaccacaaattcagctaataatagcatttcgagtatatttcgtaaactaaggaaatacacaaaaggctgttttttccgactgtaagagatatttgatgtccttttgccgaggtggatgtgttagtctcaggccctcctggaccacgttgcccaagtcacacaggcttctgtgttatgtatttagataagatgtgtgaaaatatatttgaataaaagaagttcataaatatgcattgatttttgtacagacaaatggcacctctcttaatttataaattgaactggatgtgaactaataatgtgcaactagttgagataagagggttacagatcattgtacatggaaaatattcccagcagtaaacacttccattaatgtgatctacggcttttgaaaaggagcatctcagaataagatggtggtacaatttgcttattaaaattgagaaagaaaaaaaaagacacactggagtatattagaaaggaaaaagaaggaatgtggtctctcatgattgaaagcatgatttagatcggatacggcttttgctaaccaaggaccaagggactctggcaagatggggtggttttccgaatgccagaccgaggtgccttacgaaggcagctgccaatggttctgtggcacagactggctcctgagaacccagacgaccttgacctggcagcccggccctccacgctagtacctcgcctgattttccatcgttgcggtatccagccgcttcagacgtccgccgccttcagtggtggtagtcaaatgtagtcaaccaaaccacagcatcccttaggttaaaagcaaacggggcagctttgcctagagctcattgacagtgtgatggggggagaagggttgtcacaatggaagatgaggacactagactcatgtagcacagaaacatgaagccacacgcaccggcagcctccggggtgttcctcgctctctcgtatgttaaaccttatattttataagagtttttcctcttatttcactttttaaaaaaaattaaagtaggtggggaaaaaaataaagctttacacagaatttatatgtgggtaagtgtttcatggaaatttctaatcttaacgaagctaagtggagctcactcgtatccaaaagtataacaggtgcagaagccacaagtctgagaaccttgacgacagttccatcgtcctgccatttgatttttcagtctgcgtttcatcactgtgtagctattgtaaatgtgaatagaaaaaaacaggtcattgcctatttttgaagaacgcgttggtgttcgagtccactagacacactcgctccacacagccttcaccgtagactctgtagtggacacagatatagcataaatgaaattgttaaattatttcattgtagttaattcccactataggaatgctttatcatagtgaagtttcttttgagaagaaacggaactccttgaggcttctctttgggatgtatatgagcgtgtacatattattctatgtgtttataatataatattttcccaaa

SEQ ID NO: 721 - DNA, 2678 bp, Homo sapiens
  source 1..2678: mol_type = genomic DNA
attctaaatgcaaagctagactgagcaagggaagtgacaggaaatggagctggggagacaaaaatgtggataacaacaaaagaatttcaacaggtaaaaaaatgagtcaaacatctctcaaacagaaaaagaatgagcctggaatgaggtcctcaaaagagagtctagaagcagaaaaaagaaaggaatctgacaaaacaggagttcgtctgagcaatcagggatcacaagaatcatcactgcggaagacagactctcgagggtaccttgtgcgcagtcaatggtctagaatatcccggagcccatccaccaaggctccatccatagatgagcctagaagcaggaacaccagtgctaagctccccagcagctccacgagctcccggactccatccacctccccaagcctgcatgactcctcaccgccgccgctgtccgggcagccctcgctccagccacccgcgtcgccccagctgccccggtcgctggactcgcggcctcccacgcccccagagcccgatcctggctcccggcgcagcaccaaaatgcaagagaatccggaggcctgggcccaaggcatcgtgcgggaaatccgccagacccgggactcgcagccgctggaatattcgcgcacgtcccccaccgagtggaagtcctccagccagcgcagggggatctaccccgcctccacccagctggaccgcaactctctgtccgagcagcagcagcagcagcgggaggacgaggacgactacgaggctgcctactgggcatccatgaggtcgttctacgagaagaacccgagctgctcgcgcccctggccgcccaaacccaagaacgccatcaccattgctctctcatcctgcgcgctcttcaacatggtggacggcaggaaaatctacgagcaagagggtctggaaaagtacatggagtatcagctcaccaatgagaacgtcatcctgaccccgggcccggcgttccgcttcgtcaaggcactacagtatgtcaatgctagactccgtgatctatatcctgatgaacaggacttatttgatattgtactgatgactaataaccatgcccaagtgggagtgcggcttataaacagcgtcaatcactacggcttactgattgaccgcttctgtctgaccgggggaaaagaccccattggctatttgaaggcatatcttaccaacttgtatattgctgcagattctgaaaaagtgcaagaggcaatacaagaaggtattgcctctgcgacaatgtttgatggagccaaagacatggcttactgtgacactcagctccgtgtagcctttgatggggatgctgtcctcttctctgatgagtctgaacattttaccaaggagcatgggctcgacaaattcttccagtatgatacattatgtgaaagtaagcctcttgctcagggtcccctaaaaggctttctggaagatttaggcagactgcaaaagaagttctatgccaaaaatgaacggttactttgtcctatcaggacctacctggttacagctaggagtgcagccagttcaggcgcccgtgtgctgaagacccttcgacgctggggtctagagatagacgaagctcttttccttgctggagcccccaaaagtcccatcttggtgaagatccggccccacatcttctttgatgaccacatgttccacattgaaggggcacagaggttaggttccatcgcagcttatggctttaataaaaaattcagtagttaggggcagggaggagaaataaagtggtgatagtctggtgttacagaagccacttcttttggctctctaggataattagataggtatttcagaaaattggaccttaaaactttgcttctttggaaaggttttctcctgattttttggaaaaccttttgaaccctcaagttaccatcaaactacttctctttgaactaccaatactgttgaatgccattacacctatctctgtgtaagtcataatgatgactctttaggataagtttagaacttgaatatttgcatgcttaaggcactgttttagaagcttacttagttttataaacactgctcatttttggatgtttgtagataacaatgaattgttacccatcagcattgtagaatagtgtcttcaaaggtagaaggagtatggttaagcacactcttgaaaactggagctttgtattctgtgactgctatggctagctttgtaaccaaagcaaaatgagaatttcactctacctgcatgagtataacaattttgatactgctcatttagaaataaatcatctggttgttcctccagggtactttctaagataagccttaaacagaaacccctaagaaaggttctctgaaaattatttggtgggttaaatgcctctgatccacagagtttcatatttgaagtctccggctttgggcctggcaggctggcacatccatatttgtatggaaaaaaaaaaaaaagaccctacgctaccacttcaaaaagtgacatgaagtgtagtatcctggcccttcattgtcattctctcatgatttttgttttgttttcaacaaaaattggttggtcattaaatatatcatatgttaggcacagtgacctggttattttcacatgttacttcattttcttatcaaattaaatgtttgtgacatagt

SEQ ID NO: 722 - DNA, 1856 bp, Homo sapiens
  source 1..1856: mol_type = genomic DNA
cacccgctcagctcgaccgcggagggcagctccaaaggggaccccaaaggtgcccacgcggggctggggcctcctgggcgtcgttgggagcggccactaccggcccgggtccgagctgtcagcctctccaaagcctgcgcgagaggagccgggacacgcctagcgcgggctccaggtggctgaccacgtccacgaccacatctgcctctaaactggaattcggttgctgacccagccccagcctcggctttcttgtcagcaccagggggcacagaacaccgtctcagtggccggtgtccagctgcctactttctgcccggatctctggctcctcatctctccggtctccgcagactaaagccctcgggatatgcagcagccatgcctgtgcacacgctgagccccggagccccgtccgcccccgccctaccttgccgcctgcggaccagggtccctggctacctgctacgggggccggcagatggtggagcccggaaaccgagcgctgtggagcgcctggaggccgacaaggccaagtacgtcaagagcctgcacgtggccaacacccgccaggagcctgtgcagcccctgctgtccaaacagccgctctttagccctgagactcgccgcacagtgctcacgcccagccgccgagccctgcctggcccctgccgacggccccagctggacctggacatcctcagcagcctcatcgacttgtgtgacagccccgtgtcccctgccgaggccagccgcactcctggacgggccgagggagccggccgtcctcccccagccacccctccgcgaccgccgcccagtacctctgcggtccgccgggtggacgtccgccccctgcccgcctcgcctgcccggccctgcccatcacccggccctgccgccgcctccagcccagcccggccgccgggtttgcaacgctccaagtcggacttgagcgagcgcttttctagggcagccgctgatctcgagcgcttttttaacttctgcggcctggacccggaggaggcgagagggttgggtgtggcccacctggcacgggccagctcggatatcgtgtccctggcagggcccagtgctgggccgggcagctctgaagggggctgctcccgccgcagctcggtgactgttgaggagcgggcccgggagcgcgttccctatggcgtgtcggtggtggagcgcaatgcccgcgtgatcaagtggttgtatgggctaaggcaggctcgggagagcccagcagctgaaggctaggcgccactgggcctggaattcgccacaggacggatcttacagaggcaagtggtccctggacctctcttgcatccattctctagacggccgtgtcagaggctccaccctgttgtgaacttggtatggaggcaaaggcttagaggctggaccagcattgttgggcaaggactgactctccaagggttttgttcttggctttggacacctgagaaccccctcctcccctcccccaatacaaggtttttgacatgagtgtactcctgcttagttcctcttgtggggctgcatttgcggtgctttgccctccccactgtgagtgaggggccaagggatctcctcaatcctgtctccccagcggctctgtttcctccttccttccttggcctctgtcctttgctgacttcctcttccttacccagcagaactcaccctggggtcggggcagtggggaggggcctatccactgctcttcctagtccttggcagctggcctaggtgggcagactataggagggactggttaggagtctgcattgctttgacttccctctccttggttaataaacacaaatgcttgtttctcaagg

SEQ ID NO: 723 - DNA, 1335 bp, Homo sapiens
  source 1..1335: mol_type = genomic DNA
tgatggtcaacatgtcagcaccagccatctgcctcgtgccctgggttgacctgggtttaggagaggatcccacatctgggcagaaagaccccaccccctgaaaaaagagcaaacagatttcttgcatctttcgttctatgtggctctcagaacattaaatccaggagtgctttaggaattgggtgcacagtgcctgccaccgaagaggagaaaatgaggtgtggaaacgtgcaaaccgtttgtgagggtctcagcgaggcctcttcatgccccaggcaccaccagctccccctccccagctcgttcccagccaggaccctcagctgtcctctcaggccccctgcgacagctgaagagtgtgcgggggaggggactaggggtccgggcggcgctggtcacaccctcgttgctctcactcagggcccccactcccagcccctccccccccaagaggctcggcactattttgggtggtgtcgaccccgcccccacctcctatcgagccctggctctccgggcagctggaggggtcgcgctgcgcctgttggggctgcacctcggaccagggcttctgctgcatctgcagccatgtcgggccgctcagtgccacatgcccacccggccaccgccgagtacgaatttgccaacccgagccgcctgggtgagcagcgcttcggagaaggcctcctgccagaagagatcctgacccccacactctaccatggctactatgtccggcctcgggccgccccagctggggagggcagcagggcaggggcctccgagcttaggctcagtgagggcaagttccaggcatttctggatgtgagccactttaccccagacgaggtgactgtgaggactgtggataacctgctggaggtgtctgcccggcacccccagcgcctggaccgccacggcttcgtgtcccgagagttctgccgcacctatgtcctgcctgctgatgtcgacccctggcgagtccgagctgctctctcccatgatggcatcttaaacctggaagcacctcggggtggccgacatttggacacagaggtcaatgaggtctacatctccctgctccctgcgcctcctgatccagaggaagaggaggaggcagccatagttgagccctgattgccacagacccagcacccagcaaatccctctctacctcccaaggtgatatgggcagctgcccaccactccagaggtagcagcatccttgggggaagggaaaggtgcatggtccacaatgtatggtttggtcccatgggacatgtcatagccttggtttagttttgggtggagctgaataaacccaaatctcagggc

SEQ ID NO: 724 - DNA, 1349 bp, Homo sapiens
  source 1..1349: mol_type = genomic DNA
agtggcagcggcggggacggggtcagtgccaagatgtcgacggcggcggttccggagctgaagcagatcagccgggtggaggcgatgcgcctagggccgggctggagccactcgtgccacgccatgctgtacgccgccaaccctgggcagctcttcggccgcatccccatgcgcttctcggtgctgatgcagatgcgtttcgacgggctgctgggcttccccgggggcttcgtggaccggcgcttctggtcgctggaggacggcctgaaccgggtgctgggcctgggcctgggctgcctgcgcctcaccgaggccgactacctgagctcgcacctgaccgagggcccacaccgcgtcgtggcgcacctgtacgcgcggcagctgacgctggagcagctgcacgccgtggagatcagcgcggtgcactcgcgcgaccacggcctggaggtgctgggcctcgtgcgggtcccgctgtacacccagaaggaccgagtcggaggcttccccaacttcctgagcaacgccttcgtgagcacggctaagtgccagctcctctttgccctcaaggtgctcaacatgatgcccgaggagaagctggttgaggccctggctgcagccaccgagaagcagaagaaggccctggagaagttgctcccggcctcctcttgagggctgcctgagctggtggcaccctcccctgggccggaagactgggaattcctgctaagtgtggcttctagagtgtttgtgtgtaccccgcttctgactgcctagggcgagtgggcatcctgtcatcatctccactgtcccaagcagtcactaggtggcggccgggccagctggaacccagcccatcctctcaggcagagcagggtggtccgggcacactgggcctgcctctccagcctcaggatgctcttgtttattctgggctcagaccctcctcttgtacgtctcatcacagctggtagagacccaggagtgcctgattgtcccacaggggtggcgcacagctctgggaccactcagaagatgggatgtgtgggtggaggatgccttgtctcggtcagctcattcctgcctccttcctgagccagttcagggcctgggggagagccagcttggggtaggaagttaataatactgttaatttgggttgttgttggatttactttgctagattttctctttcaccacgtgtgaactgtgggtgaggtttcaaagtagcttcaccccacgtggcttggttcccagggacagtcagggcctcgggggcccagctatgtacaacgaagctgtcgaaggagaagacaataaagtcgctccgcagctgctctgtgtgtttctca

SEQ ID NO: 725 - DNA, 3868 bp, Homo sapiens
  source 1..3868: mol_type = genomic DNA
gggccgtgctcttgctcccgccgcctggcagcctcacgctcggctccagcggccaagagccggagaaagtcctgctggtgggcggccgcggggctgagggcgtccggcatcccggggccgctccggcccgggcggcgagagtgcccggcggtccatgcatccgccgccgcccgccgccgcgatggatttcagtcagaacagcctgttcggttacatggaggacctgcaggagctcaccatcatcgagaggccggtccgccggagcctcaagacaccggaagaaatagaaagattgacagtcgatgaagacctcagtgatattgaaagggctgtttatctgctcagtgctggtcaagatgtccaaggaacaagtgtgattgcaaatctcccatttttgatgcgacagaatcccactgagacgcttcggagagtgttgccaaaagtcagagaagccctgcatgttgcaggagtggaaatgcagttaacggctgcgatgtcatttctgaccattctgcaggacgaatcagtgtcaattcatgcatatacccactcattcctccaagtcattctcctgcatctggagcacagggacacaggtgtcagcaatgcatggctggaaactcttctgtctgttatagaagtattgccaaaagaaaccctacggcatgagattttgaatccacttgtttccaaggcacaactttcccaaacagtccagtctcgtttagttagttgtaaaattttaggaaaattgaccaacaaatttgatgcccacaccattaagcgagaaatacttcctctggtaaaatcactctgtcaagatgtagaatatgaagttcgatcttgtatgtgtcggcaattagaaaatatagcccagggcattgggacagaacttacaaaaagtgtggtgctccctgaattaatagaactttctagggatgaaggcagcagtgtacgacttgcagcttttgaaactttggttaatctgcttgatatatttgatacagatgacagaagtcaaactatacttcccttagtgaaatcattttgtgaaaaatctttcaaagcagatgaatcaattcttatttctttatctttccatttaggaaaactatgtcatggactatatggaattttcactccagatcagcacttgagatttttggaattttataagaaactttgtacattgggtttgcaacaagaaaatggacacaatgaaaaccagattccaccccaaatcctagagcaggagaagaaatatatttcagtacggaagaactgtgcttataactttccggccatgattgtttttgttgatcctaaaaacttccacatggaactctattctacattcttctgcctttgccatgaccctgaagtaccagtcagatacactattgctatttgcttttatgaagtatctaagcttctgaattctggagtatatttaatacataaagaactaataacattattacaagatgaatcactggaggtactagatgctcttatagatcatcttccagaaatcttggaacttatgtctactggtggagaaagcagtgttcaagaaaataagttatcttctctgcctgacttgattccagcactcacagctgctgaacagcgagctgcagcctctttaaaatggagaactcatgagaagctacttcagaaatatgcctgcctgccacatgtcatatcaagcgatcagatttattaccgtttcttacaaagaatgttcacaatcatgatgacaaataatgttttacctgtccaaaaggcggcttcacgaactctatgcatttttctgcgttataatcgtaaacaagaacagagacatgaggtcattcaaaaattaattgaacaattgggccaaggaaaaagttactggaatagacttcgatttttggatacctgtgaatttattatagagatattttcaaaatcatttttctgtaaatatttctttctacctgctattgaactgacacatgatccagtagcaaatgtgagaatgaaactttgctacctgttgcccaaagtgaaatctactctgaagattcctgctgataagcatctacttcagcagttagaaatgtgtgtgaggaaactcctgtgtcaagaaaaagataaagatgttctggctattgtaaaaagaactgtattagagttggacagaatggaaatgtctatggatgcttttcagaaaaagttttatgagaaagatttgttggatcaagagaaagaaagagaagaactacttcttttggaaatggaacaattagagaaagaaaagcaacagaatgatggaaggcccatgagtgataaaatgtttgaaaagaaacgtagagacactaagacaccaacgcaaagtctgcccaagaacatccccatttctgttcctggaccctcttctgtcaccccatcgacaagtaaagaaatcaagaaatccaaactgattcgaagccagtcttttaataatcaagcttttcatgcaaaatatggcaacttagagaaatgtgctagtaaaagttctacaacaggatatacaacttctgtctcagggttaggaaagacttctgtgctttcactagctgatgattcattccggactcgtaatgccagtagcgttccatcttccttttctcctaatactcccttaccgagtacttcccgtgggacaggtaactcagttgaccccaagagcagtggaagtaaagatacacaaccacggaaggctaccttaaaatccagaaaatccaatccttaaatcaactgcttgatgaaggaggcaaaacaaaggcagcaggagataatgtgattggtacacaaaagctaaagcagtggctggggctttgtttttaaattttgggtttttttttttgttgttgttaatgagcagaaagagagacataatgacagctgatgttaaacttttcatatttcaaattagattccctaggaggtataatatatatttcttgagtaataatgtggttacggaattccaatgttatagtgaagtgtaatgaaaaacatctctaggaatgtgctttaaccactgctgcaaaagagacaagtctgcatttatttgtgcaggaaaccagccatttaattgttctagagttttagcatttaaaaatcgtatgaaagtctacatcagctgaattgtcctagcttgataagcacttggagggggacttggaaggtgagaaagatactgcattttctcatgagtctccaagcccacttgaaaagtcacactgaaaggatgcaaatagccgtctgcgattttggcggccctccggattgtggtgacaatatgttgtacccggacattcccaaatttaaatttggcagtgaaaattccacaaagatttctggtaactttgagctataaataccttaaaaataatagattgatgattttctttatttcctagagaatttattttataaatactttgtttacattttagattgtacttgtctttatttaaaatgatgaatctagtctgaatcagctgttattccaagctatcatgcttaagctatgtcaacagcatttatttgtactaatgctaatatttccatcaaaatttgcctgtggaatatatacagttcttaattttaaactgtcagttcttgagatataccgtgtgaagctattgtcagcttctctatttcaaaatgcaatcagcatataactatattgatattagaagatatttgttttttaaaatatattgatgtatgataaagatgatctaatttgtgaatgcatatgtatgtgtggttactttttataatgtgaaataatgaataatgaatttactcaaaataaaacataggttaatgagat

SEQ ID NO: 726 - DNA, 1169 bp, Homo sapiens
  source 1..1169: mol_type = genomic DNA
catttgggcaacggacgaattaagcggcgtggagatgcggcagccactgagctggggccgctggcgcgcgatgcttgcccgaacctacggccccgggccttcggcgggttaccgctgggcctcgggcgcacagggttacgtgcggaatccgccagttggagcgtgcgatctgcagggcgagctggacagattcgggggcatctcggtgcgcctggcgcggctcgatgcgctggaccgcctggacgctgccgccttccagaagggcttgcaggctgcagtacagcaatggcgatcagaaggtagaacagctgtatggctgcacattcccatcctccaaagccgatttattgcccctgctgcttccctgggcttctgctttcaccacgcagaatcggattcatcaacgttgactctgtggctgagagaagggcccagcagattaccaggatatgcttcacatcaagtaggagttgcaggagctgtatttgatgaaagtactagaaaaatactggttgtacaagatcgaaataaattgaaaaatatgtggaagtttccaggaggcctgtcagagcctgaagaagatattggagacacagcggttcgagaagtttttgaagagactggtataaaatcagaattcaggtccgtcctgagtattcggcaacagcacacaaatcctggagcttttgggaagtcagatatgtatatcatctgccgcctaaagccatattcattcaccataaatttttgccaggaagaatgcttaagatgtgagtggatggatctcaatgacctggcgaagactgaaaatacaactcccatcaccagcagagttgctaggctgctgctgtatgggtacagagaagggtttgacaaaattgacctgactgtggaagaacttccagcagtttacacaggactgttttataaactctatcataaggaactgccagagaattataaaactatgaaaggaattgattaaattcacatttatatgtttagaaacatgtagactaacgaatgacataagaaatagtggacattttggattgattaaacatctgactgtgattttctaatgtatatgatttccatgaagaaattttgtttctaaacatgcacattttaaaagcctcttttcgaataaagcaaatgcgtgaaaaaga

SEQ ID NO: 727 - DNA, 2081 bp, Homo sapiens
  source 1..2081: mol_type = genomic DNA
gtgagccgagattgcaccactgcactccagcctgggtgacagagcgagactccatctaaaaaaaataaataaacatgggagaaacctggaagaatatttgctcaactgtgaggcatggttggtggctaagggatcacagaatggcaggcctgcctattcctcctgagatcgttaaggaggctgaggtgccgcaggctgcgctgggcgtcccagcccaggggacaggggacaatggccacacgcctgtggaggaggaggtcgggggcatcccagtaccagcaccggggctcctgcaggtcacggagaggaggcagcctctgagcagcgtctcctctctggaggtccacttcgacctcctggacctcactgagctcaccgacatgtcggaccaggagctggccgaggtctttgctgactcggacgacgagaacctcaacaccgagtccccagcaggtctgcacccgctgccccgggccggctacctgcgctccccttcctggacgaggacaagggctgagcagagccacgagaagcagcccctaggcgaccccgagcggcaggccacagtcctggacacgtttctcactgtggagaggccccaggaggactagaccatctccacctgccccagctcctgcagggatggggtccgaacacgatggcagatctgggcagtgctgacccagcagacacacttcacccgcccacgaggctccagccgtcacctcctgacacacaccctgggggcagctctctgccagccccgagaccggccttgtctgctgggcacgggtcttcgcctcacttggagaccagccggctttcctgggggacacacggggcccccggatgcctctgggagccccagcacaagcacagcccagtggccttacgtccagctcgttcctgggccccgagtcaggaagacagcgtcacggagtcactgccaggaacgtgctgaggaatggagtggcccacggcggccttggggtgaaggggacccaggcctgtgacagccactccaggaactcctgggggtgctccaacctccgcgttttcctgtgctgccaagctcagaagccagaggcgggtttggtagtggctaatgggacaatgtgctgtccagcaaagcacacatggagaagcggccccaaaattcccaccttgatttccatcctgccccttcttctactccacggaggcgctgtctcactagggtcccctccccaaggctcagctctaagacctgcacctgcttctcttggcccctgcgtgacagacaagtccattccctccttagctcagaacaccaaatatcaccagactgcctaagagacttgatgacacctcccggaatgctctcggggtggggttcacctctccttgtcctgcacccactgctaggccacattctcgtttctgctcacatcccattgcccggctacaaggcctgcccacggcccttaaacttgctgggcaggtttggagcccatgggaccccgtgggtctctgtccaggagcagcagaggaggctgacaggccctgctccctctgctctgggggtgtctgggagccccagctcacaccctcccaatgcttatatgctgaagctcacagaatgggcttcttgcctgacagcaagtcaaagaatgagtttaatatcaaagtgtaagcttactttccatccccaagccagcctgccccctgccccatttcccatgagcacacttctggggaaggaaaacaggctcctggccttcactctcagcagagctttggagatgccccaggcatgccctgagctccttctgtgtacctgctcccacttctgagccacccgctgcccctccgcactgctggcaaacccagttcctgcctcagccaggtctccttccctggtttccagtcacacagagcccagcagctttctctttcagtcccataagggcagccttgtgtccctggccacacttccacccgccagggtcttcctccccatctttccatccttcctgctgagcttccacagagctcgtttgcaaacagggggattaaagcatcactgcgcattcgaaggcctg

SEQ ID NO: 728 - DNA, 3769 bp, Homo sapiens
  source 1..3769: mol_type = genomic DNA
gtgatgaaactgtaacttacaagaaaagggctgggttttgaaaataacacaggctctaaaaaccctaagaagcggtgcaacttttggcaggaatcggggttagcgggacctcaagggctcactgcggctaagtgaacgctgactggtcctccagcgtgagctagaacagacgtctctatggtcaagtaaacagagcgtgtgctgtcttccccatgtggtggggttgcgcatgatcagtagctgcaccactagaaagatggcggagcaagagcaaagaaaaatccctttggttccagaaaatctcctgaaaaagaggaaggcttatcaagccctcaaagccacccaggcaaagcaggcacttttggcaaagaaggagcagaagaaaggaaaagggctcaggtttaagcgactggaatcattcctacatgattcctggcggcagaaacgtgacaaggtgcgtctcagacgactagaagtgaaacctcatgccttggaattgccagataaacattccttggcctttgttgtacgcatcgaaaggattgacggcgtgagtttactggtgcagagaaccattgcaagacttcgcctaaagaaaatttttagtggtgtctttgtaaaagtcaccccccagaatctaaaaatgctgcgtatagtggaaccttatgtgacctggggatttccaaatctgaagtctgtccgagaactcattttgaaacgtggacaagccaaggtcaagaataagaccatccctctgacagacaatacagtgattgaggagcacctggggaagtttggcgtcatttgcttggaagacctcattcatgaaattgccttcccagggaagcatttccaggagatctcatggttcttgtgccctttccacctctcagtggcccgtcatgctaccaaaaatagagtgggcttcctcaaggagatgggcacacctggctatcggggtgaacgcatcaatcagctcatccgtcagctgaactagacccaggtgccaaactgcggtaaattttttatcagtgaagtggaagcatgtgttttgttttggaaatttttatcaagtatcttcagagaagattatttcctgctttatcttcagaaactggaaagggtcaaagaaaagacagtagctggccggtcgtggtggctcatgcctgtaatcccaacacttagggaggctgaggtgggcagatcacctgaggttgggagttcgagaccagcctgaccaacatggagaaatgccatctctactaaaaatacaaaaattagccgggcatggtggcacgtgcctgtaatcccagctactcaggaggctgaggcaggagaatcgcttgaacctgggaggtggaagttgcagtgagctgagatcacgccattgcactccagcctgggcaacaagcgaaactctgtctcaaaaaaaaagaaaagacagtagcatatgttcatgtcaagcacctctcatcacagtcgagttccaaggaaaaattccagtgttttctgcattgggtgctgtgtcatctgaaatcggcacattccatggaggaaggagtcctgctttgttgcatgtatcctagggtttaatgttggtaaatgagtcactctagcatttgtagaaggctccctgagactcctgcagcagtcgaccaagcccaaggacataattgaatctggagagtcctggggccttgttttgaaaaagacttgaaatacacataggaagaaaggcataaaaataaatgttcacttgtctctgctgtgagtatgtgttccaacttttcagtgatggctttgagaattctcaaacttgactggctctaagtgtatctggtggcttttgtatcgtaacctgaaactggcttagtactttttcctaaaagctcaggatttgagaatgaggaccccttcgccaggaaaacatgtatacactcaaaattttgcttgcagttctagggtgtttagacccttctcagatacctgtgcatcttatgggttttgtttttctctttgagacagtctcaccctgttgcccaggctggagcgcagtggcatgatctcagctcattgcagcctccacctcctgggttcaagtgattctgcctcagccccttgatcagctgggattacatgcatgtaccaccacacccagctaattcttgtatttttagtagagatggagacagagtttcaccatgtaggccaggctagtctcaaactcctgacctcaagtgatccacaagcctgggcctcccaaagtgctgggattacaggcatgagcaactgcgcccagctcttgtgtaccttatgtgaggaagtcctgctcaatcaggatcggtcacgcaggccctgatcttgctactctggttccatgtcctatggaagaccaaagtttaccaagatagatttttcccttcatagtggcagatagtgttaacccctgcaccatctgtaactcagaaatccccaccatttcttcccctgggcttcagaatagaattgcctggtttctctgatgatcagcatggttccttaaaacccaaatcagcaaggaatgaacaattttgtttggcatggatgaaattagcactgtttggctcgttaggccccaggcaggcaggcaccttaattttttccttgcatattctagtcttcagaagcattgccttttgtcctactggtagtgacatagaccaataacagggcatctggggattttaatcctgaaaacagtgagtctgatactgcttgtgtttttcatcagtgtccaccccaagtgggtcttcctgctattctcttcacttagttgcccctcacttgccatctgagcaattggcaaggatgtgccaggcctaggttaaacttggaaacatgcttgaccattctattccctggtcctttaagatcagtttggctgcaattttggctccttggaccctcaagcatagctggtaaatcaagttagagatgtaactgccttaaaacatgccagcttaggctgggcacggtggctcacacctgtaatctcaacacttcaggaggctgaggcaggcagatcacttgaggtcaggagttcgagaccagcctgaccaacatggagaaattctgtccctactgaaaatacaaaattagccggatgtggtggtgcatgcctgtaatcccagctacttgggaggctgaggcaagagaattgcttgaacccagggaggcagaggttgcagtgagccgagatcacaccattgcactccaccttgggcaacaaaagcaaaactctgtctcaaaaaaaaaaaaaaaaaaagtgccagcgtatgaggtaattagattggttctctccagaggtaacctgccaagaagagatgctatagatgttactcctatactgtaaaacattgtgaaatcagattactttaaaatgatgtattacaaagttatgcaaaaaagcagttgtgactatggaagcccaaggcttatatcccagctctgtcttacactaaatatgggtacagtgtttccactctgtccataaaatgggagctaatattctccaacctgtgtgcctgacatgatggttaaagggattaaacaaaacaatagtttgtaatttattctgtcagagcaaactgctggtaaataaaagggactaagttgacgaaaaataaattttaaaaaacctaataaaacaagtttgtaatttataattgtatacaaataaaagatgttacaaaaattgcgcacttatatgtatgtaccatgacataactaa

SEQ ID NO: 729 - DNA, 3334 bp, Homo sapiens
  source 1..3334: mol_type = genomic DNA
agcactctttcagtcagcatcgttcctggatttttttctcactgctgagcagcataaaagggtggggccgcttccctgcagcagaggcagaggcggcggcggcagcggctgcagcatcattcgcgggcagcggcggagaccgagagctgcagaaaagggtggggtcgcttcccaggagaagaggcggtggcggcggcggctgcggcatcctcgcgggcagcggcggaggcagcaatgctcggtctccgctggaggtgatggcctcccagccctgctaggtggccggctgcactaggacgccggcaggaaggagactcgagcccggtccgcggaccctgcggccacaccgcccggcccctcctctgcgccatggcttaagcctgtagccacctctcctcacgtcgcctcgctcgaccgaggtctgtgcgccgccgcagccgcagggaggggcgcgtcccagacaccctcgccggggactcgggaacgccgtgcgtctcacccttcggcgctcgcagcagactgcgctcccaaaggcgtttgcgaccggtaatcgagggactctacagactctcctaggacagctctccccgggtgctcgctgagggaggagggcgaactagctccggctgatcgggggtagaaaacggtgggaaccacattggccggtcaggatcggaggctgaaggaagattatagagacttgctttagaaccacaagaagaaagaggaggccggcttttcagctagcatcatggcgtggccgtgcatcacgagggcctgctgcatcgcccgcttctggaaccagttggacaaagcggacatcgctgtgccgctggttttcaccaagtactcggaggccaccgagcacccgggcgccccgccgcagccaccgccgccgcagcagcaggcgcagccggcgctcgcgcccccctcggcgcgcgcggttgccatagagacgcagccagcccagggcgagttggatgcagttgcccgggcaacggggccagcgcctgggcctaccggcgagcgcgagccggcggcgggccccggccggagcgggccgggcccgggcctgggctccggctccacctccggccccgcggactcggtgatgcggcaggattaccgagcctggaaggtgcagcggcccgagcccagctgccggccgcgcagcgaataccagccctccgacgctcccttcgagcgcgagacccagtaccagaaggacttccgcgcctggccgctgccgcgccgcggggaccacccgtggatccccaagcccgtgcagatctctgcggcctcccaggcgtcggcgcccattctcggggcgcccaagcgccggccgcagagccaggagcgctggccagtgcaggccgccgctgaggcccgggagcaggaggcggcccccggcggagcgggtggcctggcggccggaaaggcgtccggggcggacgagcgcgacacgcgcaggaaggccgggcctgcctggattgtgcgccgcgccgagggcctggggcacgagcagacgccgctgcccgcggcccaggcccaggtccaggccaccggccccgaggctggcagggggcgcgccgcggcggacgccctcaaccggcaaatccgcgaggaggtggcgagtgcagtgagcagctcctacaggaatgaattcagggcatggacggacatcaagcctgtgaaaccaataaaggccaagccccagtacaagcccccagatgataagatggttcatgagaccagctacagtgctcagttcaaaggagaggccagcaagccaacaacagctgacaataaggtcattgatcgcagaagaatacgcagcctctacagcgaacccttcaaggaacccccaaaggtggaaaaacctagtgttcagagttccaaaccaaaaaagacctcagcgagccataagcccacgaggaaggccaaagacaagcaggcggtgtcaggccaggctgccaagaaaaagagcgcggagggcccgagtaccaccaagccagacgacaaggagcaaagcaaagagatgaacaataaactggctgaggcgaaagagagcctggctcaacccgtcagtgattcaagtaagactcaaggtcctgtagccacagagccagacaaggatcaaggttctgtggtcccaggccttctgaaaggtcaaggtcctatggtgcaagagcctctgaagaagcaaggttctgtggtcccagggcctccaaaggatctaggtcccatgatcccattaccagtcaaggatcaagatcacacggtccctgagcctttaaagaatgaaagccctgttatctcagcaccagtcaaggaccaaggtccctcggtcccagttcctccaaagaatcaaagtcctatggttccagcaaaagttaaggatcaaggctctgtggtaccagagtctctaaaggatcaaggtcctaggattcctgagcctgtgaagaatcaagctcctatggtcccagcacctgtcaaggatgaaggtcccatggtctcagcatctgtcaaggatcaaggtcccatggtctcagcacctgtcaaggatcaaggtcccatagtcccagcacctgtcaagggtgaaggtcccatagtcccagcacctgtcaaggatgaaggtcccatggtctcagcacctatcaaggatcaagatcccatggtcccagagcatccgaaggatgaaagtgccatggccacagcacccataaagaatcaaggttccatggtctctgagcctgtaaagaatcaaggtttagtggtctcagggccagtcaaggatcaagatgttgtagtcccagagcatgcaaaggttcacgattctgcagttgtggcacctgtaaagaatcaaggtcctgtggtccccgagtccgtgaagaatcaagaccccattctcccagtactagttaaggatcaaggccccacagtcctacagcctccaaagaatcaaggtcgtatagtccctgaacctctgaagaatcaagttcctatagtcccagtgcctctgaaggatcaagatcctctggtgccagtaccagcaaaggaccaaggtcctgcagtccctgaacctctgaagactcaaggtcccagggaccctcagctacctactgtctcacctctaccccgagtcatgatcccaactgccccccatacggaatacattgagagctccccttgacactcaccccttgacacaccaatgaaggagctgacagtgagagtgctcccctcccaggggcagtgaagacacatatttaatctgcatgaaacatgtacagtagtcttgctggaatctaataaaaatggtccctctggctca

SEQ ID NO: 730 - DNA, 1480 bp, Homo sapiens
  source 1..1480: mol_type = genomic DNA
gccatcttggggctgctgggactcgcgtcggttggcgactcccggacgtaggtagtttgttgggccgggttctgaggccttgcttctctttacttttccactctaggccacgatgccgcagtaccagacctgggaggagttcagccgcgctgccgagaagctttacctcgctgaccctatgaaggcacgtgtggttctcaaatataggcattctgatgggaacttgtgtgttaaagtaacagatgatttagtttgtttggtgtataaaacagaccaagctcaagatgtaaagaagattgagaaattccacagtcaactaatgcgacttatggtagccaaggaagcccgcaatgttaccatggaaactgagtgaatggtttgaaatgaagactttgtcgtgtacttaggaagtaaatatcttttgaattagagaaagtgttgggacagaaagtactttatgtaactaagtgggctgttcagaagcttagaggtcattttttgtaattttctttttaattactttagagagctagggatgcaaatgttttcagttagaaagcctttatttacttttggaaattgaacaagaaatgcatctgtcttagaaactggagattatttgatgttaggtaaaacatgtaattgtttctctggcaaatttgtatcagtaatttgaaaatgagatattaggaaaaaccaattcttcttaaatttagttcatctttctttaaaagaacattaaatgtaaccattttgtcagatccatgtattttggagcataaaatgtatgctgttgtgaccaataaatataaaatatggtaattggaattaactccacaccatagtatgcattgttatacatactgtgtacctaattatgtatagcagtgtagtctcaattatatctgaaagtaattgtgactaacaagtatgctttgccttatttccacatttaaactacctgttaatataagggatttgtagtatcagcttgttgagcaatgactttgaatctagttttcagtgatcagaagcagcagttatttgagtgtatgaatggaatgatgatcactgtgctataatgtactgaaaccaccatattacagaaatatttactacatattttccatctgtagtttctcagaagggctatggattagtttgaactgtcaaatccttgcatacttctgtgacacccctgcccattttctgtctttaattaaccaaggtgttaggtgtgactgtcacaactgttatgttttccagtaaactagaagtacgatatttgataattatatttgtatttcaccacctaaatgtaatgttgattcctcaagaatgaaatgaaggcactacattgaaatatgttttgtataaatttgtcatgttgaacagcattttagcatggtaagttcccttagctatatgaattttggcatgtttcagagagatcagtaaataaaatattagataaaatata

SEQ ID NO: 731 - DNA, 1444 bp, Homo sapiens
  source 1..1444: mol_type = genomic DNA
aaccattgtgatggtctagataagtgtacatgcttaggccttctgaagcagcatttgaagctgcagtcctgaaaaccatgcaggccggaagagtagataaagaaatatttatttgagatggcacatgtttcttcagaaactcaagatgtttcccccaaagatgaattaactgcttcagaagcctccactaggtctccattgtgtgaacacaccttccctggggactcagacttacggtcaatgattgaagaacatgcttttcaggttttgtcacaaggatccttgttagaaagtccaagttacacagtttgtgtctctgagccagataaagatgatgattttctttctctgaactttcccaggaaactttggaaaatagtggaaagtgaccaattcaagtctatttcatgggatgagaatggaacttgcatagtgattaatgaagaactcttcaagaaagaaattttggaaacaaaggctccttacagaatatttcaaactgatgctatcaaaagttttgttcgacagctcaacctttatggatttagtaaaattcaacagaattttcaaagatctgcctttctagccacctttctgtcagaagagaaagaatcgtctgtcttaagcaagttaaagttctattataatccaaatttcaagcgtggctatccccaacttttagtaagagtgaagagaagaattggtgttaaaaatgcttcacctatatctactttattcaacgaagatttcaacaagaagcattttagagcaggggctaacatggagaatcataattctgccttagctgctgaagctagtgaagaaagtttattttcagcctctaaaaatttaaatatgcctctaacaagggaatcttctgtcagacagataattgcaaattcatctgtccccattagaagtggtttccctcctccttcaccttcaacctcagttggaccatcagaacaaattgcaacagatcaacatgctattttaaatcagttgaccactattcatatgcactctcatagtacctacatgcaagcaaggggccacattgtgaattttattacaaccacaacttctcaataccacatcatatctcccttacaaaatggttattttgggctgacagtggaaccatctgctgttcccacacgatatcctctggtatcagtcaatgaggctccatatcgtaacatgctaccagcaggcaacccgtggttgcaaatgcctacgatcgctgatagatcagctgcccctcattccaggctagctcttcaaccatcaccactggacaaatatcaccctaattacaactgatctgccattaaaagaggaccagattatgaatgacaacagagactaacatttacattgacaaaaaaccctaaaaatttctgcaattatcttattgaacaataaaattgcatgtttacttcta

SEQ ID NO: 732 - DNA, 5718 bp, Homo sapiens
  source 1..5718: mol_type = genomic DNA
accgcaaagaagtcgcgctttgattgggccgctgtcaggtgtcgctgcctgcaggttcggctgcgcgagcggagggaggcgggactcaagagtagccttcctcgaggacctgcctttcccatttgctgcctgaagttaatgtttcttgctggccaaatcagggacatgccggcattagcgggatgagtgggtgttccggcagggatgtggtcattgacggccagtgagggcgagagtaccacggcccacttcttccttggagctggagatgaggggctgggcacccgtggaataggcatgaggccagaagagagtgacagcgagctccttgaggatgaggaggatgaagtgcctcctgaacctcagatcattgttggcatctgtgccatgaccaagaaatccaagtccaagccaatgactcaaatcctagagcgactctgcagatttgactacctgactgttgtcattctgggagaagatgtaatccttaatgaacctgtggaaaactggccatcctgccactgcctcatctctttccactccaaaggctttcctctggacaaagctgttgcttactccaagcttcgaaacccctttcttatcaatgatctggccatgcagtattacatccaagataggagggaggtgtaccggatcctgcaggaagagggtattgatctgcctcgatatgctgtgctcaaccgtgatcctgcccggcctgaggaatgcaacctgatagaaggtgaagaccaagtagaggtcaatggagctgtctttcccaagccctttgtggagaagccagtgagtgcagaagaccacaatgtttacatctactaccccagctcagctggaggaggaagccagcgtctctttcgtaagattggcagccgaagcagtgtttactctcctgagagcagcgtccgaaagacggggtcgtacatctatgaggagtttatgccaacagatggcacagatgtcaaggtgtatacagtggggccagattatgcccatgctgaagctagaaaatctccagctttggatgggaaggttgaacgagacagtgaggggaaagagattcgatatccagtcatgctgactgccatggaaaagctggtggccaggaaagtctgcgtagctttcaagcaaacagtttgtggatttgaccttcttcgtgccaatggtcattcctttgtgtgtgatgtcaatggctttagttttgtcaagaactcgatgaaatactacgatgactgtgccaagattctggggaacaccataatgcgggagcttgccccacagttccagattccatggtccatccccacggaggctgaggacattcccattgttcccaccacatctggcactatgatggaacttcgttgtgtcattgcaattattcgtcatggggatcgtactcccaagcagaagatgaagatggaagtgaaacacccaaggttttttgctctgtttgaaaaacatggtggctacaagacagggaaattaaaactcaagcgacctgagcagctccaggaggtgctggatatcacaaggctgttgttggctgaactggagaaagaaccaggtggtgagatcgaggagaagactggaaaactagagcagctgaagtctgtactggagatgtatggtcacttctcaggtataaaccggaaggtacaattgacttactaccctcatggagtaaaagcttctaatgaggggcaagatccacagagggaaactctggccccatctctgttgctggtactgaagtggggtggagaactgactcctgctggccgtgttcaggctgaggagctggggcgagcttttcgctgcatgtaccctggaggacagggtgactatgctggcttccctggttgtgggctgcttcgtctccatagcactttccgccacgatctcaagatctatgcctctgatgagggtcgtgttcagatgactgctgctgccttcgccaagggccttctggctctagaaggggagctgacacccattttggtgcaaatggtgaagagtgccaacatgaatgggctactggacagcgatggggattccttgagcagctgccagcaccgggtgaaggctcggctgcaccatattctacagcaggatgcgccctttggccctgaggactacgatcagctggctcccaccagaagtacttccctgctcaactccatgactatcatccagaatcctgtgaaggtctgtgatcaggtatttgccctgatcgaaaacctcacccaccagatccgggaacgaatgcaggaccccaggtctgtagacctgcagctctaccacagtgagacactagagctaatgctacagcgttggagcaagctggagcgtgactttcgacagaagagtgggcgctatgatatcagtaagatccctgacatctatgactgtgtcaagtatgatgtgcagcacaatgggagtctgggacttcaaggcacagcagagttgctccgtctctctaaggcactggctgatgtggtcattccccaggagtacgggatcagtcgggaggagaaactggaaattgctgtgggcttctgtcttccactgttgcggaagatactacttgacctgcagagaacccacgaggatgagtctgtcaacaagctgcatcccctctgttatctcaggtactcccgaggcgtgctctccccaggtcgccacgttcgaacgcgtctctatttcaccagtgagagccatgtccactccctgctcagtgtcttccgttatggaggacttcttgatgagacccaggatgcacaatggcagcgagctttggattatcttagtgccatctcagagcttaactacatgacccagattgtcatcatgctttatgaggacaacacacaggatcccttatcagaggaacggttccatgtggagctacacttcagccccggagtgaaaggtgttgaggaagaaggcagtgccccggctggctgtggattccgtccagcctcttctgagaatgaggagatgaaaaccaaccaaggcagtatggagaacctgtgtccaggaaaggcatcagatgaaccagaccgggcattgcagacttcaccccagcctcctgagggccctggccttccgaggagatcacccctcattcgtaaccgaaaagctggttccatggaggtactttctgagacttcatcctcgaggcctggtggctaccggctcttttcatcttcacggccacccacagaaatgaagcagagtggcctaggctcacagtgcacagggctgttcagcaccacagtgctgggtggctcctccagtgccccgaatcttcaggactacgcccgcagccatggcaaaaagctaccacctgccagtctgaagcaccgagatgagctcttgtttgtcccggccgtaaaacgattttctgtgtcgtttgcaaagcatccgactaacgggtttgaagggtgttccatggtgcctaccatctaccctctggaaacactgcataatgccctttccctacgtcaagtgagtgaattcttgagtagagtctgccagcgccacactgatgcccaggcacaggcatctgcagccctctttgattccatgcacagcagccaggcctcagataacccattttctccaccacgtactcttcattcacctcccctgcaactccagcagcgctctgagaagcccccttggtacagcagtggcccttctagcactgtgtccagtgctggtccttcttcccctactacagtagatggtaactcccaatttggcttcagtgatcaaccctccctaaattcacacgtggctgaagaacatcaaggccttgggctgctccaggagacccctgggagtggagcacaagagctctccatagaaggggagcaagagctttttgaaccaaatcagtccccacaggtgccacctatggaaaccagccagccatacgaggaggtcagccagccatgtcaggaggtccctgacatcagccagccatgccaggacatttctgaggcgctcagccagccatgtcagaaggtccctgacatcagccagcaatgccaggagaaccatgacaatggtaaccacacatgccaggaggtccctcacatcagccagccatgccagaagtccagccaactgtgccagaaagtctctgaggaagtttgccagctatgtctggagaactccgaggaggtcagccagccatgccagggggtctctgtggaggttggcaagctggtccataagttccatgtaggggttggtagcttggtccaggaaacccttgtagaagttggcagcccagctgaagagatccctgaggaggtcatccagccataccaggagttctctgtggaggttggcaggctggcccaggagacttctgcgatcaatctgttatctcagggcatccctgagattgataaaccatcccaagagttccctgaggagattgatctgcaggcccaggaggtccctgaggagataaattagaagtcctgggtggtccctgaagtgattgatcagctgcctggagagggtattcctcaagcccagcatccatctggtgatccaaaccctcagagccagtctctagcccatgaccagcactcaccccttccaccagcaacatgtgattaattttctcattagtggtatcacactataccagccatttgagccagcaaccttttctgttggctaactcactggccagctctcaccagcggtgtctggggaagtagttctctttgtatgaagcatacctgtgccagagctgtggttgaggaggagccagttttaggttcgaagaagccattggctcctcacttagccattagacttgaataggatttccttggggtgggttggtctgtcattacccagccttctctgagcatcctaggaaatcacagattgttaaaggaaatgccgcttcactgctgaagacaccatctggcgacagcaaatgcaaaagaggggactctagggtcttcacttttctggggaaatgttcacgacttctcaaggtacgcttagaccatatgtgcattcaggggactcttgtctttgccagcactcctcaggtgagcccgggatggctatctgaaatgtctggaaaatagagtcccttccccaaacatctgacatggccactaaatctttagacttgccttatagatccttccatatcatccccaagtgccccttctgcctcagtcctgttcctctgggcaatagctctagggaaaagtaggtattagactgctgtgcaaaattcagagcaactacttaaaatgctctagaggattcttagccagtctgtgaaagtgggcctcctctgtggtggggctgtttggcttaggagatgctgtagtagtagagataatcaggttctattttaagcaatcagcagagatcaatattgtacagatacaagcaaaggtttaataaatatatatatatatatttatttctgtagttgtgccagggacagactggccaaagaccaaacactgcagggtccccaagaaatttgtccttatatcattgtgtctgagggccagatatgattatgaagctttttccaaagatccagggatgggaatgggagtgggtaggaggggtaatgcggtcattggagtcgggggctggaacattatgagtgctcaataaatataaactaatgagaatggtggtgatgga

SEQ ID NO: 733 - DNA, 3715 bp, Homo sapiens
  source 1..3715: mol_type = genomic DNA
attctatgagacagagtctcactctgtcgcccacgctggagtacagtggtgcaatcttggcttactgcaacctccgtctcctgggttcaagcaattcttctgcctcagcttccggagtagctggaacgtgtgagccaccacccctggctaatttttgtatttttagtagagacaggctggtctcgaactcctgacttccggtgatctgcccacctcagcctcccaaattgttggtattacaggcgtgagccaccgcacctggcctctatttatttatttattttgagatggggtcttgatatgaattcctagactcatgcttctcatgcttgctaccacccagtcctgcctcctgcacagcagtttccactaaagtcacccctttacgagaggcatcttttttttttttttgagatggtgtctcactctgtcgcccaggctggagtgcaatggcatgatctcagctcactgcaagctccacctcctgggttcaagtgattctcctgcttcagcctcccgagtagctgggactacaggcacccgccaccattcccggctaattttttgtatctttagtagagacggggtttcaccatgttagccaggatggtctcgatctcctgacttcgtgatccacccgcctcggcctcccaaagtgttgggattacaggcatgagccactgtacctggcctactagaggcatcttaaaacacatctcctgtgtctccattccaaagcgcatctttgtctacactcctggggtcctcccacgtcagcctcccaaagtgctgggattacagtcatgagccactgtgcccggccccaccaaattgttttctaacctgcttttttcttgaggaatcttctgcagcacatgactcacatgtagagccccttgtttcttgaggccttcatacccgtcagctcatctaaaagtcactcctgaggagtaagggcaaggggcattgggagaggtcaggcagccctgggaagcctcccagcgtgtgtcccaggaggcctgctgcctgcagacactgctcccagacgcagcggcctcggccatcagagcgtgtcccacgatgaggtggcaacttccctgaagggcttgctctcacccaggggtgtggttctccgtgtgcacacagatagatagttctacgtttgccatataccatttatatgcctcacacagattaacccactttcatttcaaaaagacctcctgtcatcgtgcccattgtacagatgaggacactgagacacggaatcctagtgacctgtgcaaggtcacacagctgggaagggtgagggaagcgtctgtgaacccagcaggcccagcccctgagtctaggctccgctcggcagctgtcatgggagcagagtccgagaagcactgcaggcacctgctctagggggagagaggtggaggtggcaggtagagagaggacgacccctgggagctgagacgatgccagcctcacacggacaggctgggtgacctcaggcaagtcgcttcccatttgggaccccaaggacccttctgcagacccagctgggggtccccgatgagactggctctcagagtccctgtgagtcccgtcagctgaggccagtaatgtcctggcaccatcactggacatggtttgctctcccatggaggggcaggtgtagcagccaaaagcgatcctgagctctgggcctctgaaccctgctctgccagctactgtgggtgtctctacccgctctgtgtctcagttccctttcctgaaaagaggggatagtaaaaactaaccctcaaggtgtttattaccaatgcccttcatggaggaatccgctgctccaggcccttgccagcagctgcacagctgggcctggggacctgggtgtgggtctgttgaaccttggcccaccctggggctgtggtcggcctggacgtgtaggtgtggaggtgcatatttattatggcaattttctgacaggtaacagagtgtggggctctcttctgaatggggctcgtggaggccgtgggtcaaaagccctaattttgtagtgagggctaaaaggcttcacaagggaaagggcctggctggggctatgggccggtgccgaccccccctctcccactttgtttgcagttctgggaagtcatcagtgatgagcatggcatcgaccccagcggcaactacgtgggcgactcggacttgcagctggagcggatcagcgtctactacaacgaggcctcttctcacaagtacgtgcctcgagccattctggtggacctggaacccggaaccatggacagtgtccgctcaggggcctttggacatctcttcaggcctgacaatttcatctttggtcagagtggggccggcaacaactgggccaagggtcactacacggagggggcggagctggtggattcggtcctggatgtggtgcggaaggagtgtgaaaactgcgactgcctgcagggcttccagctgacccactcgctggggggcggcacgggctccggcatgggcacgttgctcatcagcaaggtgcgtgaggagtatcccgaccgcatcatgaacaccttcagcgtcgtgccctcacccaaggtgtcagacacggtggtggagccctacaacgccacgctgtccatccaccagctggtggagaacacggatgagacctactgcatcgacaacgaggcgctctacgacatctgcttccgcaccctcaagctggccacgcccacctacggggacctcaaccacctggtatcggccaccatgagcggagtcaccacctccttgcgcttcccgggccagctcaacgctgacctgcgcaagctggccgtcaacatggtgcccttcccgcgcctgcacttcttcatgcccggcttcgcccccctcacagcccggggcagccagcagtaccgggccctgaccgtgcccgagctcacccagcagatgttcgatgccaagaacatgatggccgcctgcgacccgcgccacggccgctacctgacggtggccaccgtgttccggggccgcatgtccatgaaggaggtggacgagcagatgctggccatccagagcaagaacagcagctacttcgtggagtggatccccaacaacgtgaaggtggccgtgtgtgacatcccgccccgcggcctcaagatgtcctccaccttcatcgggaacagcacggccatccaggagctgttcaagcgcatctccgagcagttcacggccatgttccggcgcaaggccttcctgcactggtacacgggcgagggcatggacgagatggagttcaccgaggccgagagcaacatgaacgacctggtgtccgagtaccagcagtaccaggacgccacggccgaggaagagggcgagatgtacgaagacgacgaggaggagtcggaggcccagggccccaagtgaagctgctcgcagctggagtgagaggcaggtggcggccggggccgaagccagcagtgtctaaacccccggagccatcttgctgccgacaccctgctttcccctcgccctagggctcccttgccgccctcctgcagtatttatggcctcgtcctccccacctaggccacgtgtgagctgctcctgtctctgtcttattgcagctccaggcctgacgttttacggttttgttttttactggtttgtgtttatattttcggggatacttaataaatctattgctgtc

SEQ ID NO: 734 - DNA, 1614 bp, Homo sapiens
  source 1..1614: mol_type = genomic DNA
gcggcggcggcgggcgcggcgcgatgtgcgagcgggcggcgcgcctgtgcagggccggcgcgcacaggctgctccgggagccgccgcagcagggccgggcgctgggcgggctgctgcgctgggtgggcgccaggatgggcgagccccgggagtcgctggcccccgccgcccccgcggaccccggcccagcctcgccgcgcgggggcaccgccgtcatcctggacattttccgccgtgcggacaaaaatgatgatgggaagctgtccttggaggaattccagctcttctttgcagatggcgtccttaatgagaaagaactggaggatctctttcacacgattgactctgacaacaccaaccatgtggacaccaaggagctgtgtgattactttgtggaccacatgggtgactatgaggatgtcctggcctccctggagaccttgaatcactctgtcctgaaggccatgggttataccaagaaggtatatgagggtgggagcaacgtggaccagtttgtgacccgcttcctcctgaaggagacggccaatcagatccagtcgctgctgagctcagtggagagtgcggtggaggccatcgaggaacagaccagccagctccgacagaaccacatcaaacccagccacagcgcggcacagacctggtgtggaagccccactcccgcctctgcccccaaccacaagctcatggctatggaacaaggcaagacccttccatctgccacggaggatgcaaaggaagagggtctggaagcccagatcagccgcttggcagagctgattgggaggctggagagcaaagcactgtggttcgacctgcagcagcgcctgtcagatgaagatggcaccaacatgcacctgcagctggtccggcaggagatggccgtgtgccccgagcaactgagcgagtttctggactctctgcgccagtatctgcgggggaccactggcgtgaggaactgcttccacatcactgccgtgaggctctcagatggcttcacctttgtcatctatgagttctgggagacagaggaggcgtggaagaggcacctgcagagccccctgtgtaaggcgttccggcacgtcaaggtggacacactgagccagcctgaggccctctccaggatcttggtgccagctgcttggtgcacggtgggacgggactgacagcctcccagaggcccgtggaggagcccaccagccccttcttcttgtgaaggaaatcccgtttttttctagacagacactttggtgcagaagcttcttttcaatccatcctccacaagaaggtgtttccctgttgttaagtgaaggaggccgcccctgcccccacctgagaaggcagagcagtgtctgtgctgccaggtcctggtgaagcccaaggttgaagggggcggcttcctggagccagcacccctgcctcctggtcctggcctctcccctacccctcacatggccacgcatgacccacactgaccacaccctgccctcttcggtgacattcttctacctagtaggagtcatgcccctgtagtgcccaacctagccaggtagccaccactgtgcccaggcgccaaataaaccctggttgggaaga

SEQ ID NO: 735 - DNA, 4229 bp, Homo sapiens
  source 1..4229: mol_type = genomic DNA
cactcgggtcgcgggcgttggcagccgggcgggtgggaggggccggagcaaaagttccgggcgcccgagccggctgctcgtgccatggagcggagtcccgacgtgtcccccgggccttcccgctccttcaaggaggagttgctctgcgccgtctgctacgaccccttccgcgacgcagtcactctgcgctgcggccacaacttctgccgcgggtgcgtgagccgctgctgggaggtgcaggtgtcgcccacctgcccagtgtgcaaagaccgcgcgtcacccgccgacctgcgcaccaaccacaccctcaacaacctggtggagaagctgctgcgcgaggaggccgagggcgcgcgctggaccagctaccgcttctcgcgtgtctgccgcctgcaccgcggacagctcagcctcttctgcctcgaggacaaggagctgctgtgctgctcctgccaggccgacccccgacaccaggggcaccgcgtgcagccggtgaaggacactgcccacgactttcgggccaagtgcaggaacatggagcatgcactgcgggagaaggccaaggccttctgggccatgcggcgctcctatgaggccatcgccaagcacaatcaggtggaggctgcatggctggaaggccggatccggcaggagtttgataagcttcgcgagttcttgagagtggaggagcaggccattctggatgccatggccgaggagacaaggcagaagcaacttctggccgacgagaagatgaagcagctcacagaggagacggaggtgctggcacatgagatcgagcggctgcagatggagatgaaggaggacgacgtttcttttctcatgaaacacaagagccgaaaacgccgactcttctgcaccatggagccagagccagtccagcccggcatgcttatcgatgtctgcaagtacctgggctccctgcagtaccgcgtctggaagaagatgcttgcatctgtggaatctgtacccttcagctttgaccccaacaccgcagctggctggctctccgtgtctgacgacctcaccagcgtcaccaaccatggctaccgcgtgcaggtggagaacccggaacgcttctcctcggcgccctgcctgctgggctcccgtgtcttctcacagggctcgcacgcctgggaggtggcccttggggggctgcagagctggagggtgggcgtggtacgtgtgcgccaggactcgggcgctgagggccactcacacagctgctaccacgacacacgctcgggcttctggtatgtctgccgcacgcagggcgtggagggggaccactgcgtgacctcggacccagccacgtcgcccctggtcctggccatcccacgccgcctgcgtgtggagctggagtgtgaggagggcgagctgtctttctatgacgcggagcgccactgccacctgtacaccttccacgcccgctttggggaggttcgcccctacttctacctggggggtgcacggggcgccgggcctccagagcctttgcgcatctgccccttgcacatcagtgtcaaggaagaactggatggctgagctggcccggggctgccccggtcttgtgccacagcactgttttctttctgccctcttcctaatgcccacactgcttgggcactattgcgcccctgcctccttgccaggctcttcctcctgtcctgcctggtccttttccatgactccaggctgtgcctctctccatgtttggtcccttctgtgcccatggtcaggagctattcgggtggcacctcgctggccaggctctcccgagtcgtggcacctccacaatgtgaattttctgaatccctattccaggatttctgggaataatgtttacttctagaatgggcctgttgtaaaccatctcatcgaggtgtggtaaagccattggatgaggaggggactgccatggaaaggagagtttgttacttacggttctgagaggaggggccacataggaaagccccacggtgggtcagaaggcggaaggagggaggggaacgtgtgggcaagagacttcctctggtttcctcaggaggaaatgggcaaggcagagtaagcaggggagacaggtttaagggtagctggcttgagtaatttcagtggctctcaggataggggctgccctttttgtctgatacctggccccgggatagtcaggacaggtgaatgttggcctggggtgtgacagccctgggagagccatgtgaaggaggcagctggcgccatcgctccggattagttggtttccataggaaaggcatgctttcagccagatgcttgccatctctagggattgggggattggctagcctgggaggatcagtctgtccaggtcagcgaggccccagataccagagcatcaagagtacaggaaatacagttaatgcagggcctctgtgtggctggatcctccgtctccatcagatcagctctgattgatctattcttgcacgatttcctctgaacacagggttccagagtacttaaacacaacattttttaaatcgtgatttcggcctatttccttgccaggcctgtttccccaccaggaaatgagataggaggactggatgaggatgtcctgttatagttgctgtggaggaagttcctctggttaattctcatcagcgtctgcagaaaagaaggaaagagggcacccttttcagttgggaagaaaggagaggggtggcgccatggacgtggccctaaacgctgtgggagagggaagaggaggctgggcctcgctgccctcttgtctctgctgacttcagcctggtcatgcttgctctgccacttgcgatttcatccctaatttcttcctccaccatgcctgcagacttttccctgggcttgttttttctcgcacatctctgaagagtttttaatcttcagctcatcatgtcccaggaagtggcatcataaaaggaaatatttttttttcctaggagcagtgttaaaatctgggtcacattcctgaccaaggacagcatcctgccttctgcccatccccttcagttcacaaaagctgacattttaaacaaatcatgactcacacgtattaattggttataaatatgttgtgtacactggttagataaaacttaaggccacaaggagggcccaggtaggcgatgtcagtgtgtgaaggggctggattgggcgtggtgaggatgttggcaaaccagtgcatgcacctggttggaagatgctcagcctcacaaaagctccaagccctttgggagccaaagtgtctgagagtgtgaccctctcctgtaaagtatttatcccacccattaatataatttctgtataataaacttgacctgaaattatttcattctttatattaaacttttaaaaatgttttttattttcaccttagatatgggaagagttttttttttttttttttttttaacaggataacttgagcaggctaggcctcttaaaaaaaaatttgagctaaaactcatttttcttttggcattttcttttcaatgttcttataagcaaagttcatccatgttgtagcatgtgttcaactttattttttcatcgggtaatattccattgtatggaatggtagtactacattttatttatcatgcatcgattggtggacatttggatcgtttctacttcttgactattatacataatgctgctaggaacttttgtgtatgagtttttgtgtggacatatgttttcatttctctttggtatatgcctgggagcagatttgctggatcatatgaaactctatttaacccttgagggactcccaaactgttttccaatgtggtgacacaattttatatcccatcaacagggcatgagggttctgatgactccacatccctcagtgctttttattatctatcttttaacttagccatcctagtaggggtaatgtggcatctcattgtgattttggtttgcatttccctgatggcgaatgatattgagcatcttttcatgagcttattggccatttgcatatcttcttaggacagctatctttagatcacttgctcattttttaattgggttatttgtctttttattattgagttgtaagagtccttttatagcctggcacaagtccctttaactggtatatgattataaaatttttctccgtgagctgtttcatttccttgatgatgtcctttgaaatactaaagcttttaattttg

SEQ ID NO: 736 - DNA, 2570 bp, Homo sapiens
  source 1..2570: mol_type = genomic DNA
cgcgcaatctgcttccggcctgcgagctcggtgttccgctttttgtgggccgggtgggtttcctaatctggtttcgtctgcctggttcatctgtgtgcgatggctccggactcggatcccttccctgaagggccgctcttaaagctgctacccttagacgctagagaccggggcacccagcgctgccgcctgggcccggccgccctccacgccctgggcgcgcgcttgggctcggcagtgaagatctcgctacccgacggcggctcctgcctctgcactgcctggcctcggcgggacggagcggacggctttgtgcagctggacccgctgtgcgcgagccccggggcggcggtcggggcgtcgagatcccggaggagtctcagcctgaatcgcctcctcctagtgccctgtccgcccctgcggcgcgtcgccgtgtggccggtgttgcgagagcgggcaggcgcgcccggtgcccggaatacagccgcggtgctggaggcggcacaggagctgctgagaaaccgaccgatctccctgggccacgtggtggtcgctccgccaggcgctcctggcctggtggctgccttgcacatcgtcggcgggacgcccagtcccgatcccgctgggctggtcacccctcgtacccgcgtcagccttggcggggagcctccgtcggaagcccagccgcagcccgaggtgcccctgggaggtctttcggaggcggccgactcgctgcgggagctcctccgcctcccgctccgctacccgcgcgccctgaccgcgctgggcttagcggtgcctcgcggggtgctcctggcggggccccccggagtgggcaagacccagctggtgcgggccgtggcgcgcgaggcgggcgcggagctgctggcagtcagcgccccggcgctgcagggttcccggcctggggagaccgaggagaacgtgcggcgggtcttccagcgcgcccgggaactggccagccgcggacccagcctcctcttcctggacgagatggacgccttgtgtccccagcggggcagtcgagcacccgagagccgcgtagtggcccaggtgttgacgctgctggacggcgccagtggggaccgcgaggtcgtggttgtgggagccactaaccggccggacgctctagacccagcgctgcgtaggcccgggagatttgaccgagaggtggtcattgggactcccacacttaaacaaagaaaggaaattctgcaagtgattacctcgaagatgcccatctccagtcatgttgatttgggccttcttgcagaaatgacagttggctatgttggtgccgacctgacagcactctgtagggaggctgccatgcatgccctccttcatagtgagaagaaccaggacaatcctgtgattgatgaaatagacttccttgaagcttttaaaaatattcagccctcatcgtttcgaagcgtcattggattaatggatatcaagcctgttgactgggaggagattggtggccttgaagatgtaaaactgaagttaaaacagagcattgagtggcctctgaaattcccttgggaatttgttagaatgggcctgacacaaccaaagggagttctcctctatgggccccctggatgtgctaaaaccactctggtgagggccctggccacaagctgtcactgctctttcgtttcagtgagtggagctgatctgttttcaccgtttgttggagattcagaaaaagtgttgtctcagatatttcgacaagcaagagcaagcactccagcaattttgtttttggatgaaattgattcaatcttgggagctcgctcagccagcaagacaggatgtgatgttcaagaacgagttctttctgttctcctgaatgaattagatggtgttggacttaagacaatagagagaagaggaagtaaatcaagtcaacaggagtttcaagaagtttttaaccgaagtgtcatgattattgcagcaacaaatagacctgatgtgttagatactgctttgttacgacctggaagattagataagatcatctatatcccacctccagatcacaagggcaggctttctattttaaaagtctgtacaaaaaccatgccaatagggcctgatgtctccttagaaaacctcgcagcagaaacctgttttttttctggagctgatcttagaaacctctgcacagaagctgctttgctggctctgcaagaaaatggactagacgcaactacagtgaaacaagagcactttctaaaatcacttaagactgtaaaaccgtcgttaagttgcaaggacttggctttatatgaaaacttatttaagaaagaaggattttctaacgtggaaggtatttaaaaatcaccttaaactcttgttcagttcacattaattgaaatgtgaacttgcctgtcgtttgcaacttcacacttttagaatttgtgtttatatttcctgtaagtgaataaataaaacaaaacaaaacaaaaaaaacttgtgcctgataagctaaggctcatttatttttaaaaggcatattaaataaaatactgtaatttaggaagaaa

SEQ ID NO: 737 - DNA, 3421 bp, Homo sapiens
  source 1..3421: mol_type = genomic DNA
agttagttccctaacccgagtgaagccacttccgggcttcccgggcgccttccgcagtcctcttccgggtgatggcggccgggtgccccggatgtagccctggcgcaagcatctcttcttttttccacctcgccttccgcggattcccagcttgagaaacacctctttgccccgtcatgccaaagaggaaagtgaccttccaaggcgtgggagatgaggaggatgaggatgaaatcattgtccccaagaagaagctggtggaccctgtggctgggtcagggggtcctgggagccgctttaaaggcaaacactctttggatagcgatgaggaggaggatgatgatgatggggggtccagcaaatatgacatcttggcctcagaggatgtagaaggtcaggaggcagccacactccccagcgaggggggtgttcggatcacaccctttaacctgcaggaggagatggaggaaggccactttgatgccgatggcaactacttcctgaaccgggatgctcagatccgagacagctggctggacaacattgactgggtgaagatccgggagcggccacctggccagcgccaggcctcagactcggaggaggaggacagcttgggccagacctcaatgagtgcccaagccctcttggagggacttttggagctcctattgcctagagagacagtggctggggcactgaggcgtctgggggcccgaggaggaggcaaagggagaaaggggcctgggcaacccagttcccctcagcgcctggaccggctctccgggttggccgaccagatggtggcccggggcaaccttggtgtgtaccaggaaacaagggaacggttggctatgcgtctgaagggtttggggtgtcagaccctaggaccccacaatcccacacccccaccctccctggacatgttcgctgaggagttggcggaggaggaactggagaccccaacccctacccagagaggagaagcagagtcgcggggagatggtctggtggatgtgatgtgggaatataagtgggagaacacgggggatgccgagctgtatgggcccttcaccagcgcccagatgcagacctgggtgagtgaaggctacttcccggacggtgtttattgccggaagctggacccccctggtggtcagttctacaactccaaacgcattgactttgacctctacacctgagcctgctgggggcccagtttggtgggcccttctttcctggactttgtggaggaggcaccaagtgtctcaggcagcgaggaaattggaggccatttttcagtcaatttccctttcccaataaaagcctttagttgtgtactggggccttggctgtgctgatggccagaagccaggggccttctccacagtccctttggacttgtcttggtccctgagtactcccatgaagatccttcttggaggtgcctgtcaggtatcctgtggcctccctgcctggactctgcttgccgtgtaaacacccccaactgcgctgctctgtgctcctctcccaggtttcttgttcgattcctcttaggtctttggctttcaggacctcagattctttatccttgtagccaccagaggacagagccccagaagtggatgttttaggcccagaaggaccagggcatcgagaagacattgggaccctgttgggggtgagcatggaaccctcttactctcgcttcaccctctcaagctccttagatgctgggcagaagtgggatgagtggcccaagaccgagatccctaaggttctgagagccagtgtcttccctaatctggctttcctctatccttgccgtcgttcccacagcccttcagtgaagtgcaaactcagtggccaagtgtgggccaagtgtgcattgtactggcacagagaggggcagtgactcactggagatcacaggaatcaaagggctggcccagacccagtgggctcctttcccagacctttcttggcacaaagcctttgctgcctggccttggaggccctgcggcctacattctctggaccccactatgtgcctggcacagggctagtgccttgaggaaactgaggtagctgggttggtccccttccaggaattcagagtctggtggcaggggcatgggaaatagacagatgtaattctatagcctgggcctggcaccctccacctccacgccccaccagcattgccttacgcctcccttgccccacgttagatggtttcttccggttttgcactctggctgccccttggagtctcctggggagctgtaatatctctttggagattcagattgagctggtctaggttgtggcccaggcattgggcattttggaagcccccaggtgttttcagcttgcagccaggccgagagagagcccctgagtcagatccccatggtttaggcacacctagcgggaggggtggctcctggaccccaccgtggttggagagctgagcatgtgtgtggctttagtggggtctgttagttatgggggtctgggcactggagctgcaggacacttgggatcccaggtcagaaagggccagatgagcaactaggaaagacttgggggccagggcggagtggggtcacctgacactcttgtgaggccccttctagtgcctgctcacaccggaatttcattcactccaagaagccatcaggggtaagataccttcctttaaacgtcactaagaaagaagaggcctgccggtgacacagtaagatgccattgatctaaagatgcgtcttgatttcagaaaggtccggaagtggaaagcaggtttcagggctgctgaggtacagggttctcctgtaggccccagggatggtctcaggggtgctgagtgcgtgcgtggtaaatggatggagcccaggggcgcctcctgccagtgtcctccaggcactcaaacctagcccttctgaagccgacctcacgtgacctcacagcccctcctgaaggcgcctcactgatgacggtgggtggaataacagcccccagagatgtccaggtttggaaccccaggacgtgggaaagtgttaccttgcgtggcaaaagggacccggcgcctgtgcttcagttcaggatttcgtggtggggagatgaccgtggatggttgaggtgggccctgagtaatcatgggggcccttataagggaaggggagtcacgagggtctgcgcatgaagcaaggaagcttctggctgtgaagatggcaagaaggcctggggccaggcgatgaggtggcccctggaggagctggaaaaggcattggattctgccccagagcctccgtggagaaacaaagccgcactgacaagacttcagcctggtgaaaaccattttggactcctgacctctagaactgtaagataataaattggtgtggttttcaacctctca

SEQ ID NO: 738 - DNA, 4562 bp, Homo sapiens
  source 1..4562: mol_type = genomic DNA
gcttcctccagagggcgggaaccttggacgtggcggggctgggtcagtcagggcgctgggcccagcctctctgcaggctggccttccgcgctgccgtgaagcccccgacaggtcccacgcctgcctaggtagaccggcgccagcccgagtgacgcctggcgtgtggccgcgggcaggcggctccgtgcggcggggcgggcgggtgccacacctgtgcgggcaagggcggggcgggaaggtgcgcaggcgcgctcggggctggtgggcggtggctcctgggaagttgcgcagccgaactggccggctgggcgcgcgctcttgcggtggcgtaatctctcagcctttctgtgtctcctttcctccgcctcagtttggggcgggtcgggggaatggctgaggagatggagtcgtcgctcgaggcaagcttttcgtccagcggggcagtgtcaggggcctcagggtttttgcctcctgcccgctcccgcatcttcaagataatcgtgatcggcgactccaatgtgggcaagacatgcctgacctaccgcttctgcgctggccgcttccccgaccgcaccgaggccacgataggggtggatttccgagaacgagcggtggagattgatggggagcgcatcaagatccagctatgggacacagcaggacaagaacgattcagaaagagcatggttcagcactactacagaaatgtacatgctgttgtcttcgtgtatgatatgaccaacatggctagttttcatagcctaccatcttggatagaagaatgcaaacaacatttgctagccaatgatataccacggattcttgttggaaataaatgtgacttgagaagtgccatacaggtacccacagacttggcacaaaaatttgctgacacacacagtatgcctttgtttgaaacgtctgctaaaaaccccaatgataatgaccatgtggaagctatatttatgaccttggctcataagcttaagagccacaaaccattaatgcttagtcagccccctgataatggaattatcctgaagcctgaaccaaagcctgcaatgacgtgctggtgctaaataacagtctttattatattatctaattttgactaaagaaatacttttgaagtatgacagtattaagtcataagatttaatctcaactataatgggtcatcttgacactttgctgtttgtcattgtcacgcttttgtattttgtatctacttaagtttgtcactgtgacaacacaggaaaagttggttttcaggtgagattgaaaatgaagcaaagataggatgaatctgaacatctctccatctagagcccaatgaaggaagcttcaaatgagaacatgatggaatcagtaaccattcaatcttttgtcctaggattggaaaaaaatgttaaaggtttaggacacacctaatagtatgtcctttgaatgggaagtgttcttaataggataaaaactggtatttgcctctccccagagtactttttttgttttttcatagagacggggtcttgctatgttgtccaggctggccttgagctcctgggctcaagcaatcctcccacctcagcctccccagtactgggactgtaggtactcaccactgcatctggcctttctttgttttattaacatatttagttttgttattattggtatgttttagagccaagactttagttccagtgggataagaaggcatagaatgttttctggttcccagtccataaagaatgacttttccaagagttctagatgtttgattttctaattaatacttatcagatctacaaaaatcattattattttaaaagagttatttgagtttctttctttctttttttttttttttttttttgagatggagtctcgctctgtctccaggctggagtgcagtggcgtcatctcggctcactgcaacctccgcctcccaggttcaagtgattctcctgcctcagcctcccgagtagctgggattacaggcgtgcactaccacacccagctgatttttgtatttttagtatagatggggtttcaccatgttggccaggatggtctcgatctcttgacctcatgatccacccgcctcagcttcccaaagtgctgggattacaggtgtgagtcactgcacccagccgagttgctttcttactaaatcctattaaaatatgcaaaaataagtcagattttaaggcaaataaagtgacataaggtgctttatattttattttggtatatttaaacagtgaaaaactaactgaaagcacatgaagagttgtaacttgggggaaaataggtaaacatagcttctagctaacacaggagacctattcttagcctttactaatttcaagcagtgtatcccatatggtatctcttgctcttccttcaactccaataaatttaatgactaaatgccaagttaacaaatcaacttccatttggattgtaggtgtgaaggcacaactctaattgctattagtctacatgtatttctgtaatagtattgtgtcatatcaatttttaagatgtctaaattttatggtcacaagttatccctcctcagtatgaaaaataaattagatattgaaaaatgtctaaacttcagtgatggaaagaatatttcaagaagttttttaacctaaatacttttattttgaatttaagtctttgcacataaaatatagcaagcttacatattaaactatttacgtaaatggaatgtaagccatgactttaactgaagtgttcacattcactaattttgatagattgctgtccttaataattttggaggaaattaagccaaatgattattgtactacagtattttcagaatatgggaaatcaattaaaaatgtaatctaatctagtttaagatttttgtttaatcatcatggtggtcctacctggataatttaactataaagacaaagtaattctattaaatgaactaactgaaaataataattataggaagtgattattccattttaagtattagagctcaaattggctttatttgcatttagggagatcatgttttcttaatcatgctggaatttaaaaattgttttacttgtatcgaaattaaccttgatttataactatttttgtaataaaacaatgacagctgtagtaactatgatgggtgtaacaacatttttttaaagaagggaatctgtttatcgcttttcaaaatattttctaaagtgggggaagaaagtttatagactttccaagcacatttatggttttttattactattattatggttttaaaaagagtaactttatttctttttgtaaggaattaagtaatatcctttacagttctgtgaaaggacttattttttaactgtaatatttattagttttaaaatatttgtatctcatttgtaacaatttgttttaattttttatatatatgtttttatttttaaaaaacataccagttgaatggggttaaagctttcaatatcttaaaatatttataaaacatttcactgttgcaaaatcacttccaaaatgatagctatctaacaactaattactaatttttaaagaacaaatcacacatttaaaaaatctgtagaatttattttaactatgacctttaattgaaaataaataattaaaatatcagacatgttttggaaaagtcttaatttgagaacaccaaaggaaactaccccagaatctaatgtagttcgctattaataacaatgcattattgaaagtatattgcaaatacatgtttcctcatgaaatctaagtaattttgttgtggaatagtgtcactgttacatttcccccatgaagttcaataaaccagcttagccacaaagaaattgtgttttattttctttgtttggttactgggtagagtataaaataaaacaatctttttttcctcctggtttccagataatattatatatatgatacacttttgaaaacaacaaaaagcccccaacccattggacaattattttcttgtatacatttgaggtcaaagaacacttcaggaaaaaaactcaacaaagtattaaaattagctgataacacagcttttgtatttgtgtgttttagtaatccagcttgttttagaatagttcagtgcaaaaagcaaatggtgcaagaggagttgatgtgtatttagacgtaaaagcatttaacagaatgaataactatagaaagtatgagaaaagagaacgaactacgtctcaggtataagattgcagttactgatttagacaccataggattagggatgtgggggcctctgatgttgattctgcttcccctggtcagtttattttacgtataagttacccttgtgttcaaacacaaaattgacattattcatgaaggactgctttcttaatcagatattaagaagttcgtcatgtattttgggagcacgtttgctacagcctgtgtggcaagggcgaatgcacttggtttgttggaataacctgatttatcaaacatttatcaagtatgggtcatgtgttctctatttgtgttagtggagctacata

SEQ ID NO: 739 - DNA, 2601 bp, Homo sapiens
  source 1..2601: mol_type = genomic DNA
cctgcggcgggctttagggagtggtccctggctgtggatagatctgctgatgagtccaggccccggtccattctcctcgcgctgcaaggatgctcctgggatttcggagaggccgcaggagtcatttcaaacacatcatccatggccttttacctgcagccagcgttgctccgaaggcagctgtgccacgcacacctcctccccgcagccccaacccatctccagagagaccaagatctgctctggcagcagccattctggcgacaacattgactgggcggacggttgctattcctcagcctcgccagaggtcccggtctgagagtgatgtgagcagtgttgaacaggacagcttcatcgagccctatgccaccacctcacagctgaggcctcggccaaattggcagagtgagatgggaagaagatcttctttgccatcctttgaaacactggactatggggacgaagaggacattgaaactcagctgtcatccagcggcaaggaattgggggatgtcagtgcccgggaggacagaggaggccacagtgatgacctgtacgctgtgccacacagaaatcaggtgccattgttacatgaggtgaacagtgaagacgatgaaaatatttctcatcaagatgggtttccaggctcccctcctgcaccacagcggacacaacaaaaagatggtaaacaccctgttctgaatttaaaggatgaaaaacctccattatgtgagaaacctccaccctccccagatataactggtagagcacgtcaaagatatacagaaataaccagagaaaagtttgaggcattaaaagaagaaaatatggacctaaacaatatgaatcaaagccttacccttgaactaaacacaatgaaacaagcaatgaaagaactacagttaaaacttaagggaatggaaaaagagaagagaaagctcaaagaggctgagaaggcgtcgtcacaggaagttgctgcacctgaattactttatctgcgaaaacaagctcaagaactggtggatgaaaatgatggattgaaaatgactgtccatcgtttgaatgtagaactcagtcgatatcagacaaaattcaggcatttgtccaaggaagagagcttaaatattgaaggcctcccatccaagggccctataccaccctggttgttggatataaagtacctgtcaccattgttgctggcttatgaagatatgatgaaagagaaggacgagctcaatgccaccctcaaggaggaaatgagaatgtttaggatgcgagtccaagaagtggtgaaagaaaatgaagaattgcaccaagagttaaataagagtagtgctgttaccagtgaggaatggcgtcagcttcagactcaagcaaaactggttttagaggaaaacaagttgttgctggagcagttggagattcagcaaaggaaagccaaggacagccaccaggagcgcctccaagaagtttctaagctgactaaacaactaatgctcctggaggcaaaaacccacggccaggaaaaggagctggcggagaacagggaacagctggagattttacgtgccaaatgccaagaactcaaaacacactcggatggcaaaatcgcagtggaagttcataaatcaattgtgaatgaattaaaaagccaattacagaaggaagaagagaaagaaagggctgagatggaggagttgatggagaagctgacagtcctgcaagcgcagaagaagagcctgctgttagagaagaacagtttgacagagcaaaacaaagcactggaagccgaacttgaacgagcacagaaaatcaataggaaatctcaaaagaaaattgaggtcctcaaaaagcaggtggaaaaagccatggggaacgaaatgtctgctcatcagtacctggcaaaccttgttggcctggcagaaaacataacccaggaacgtgacagtcttatgtgtttggcaaaatgtttagaaagtgagaaggatggagtgcttaataaagtcataaaaagcaacattcgcctgggaaagttagaggaaaaagtcaagggctacaagaagcaggcagcactgaagctgggggacatcagtcaccgtctgctggagcagcaggaggacttcgccggcaagacagcccagtaccggcaggagatgcggcacctgcaccaggtgctgaaggacaagcaggaggtgctggaccaggcgctgcagcagaacagagaaatggaaggtgaacttgaagttatttgggaatctaccttcagggaaaaccgaagaatccgagaacttctccaggacacactcacgaggacaggcgtgcaggacaaccccagagctctggttgcccccagcctcaatggcgtctctcaggcagacctgctggacggctgcgatgtctgctcctatgacctgaagtctcatgcccccacctgctagaatctgcgggagcccgtggtgtagcctcctctggcctgaaaggtctgcctcacacaggccttccctgcagggcagcccatggtggcagccggaggtgcgtaagcccactgaacgctgcagggcagggaagaaataaatggtctcatagtttaatccattg

SEQ ID NO: 740 - DNA, 1232 bp, Homo sapiens
  source 1..1232: mol_type = genomic DNA
aggacacggctccagtggcggcgcggcccagggcgcaggcgcgggtgtcggtcccaccgcgcgtcgtcctcgccccggccccggccaatcccttcgaatttggccgaggccgggaaatactagctaatcacggcgcgcgctgttgacgccggccaatgggagctccggaaggctgcgtggagacgccagcggcgggcggtggacagtcatggcggcccggcgcggggctctcatagtgctggagggcgtggaccgcgccgggaagagcacgcagagccgcaagctggtggaagcgctgtgcgccgcgggccaccgcgccgaactgctccggttcccggaaagatcaactgaaatcggcaaacttctgagttcctacttgcaaaagaaaagtgacgtggaggatcactcggtgcacctgcttttttctgcaaatcgctgggaacaagtgccgttaattaaggaaaagttgagccagggcgtgaccctcgtcgtggacagatacgcattttctggtgtggccttcaccggtgccaaggagaatttttccctagattggtgtaaacagccagacgtgggccttcccaaacccgacctggtcctgttcctccagttacagctggcggatgctgccaagcggggagcgtttggccatgagcgctatgagaacggggctttccaggagcgggcgctccggtgtttccaccagctcatgaaagacacgactttgaactggaagatggtggatgcttccaaaagcatcgaagctgtccatgaggacatccgcgtgctctctgaggacgccatccgcactgccacagagaagccgctgggggagctatggaagtgacccaaggctgcccactggagacgcctctccctgcagtcccccgagaggtgggagactcgcggaaggccccgtccccagcagagtccagaccccacaacttcaggagctctttcccggcagcagagatctgcaggctgcctcttctgccccggagctggggtgcactggggacccccgtggtggggaccttggcagtgtggacatgagcagagcgatggagcagtctcctgccctctcccctgtcctgatggcactctgttgtattttcttactgaagttcagtgataactctgagcagtttcattgtgatcactgtaaatggtaatcagttggaattctcctaaatgtcttccagacactagtaaaaaacgacctgaaaattgtt

SEQ ID NO: 741 - DNA, 804 bp, Homo sapiens
  source 1..804: mol_type = genomic DNA
gctggggcttgcgtgggaggaaggtgactgtgaggaaggtgtgtgtccaccgagcacttggattcagcttcttcatttccaacatggaagaaacttacaccgactccctggaccctgagaagctattgcaatgcccctatgacaaaaaccatcaaatcagggcttgcaggtttccttatcatcttatcaagtgcagaaagaatcatcctgatgttgcaagcaaattggctacttgtcccttcaatgctcgccaccaggttcctcgagctgaaattagtcatcatatctcaagctgtgatgacagaagttgtattgagcaagatgttgtcaaccaaaccaggagccttagacaagagactctggctgagagcacttggcagtgccctccttgcgatgaagactgggataaagatttgtgggagcagaccagcaccccatttgtctggggcacaactcactactctgacaacaacagccctgcgagcaacatagttacagaacataagaataacctggcttcaggcatgcgagttcccaaatctctgccgtatgttctgccatggaaaaacaatggaaatgcacagtaactgaatacctatctcatcaaatgccagaccctagaagactgttgcttcttcttctaccagtgggttctcattttcctcctaatctaattatagaatggtaaactccctgtgactttccaaactgacaagcacacttttttcctccccccttgaatcctcatttaatgcaagaaccctcatactcagaagcttccaaataaacctttgatacagattg

SEQ ID NO: 742 - DNA, 3017 bp, Homo sapiens
  source 1..3017: mol_type = genomic DNA
ccgcaggcagtagagtgaagcgcgcagctgccaggacttgcgcggtgacgtgcgccgctgccaggaccttgcaggtggagagcatagttgccaaaatcaaggcggaggagcgcaccgccgctaggatccaggcggagaagcccaccgcggccaggacctaaggatgcagtacactgctgccaggatcttgtctgtggagcgcagcgcggccaggacctccggctgcagcacaccgctgccaggatcttatcggcagagcgctccgcggtccggaccccgccccgtgcgcgtccccgaccccgccccgtgcgcgtccccggcgttggcgtcttcgtcctgttgctggtctccgtccggtcgccggccgtctaggtctccggccctccccagccgctcctgcgcccttgccggccccgccgcccgcagccctggcgctccctgcgggccccgccgaggccgcctgcgccctgtgccagcgcgcgccccgggaaccggtgcgcgccgactgcggccaccgcttctgtcgggcgtgcgtggtgcgcttctgggccgaggaggacgggcccttcccgtgccccgagtgcgccgacgactgctggcagcgcgccgtggagcccggcaggcccccgctcagccgccgccttctggcgctcgaggaggcggccgcggcgcccgcgcgcgacggcccggccagcgaggccgcgctgcagctgctgtgccgcgccgacgccggcccgctctgcgccgcctgccgtatggctgcgggccccgagccgcccgagtgggaaccgcgctggaggaaggcgctgcgcggcaaggagaacaaggggtctgtggaaatcatgagaaaggacttgaatgacgcccgggacctgcatggccaggcagagtcagcagctgcagtgtggaagggacacgtgatggaccgtaggaagaaggcactgaccgactacaagaagctgcgggccttctttgtggaggaggaggagcatttcctgcaggaggctgagaaggaggaggggctccctgaggacgagctggctgaccccactgagcggttcaggtcactgctgcaggcggtctcggagctggagaagaagcatcgcaacctgggcctcagcatgctgctgcagtgatggcgccaacccgtggcagtcccagagctggaggcaggaggatggatcctcatctccatgggaagtgtcagcgtgtggctgccagggaagcgtggcaggcgcctggccttgggtccatctacatagttgcgtgtttcaacaatgtccatttatccttcaccccgaggcgtgttttgggggctgcaaacacctcccggtagaggctggacctgaggacccttcccacctgtgcccgtcccttcctgaagtcctagccacagcccatcctccatgagtcccggcagctctgggtcatgcccttccctggtcacccatctgcccctcacctcgtcatccagggacccagaccctgcaccttccatgtgggcccacagatccttggcaggtacctgaggtgcaccattgagtgtcggatttggggttagcatccagaaagaagaatgcgcatgacgctctgtgaaggctggaactcaggtcttcagggagagaaaggaagactggattgcaccttgatgcctcctgaggaggcggcccccctcttgaggtgggcgtgggcccggcccagccttatccaagtcgctctgtccacctcccccttcctggcccccaccccactcctgtgcctcccaggagccctccctgtgctccacctgcctccgcagaaggaagcctctttctctgtttccctgggtgagggggctggcaggtggctaaccccatttagcatctccaggccctgccatcgtgtctcatcttgctgttatctctagctctttccctcctcccatttcctttagtagttgaattttgcaaagcttgtagcagtagctcagttgcctgcagcatccttgtgtgtagataaattagtcgacagaaactcagcactggggacaggattgcaaagtcggggacatagatgcagacagttgttgagatttggggatagccgggcttgtgagcggtgcccatttccagatgaagcctttcagcccttctgagtccccggcccttggtgcgatgtctgtgagtttgacctgcccagcgtgtgggctggctcaatgctgaataaagtgggtttgtgtcagctcgtttgcttcgtctccgtgtgtccacctggcctcttccccctgccctggccaccctccagtgtcaaaggaaacttcctcgtgacacgtgctaaagcatggtgaggaggactttgattgggaccattgagatgggtgtgggaccctttccttggggcctggggggagatggggctccaccccgacgtagcagggcaggggttggaggagcgaggagcagtatagggtccatgggtgggaatgactgtgaggagacatcagggctgagggggctctggctaaacccacctcacagagtccttgctgcaggcaggcagggcgatcagacattggctgcaaacggtcagagaggaacccagtcaggtaccattgagggtggtcagatattatggttaaccaaattagggttcttgctaaaactggatttcataagaaagggcaaagagggccctaggagaagattccagagcctggccagagtttggccaagtagagaatctttgtcagcacgccaacaacatcccgaccctgagacctccagtttgtctttctcactgtctccgcctgctgcagtctgctgtcatccctgagcatccctgcccctgccctgcacacctgtgatgcttgcccggacaggtcctgatggcagagtctcccacaacatcagtgtctccacatcaccaggtccgacagtggcttcaccatcctcacctaacctagctgaccagcaacatcccaccctgtcaatcacaacctctttctatttaagaaaattatatatttatggggcacagtg

SEQ ID NO: 743 - DNA, 2233 bp, Homo sapiens
  source 1..2233: mol_type = genomic DNA
gccgggccggagcggggtgggtaggggacgcgaggcggagcggggccccacacaggccgcggcggctggctcgggcccctacggtcccggcggcggctggaggaggaagccaggcggctggcggaggaggagagacggaggaggccgagaccggagcgccgctcgccgcagacttacttccccggctcagcagggaaaggttcctagaaggtgagcgcggacggtatgcaaagttgtgaatccagtggtgacagtgcggatgaccctctcagtcgcggcctacggagaaggggacagcctcgtgtggtggtgatcggcgccggcttggctggcctggctgcagccaaagcacttcttgagcagggtttcacggatgtcactgtgcttgaggcttccagccacatcggaggccgtgtgcagagtgtgaaacttggacacgccacctttgagctgggagccacctggatccatggctcccatgggaaccctatctatcatctagcagaagccaacggcctcctggaagagacaaccgatggggaacgcagcgtgggccgcatcagcctctattccaagaatggcgtggcctgctaccttaccaaccacggccgcaggatccccaaggacgtggttgaggaattcagcgatttatacaacgaggtctataacttgacccaggagttcttccggcacgataaaccagtcaatgctgaaagtcaaaatagcgtgggggtgttcacccgagaggaggtgcgtaaccgcatcaggaatgaccctgacgacccagaggctaccaagcgcctgaagctcgccatgatccagcagtacctgaaggtggagagctgtgagagcagctcacacagcatggacgaggtgtccctgagcgccttcggggagtggaccgagatccccggcgctcaccacatcatcccctcgggcttcatgcgggttgtggagctgctggcggagggcatccctgcccacgtcatccagctagggaaacctgtccgctgcattcactgggaccaggcctcagcccgccccagaggccctgagattgagccccggggtgagggcgaccacaatcacgacactggggagggtggccagggtggagaggagccccgggggggcaggtgggatgaggatgagcagtggtcggtggtggtggagtgcgaggactgtgagctgatcccggcggaccatgtgattgtgaccgtgtcgctaggtgtgctaaagaggcagtacaccagtttcttccggccaggcctgcccacagagaaggtggctgccatccaccgcctgggcattggcaccaccgacaagatctttctggaattcgaggagcccttctggggccctgagtgcaacagcctacagtttgtgtgggaggacgaagcagagagccacaccctcacctacccacctgagctctggtaccgcaagatctgcggctttgatgtcctctacccgcctgagcgctacggccatgtgctgagcggctggatctgcggggaggaggccctcgtcatggagaagtgtgatgacgaggcagtggccgagatctgcacggagatgctgcgtcagttcacagggaaccccaacattccaaaacctcggcgaatcttgcgctcggcctggggcagcaacccttacttccgcggctcctattcatacacgcaggtgggctccagcggggcggatgtggagaagctggccaagcccctgccgtacacagagagctcaaagacagcgcccatgcaggtgctgttttccggtgaggccacccaccgcaagtactattccaccacccacggtgctctgctgtccggccagcgtgaggctgcccgcctcattgagatgtaccgagacctcttccagcaggggacctgagggctgtcctcgctgctgagaagagccactaactcgtgacctccagcctgccccttgctgccgtgtgctcctgccttcctgatcctctgtagaaaggatttttatcttctgtagagctagccgccctgactgccttcagacctggccctgtagcttttctttttctccaggctgggccgtgagcaggtgggccgttgagttacctctgtgctggatcccgtgcccccacttgcctaccctctgtcctgccttgttattgtaagtgccttcaatactttgcattttgggataataaaaaaggctccctcccctgcccctcagcttctctctggttttctca

SEQ ID NO: 744 - DNA, 4453 bp, Homo sapiens
  source 1..4453: mol_type = genomic DNA
gtaaggggtgggctatagggccagatcgccgcgcgagggtggtgggcatcgaggtcccagcagcggacgagggaggtgccgccgtcgcccaggatgggctgggaatgaagcgatgtagccttttaagagatttgctctgacccatctgaagtccatatggctctgtatgatgaagacctcctgaaaaatcctttctatctggctctgcaaaagtgccgccctgacttgtgcagcaaagtggcccaaatccatggcattgtcttagtaccctgcaaaggaagcctgtcgagcagcatccagtctacttgtcagtttgagtcctacattttgatacctgtggaagagcattttcagaccttaaatggaaaggatgtctttattcaagggaacaggattaaattaggagctggttttgcctgtcttctctcagtgcccattctctttgaagaaactttctacaatgaaaaagaagagagtttcagcatcctgtgtatagcccatcctttggaaaagagagagagttcagaagagcctttggcaccctcagatcccttttccctgaaaaccattgaagatgtgagagagttcttgggaagacactccgagcgatttgacaggaacatcgcctctttccatcgaacattccgagaatgcgagagaaagagcctccgtcaccacatagactcagcgaatgctctctacaccaaatgcctccagcagcttctgagggactctcacctgaaaatgctcgccaagcaggaggcccagatgaacctgatgaagcaggcagtggagatatacgtccatcatgaaatttacaacctgatctttaaatacgtggggaccatggaggcaagtgaggatgcggcctttaacaaaatcacaagaagccttcaagatcttcagcagaaagatattggtgtgaaaccggagttcagctttaacatacctcgtgccaaaagagagctggctcagctgaacaaatgcacctccccacagcagaagcttgtctgcttgcgaaaagtggtgcagctcattacacagtctccaagccagagagtgaacctggagaccatgtgtgctgatgatctgctatcagtcctgttatacttgcttgtgaaaacggagatccctaattggatggcaaatttgagttacatcaaaaacttcaggtttagcagcttggcaaaggatgaactgggatactgcctgacctcattcgaagctgccattgaatatattcggcaaggaagcctctctgctaaaccccctgagtctgagggatttggagacaggctgttccttaagcagagaatgagcttactctctcagatgacttcgtctcccaccgactgcctgtttaagcacattgcatcaggtaaccagaaagaagtggagagacttctgagccaagaggaccatgataaagataccgtccaaaagatgtgtcaccctctctgcttctgcgatgactgtgagaaactcgtctctgggaggttgaatgatccctcagttgtcactccattctccagagacgacagggggcacacccctctccatgtggctgctgtctgtgggcaggcatccctcatcgacctcctggtttccaagggcgccatggtaaatgccacagactaccatggagccactccgctccacctggcctgtcagaagggctaccagagcgtgacgctgctgctgctgcactacaaggccagcgcggaagtgcaggacaacaatgggaatacgccactccacctggcctgcacctacggccacgaggactgtgtgaaggctctggtttactacgacgtggagtcgtgcagacttgacattggcaatgagaaaggagacacccctctacacattgctgcccgctggggctaccaaggcgtcatagagacattgctgcagaacggagcgtccaccgagatccagaacagactgaaggagacgcccctcaagtgtgcattaaactcaaagattctgtctgtaatggaagcctatcacctgtccttcgagaggaggcagaagtcgtccgaggcccctgtgcagtccccgcagcgctccgtggactccatcagccaagagtcctccacttccagcttctcctccatgtcagccagctcaaggcaggaggagaccaagaaggactacagagaggtagaaaaacttttgagagcagttgctgatggagatctagaaatggtgcgttacctgttggaatggacagaggaggacctggaggatgcggaggacactgtcagtgcagcggaccccgaattctgtcacccgttgtgccagtgccccaagtgtgccccagctcagaagaggctggcgaaggttcctgccagtgggcttggtgtgaacgtgaccagccaggacggctcctccccgctgcatgtcgccgccctgcacggccgggcggacctcatccccctcctgctgaagcacggggccaacgcaggtgccaggaacgcagaccaagccgtcccgctccacctggcctgccagcagggccactttcaggtggtgaagtgtctgttagattcgaatgcaaaacccaataagaaggacctcagtggaaacacgcccctcatttacgcctgctccggtggccatcacgagcttgtggcactgctgctacagcacggggcctccattaacgcttctaacaataagggcaacacagcgctgcacgaggctgtgattgaaaagcacgtcttcgtggtagagctgcttctgctccacggagcgtcagttcaggtgctgaacaagcggcagcgcacggctgtagactgtgctgaacagaattcaaaaataatggaattgcttcaggtggtaccaagctgtgttgcttcattagatgatgtggctgaaactgaccgcaaggagtatgtcactgttaagatcaggaaaaaatggaactcaaaactgtatgatctaccagatgagccttttacaagacagttttactttgtccactcagctggtcagtttaagggaaagacttcaagggagattatggcaagagatagaagtgtccctaatttaaccgaaggttctttgcatgagccagggaggcaaagtgtcacactgagacagaataacctgccagctcagagtggatctcatgctgctgagaaaggcaacagcgactggccagagaggcctggactgacacagactggccctggacacagacggatgctgcggagacacacggtagaggatgcggtcgtgtcccagggcccggaggctgctggccccctctccactccccaagaggttagtgcttcccggtcctaacaggaatgaggagttgttgaacccactgctaggaagcaaggatgcaacaagatgatgctgagcgtgaacacatctgagaactaaatgtgcttccatgagactggcttgagaagtcttcagcaccaagttcctgaaagcttttctgtggcaggaaagaatgcaacaaaaaagttaaccaccaccatctctctcctcttcaaagctaatgaatacaattgaaacagacaaaaattccagtagcatccagatccttaagccagaggtgcatgcttctttttaagtatgagggtttgttggtcacagtgggagaggtttcaccaccgcattctgacctcctcctcccaaaaggtgctaaacctctctgacctgtgtacattcacaaaccacagctagaattcctccacctaggattaagctggagagaagtaagtaatttaggtttcatggtactgtagaggccaggctgaaatgtcatatctgaaggaagaaagcagcagctggacaatgtttctttgcaaagcaacactcgaaccaaaagatgcctcaatcccattttgatattcattttagtgaaaggatgcatcagacctgttccacatcatgcacatgggaaagggtggttatcattttccttctaacaagtaggtacagatattcggttactacacgtgcacctgtagcagtatttctagaaacatccctttttgttgagaacctcccttgaatgtctgtcacactcacacctgacgggatggttactggattagagagtagatttggcacatcttttcttagtcttttgattcaaattcaaaacttaacagcacaaaccaggtcagagttactttcggttagaatttattgccatttattcctttttataaatttctatagattatactgttatttttatgttattggcctagagctacacgtatatgggtttgtcctgagtccgttttcaaatgaccttgtgatagggaaatggttttgtccatgttcttggaaatacttgtgtatgtacagaaggaagggagggattatttttctacaaagtaatttatgatttctaattttctaatgtgccttggatatgtgccaaatgatggaaaagaaacagtaaactttatgattcttgactgtg

SEQ ID NO: 745 - DNA, 1873 bp, Homo sapiens
  source 1..1873: mol_type = genomic DNA
gaatgcgtagtcccagcctcagcacaggggagccaccttgaagctctcaaatatcactgttgtgaatacagagagggaaaaccaactgtaacgtgccacccaaatgtaagttttactcatattttgatgttaggatggatagcttggaaaaagttggagggtacggcctttactatgaggcatctatgaaggatcaggaatggatgtagacaaggaactaggaatggaaagtgttaaagctggagcctctggaaaaccagaaatgaggctgggcactcaggaagaaacaagtgaaggtgatgctaatgaaagctcattactagtcctgtccagcaacgtgcctctcctggccctagagttcttggaaatagcccaggccaaagagaaggcctttctccccatggtcagccacacgttccacatgcgcacagaggagtctgatgcctcacaggagggcgatgacctacccaagtcctcagcaaacaccagccatcccaagcaggatgacagccccaagtcctcagaagaaaccatccagcccaaggagggtgacatccccaaggccccagaagaaaccatccaatccaagaaggaggacctccccaagtcctcagaaaaagccatccagcccaaagagagtaacatccccaagtcctcagcaaaacccatccagcccaagctgggcaatattcccaaggcctcagtgaagcccagccagcccaaggagggtgacatccccaaggccccagaagaaaccatccaatccaagaaggaggacctccccaagtcctcagaagaagccatccagcccaaagagggtgacatccccaagtcctcagcaaaacccatccagcccaagctgggcaatattgccaagacctcagtgaagcccagccagcccaaggagagtgatatccccaagtccccagaagaaaccatccagcccaaggagggtgacatccccaagtcctcagcaaagcccatccagcccaagctgggcaatattcccaaggcctcagtgaagcccagccagcccaaggagggtgacatctccaagtccccagaagaagccatccagcccaaggagggtgacctccccaagtccctagaggaagccatccagcccaaggagggtgacatccccaagtccccagaagaagccatccagcccaaggagggtgacatccccaagtccctagaggaagccatccagcctaaggagggtgacatccccaagtccccagaagaaaccatccagcccaagaagggtgacatccccaagtccccagaagaagccatccagcccaaggagggtgacattcccaagtctccaaaacaagccatccagcccaaggagggtgacattcccaagtccctagaggaagccatcccacccaaggagattgacatccccaagtccccagaagaaaccatccagcccaaggaggatgacagccccaagtccctagaagaagccaccccatccaaggagggtgacatcctaaagcctgaagaagaaacaatggagttcccggagggggacaaggtgaaagtgatcctgagcaaggaggactttgaggcatcactgaaggaggccggggagaggctggtggctgtggacttctcggccacgtggtgtgggccctgcaggaccatcagaccattcttccatgccctgtctgtgaagcatgaggatgtggtgttcctggaggtggacgctgacaactgtgaggaggtggtgagagagtgcgccatcatgtgtgtcccaacctttcagttttataaaaaagaagaaaaggtggatgaactttgcggcgcccttaaggaaaaacttgaagcagtcattgcagaattaaagtaaacatgtattctg

SEQ ID NO: 746 - DNA, 3613 bp, Homo sapiens
  source 1..3613: mol_type = genomic DNA
cctggctgggacggaagttgcaccacaagtacaattagtttcagttttgtttcttttccaggcacccagcaacggcggcctccaggcctcaggccccctcaccatcctagaggtcaagatcagctctggctagttctcacaggtctgacccaacaagtagcactgacatttttacgtttgctggatgtacacacggaagtggaggaggaggaggagaaggaggagggcagctccttagctcaagagcaagtggcccaaggcctcagaagactagaaggaagttcctggccattcagcatggtttcccacgggtcctcgccctccctcctggaggccctgagcagcgacttcctggcctgtaaaatctgcctggagcagctgcgggcacccaagacactgccctgcctgcatacctactgccaagactgcctggcacagctggcggatggcggccgcgtccgctgccccgagtgccgcgagacagtgcctgtgccgcccgagggtgtggcctccttcaagaccaacttcttcgtcaatgggctgctggacctggtgaaggcccgggcctgtggagacctgcgtgccgggaagccagcctgtgccctgtgtcccctggtgggtggcaccagcaccggggggccggccacggcccggtgcctggactgtgccgatgacttgtgccaggcctgtgccgacgggcaccgctgcacccgccagacccacacccaccgcgtggtggacctggtgggctacagggccgggtggtatgatgaggaggcccgggagcgccaagcggcccagtgtccccagcaccccggggaggcactgcgcttcctgtgccagccctgctcacagttgctgtgcagagagtgccgcctagacccccacctggaccacccctgcctgcctctggctgaagctgtgcgtgcccggaggccgggcctggagggactgctggccggtgtggacaataacctggtggagctggaggcagcgcggagggtggagaaggaggcgctagcccggctgcgggagcaggcggcccgggtggggactcaggtggaggaggcggctgagggcgtcctccgggccctgctggcccagaagcaggaggtgctggggcagctacgagcccacgtggaggctgccgaagaagctgctcgggagaggctggcggagcttgagggccgggagcaggtggccagggccgcagccgccttcgcccgccgggtactcagcctggggcgagaggccgagatcctctccctggaaggggcgatcgcacagcggctcaggcagctgcagggctgcccctgggcaccaggcccggccccctgcctgctcccacagctggagctccatcctgggctcctggacaagaactgccaccttcttcggctgtcctttgaggagcagcagccccagaaggatggtgggaaagacggagctggtacccagggaggtgaggagagccagagccggagggaggatgagccgaagactgagagacagggtggagtccagccccaggctggagatggagcccagaccccaaaagaggaaaaagcccagacaacccgagaagagggagcccagaccttggaggaggacagggcccagacaccccacgaggatggaggaccccagccccacaggggtggcagacccaacaagaagaaaaagttcaaaggcaggctcaagtcaatttcccgggagcccagcccagccctggggccgaatctggacggctctggcctcctccccagacccatcttttactgcagtttccccacgcggatgcctggagacaagcggtccccccggatcaccgggctctgtcccttcggtccccgggagatcctggtggcggatgagcagaaccgggcactgaaacgcttctccctcaacggcgactacaagggcaccgtgccggtccctgagggctgctccccttgcagcgtggccgccctgcagagcgcggtggccttctccgctagcgcacggctctatctcatcaaccccaacggcgaagtgcagtggcgcagggccctgagcctctcccaggccagccacgcggtggcggcactgcctagcggggaccgcgtggctgtcagcgtggcgggccacgtggaggtgtacaatatggaaggcagcctggccacccggttcattcctggaggcaaggccagccggggcctgcgggcgctggtgtttctgaccaccagcccccaggggcatttcgtggggtcggactggcagcagaatagtgtggtaatctgtgatgggctgggccaggtggttggggagtacaaggggccaggcctgcatggctgccagccgggctccgtgtctgtggataagaagggctacatctttctgacccttcgagaagtcaacaaggtggtgatcctggacccgaaggggtccctccttggagacttcctgacagcctaccacggcctggaaaagccccgggttaccaccatggtggatggcaggtacctggtcgtgtccctcagtaacgggaccatccacatctttcgggtccgttctccggacagttaaaggggctaggactagggtgagagggagtggggagggagagggcaggaaggaggcagagctgtccgtgggaggtggaggccgaggacattttcctgaagggcaggggttggcaacttttcaacatggagtgccaaactgctaacccgtcttctagtgtgtgagaatagggaccaaggtggtggcgtgaccttaactctcagaagcagaggaggcaggtgggtggagggggatgctgggagttcacctgcctcttgctttttgtgggtggctgctgccaccaccgccgctgctatatagtttaggtttctgaggtttgtgagcctgtcctgctttgcattcttcaaaaccattcctgatagagtagccgagggagagtcttggggccaagaagggcccagggtgggtcaggcgtgtgcactgtggaacagagctgagaccccggccccccttggactggcacagggtcctacagagtcagaggaggcctgagatttcgaatgggcagtgaatggcctcttctgccagccacaggcaggatgctccttgatcacggcatcccccggcggtagtacagggtgagcttgcaggagggtctgcaagtgcagacagcagctggggccaaagaggtgttaggttcaaaggctgcgaagagaataggctactggaaaaccaaacccaacagaattcacgtccaaaaatccacattctccatcgcttctcagccttttggctaagattaagtattaaaaaaaaaccaggctctgccaggcgcagtggctcatgcctataatcccggcactttgggagtctgtggcaggaggattgcttgaggccaggagtttgagaccagcctgggcaacatagcgagaccccatctctacaaaagattaaaaattagctgcgtgtagtagcatatgcctttcaacgtagctactcaggaggctgaggtgggaggatcccttgagccgaggagtttgagtctgcagtgagctatgatcgcaccactgcattccagaccccatctcgaaaaaaaaaaaaaaaaaaaaaa

SEQ ID NO: 747 - DNA, 1953 bp, Homo sapiens
  source 1..1953: mol_type = genomic DNA
ccggcgtttccgtaggagccgggcgggagtcgccggggctccttcctgtggtgcagcttcgggtctcggagtttggcccctactctgaccccaccccagctccgctccgccttgggttccggcagaacccgccttgcggtagccatggcagcaggctccgaggcgaccactcctgtgatcgttgcggctggggctggaggggaggaaggtgaacatgtcaaaccttttaagccagagaaagcaaaagaaattatcatgtctttacaacaacctgcaatcttctgtaacatggtgtttgattggccagcacgacactggaatgctaaatacctttcgcaggtccttcatggcaagcagatacgattcagaatggggatgaaaagcatgagcacagttcctcagtttgaaactacatgtaattacgtagaagctacactcgaagagtttctgacctggaactgtgaccagtctagtatttctggaccatttagagattatgaccattccaagttctgggcttatgctgactataaatattttgtcagtctatttgaagacaagacagatcttttccaggatgtgaaatggtctgacttcgggtttcctggaagaaatggacaggaaagtacattgtggattggctccttgggagcccacacaccctgtcatctggactcctatggttgtaacttggtattccaggtacaaggaaggaaacgatggcatctctttcctcctgaagatactcctttcctttatccaactagaatcccttatgaagaatctagtgtgttcagtaaaatcaatgttgtcaatcctgatttaaagcgttttcctcagttccggaaagctcaaagacatgcggttacactgagcccaggacaggttctctttgttcccagacactggtggcattacgtagaatccattgatcctgtcactgtcagtataaactcatggattgaactggaagaggatcacctagcccgggtagaagaggcaatcacccgtatgcttgtgtgtgccctgaaaactgcagagaatccacaaaataccagagcctggttaaaccccactgaggttgaggaaacgtcccatgcagtcaactgttgctacttaaatgcagctgtttctgcattttttgatcgctgcagaacatctgaggtagtagaaatccaagcactgagaacagatggagagcacatgaaaaaggaagaattaaatgtgtgcaaccacatggaggtgggccaaacaggtagccagaacttgaccacaggaacagacaaaccggaggcagcaagtccctttggccctgatctggtccctgtagcacagaggtccgaagaaccgccttcagaaagaggaggcatatttggaagtgatgggaaagactttgtggacaaggatggagaacactttggaaaattgcattgtgccaagagacaacaaataatgagcaacagtgaaaatgcaattgaggaacagattgcctcaaatactactacgactcctcaaacattcatttctacggatgacttgctggactgcttggtgaatccacaagtaaccaggatagtggcacaacttttgatacaaggaagaagtttatgattcaagtggaagatgacttttaaaataatattttttaaatatatatttttaagtagtatgactaaaataaagatgaaccagcaaaaggtcagtttgcacatttgtaaatgtatttatccttaccgaattacatgtcagtctgttgccaccttctttcatgcacattcctctttggccaaactggctgctctttgtttgtaagcttttgttcctctctcatcccatacttttagcctgtgtcaaatgtaagtcccaagtatttccagcaggaagtaatgtcttcctcagcctcaaccagggaccaaccggctgcttacttttgcaaataaaattttactagaa

SEQ ID NO: 748 - DNA, 1409 bp, Homo sapiens
  source 1..1409: mol_type = genomic DNA
ccaaaccactatgcccacgcacgcacccacccaaacagagcgttttctggtccccgagctcctcccgaccccacccgctcctacggcctccaaccggccccccccaggtctcgaccctctcccccaggcctcgaccctccccccccagccgctctagccccgcccggccgctctagcctccgctcctctcgctggtggaggttcccgaccgcgctcgctcccgcaactgggggcacggcagaggaggcagggccgacggcggtgggcggtgcgttgcgcaggctcgggcctcccgctcgccgctgcgttgggaccgcgcagcccggtgtgtgcagtggcctcagggatccggaaagtctaggactgaacttctcctaacatccagtaatggggacctggaacctgggcttactagagtgccgcgcgtagggctccaggtcgctggcttctgcgcttccttcctctccaaagttgagtatctcctatctgtgtcctcgtacatactgccgcctgaggtgccatggcccccaagccgggggccgagtggagcacagccctgtcccatctggtgctgggagtggtgtctctgcacgcagccgtgagcacagccgaggcaagtcgaggggctgctgctggcttcctgctccaggtcttggctgccaccaccacgctggccccagggctgagcacacacgaagactgccttgctggagcctgggtggccaccgtcatcggccttccccttctggccttcgatttccactgggtgaatggggaccgctcctctgccaacctgctcctgggaggaggcatggtgctggcagtggctggcggccacctcggccctgagggccgctctgtggctggtcaggcaatgctgttggtggtcgcagtgaccatcctcattgtagctgtcttcacggccaacacttatgggatgtgggggggggcgatgctgggtgtggcaggcctcctgagccggctggaggaggacaggctgctgctgctaccgaaggaggatgtctgtcgctgggccttggctgtaggcagctgggcttactgccgggccctgcatacacagcgcctccagtgggagtgacagttggatacagccaggcagggtttctgccctgccgaacactttccctcccacctgcctgctcctggcgccttctccctaggggtagactcttctgcctactgaagtgggtttgctgcacattgactggtcaggggcagagtctgggtgctgtcctttggccacgtgtggggacttgtctagaccagaatgaaagggacagggtcccagacacgtttgggggtcctgattctgggctggacacggttgtggatccagagaagaggcctagtctccaataaatcttaggaattttgcaggaatatgaaaa

SEQ ID NO: 749 - DNA, 2777 bp, Homo sapiens
  source 1..2777: mol_type = genomic DNA
tcagcagctgccctcactgggcagggcaaattataccgtggcccgaccataaaagccactttccaaaaaaagaagctttaaggcccccgagagacgcagctgagcctctcacctggcagtgcctgactcaggaggtgatgtctgggccatgagccacagagcctggtgtccctttaagcagggagtacaaattctcatccctccctcctgctctccctgacgtcagctggaaggcgtgtgagtgagtgaggggctgaggtaccgcccgcgcgagcacacacagacacacacacacacacacacacacacacacacacacatcttccagacccatcccctgcctgccagctccacgagccagagagagacagagcgcggacgccgcaggaggcagtgcctggaccccagctgcccaggagagacggagcccgtggctggtgaggccgcagagcagggccaggccgggccctgcccgcaaggacgaccaaacccctcaccggcccctgggccccagagcccaccaggctctcctgctggccccaccatgacttcagagtcgacgtcacccccagttgtgcccccgctccactcccccaagtccccagtctggcccaccttccccttccacagggagggcagcagggtctgggagcggggtggtgtcccacctcgggacctacccagccctctgcccaccaagcggaccaggacctattcagcgacagcccgggcctcagctggccccgtgttcaagggcgtctgtaagcagttctcacgctcacagggccatggcttcatcacccccgagaacgggtccgaggacatcttcgtacatgtgtctgacatcgagggggagtacgtgccagtggagggcgacgaggtgacctacaagatgtgccctatccctcccaagaaccagaagttccaggccgtggaggtggtgctcactcagctggccccccacactccccacgagacgtggtctggccaggtcgtgggctcctaggctgagtggttcacaggccagctggccgggggttggggagccacacagggtgaacgggcagcagccggctccatgccccactgccctggctgatgagtccttcggtggcctcagtgtgcacgtctgtctgtccgtctgtgcttgtggctatgagcgtgtgcctccacccaccccacgacccgtgactactgtgcaagctggccaggaggtaggtggagggcaaggccaccagacctggcttcgcgctgtccactgcctctctcctcccctccctgccgcagacacgcaggacccgctcgccctcctgcttacccgtccccacggtgactgagctgcgagagcctgcgctgggctcactccctggcctccgcccctgagctgtcccgtgtcagtccctggcccggagccaggctctctgtgctacttacatctccctcccttggctgaggtcccccgccacagcctggacccttccctcagaagcctggccgatgggtgcttttggggagcctctcagcctctggcaggggaggaggactgacacggaggcacacaggcctctcactgccgaggccagccttccttcctgctctgctctctcagtgccatggagaggcaggaagaggggcctgagggcggaaggggtttggggctcccatttcgccggccagtccctcctcctcagcctggcagtggcgctgggctccttcccctgggctgtactgagccgagcccaggggtttgcagagggtgggggtccatctctccagcttggctgcagacctcctttaccctgactcacaagccccactgatgctctgggccatgcccggctgacggctgctgtggatgccgcgagggacggacacacgtccggggcacccacgaggagggcccccagcctgggagactggccctgcggcctccacgtcaaactctcttcccaaagccctaacagaccagtggccgaggtgtggctcttattgcatccatccctgaagatgtgtggctgttgctgtcacctggagtccttttggggccaagatgtgtgtgcacccggggtcgtggccattcactcccaggcaggggtgagggtggcctggcccaggaggccaggaaggagggccctgtctgcctccacctctgggtgcaccccctgcctaccaccctcccttctagagagcacatcgcctgaccggggagaagtggggccgtggttcgagggagggctggccaggggtgggacccttatgagactcagtctgtgagtaaaactgggggctcaaatgcccaggatgaggggatcagtgactgtctaggaggatcccttgccttgtaggtgccccaagaccgcagggtagaaatcagccgggatgcctgcatcccacccccggccccagggcccaccacataaaatctgggagcccagagctgctgaggtgtggtcagctcccctaaaatgggcacggcccagcctgtcccatgaggaataaaggcccctggcccccttgagagagggcttgttggtgagggctgactcctgggggcccccaaggctcccctcctgtggggaggccaccttttaaggcaccactagcagtcaggatatggtggcatcagccctggggcctcctgggtggcaggggggcagcagctctcctccccactcacaggccctgcagtgctcatttggaattcctcccaagacccctggccacccagaccccccattcttcctaacactggcaataaaccctcaactgtgacccac

SEQ ID NO: 750 - DNA, 1086 bp, Homo sapiens
  source 1..1086: mol_type = genomic DNA
gtttaggtcggctggaaattatgtcctccgtcggttttccgcagtttttccaccaagcgagatatttttgggagttattccctaaataactgcattatatgctcctttcatgacgaaattgctgccgtggagaagactggaggaaactcgaggaagagggagaagccgacaagtgctcgacgggctaggaactgtcctgcttgggtgttagcgtttcccgccgggccagtaaggctgagtgacccggcgtggctactaggagaaggacgtacggtcctgctagtagaggaatatgtcgagtttctctagggcgccccagcaatgggccacttttgctagaatatggtatctcttagatgggaaaatgcagccacctggcaaacttgctgctatggcatctataagacttcagggattacataaacctgtgtaccatgcactgagtgactgtggggatcatgttgttataatgaacacaagacacattgcattttctggaaacaaatgggaacaaaaagtatactcttcgcatactggctacccaggtggatttagacaagtaacagctgctcagcttcacctgagggatccagtggcaattgtaaaactagctatttatggcatgctgccaaaaaaccttcacagaagaacaatgatggaaaggttgcatctttttccagatgagtatattccagaagatattcttaagaatttagtagaggagcttcctcaaccacgaaaaatacctaaacgtctagatgagtacacacaagaagaaatagacgccttcccaagattgtggactccacctgaagattatcggctataagagaataagaattgcagaaaataacagtgaagtgattgaaactttcttctgatgagtttctctaacctacaggatggagtaaaacaactgctacagttcagcacctgttttatgtgccgaatcactgtggggaaaggtcaggaaggtatagtccttcaataggaaattgtaattaaaatataattttatagaaccatttttatgtaatctgatttgaatgttatagttgataataataaaatcacttacttggttga

SEQ ID NO: 751 - DNA, 9829 bp, Homo sapiens
  source 1..9829: mol_type = genomic DNA
aaacaagatggcggctgaaggcgatccggagtggggccccagcaattcggattgagccttctccctccacccgcttccgtcggccgggcccctcccgcccggccccgcgggcctccccacccggccccggcgctccccaccgccccccctgcgcccgcccctcccccttcgctttccttctccccccgcctcggctccgacatgaggggccggcggggcaggccgcccaagcagcccgcggctcccgctgcggagcgctgcgccccggccccgccgccaccgccgccgccgcccacgtccggacccatcggggggctccgctcgcggcaccgcggcagcagccggggcaggtgggccgccgcccaggctgaggtggcgcccaagacgcggctgagctcgcccagggggggcagcagtagccggaggaagccgccgccgccgccgccggccccccccagcaccagcgccccgggccggggggggcgaggaggcgggggcggcaggacggggggcgggggcggcggcggccacctggcccggaccaccgcggcccggagggccgtcaacaaagtggtgtacgatgaccacgagagcgaggaggaggaggaagaggaggacatggtctccgaggaggaggaggaggaggacggcgacgccgaggagacccaggattctgaggacgacgaggaggatgagatggaagaggacgacgatgactccgattatccggaggagatggaagacgacgacgacgacgccagttactgcacggaaagcagcttcaggagccatagtacctacagcagcactccaggtaggcgaaaaccaagagtacatcggcctcgttctcctatattggaagaaaaagacatcccgccccttgaatttcccaagtcctctgaggatttaatggtgcctaatgagcatataatgaatgtcattgccatttacgaggtactgcggaactttggcactgttttgagattatctccttttcgctttgaggacttttgtgcagctctggtgagccaagagcagtgcacactcatggcagagatgcatgttgtgcttttgaaagcagttctgcgtgaagaagacacttccaatactacctttggacctgctgatctgaaagatagcgttaattccacactgtatttcatagatgggatgacgtggccagaggtgctgcgggtgtactgtgagagtgataaggagtaccatcacgttcttccttaccaagaggcagaggactacccatatggaccagtagagaacaagatcaaagttctacagtttctagtcgatcagtttcttacaacaaatattgctcgagaggaattgatgtctgaaggggtgatacagtatgatgaccattgtagggtttgtcacaaacttggggatttgctttgctgtgagacatgttcagcagtataccatttggaatgtgtgaagccacctcttgaggaggtgccagaggacgagtggcagtgtgaagtctgtgtagcacacaaggtgcctggtgtgactgactgtgttgctgaaatccaaaaaaataaaccatatattcgacatgaacctattggatatgatagaagtcggaggaaatactggttcttgaaccgaagactcataatagaagaagatacagaaaatgaaaatgaaaagaaaatttggtattacagcacaaaggtccaacttgcagaattaattgactgtctagacaaagattattgggaagcagaactctgcaaaattctagaagaaatgcgtgaagaaatccaccgacacatggacataactgaagacctgaccaataaggctcggggcagtaacaaatcctttctggcggcagctaatgaagaaattttggaatccataagagccaaaaagggagacattgataatgttaaaagcccagaagaaacagaaaaagacaagaatgagactgagaatgactctaaagatgctgagaaaaacagagaagaatttgaagaccagtcccttgaaaaagacagtgacgacaaaacaccagatgatgaccctgagcaaggaaaatctgaggtaggtgatttcaaatcggagaagtccaacggggagctaagtgaatctcctggagctggaaaaggagcatctggctcaactcgaatcatcaccagattgcggaatccagatagcaaacttagtcagctgaagagccagcaggtggcagccgctgcacatgaagcaaataaattatttaaggagggcaaagaggtactggtagttaactctcaaggagaaatttcacggttgagcaccaaaaaggaagtgatcatgaaaggaaatatcaacaattattttaaattgggtcaagaagggaagtatcgcgtctaccacaatcaatactccaccaattcatttgctttgaataagcaccagcacagagaagaccatgataagagaaggcatcttgcacataagttctgtctgactccagcaggagagttcaaatggaacggttctgtccatgggtccaaagttcttaccatatctactctgagactgactatcacccaattagaaaacaacatcccttcatcctttcttcatcccaactgggcatcacatagggcaaattggatcaaggcagttcagatgtgtagcaaacccagagaatttgcattggctttagccattttggagtgtgcagttaaaccagttgtgatgctaccaatatggcgagaatctttaggacataccaggttacaccggatgacatcaattgaaagagaagaaaaggagaaagtcaaaaaaaaagagaagaaacaggaagaagaagaaacgatgcagcaagcgacatgggtaaaatacacatttccagttaagcatcaggtttggaaacaaaaaggtgaagagtacagagtgacaggatatggtggttggagctggattagtaaaactcatgtttataggtttgttcctaaattgccaggcaatactaatgtgaattacagaaagtcgttagaaggaaccaaaaataatatggatgaaaatatggatgagtcagataaaagaaaatgttcacgaagtccaaaaaaaataaaaatagagcctgattctgaaaaagatgaggtaaaaggttcagatgctgcaaaaggagcagaccaaaatgaaatggatatctcaaagattactgagaagaaggaccaagatgtgaaggagctcttagattctgacagtgataaaccctgcaaggaagaaccaatggaagtagacgatgacatgaaaacagagtcacatgtaaattgtcaggagagttctcaagtagatgtggtcaatgttagtgagggttttcatctaaggactagttacaaaaagaaaacaaaatcatccaaactagatggacttcttgaaaggagaattaaacagtttacactggaagaaaaacagcgactcgaaaaaatcaagttggagggtggaattaagggtataggaaagacttctacaaattcttcaaaaaatctctctgaatcaccagtaataacgaaagcaaaagaagggtgtcagagtgactcgatgagacaagaacagagcccaaatgcaaataatgatcaacctgaggacttgattcagggatgttcagaaagtgattcctcagttcttagaatgagtgatcctagtcataccacaaacaaactttatccaaaagatcgagtgttagatgatgtctccattcggagcccagaaacaaaatgtccgaaacaaaattccattgaaaatgacatagaagaaaaagtctctgaccttgccagtagaggccaggaacccagtaagagtaaaacaaaaggaaatgattttttcatcgatgactctaaactagccagtgcagatgatattggtactttgatctgtaagaacaaaaaaccgctcatacaggaggaaagtgacaccattgtttcttcttccaagagtgctttacattcatcagtgcctaaaagtaccaatgacagagatgccacacctctgtcaagagcaatggactttgaaggaaaactgggatgtgactctgaatctaatagcactttggaaaatagttctgataccgtgtctattcaggatagcagtgaagaagatatgattgttcagaatagcaatgaaagcatttctgaacagttcagaactcgagaacaagatgttgaagtcttggagccgttaaagtgtgagttggtttctggtgagtccactggaaactgtgaggacaggctgccggtcaaggggactgaagcaaatggtaaaaaaccaagtcagcagaagaaattagaggagagaccagttaataaatgtagtgatcaaataaagctaaaaaataccactgacaaaaagaataatgaaaatcgagagtctgaaaagaaaggacagagaacaagtacatttcaaataaatggaaaagataataaacccaaaatatatttgaaaggtgaatgcttgaaagaaatttctgagagtagagtagtaagtggtaatgttgaaccaaaggttaataatataaataaaataatccctgagaatgatattaaatcattgactgttaaagaatctgctataaggccattcattaatggtgatgtcatcatggaagattttaatgaaagaaacagctccgaaacaaaatcgcatttgctgagttcttcagatgctgaaggtaactaccgagatagccttgagaccctgccatcaaccaaagagtctgacagtacacagacgaccacaccctcagcatcttgtccagaaagcaattcagttaatcaggtagaagatatggaaatagaaacctcagaagttaagaaagttacttcatcacctattacttctgaagaggaatctaatctcagtaatgactttattgatgaaaatggtctgcccatcaacaaaaatgaaaatgtcaatggagaatctaaaagaaaaaccgtcatcacagaagtcaccacgatgacctccacagtggccacagaatcaaaaactgtgatcaaggtagaaaaaggcgataagcaaactgtggtttcttccacagaaaattgtgcaaaatccactgtcacaaccaccactacaacagtgaccaagctttccacaccctccacaggcggcagtgtggacatcatctctgtaaaggagcagagcaaaaccgtggtcaccacgacagtgacagactccctgaccaccacgggaggcacactggttacatctatgactgtgagcaaagagtattccacacgagacaaagtgaaactgatgaaattttcaagaccaaagaagactcgttcaggtacagctctgccatcctatagaaaatttgttaccaagagcagcaagaagagcatttttgttttgcctaatgatgacttaaaaaagttggcccgaaaaggaggaatccgagaggtcccttattttaattacaatgcaaaacctgctttggatatatggccatatccttctcctagaccgacctttggcatcacttggaggtatagacttcagacagtaaagtccttagctggagtgagcctgatgttacggttactgtgggcaagtttgagatgggatgatatggcggccaaggctcctccaggaggagggactacacggacagaaacatccgaaactgaaatcacaacaacagaaataattaagaggagagatgttggtccttatggcattcgatctgaatattgtatcaggaaaatcatttgtcccattggagttccagaaacaccaaaagaaacgcctacacctcagaggaaaggccttcgatcaagtgcactgcggccaaagagaccagaaacgcccaagcaaactggccctgttattattgaaacctgggtagcagaagaagaactggaattgtgggagatcagggcatttgctgagagagtggagaaagaaaaggcacaagcagttgagcaacaggctaagaaacgactggagcagcagaagccgacagtgattgcaacttccactacttccccaacaagcagtacaaccagcaccatctctccagcacagaaggttatggtggcccccataagtggctcagttacaactggaaccaaaatggtactaactactaaagttggatctccagctacagtaacattccaacaaaacaagaactttcatcaaacctttgctacatgggttaagcaaggccagtcaaattcaggcgttgttcaagtacagcagaaagtcctgggtatcattccatcaagtacaggtaccagtcagcaaacctttacttcattccagcccaggacagcaacagtcacaattaggcccaatacctcaggctctggaggaaccacaagcaattcacaagtaatcacagggcctcagattcgccctggtatgaccgtgattagaacaccactccaacagtcaacactaggaaaggcaattattcgaacacctgtgatggtacagccaggtgctcctcagcaagtgatgactcaaatcatcagggggcagcctgtctccactgcagtctccgcccctaacacggtttcctcaacacctgggcagaaaagcttaacttcagcaacgtccacttcaaatatacagtcttcagcctcacaaccccctcgcccccaacaaggacaagtgaagctcaccatggctcaacttactcagttaacacagggccacggtggcaatcaaggtttgacagtagtaattcaaggacaaggtcaaactactggacagttgcagttgatacctcaaggggtgactgtactcccaggcccaggccagcagctaatgcaagctgcaatgccaaatggtactgttcagcgattcctctttaccccattggcaacaacagccaccacagccagcaccaccaccaccactgtttccacgacagcagcaggtacaggtgaacaaaggcagagtaaactgtcaccccagatgcaggtacatcaagacaaaaccctgccaccagctcagtcatcaagtgtgggtccagcagaagcccagccacagactgctcagccttcagctcagccccagccccaaacccagccccagtccccagctcagcctgaagttcagactcagcctgaagttcagacccaaacaactgtttcatcccatgtcccttctgaagcacaacccacccacgcacagtcatccaagccccaagttgcagcacagtctcagcctcaaagtaatgtccaaggacagtctcctgttcgtgtccaaagtccatcacagactcgaatacgtccatcaactccatcccaactgtctcctggacaacaatcccaggttcagactacaacctcacaaccgattccaattcaaccacatacatctcttcagataccttcccaaggccagccacagtcacaaccccaggtacagtcttcaactcaaactctttcatcaggacaaactttaaatcaagttactgtttcatccccatcccgtcctcagctacaaatacagcagccacagccccaagtcattgctgtgcctcagctgcaacaacaagtccaggttctctctcagatccagtcacaggttgtggctcagatacaggctcagcaaagtggtgtgccccagcaaatcaaactccagttacctatccaaattcagcaaagcagtgctgtgcagactcaccagattcagaatgtggttacagtgcaggcagccagtgtgcaagagcagttgcaaagggttcagcaactcagggatcagcagcaaaagaagaaacagcaacagatagaaattaagcgtgaacacaccctccaagcttctaatcaaagtgaaatcattcagaaacaggtggtgatgaagcataatgctgtaatagaacatttaaaacagaaaaagagcatgactccagctgaaagagaagagaatcaaagaatgattgtctgtaaccaggtgatgaagtatattttggataagatagataaagaagaaaaacaggcagcaaaaaaacggaagcgtgaagagagtgtggagcagaaacgtagcaagcagaatgccactaagctgtcagctctgctcttcaagcacaaagagcagctcagagccgagatcctgaagaagagagcactcctggacaaggatctgcaaattgaagtgcaggaagagctgaagagagacctgaaaattaagaaagaaaaagacctgatgcagttggctcaggccacagcagtagctgcaccctgccccccagtgacaccagctcctccagcccctccagcccctccaccttcacctccccctccacctgctgtgcaacacacaggccttctgtccacgcccaccttacctgctgcttcccagaagaggaagcgggaagaggaaaaagactccagctcaaagtccaagaaaaagaaaatgatctctactacctcaaaggaaactaagaaggacacaaagctttactgtatctgtaaaacgccttatgatgaatctaaattttatattggctgtgatcggtgtcagaattggtaccatgggcgctgcgttggcatcttgcaaagtgaggcagagctcattgatgagtatgtctgtccacagtgccagtcaacagaggatgccatgacagtgctcacgccactaacagagaaggattatgaggggttgaagagggtgctccgttccttacaggcccataagatggcctggcctttccttgaaccagtagaccctaatgatgcaccagattattatggtgttattaaggaacctatggaccttgccaccatggaagaaagagtacaaagacgatattatgaaaagctgacggaatttgtggcagatatgaccaaaatttttgataactgtcgttactacaatccaagtgactccccattttaccagtgtgcagaagttctcgaatcattctttgtacagaaattgaaaggcttcaaagctagcaggtctcataacaacaaactgcagtctacagcttcttaaagttcagcgtgttaacctaacataaaacacagcaagaatctggttgtctgaactattttaaattaaggagccagatgtttttagtcaggctatcctgacaagacttgacctaaacttcgtttttattggtcataacagtccaattatattcttggccaattttgtccaacggacaagaaaaaagcaaagtcaacgacaccattatcttgtcaagatcagatggttttactattgtggcagaagcgagaaaactttgtttattgaaaaaaaaagaaaaagaaagcaagaaaaaaagatactatggggtcaagtgtaactccatggaaatgccacgtctgctcttcagtgaagaagctggtttagagtctcacagaaaacttttgactgtatttatttattgttgcaaaaaagacgcttttttattgctgccctcatttgtcagctaattattttttcttataaaatccagccccggttacatataatcatctgtatcttatcatgattcctgtaggtaaaagtacaagacgacctctagatgtcttttctttctatgaaaggagctgctatgtacacatgtgcacacacacacaactgggaatcaacaatgagtttattgttcatggtagattaaaattaagcttgcataaaggttgggctaagtggtcctggactacagactctgttgccttgaatataacagtacaatttgtcaattactctgcaccaggctaaaatgagtaaaatctatttgaaggtatcttgtttgtaaacatttgtcagattctaatttttttcttttgtattaaaattcaactatggatgtatatgaaacaaaataaatggagataatttttctcccaca

SEQ ID NO: 752 - DNA, 2301 bp, Homo sapiens
  source 1..2301: mol_type = genomic DNA
gcccctccttctcgcggcgctcgagggaccatggccgatcctcgcgtgagacagatcaagatcaagaccggcgtggtgaagcggttggtcaaagaaaaagtgatgtatgaaaaagaggcaaaacaacaagaagaaaagattgaaaaaatgagagctgaagacggtgaaaattatgacattaaaaagcaggcagagatcctacaagaatccaggatgatgatcccagattgccagcgcaggttggaagccgcatatttggatcttcaacggatactagtaagcaaagacttctgtgtcatgtttaaattttttttttcaatccaatacatggaaagccaaaagtttaaatatttaacactgagaactagttggcagtatttcttattcacttgccctttataccgctatattttaaaataattaatggagtttaaattgtgttttgaattatgcctccagtaaaagtactgttttctagcatgtttgttcagtttattaaaatttagctagttaaatttatttaagttatgatagtaccagtattgtccagcaatgtcttgattatttggttttcatacataaagatcttttgagacattgaggatgagttgactgattaaaattttaaaagatctaatgtttcaaaagaatttgggatcttattaaaaggatcttgaattctttcacattcaaacctagatcagtttgagagggggaaaaaacctggtaatctatgtagtcccctcatactaacttggagctgaataacacttatacttgctggtataaatgccttgtgatacagaaggtagataaagcaggaaataataactgttaaaatactatctaagacaggaagcatcatttgtatttcttgacagtttaaatgcttttttctctcatgaatctagtagctgagaaagtaatagaaattgcttggaaaaaaataatgttggccgccaggtgcagtggctcatgcctgtaatcccagcactttgggaggctgaggtgggtggatcacgagtcaggagttcaagaccagcctgaccaacatggtgaaatcctgtctctactaaaaataccaaaataataataataataataatgtatttggatgatatatttgtatgtgaagatgtattcaacaatatctctgcccttgaagagcttgtatttactaacagagaacaaagatgtgtttaaggtataacatggaggtttaagaaattcttacgtatagtttgagctaagcaaattctcagtcgttttgctttcagttttcatattaaatacacacatactttatttcctctactgtttgtatatctccatcttttattgacctgacataaattgctaaccatagcttcatttaaaaatcaaacaaaatttcctgtgtactttagataatattatttcatttgtctgttatcattacaatatattagtaaaagttgcctgtatatcagtattatggaaaaactcaatctttaaatatcagaaaatgaaagatgtattttgtttcctttagtgtagggtatgtaatacccattagcaagcaggcaattcatttgtttaattcaaagattatatttaactctgttgtgacatcagaagccttctttgtcattgtgaatagtcagtggattattttggcctgaatgctgtcatatatgtaacatgttagtaaatcttcctttttacttttctcttttgtatgatgatgatgggtcaacaaaatgagaataaactttttctgaggtttttatttaattaatgctggtagctttagaagactgttattcacttattttatgagaatatatacagtgaaacaaaaccaccagttatttcttcctttccttgtaaagaaggaacagaatgtgggaaacctgtggaattacaatatatttagatgaggcttgggattttttacttttaattttttagttattaacattaatggtttgtaatatttgagtaaataacaaagtactgaaacttgaaaaggataaacttaatttttattgtatttcattttaggaaaatgaaaaagacttggaagaagctgaggaatataaagaagcacgtttagtactggattcagtgaagttagaagcctgaaacttttctcgtatggggtggtttttgcattaaatcctggggtccattttacaatccattatttttgaccactgctatgtgttcaagtagtatgagaatgtgattgtttttatctggttacatatatatttctttgtctaatttaatatgtcaaataaatgagttcatctaataaaa

SEQ ID NO: 753 - DNA, 1511 bp, Homo sapiens
  source 1..1511: mol_type = genomic DNA
ggcggcggcggaggagtggtgtgtgtgcgagcgtgtgtggctgggggaagccattgcctgtttaatagttgctgttgctgcacttccgcttctctcccagcgagagagagacacgagtggccaggcccagccgcagccgcagcagcagccgccgcggcggcacggaggagccagacacaaagagaggggctgtttgcggggtggggtggggggttcgctatgtcggatgacgattcgagggccagcaccagctcctcctcatcttcgtcttccaaccagcaaaccgagaaagaaacaaacacccccaagaagaaggagagtaaagtcagcatgagcaaaaactccaaactcctctccaccagcgccaagagaattcagaaggagctggcggacatcactttagaccctccacctaattgcagtgctggtcccaaaggcgataacatctatgaatggagatcaaccattctagggcctccaggatccgtgtatgagggtggtgtattctttctcgatatcacttttacaccagaatatcccttcaagcctccaaaggttacatttcggacaagaatctatcattgtaatattaacagtcaaggtgttatttgcttggacatattgaaagataattggagtccagcactaaccatttctaaagtcctcctttctatctgctcacttcttacagactgtaatcctgccgaccccttggtgggaagtattgccactcagtatatgaccaacagagcagaacatgacagaatggccagacagtggaccaagagatacgctacataaattggggtttcacaattcttacattatttgtctgtcacagaagagagctgcttatgattttgaaggggtcagggagggtgggagttggtaaagagtagggtatttctataacagatattattcagtcttatttcctaagattttgttgtaacttaaggtatcttgctacagtagacagaattggtaatagcaacttttaaaattgtcattagttctgcaatattagctgaaatgtagtacagaaaagaatgtacatttagacatttgggttcagttgcttgtagtctgtaaatttaaaacagcttaatttggtacaggttacacatatggccatttatgtaaagtccctctaagactacatactttttgtttaaaacaaaattggaatttgttttcccttcttggaagggaacattgatatttaacagagtttttagagattgtcatctcatatatataaaatggacacgtggctataaaacaccatataagagatgagtagtgcgttttattttatatgccaatctactttgtttaaaaaaggtctgaatcaggacttgtgaaaacctgtagtgaaataccttaagctgttaactaactgtaaggcgtggaataggagttgctcagtggattggttctatgttgtggactacttaagtctgcatttgttactgtgctaataaacaatattaaaaaccacctaataaaca

SEQ ID NO: 754 - DNA, 2076 bp, Homo sapiens
  source 1..2076: mol_type = genomic DNA
atgatattctgttctcttgggacattacagttttgcatagacaaggtgaacatttctcaaaacaccatgtctctccaattttctaatggatccaggcatgtttgcttaaggtctggagctggatctgtcagacccctcaatggaggtgcaggctttgcaggcagcagtgcatgtggtggctctgttgctggaagtgaattttcctgtgccttgggagggggcttgggcagtgttcctggtgggagccatgctggtggtgcccttggaaatgctgcttgtattggctttgctggaagcgaagggggactcctctctggaaatgagaaggtgaccatgcaaaatcttaatgaccgcttggcatcctacctggataatgtgcgagctctggaggaggcaaatgctgaattagagagaaaaatcaagggttggtatgaaaaatacggacctggatcttgccgtggacttgatcatgactatagcagatatcacctaacaattgaggatcttaagaataagattatctcctccactactactaatgctaatgtcattctgcagattgataatgccagactggctgctgatgatttcaggctaaagtatgaaaatgagctcacccttcaccaaaacgtagaggccgacatcaacggattacggcgagtcctggacgagctgacgctctgcaggaccgaccaggagctgcaatatgagtctctgagtgaggagatgacatatctcaaaaagaaccacgaagaggagatgaaggctctgcagtgcgcggctgggggcaacgtgaacgtggagatgaacgcggccccgggggtagacctcgcggttttgttgaacaacatgcgagcggagtacgaagcccttgcagagcagaaccgcaaggacgcggaggcctggttcaatgagaagagcgcctcgctgcagcaacagatctcccacgactcaggcgcagccactttcgcccggagccagctcaccgagatgaggcgcaccctgcagaccctggagatccagctgcagtccctgatggccacgaaacactccctggagtgctccttgacagagaccgagagcaactactgtacgcagctggcgcagatccaggctcagatcggggccctggaggagcagctgcaccaggtcagaaccgagaccgagggccagaagctggagtatgagcatctcctcgatgtcaaggtccacttggaaaaagaaattgagacctactgccgcctgatagatggagatggaaattcatgctccaaatcaaagggctttggatcaggaagccctgggaattcatctaaagatttatccaaaaccacactggtaaagacagtggttgaagagctagatcaacgtggtaaagttctttcatcaaggattcactccattgaagaaaagacatctaaaatgaccaacggcaagacagaacaaagggttcctttctagctgtcattttagagaaaagaataatttgggaaaggatcctgtacaattgcattattctaaatatcagagagaatatacacactttttacttttaaagatacattacttagcaaaaatacctgttttcttagttttacaggatattgagtgtttgtttccaataaataaaaaagttgatgtgcattcatttccattcactgatgactaataaataactatttgtgatttttttctatgtctcattcatagagaaacacttgtggaatatattttaattgcctttcactgttgttttaaataatagtcaataccgccacatggcatttgaatatgaaacattcactatgcataatctttaaatcacatcgtgtctatgtgggcaaataatcaaaaacttcagaaattctcctgtgactgaaaagtctcaccactagatgacgcattcctggtattttaccaagagcctctctcaaactcttctttccacaatacccaggataccattcctcgtctaaacaggataatctccggaaaaatccacagcaatatggcttgtgttagtgacacttttcctagaacaggggtcagaagctttttttgtgaagacccagatag

SEQ ID NO: 755 - DNA, 2596 bp, Homo sapiens
  source 1..2596: mol_type = genomic DNA
ctgcttcctgcacgggtggtccccaagcactgcggggccccagcccaaagcggaccttgactaccgcccagccccgcgctcccaggacctcccgcccgcggagcccactcggattgctctccgcccgggtcggcggaggccccgtctcctgtacccggcgctgggactgctccgcaccgcgcggctccctttcagcagctgcgggagcatgcggaggaggccctgccggccccgcgggtcatggaggagttccggcgctcctacagccgcctgtgcagggagagtggggccgagccccaggaggctgtcctgcagcagctgcaccagcttcccaggggccggctggacctggccacgcaaagcctgacggtggagacctgcagggccctgggcaagctgctgccgagggagacgctgtgcacggagctggtcctgagtgactgcatgctcagcgaggaaggggccacactgctgctccgaggcctgtgtgccaacaccgtgctgcgctttctggacttaaagggcaacaaccttcgggctgcaggggccgaggctctgggaaaactcctccaacagaacaagtccattcagagcctcacgctggagtggaacagcctgggcacgtgggacgatgccttcgccaccttctgcgggggcctggcggccaacggcgccctgcagcggctggacctccgcaacaaccagatcagtcacaagggcgcggaggagctggccctagccctgaagggcaacaccaccctccagcagctggacctgcgctggaataacgttggcctcctggggggccgggccctcatgaactgtctccccagcaacagaaccctgtggagactggacctggctgggaacaacatccctggagacgtcctcagagccgtggagcaagccatgggccacagccaggaccggctcaccaccttccaggagaaccaagcccgcactcacgtcctcagcaaggaggtccagcacctccgggaggagaagtccaagcagttcctcgacttgatggagactattgataagcagcgagaagagatggccaagagcagcagggcgtcggcagcccgtgtagggcagcttcaggaagccctgaatgagaggcactccatcatcaacgctctcaaggccaagctgcagatgacagaggccgccctggctctgtcggagcagaaggcccaggacctgggggagctcctggccacagcggagcaggagcagctgagcctgtcacagaggcaggccaaggagctcaagctggagcagcaggaagctgcagagcgggagtctaaactcctcagagacttgtctgctgccaatgaaaagaacctgcttctgcaaaaccaggtagacgagttggagcggaagttcaggtgtcagcaggagcagctgttccagaccaggcaggagatgaccagcatgtcagctgagctgaagatgcgggccatccaggccgaggagcgcctggacatggagaagagaagatgcagacagagcctggaggactccgaaagcctgcgcatcaaggaggtggagcatatgacccgtcacctggaggagagtgagaaggccatgcaggagcgggtgcagaggctggaggcggcgcggctgtccctggaggaggagctgagccgagtgaaagcagcggcactcagcgagcgtggccaggctgaggaggagctgatcaaggccaagagccaggcccgcctggaggagcaacagcgcctggctcacctggaggacaagctgagactgctggcgcaggcacgggacgaggcgcagggcgcttgcctacagcagaagcaggtggtggccgaggcccagacccgggtcagccagctgggcctgcaagttgagggcctgcggcggcgcctggaagagctgcagcaggagctgagcctcaaggaccaggaaagggtggccgaggtgagcagggtgcgcgtggagctgcaggagcagaacggccggctgcaggcggagctggcggctcaggaggcgctgagggagaaggcggcggccctggagcgccagctgaaagtgatggcgagcgaccaccgagaggcgctgctggacagggagagcgagaacgcgtctctccgggagaagctgcggctccgggaggcggagatcgcccgcatccgggacgaggaggcccagagggcgagcttcctgcagaacgccgtcctggcttacgtgcaggcgtcccccgtgaggaccctgagccccccaaagtgagacaggccgggaggacccgggcgcagtaggagtgcatcaggcggcgcccgagatggaccaggggctgcgtcccgcccgcgccgcctctttgagacccgggtcgtctgttccacgcggcggttgcggcgactgttggtggtgtcgcggctgcgggggaaccccgtgggaggcgcctgggaagggctccctaccggccccttcttcccggtcgacgccacgtgggagcacaccgggaaggggtcccgcgggcgcgtctccccctcgccttttgcgatgtcaccgtgaacgctgcggccgcctgcgcgcggcggggtttggaaatacagcgcgtttgcactttgtg

SEQ ID NO: 756 - DNA, 3943 bp, Homo sapiens
  source 1..3943: mol_type = genomic DNA
agcctggctgaggcagccgcgcaggtcgcagggccagcgtccgcgaggacggcccggctgggcggccccgagctctgtggcgctgtggaggagcgggagcgcggccgaggaagcggggcgccgagggggtcggcggccttcgggaaatttccgccgacccttcgctcccggctctaaaagttcctgatttcctatttccttttaaatcccgagtggctgttagctcttcgcctgcactttttcttccccaggagataagggggagtgtgaggaacggagcgaataatataaaaaaggatttcctcccggaagagagcggcagttcggagagatttttcttaaggaagcagaagcggcgtttgcggccgctgcaggcgccgggccctgccggccacactatgcgcgagccggccccgggctgctgaggcgcggggacgcggaagcggaggccgagcgcgccgggctcccgcgctcgcgagcgagttttgtccgcccggcggcggtggcggggggatggagcccgcgaccgcgccccggcccgacatggcgccggagctgaccccggaggaggagcaggctaccaagcagtttctcgaagagattaacaagtggacagttcagtacaatgtttccccgctgtcttggaatgtggctgtcaagttcctcatggcaaggaagtttgatgtgctccgtgccatagaattgttccactcctacagagaaactcgaaggaaggaaggcattgtaaagctgaaacctcatgaggaacctcttcgttctgagatcctcagtggaaaattcaccatcttaaatgttcgggacccaacaggagcctccattgccctctttactgccaggttgcatcatccccacaagtcagtccaacatgtggtacttcaggctctgttttacttgctagacagagctgtggatagctttgaaactcagaggaatggactggtgtttatctatgacatgtgtggttctaattatgccaactttgagctggatcttggcaagaaagtcctaaacctgctgaagggagcatttccagctcgtttgaagaaggtgctgattgtgggggcacccatatggttccgagtgccctattccatcatcagtctcctcctgaaggacaaagtccgggagaggattcaaatattaaagacatctgaggtcacgcagcatctgcccagggagtgtcttccagaaaacctgggtgggtacgtcaaaattgatctcgccacttggaatttccagttcctaccccaggtgaacggccacccagatcccttcgatgagatcatcctgttctccctccctcctgccttagactgggactcagtacatgttccaggtccccatgctatgaccatccaagagttggtggactatgttaatgccaggcaaaagcaaggaatctatgaggaatatgaagacattcgtcgtgagaaccctgttggcactttccactgttccatgtctccaggaaacctagagaaaaaccgttatggggatgtaccctgcctggaccaaactagagtgaagctaacaaagcgaagtggccatactcagacagattacatcaatgccagtttcatggatggctacaagcagaagaatgcttacattggcacacaaggtcctttggagaatacctatcgtgatttctggctcatggtatgggagcaaaaagtcttggtgattgtcatgaccacccgctttgaggaaggcggcaggagaaagtgtggccagtactggcctttagaaaaagactctcggatccgatttggcttcctcacagtgaccaatctaggcgtggagaacatgaatcattataagaaaacaacgctagaaattcacaacacagaggaacggcagaaacgccaggtgacccacttccagttcttgagctggccagactatggtgtcccttcctcagcagcttccctcattgacttcttgagagtggtcagaaaccagcagagtctggctgtgagcaacatgggagcacgctccaaagggcagtgccctgagccacccattgtggtccattgcagtgcaggcattggcaggacaggtaccttctgctcactggacatctgcctggcacagctggaggagcttggcacccttaatgtgttccagacggtgtcacgcatgaggacccagagggccttcagcatccagacccctgagcagtactatttttgctacaaggccatcctggagttcgcagagaaggagggcatggtatcctctggccaaaacctgctggccgtggagagtcagtaactctcctacgaacctcctacctgttggccagccttccttaaactaccctggacaccgctgagcctataggttgccatcagttacgctgaagccatggatcaacttctttcttgtgtctcccagcacacgtgtgcacgcaaggcagcctttccctttggctagataaatgtggtgaaattgccactagaaagggccagtagcaatgtgttcttaattcctagcatctgctatcaaactgtgccttattaaaaccaaattgtggctattgatttttgctagggtccccgaggtaagtggggaaggaacctccctcctcctttctcccgccattctttttctgaggtctcctgtctcccactccttccctttcctaggattttatggggaggtttgatgagcatttgcctttctccccagagagcttgaccaagttacatattctagagatcgtcctgagtgccaagcacgtttataagtagggcgtgtattccagtcctttctgtcattctgtgtgtgtgtgtgtgtgcacttatgtgtatgggtccatatgtacgtgtgtatataatatatattgtatgtgataatatgatcgtattctataaatacatatacacacgatactcctttccagaagttcctggggctccgtgttgcagttcaggactccttgcttcttggaccctactatttatcctggactagcttgggttggtgatcatgtctcctcttgtcaggctacagagtggtggaagaggacacacacacatctcctccatgttcctgccacagggccccttccttaagtaatgacttatctccttccagttgccacctgttggagccaagaatgtattagtttgtggtgacactgggttagctcagcatggatttcccttatccgatgatttttctacatttacttggccaatttggggaacagacctccactgtgattccatactctctctttgctttcactatcccagggatgggaggcggagggtagagatgaactcactgagcagccagagccaaatgcaatcggtacgaatcttagaaggaaggagggggagcccaggtatgagaaagaaaaaaccactaagaaaatacctccctgggaggatgagctggggccctttttcttttgctggatggttcctttatgcagcttggccctgtctaccgagatgcccatctcttcctgcctgctagcctgctagaccctcaaactgggtgggttctgtgtcaataaaaagcttcaccccctggctgagtgaggtggtcccctgcaatcactgtttgtcccctacccacccaacctgtccctgcctgctcccagcccactcatccttatgtgctagggataaatcaagagtcctcagcactccacattcccaaaaaatcccaggaactcctaaaccttcccctgtgacagaagatgaggttggcagctgatcagacctcaataattttatactgtaataagctctttgaatgtgtatattattattttttacaatcatttcattttgtatttaatatcaatggactgagtctgattcagaaaataattgtaatgttcatattcaatatcttacagtgatacagttttgtatttacatataaatataccgacatgatcaaaacc

SEQ ID NO: 757 - DNA, 7122 bp, Homo sapiens
  source 1..7122: mol_type = genomic DNA
cgctcttgcgggagcgttccgcatcgccccgggggcccctacgcgaggatctccggggccgttggcagcgcctggcacttctgagctcggcggacgagagcctgcaggtttcctccagtcagggacggcgaagggcggaaagcgcaggaggaggcagtgttaggccttaggccgggtgggccgggtcaggagagacgcgcccatctttcgccatccggggtgcgcgaggtcctctcgggacccggccggcgacccgtagctcgggcacgcgcctgtcgcatcccgcaggaaggaggggtccggcctgaggcccggggcggcgtccgccatggagatcccctcggtccagggccggcgcctgggacctggcgggcggccctgaccgccttcctccctgcgcgggctgggtcgcggacgtgcccttcgcggcactcggcctcctctgcgtctccgccttccctgggccgcactgctgcctgggcgcggcggcggcgacggcgccctgttgaatgggctgtgagggcccaggtttaaagcgctggcgaacgcggcctccgggggcgcacggcagctgcagcggtggcgaccaaacgggtgttggagttggcggcggccatggagggcctggctggctatgtatacaaggcggccagcgagggcaaggtgctgactctggccgccttgcttctcaaccggtctgaaagcgacatccgctatctgcttggctatgtcagccagcagggagggcagcgctccacgcccctcatcatcgcagcccgcaatggacacgcaaaggtggtacgcttgctcttagaacattaccgggtgcagactcagcagactggcaccgtccgcttcgacgggtatgtcattgatggtgccactgctctttggtgtgcagctggagcaggacattttgaagttgttaaacttctagtcagccatggagccaacgtgaaccataccacagtaactaattcaacccccctgcgggcagcatgctttgatggcagactggacattgtgaaatacttggttgaaaataatgccaacatcagcattgccaacaaatatgacaacacctgcctaatgattgcggcatataagggacacactgatgtggtcagataccttttagaacaacgtgctgatcccaatgccaaagcacattgtggagccacagcattgcactttgcagctgaagctgggcacatagatattgtgaaagagctgataaaatggcgtgctgctatagtagtgaatggccatgggatgacgccattgaaagtagctgccgaaagctgtaaagctgatgtcgtagaactgttactctctcatgctgattgcgaccgaagaagtcggattgaagctttggaactcttgggtgcctcctttgcaaatgaccgtgagaactatgacatcataaagacataccactatctatatttagccatgttagagaggttccaagatggtgataacattctcgaaaaagaggttcttccaccaatccatgcttatgggaatagaactgaatgtagaaatcctcaggaactggagtccattcggcaagacagagatgctcttcatatggaaggccttatagttcgggaacggattttaggtgctgacaatattgatgtttctcatcccatcatttacagaggagctgtttatgcggataatatggaatttgagcagtgtatcaagttgtggcttcatgccctgcacctcagacaaaaaggtaacaggaacacccacaaggatcttcttcgatttgctcaagttttctcacaaatgatacatttgaatgaaactgtgaaggccccagacatagaatgtgttttgagatgcagtgttttggaaatagaacaaagtatgaacagagtgaaaaatatttcagatgctgatgtccacaatgctatggacaattatgaatgtaatctctatacctttctgtatttagtgtgcatctctaccaaaacacagtgcagcgaagaagatcagtgcaaaattaacaagcagatctacaacctgattcaccttgatcccagaactcgtgaaggtttcaccttgctgcatctggctgtcaattccaatactccagttgatgatttccacaccaatgacgtctgcagctttccaaatgcacttgtcacaaagctcctgctggactgtggtgctgaggtgaatgccgtggacaatgagggaaacagtgcccttcatattatcgttcagtacaacaggcccatcagtgattttttgaccttgcactccatcatcattagcctagttgaagccggagctcacactgacatgacgaataaacagaataagactccgctagacaaaagtacaactggggtatctgaaatactgcttaaaactcaaatgaagatgagtctcaagtgcctggctgcccgagcagttcgggctaatgacattaactaccaagaccagatccccagaactcttgaagagtttgttggatttcattaagtgactggatatgtaaagtcgtttaatgtggtgctaaaaagtaaaggacttttaatcacagacagtagaattatgtgttcataaattctgcttttctttccactacccttcctcccatcccatccttccttagttctgtatttgtttttcttgcctcatggtaattgatttcagacagactttaacaaaaccacattgttttggtgtaactataaggtatttgcatattggttacctatttgtctttcttttttttaaaggaacagatataaaatgttttgtttatgtaacaagggacatttataatttcaagttgataatgttttaaacagctgcttacaaaagtatttctgttaagcctatgtcagcatgttatccatgcagcagttttgaggattttatgaagaaaaagagctaaaaaggaacattaagaggaatgggatatccaggtgttctgcacatgccaaactgctgtagatagtttacactcttccattatttatacggagtgatgcagcacattttagcattcaggaggatttttaaaaaatagctgcagattaatctggaaaatgtgctaatttaataatagttacaaatttataaatttaaatccatttgaaattgttgcattatgctgggtagtatatacaaaatggttatcatcttaaaccaacttttcagagaatcttgatggactctgcctttaggcttgaattcttcaaagtctattttaatgaaatttatctaaattgcagcagtctatttgattcagctcatagacatgtaaaaattatgaatgctgttttcttatgaaacaaattgtcacagtgtagttatacattctatttttgtccccttttccctttttctcctgtatcttttaaaatttggaaactacttttccagaaggcattatttatgcctccctaataaggtattttacttatgacagatgaaaaggaaccaggatatgtttgaattttttcactttcttagtctgtgacaagaagtagaaatatcactagtgtggtataggaacttacatgttttttatgatgaaaataattctcaatgccacttgaaaggtaattgtgtctgagagctgcaaatttttcaaccacaaaatgtcacttattcctacaggctatacagaggtctttatggtttttttgttttgttttaatggcaacattgtaactgtcaaactaaaagggtattctgtgattatcttttaagcattacagaaattcaagtgaaagttatatgcttatttctattgatgttaaaaatgataatgaaagcaaaattagctgtatctgtaattttctctctagtgccaaatgaatgccttagctactcatagtgcatggtactgtaagtgaagacctgtagctttttttttttctttaatgaaaagcattataatgatgtagcagcatcagatataaacttaaaaaaaaaggtttcaattaacattttatatatggataatgctttgtaaagtgtaagagaaaggttgcagttggatcagtataaaacaatgaccaagccaaaatcagcaccctagggccttaaataaaatagagataccccacaaaatgaaatattttgaaggatgggaggggacagaaggggggactatcccccaaggatgcaagatactttttacagttgctatcattatactttgtcttcttgcttcagttaggaaggttttgatggtaaattctgtcatggtaatagatacctattttcctaacctgagattttacaaggaaggtttttaggttggcttaaatggaggtatttatttgagtgagccctaatttgaaaattaccagacttgatcctcctggtatgaatcaaggaaatactgtaccttgctcttagcaactctcagtggcctgaaagagaaaatgcacttcttcaaggtgagtgaatcatgctttttccacagttcagatcagaccctttatttttcaaactacaaggcctgcttattggacagtctaaggaatagctttgatacttggtattcagttggttccattattaatgtatattatttttatttaaacatcaaaacttaaaatatcagataatgttgcatgttttaaaaacacatttcatccctttggctacccaggaccagcactatttaagacactgcttatttataaaatgagaataatgattatatgtacatattcagacatcaaaatttaatgacattctattttgagaagggaagacaatgctgaagaaagtaaaactgttgattgaaatgctgacagggtggagaacgaatttgaagacagtggaataaactatgaactatgctaatggtaattagattttttgtttgtttagtatagtggtaaattgtgtagtatcttgctgagaatctaattctatcttgtaaaatcaatccaaatgtgtattgtgaaacacctgtataaaatcatttttgaaataagtgatctacatgcctgtttttttaaaatgtttttggtagaattgtttgaaaatatgtttagccagacccttccccaacttaatttttttttaaaaaaggaaaataggtaagaaaatgatagttctatatctcagccctctgtgaactctaggctgtctccattttgcagccactttggtcatttgatgtttactattggtatacttatgctttgaattgtaaatcttcattgatggtattacagattcaaccaaaacttctctgtcctgttcagtaattgttatataaatctggatgagctagggaggcccaggtggatgttttcattcgcaaatcatgagaaacttaagtgggttttatgcacttgatagagttggcaaaattgaactatgaagttaactatttaactcaaggaatgggcggcaaacccatcccctcgattgataaagaaggggaacatttttacattagaactgacactgaaaacatagctttttcagtccaccctggttgctctagtagcccacagcccaatcacgttaaggttctttgctgtgggaattttaaataaaccaaaccccaaagcagaccatctgtaagctttggtctgcttgtttctgagaagggttttatttcattatactaatagtggactaataattggtaattgtgagaacttaggtatgataacattgtttgaagtaaaatatgatttgggggcagcagctttctaaataccaactctgtttgacaaatgttttgaaaattaaaatttcaagtgagcaacaccctgttaagagttttcactatagttgaggcagctactttatgaataagaccactttgggttatttaagcagaagcgtttcttttttttttttggaatggggtgggatgaggagtgagttgccagacctttgattagtttgctggtttagaaacagccagtggctgaattagtgagtaaatgaatgaaagtataaaggacttgttttttatgatagattttctgtaagaatcttaaatgttccttttcaaattagatgtgttgatgcacacatgactattctgtttttctcactgactatataacattaaaaaggggttaaagaaaacaaaactctgccttttgtgctatgaaatatttttagtccagaggttttaagctgtgtgtccattcctactctgaaaatgcatagctttgttctggatgtcatctcttgaaagtagaaaactcctatgtgtttatcacattgcagggctttcttatgtatttctggcagacttgcccaaatctttagatgggctgggttatacagcatgccctcccccaaataagggatctgaaataaatactacactattgatagtggagatatattaatttttaaaactgtaaagtaaatgtggtctctaggtttgtggtgtgtacctttgtgttaatgtgtagggaagagacagtgacttgatggttatggggagtgtatcttgatgtgtgtataggggtaagtattgctaaattatttacagcttttattcagggtgagtcatgtgatgaatggcctaatcagaaaagtgaaggagcgaagatgcaagcttgccaaatgatgaaatgaacaagattttgtatctattttttatcaggtgttgtaaaatttgtgcatggctttttgttgttgttgcttagtaactggtagaggagaaaagatgaggaaagaaactcagctttcctcacagtcttttcaaaggtacacagttggggagtaaaatctgactggcctaatcgatggaaaagaccctgtccttttcaccccatcctgcaatcctccgtgcagaggaactacactgttgtattctagtaattcactgtgatttataacaaaccggtgatgtcattctattgtgcacttttgtcaaaccatttatgtgactttaataaacatagtaaacttgctgactgcaccagaggtccattagtgatttatatattgcatgacattttctatttgagtttgacatgtagagtcatttttagtttcatggcaattgacagtcctaataactcagctaatttgaaactaacaatcttgctgtgtaaaaggaaaaaatggtgtttgtgttcagtaaatgtttgaaaaaaacta

SEQ ID NO: 758 - DNA, 832 bp, Homo sapiens
  source 1..832: mol_type = genomic DNA
gcaaggctcgcagccacctctcgggagtgcagggccagatcctgtgccagcggccttacacggccacagtcggattcgctgccgcagcagccgccacccccaggagccgccgggaccctcgcgtcgtcgccgccgcggcccagatccccacaccatgccgtcggagaagaccttcaagcagcggcgcaccttcgaacaaagagtagaagatgtccgacttattcgagagcagcatccaaccaaaatcccggtgataatagaacgatacaagggtgagaagcagcttcctgttctggataaaacaaagttccttgtacctgaccatgtcaacatgagtgagctcatcaagataattagaaggcgcttacagctcaatgctaatcaggccttcttcctgttggtgaacggacacagcatggtcagcgtctccacaccaatctcagaggtgtatgagagtgagaaagatgaagatggattcctgtacatggtctgtgcctcccaggagacgttcgggatgaaattgtcagtgtaaaaccagaaaaaatgcatctcttctagaattttttaaacccttaccaaggaaaaaaaaagggatgttaccaactgagatcgatcagttcatctaatcacagatcatcaaacagtagtgttcccacctaggagtgttaggaagttgtgtttgtgtttcaagcagaaaaactgagctccaagtgagcacattcagctttggaaactatattatttaatgtaggctagcttgttttcaaattttaaaagtttaaaaataaaatactttgcattctaaaaaaaaaaaaaaattgccttacacaat

SEQ ID NO: 759 - DNA, 7295 bp, Homo sapiens
  source 1..7295: mol_type = genomic DNA
gagcccattagccgcacaaattcgcagcaggcggctggggcggcggctggggcagcggctgcagcagcggcggacgctctgcattacccagtcttgcgtcctcggcaggcgcccgaagctgagtgcgcatcctctaccgcacccaagcttcgtctgtctcgtcaagctcttcatgctgcccaactaaaaggaaaacatgggcacaggggattttatctgcatttccatgactggaggggcgccctgggggttcagattgcaaggtggcaaggagcagaagcagcccttacaagttgcaaagattcgaaatcagagcaaagcctctgggtctgggctctgtgagggagatgaagtggtttccatcaatggcaacccttgtgcagatctcacctaccctgaagtcatcaagctcatggaaagcataacagactctctccaaatgctcatcaaaagaccatccagtggaataagtgaggctttgatatctgaaaatgaaaacaaaaacctcgagcatctcacacatgggggttatgtggaaagtaccaccctgcagattcgaccggccacaaagacccagtgcacagaattcttcctcgcccctgtcaagactgaagttcccctagctgagaaccaaagaagtggtcccgactgtgcaggcagcttgaaagaagaaacaggcccgagctaccaaagggctccccaaatgcctgactcccaaagaggacgcgtggcagaagagctgatcttaagggagaaggtagaagcggtacagcctgggcctgtggttgagctgcaactgtccctttcacaggagagacataagggcgctagtggccctttagtggctctcccgggagctgaaaaatctaagtctcctgacccagaccctaacttgtcacatgacaggattgtccacataaattcgatccctactaatgagaaagcagaccctttcctgaggtccagcaagataatccagatctccagtggcagagagttgagagtgatccaggaaagtgaagcaggagatgcgggactgccccgggtggaagtgatcctcgactgctctgacaggcagaagacagaagggtgcaggcttcaggcaggaaaggagtgtgtggattctccagtggaaggagggcagtcagaagcacctccttctctggtatcctttgccgtctcatcagaaggcacagagcagggagaagatccacgctcggaaaaagatcacagcagacctcacaagcaccgagcgcggcatgcacggctcaggaggagtgaaagcctgtcagaaaaacaagtgaaggaagcaaaatctaaatgcaaaagcattgcccttcttctaacggatgctcccaaccccaactccaagggggtgttgatgtttaagaagcgacgtcggagggccaggaaatacaccctagttagctacggtactggcgagcttgagcgagaggcggacgaggaggaagaaggtgacaaggaggatacatgtgaagtagcatttcttggtgcaagcgaatcagaggtggatgaagagttattgtctgacgttgacgacaacacacaagttgtgaactttgactgggattctggactggtggacattgaaaagaaactgaacagaggggacaagatggagatgttaccagacaccacaggcaagggagccctcatgtttgccaagaggagggagagaatggatcagatcacagcccaaaaagaagaggacaaggtaggtggaacgccaagcagagaacaagatgctgcccagaccgatggcctgagaaccacgacttcttaccaaagaaaggaggaagagtcggtaagaacgcagagctctgtgagcaaaagctacatcgaggtgagtcatggtcttggccatgttccccaacagaatggcttcagtgggacatctgagacagcaaacatccagaggatggtccccatgaatagaacggccaaacccttcccagggtctgtgaatcagccagctacccccttctcgccaacccgaaacatgacgagtcccattgctgactttcctgcacctccaccttactctgcagtcactcctccccctgacgccttctccagaggggtttcaagtccgattgctggcccagcacagccccctccatggccccagcctgccccgtggtcccagccagccttttacgattcgtctgagcgaatagcttcccgagatgagaggatctcagtgccagcaaaaagaacaggaatattgcaggaggccaaaaggagaagcacgacaaaacccatgtttacttttaaagagcccaaagtaagcccaaatcctgaactcttgtcactccttcaaaattcagaaggcaaacggggcactggagctggaggtgattccggaccggaagaagactacctcagcttgggggcagaggcttgtaatttcatgcaaagctcctctgccaaacaaaagacccctcctcctgttgctccaaaacctgcagtcaagtcctcatcctcccaaccagtaactccagtttccccagtctggtctccaggagtggctcccacccaacctcctgccttccccacatccaacccatcaaagggcaccgttgtctcctccatcaaaatagcccagccttcttaccctcctgcccggcctgcaagtactttgaacgtggctggtcccttcaaaggaccacaagcagcagtagccagtcagaattacacacccaaaccaacagtttccacaccaacagtcaatgctgttcagcctggtgcagtgggaccatccaatgagcttccaggaatgagtgggagaggagctcagctctttgctaaaaggcagtcgagaatggagaagtatgtggtcgattcagacacggtgcaggcccacgctgctcgagctcagtctcccactccatctctcccggccagttggaagtactcctccaatgtccgagcacctcctcctgtggcctataatcctatccactcgccgtcttacccactggctgctctcaagtctcagccatcagctgcacagccctccaaaatgggcaagaaaaagggaaagaaacccctcaatgcattagatgtcatgaagcaccaaccgtatcagctcaatgcatccttgtttactttccaacctccagatgcaaaggatggcctcccccagaagtcatcagtcaaggtcaattcagccctggccatgaagcaagctcttcctccccggccagtgaatgctgcctcacctacgaatgtgcaggcttcgtcagtgtactcggtaccagcctatacctctcctccttccttctttgcagaggcctcctcaccagtcagtgcatccccagtgcctgtgggcattcccacctcgccaaagcaagaatcagcctcatcatcttattttgtggcaccaaggccaaagttctcagccaagaaaagtggtgtcacaattcaggagagtgggcgctccctttctcttcctggaagatcagtcccaccccccatttctacatctccttgggtataccagcctacttatagttactctagtaaaccaaccgatggactagagaaagcaaacaagagaccaactccttgggaagcagcagcaaagtctcctctcggtctagtggatgatgctttccaacccagaaacatccaggaatccattgtggcaaatgtggtttcagcagctcggaggaaggtgcttccagggcctccagaggattggaatgaaagactgtcctatattcctcaaacccagaaggcctatatgggctcatgtggaaggcaagagtataatgtcacagccaataataatatgtccaccacctcccaatatggttcacagttgccatatgcatattataggcaggcttcaagaaatgattctgcaatcatgtccatggaaaccaggtctgattactgtcttccagtagctgattacaactacaacccacacccaaggggatggagacgccaaacatgaaagttagaagaacggatcatgtgccaactgtagttttttaaaaaaaacgctcctttgtagggttttaaacttttctaatagatttagattcacttttggtcttggcttgttctcataagtcatttatctaagtttgtgtttctgtgtgtgtgtgtgtgtgtgtatgtatgtgaatatacacacacacacacacacaggtgagtgtgaatacttccttgttggctgatccatagagcattacttggaagaaaatttcactatttgcattgatgtgctggcatttatatgtaattcataattttgattccattaataggtagtctatgcaacaaactctactcaattaaagtaaaactaagtatttcttcattgtaccttagtccaggaagaaattaatggaatatggtgtgctaattatcactacctataacatgaggaatataacattgcagaaatttctcataggggcatgccagtgagcaattactttataaaaatattttccttggtgttaagtatttctctgcaacttttttttttttttttttttttttttgagatggagtcttgctctgtcccacccagtctggagtgcaatggtgcgatcttggctcactgcaacctgcgcctcctgggttcaagcaattctcctgcctcagcctcctgagtagctgggattacaggcatgaaccaccacacctggataatttttgtatttttagtagacacaaagtttcaccatgttggtcagactggtcttgaactcctgacctcgtgatctgcccgcctcagcctcccaaagtgctgggattacaggcgtgagccaccacacctggcctttctgcaacatttttttaaaaaaatctaataaatcttagatttttaaaaaagaattaaaatgtgggagttctcagaaagaaataaacacatgagaataagattattacacattttggaaggacttttgaggaatgatgtgatgtgtagagaatagaaagatttagatatatgcctgtgacaggaatagattctgggttcaggggtccccatctgtcaaatgagaagattggattatctaatcttttagatccttaacaactctgatattctgagattctctcatttgtagaatgcccgctgatgcattgtttattttttttgctcataatataaatatcagattatgtttaggagtggattaggtaattagtgtcactacatgtatcattaaaggtcctaaaaggaattgttaggcggcaggctttgtgttacgtgttacatggagtgagggtagatgtgaagatttaaaacgattgatggatttaaggaagtggtacataaatatgtctgttattatgcaatcgtaggtcatgataatttattcagttatagaaaacatgccacagaagcctatgtaacaagtggtgcttctttagaaagttgtcattagaatgttctgaggaagttaagcagctgcttcatcaatcccatgacacatgccttgttagcatgcccatcaaataatcagatcaaacacctgctccttattgccatacccacgaactgttaaatataaaaaaattcaaagtatttgacatcttaagcaaatatccagaatatttttaagtaaaaaaccatcttaagtattcaaaatttccttggttttttaaaggtgataattttgctttgtgttacttttttgctcttgaatgtatcgttatgatggtctcttataatcatggtatctttcacagaataaaaattaaaaataatgccagggtgcaagtgaccaaggccttatcttgaaagttaaaaaaaaaaagtaaagaaatcacagtaagttctattagtgatgatagaaccagatataaaattgttcagtgatggagaaaagaaacgataaatactttccaaggttatattgttaaattatcttaaattatcaaggtgtaagatgtaatgatcccaagagtttttatagaatcctaaaaaataacgcctgatgtatagattagttagcaaattctcagaaatcccccacataaaagccttactttgttcaaaatttattatagtggtttaatcattttagatttgaatgttttaagataggagagacttagcagaaaatacttggcttgccagggccacgttctacttcattgctttcttttataagtgcaaggagttatttccatcagttgacatagatattattcactaaaattttcagcagactcaaaatagagaggagactttaaacttacatgttagcataaaacagacttctctctcattgcatgcactagatcaatattatcatctgtattaagctatctgaatttattcgagacattaagaaaaagacagtacatggtgggaaagctgcacatttctcacaaggaaaaaaacattctatatttgtagcagaaatcagtggtttgaaaagtcatactttgcagatatgaacctgaaaatcaaagtgccattgttaaatcatcctaaagtgtactgtgggtattctccagcatacttgaaaatgaataaagttagattgctcacattgaagctaatggttgagacaagacacctgccagagtgaagtttgattcctatgggtgagaagatgtagatgactattgttctcactaaagttctaaaataatagcaagtgtagagaagagccgttgctttgaaaatacataccacatttgttataaagcatttgtttgttagtatcaatcacataggtagaaagagtttgagttttactgtggattaaaaagccttccctaaaaagagagcatgccagtcatagagacactaatttggcacttttcctccttcttaggtttaaatgttataccaatgcatgtgtttgaaatatccattaagatgatttaaaatttgtcttgtattttgagtttcttaaatgcgtggattcttgttcatttatctctgaatatgtctcttttatattttggcacaattatacacattggaaagggccaacctattagggctcaagtatgtatatgcaaaaaaaaaaagttatatcaaacaggcacagttattacaactagagagaaattccagaaatatttgtttttttaagagaaagtaaattttcacattagatttctattcaaagtactaatatctacatggtccacacttttctattttaaaaaattgtgttctcttgttaaatagattaacatttccacttctgtttatcacaaaagactgtatttgaaatatgcatacggaaaattgaaattatattagtaataaatgtaacttgaaaaatcaa

SEQ ID NO: 760 - DNA, 1664 bp, Homo sapiens
  source 1..1664: mol_type = genomic DNA
agagtgctgaaggtcctgccaacggctctcttggcgtctcaacgttcggatcagcagcttttttccattctctctctccacttcttcagtgagcagccatgagttggactgtgcctgttgtgcgggccagccagagagtgagctcggtgggagcgaatttcctatgcctggggatggccctgtgtccgcgtcaagcaacgcgcatcccgctcaacggcacctggctcttcacccccgtgagcaagatggcgactgtgaagagtgagcttattgagcgtttcacttccgagaagcccgttcatcacagtaaggtctccatcataggaactggatcggtgggcatggcctgcgctatcagcatcttattaaaaggcttgagtgatgaacttgcccttgtggatcttgatgaagacaaactgaagggtgagacgatggatcttcaacatggcagccctttcacgaaaatgccaaatattgtttgtagcaaagattactttgtcacagcaaactccaacctagtgattatcacagcaggtgcacgccaagaaaagggagaaacgcgccttaatttagtccagcgaaatgtggccatcttcaagttaatgatttccagtattgtccagtacagcccccactgcaaactgattattgtttccaatccagtggatatcttaacttatgtagcttggaagttgagtgcatttcccaaaaaccgtattattggaagcggctgtaatctggatactgctcgttttcgtttcttgattggacaaaagcttggtatccattctgaaagctgccatggatggatcctcggagagcatggagactcaagtgttcctgtgtggagtggagtgaacatagctggtgtccctttgaaggatctgaactctgatataggaactgataaagatcctgagcaatggaaaaatgtccacaaagaagtgactgcaactgcctatgagattattaaaatgaaaggttatacttcttgggccattggcctatctgtggccgatttaacagaaagtattttgaagaatcttaggagaatacatccagtttccaccataattaagggcctctatggaatagatgaagaagtattcctcagtattccttgtatcctgggagagaacggtattaccaaccttataaagataaagctgacccctgaagaagaggcccatctgaaaaaaagtgcaaaaacactctgggaaattcagaataagcttaagctttaaagttgcctaaaactaccattccgaaattattgaagagatcatagatacaggattatataacgaaattttgaataaacttgaattcctaaaagatggaaacaggaaagtaggtagagtgattttcctatttatttagtcctccagctcttttattgagcatccacgtgctggacgatacttatttacaattcctaagtatttttggtacctctgatgtagcagcacttgccatgttatatatatgtagttggcatttggttcccaaaaagtaggatgtaggtatttattgtgttctagaaattccgactcttttcattagatatatgctatttctttcattcttgctggtttatacctatgttcatttatatgctgtaaaaaagtagtagcttcttctacaatgtaaaaataaatgtacat

SEQ ID NO: 761 - DNA, 1323 bp, Homo sapiens
  source 1..1323: mol_type = genomic DNA
cgcaacccgggcggcgagatggcgctttggtgtaagcgaggaggacagtacaggacatgagtcctggtgagggacccgaggagcaggacagagaagacggcccctgaatcccatttggccccttgctggctggaggtgtgaaaaccagcggtggaggcagccttcggggcctgcatttgagaataagggtgtcactagttccaggcgtctgctgaaagatttggaacagaagatgatggccactccgaaccagaccgcctgtaatgcagagtcaccagtggccctggaggaggccaagacctctggtgccccggggagcccccaaacaccccctgagcgtcatgactctggtggttccctgcccctgacaccgcggatggagagccactcagaggatgaagatcttgctggggctgtcggtggcctgggctggaacagtaggagtccccggacccagagcccagggggctgctcagcggaggctgtgctggcccggaagaaacaccgtcggcggccatcgaagcgcaaaaggcactggcgaccctacctggagctgagctgggctgagaaacaacagcgggatgagaggcagagccagagggcctcccgggtccgcgaagagatgttcgccaaaggccagcccgtggccccctacaacaccacccagttcctgatgaatgacagggacccggaggagcccaacttggatgtgccccatgggatctcccacccaggttccagtggggagagtgaggccggggacagtgatgggcggggccgagcgcacggtgagttccagcggaaggacttctctgagacttacgaacgcttccacaccgagagcctgcagggccgcagcaagcaggagctggtgcgagactacctggagctggagaagcggctgtcgcaggcggaggaggagactaggaggctgcagcagctgcaggcgtgcaccggccagcagtcctgccgccaggtggaggagctggctgccgaggtccagaggctccggaccgaaaaccagcggcttcgtcaggagaaccagatgtggaaccgagagggctgccgctgtgatgaggagccgggtacctaggggtgcctcccagcctggtggacccaaggagaaggtcccatttcgtgcacactcaggccagctgggtctcaaggaggcaggtggcagatgaaaaccaccgtcaacaccctgtgcgccctgagaacagctaaatcggttcagactcccacctcaccgtttccatagttggctcttttgtgtcatcttaccctttacagagaaattaaatggccttggtgggaccaaatggg

SEQ ID NO: 762 - DNA, 1444 bp, Homo sapiens; identical to SEQ ID NO: 731
  source 1..1444: mol_type = genomic DNA

SEQ ID NO: 763 - DNA, 2625 bp, Homo sapiens
  source 1..2625: mol_type = genomic DNA
gcgacgccgagtttcactctggctgccttctcctgagagtcggagccacagccagagccctgcccaggccgagccggagctgcagcccgagcgcggtggtgccctcagccccgtcctcttgtcctcctcagcctcggtgccttggaatttgtgtcgctgagtcagcaagcctttcagatttgcccggtttttgttgtttgtggtttgtatcaagatgggaactcaaacaagtcattcctcctaaggagctggtgtcttcatccagaagggacagtttgtgccagctctccagagagaaaaggatctggtactgttctggagtggcctgtagcagacactgaaccaccagccagctgcatttgttgtcctggaagtcattgccaactctgccagtcacactggggtccccagagaagtcaagatctgccggaggcgctgggcaatgaccccgggactccaggccagaggggtctgaagctgtttgggaaagcagcgggactccttgggaagatggccatggccccaagcccttccctggtgcaggtgtacaccagccccgcggctgtggccgtgtgggaatggcaggacgggctgggcacctggcacccctacagtgccaccgtctgcagcttcatcgagcagcagtttgtccagcagaagggccaacgttttgggcttgggagcctggcccacagcatccccttgggccaggcagacccctcgctggccccttacattattgacctccccagctggacccagttccgccaggacaccggcaccatgcgggctgtgcggagacacctgttcccccagcactcagcccctggccgaggtgtcgtctgggagtggctgagcgacgatggctcctggactgcctatgaagccagcgtctgtgactatctggagcagcaggtggccaggggcaaccagctcgtggacttggcccccctggggtacaactacactgtcaactacaccacccacacgcagaccaacaagacttccagcttctgccgcagcgtgcggcgccaagcagggccgccttacccggtgaccaccatcatcgctccgccgggccacacaggcgtcgcctgctcttgccaccagtgcctcagtggcagcagaactggccccgtgtcaggccgctaccgccactccatgaccaacctccctgcataccccgtcccccagcaccccccacacaggaccgcttctgtgtttgggacccaccaggcctttgcaccgtacaacaaaccctcactctccggggcccggtctgcgcccaggctgaacaccaccaacgcctggggcgcagctcctccttccctggggagccagcccctctaccgctccagcctctcccacctgggaccgcagcacctgcccccaggatcctccacctccggtgcagtcagtgcctccctccccagcggtccctcaagcagcccagggagcgtccctgccactgtgcccatgcagatgccaaagcccagcagagtccagcaggcgctcgcaggagcgaccccgaagccagagccagagccagagcaggtcataaaaaactacacggaagagctgaaagtgcccccagatgaggactgcatcatctgcatggagaagctgtccacagcgtctggatacagcgatgtgactgacagcaaggcaatcgggtccctagctgtgggccacctcaccaagtgcagccatgccttccacctgctgtgcctcctggccatgtactgcaacggcaataaggatggaagtctgcagtgtccctcctgcaaaaccatctatggagagaagacggggacccagccccagggaaagatggaggtattacggttccagatgtcgctccccggccacgaggactgcgggaccatcctcatagtttacagcattccccatggtatccagggccctgagcaccccaatcccggaaagccgttcactgccagagggtttccccgccagtgctaccttccagacaacgcccagggccgcaaggtcctagagctcctgaaggtggcctggaagaggcggctcatcttcacagtgggcacgtccagcaccacgggtgagacggacaccgtggtatggaacgagatccaccacaagacagagatggaccgcaacattacgggccacggctatcccgaccccaactacctgcagaacgtgctggctgagctggctgcccagggggtgaccgaggactgcctggagcagcagtgacctcgcaccccagcacgcccgcctctggtggccaccccgctgccccatggctggctgggtggccaggcaggaagtgcccagcccgagaggctgggaggtttgttgagggtgtggggtgtgccccacctgaagccggggctccccctgcctgcctctctctcctcctcccctctgggaattgggcagccctgggcagttgtactcatgggggcttaggatgcagctacctcagtgcgcagggcccgtctgtcctctgggggctgcttcgggcccgcggtgctcggggcctggtgtggggcgagtagagacttccccagcctggacgggcgtgggttctgggtcagcttcttttacctcaattttgtttgcaataaatgctctatagcc

SEQ ID NO: 764 - DNA, 2615 bp, Homo sapiens
  source 1..2615: mol_type = genomic DNA
gactttttgctccaagtgccagaattgattgtggttaggacatcttacgctgagaaataaataaaatggaacataatgggtctgcttcaaatgctgataaaatccaccagaatcgcctgtcgagtgttacagaagatgaagaccaagacgctgctcttaccattgtgactgtgctggacaaagtagcctccatcgtggacagtgtgcaggcaagccagaagagaatagaagagagacacagggaaatggaaaatgccataaaatccgtccagattgacctgttgaagctttcacagtcgcatagcaatacagggcatatcattaacaaattgtttgagaaaacccgaaaagttagtgctcacattaaagatgtgaaagcccgggtggagaagcaacaaattcatgttaaaaaagttgaagtcaagcaagaggaaataatgaagaaaaacaaattccgcgtggtaatattccaggagaagtttcggtgtccgacatccctgtctgttgttaaagacagaaacctaactgagaaccaagaagaggatgatgatgatatctttgatcccccagtagatctgtcttcggatgaagaatattatgttgaagaaagcagatctgccaggcttaggaagtcaggcaaggagcacattgataatatcaagaaggcattttccaaagaaaacatgcagaagacacggcagaatcttgacaagaaagtgaacagaattagaactagaatagtgaccccggagaggagagagaggctaaggcagtcaggagagaggctgagacagtcaggggagaggctgagacagtcaggggagaggtttaagaaatctatttctaatgcagctccctcaaaggaagcttttaagatgcgcagcctcaggaaaggtaaggaccgaacagtggctgaaggtgaggaatgtgccagggagatgggtgtggacatcattgccaggagcgagtctctgggccccatcagtgagctctactctgatgagctcagtgaaccagaacacgaggcagccaggccggtgtatcctccccatgaaggaagggaaatccccacccccgagcctttaaaagttacttttaaatctcaggtgaaagtagaggatgatgaatctcttttgttagatttaaagcactcatcgtaaagaggaattaagtatatcctaaatatgaatctcctaatcatgcagttttagtttgaatagtgtagtcgtctacatttctgtgccatgtaggaaaacataaatgtattttttttcttatatttaaaatcttgaagataatataaatattattatcactctttctcatggcagctgtggattttttagttcctttctcttgtccaccagaaaaatagtttcctaggttgggccagttacgtgtttggtaagggcaactttgcggccgtcatttgcaggagaactctaaatattggttaggattaatattgtggccagcctcaaaggggaataactcatgtgtgggttatatcgtccagatgttcagatcaacagatttgttagtaaattagcagtcacaccccttttttgatgctttcacattaaaaaattgaagttttggacttgagcatttggctctagtatcatagctttacttataagaaaaccctgggcaagtcatctgcttattctcatcagtaaaaatggagagggttggcctctgctgcctgcctcagaggactgttgtgatgatcaaaggaaatggtacacattctgggggaacaagaagcacacccagagaaaacaagcctcatcagttcctccaaaacagaatggaaagagttacaccttctgaaaaagccctcagcaccaatcaataaggtcctaggttggagagaaactaaagctggtcttcagaagccttttcacagaatcaagagtgaaaaataagtaaatgtttgggtgaccactttttcatcagactaactatatcttgggttttagttgggtctcaaaatgttccccagccagaccctttctaatttccttttgattaagatctttggtggactatagcactaaatttgtttaagcagtatgaggcataaaattgtgactatgtttctaaagtcggccctgatgcattgggtttggaaatgaccacaaatattcctgttttcctgagtgtacccttcagggtccagctgtccaaaacagtgttgataggagttcatcatagctgctttgggaggaagccagattctccttatcttttagctttagatcgtggaatccaggaagtagaacaatgtctattgttgctaaagaaagaaagaaatgggccgggtgtggtggctcacggggagtaatcccagcactttgcgaggccgaggtgggtgaatcacctgaggtcagaagttcacgaccagcctgaccaacatggcgaaaccctgactctactgaaaatacaaaaattagctgggcatggtggcatgcgcctgtcccagctactcaggaggctgagacaggagaattgcctgaacccaggaggcggaggttgcagtgagccgagattgtgccactgcactcaagcctgggcaaaagagccagactctgtttcaaaaaaaaagaaaaaaa

SEQ ID NO: 765 - DNA, 1378 bp, Homo sapiens
  source 1..1378: mol_type = genomic DNA
gaggcaggactgcccggcccagccttggaggaagacttctgggcagaagcggaacacaggagcagagacacatagtcttggctccagtttcgtttcagttatgcccaccctttcagtgttcatggatgtgcccctcgcccacaagctagagggcagcttgttaaagacctacaaacaagatgattacccgaacaagatattcttagcctatagagtctgcatgacaaatgaaggccatccctgggtttctctcgtggtgcagaagactcgactacagatttcacaggatccctccctgaattatgagtacttgcccaccatgggcctgaaatcattcatccaggcctctctagcactcctctttggaaagcacagccaagccattgtggagaacagggtagggggtgtacacactgttggtgacagtggtgccttccagcttggcgtccagtttctcagagcttggcataaggatgctcgtatagtttacatcatctcttctcaaaaagaactgcatggactcgtcttccaggacatgggctttacagtttatgaatactctgtctgggaccccaagaagctatgcatggaccccgacatactcctcaatgtggtggagcagatcccacatggctgtgtccttgtgatggggaacattatcgactgcaagttgacaccaagtgggtgggcaaagttgatgtccatgataaagagcaagcagatattcccattttttgatattccctgtcaaggtttatacaccagtgacttggaagaagatactagaatcttacaatactttgtgtctcaaggctttgagttcttctgcagccagtctctgtccaagaattttggcatttatgatgaaggagtggggatgctagtggtggtggcagtcaacaaccagcagctgctgtgtgtcctctcccagctggaaggattagcccaggccctgtggctaaacccccccaacacgggtgcacgtgtcatcacctccatcctctgcaaccctgctctgctgggagaatggaagcagagtctaaaagaagttgtagagaacatcatgctaaccaaggaaaaagtgaaggagaaactccagctcctgggaacccctgggtcctggggtcacatcaccgagcagagtgggacccacggctatcttggactcaactcccagcaggtggaatacctggtcaggaagaagcacatctatatccccaagaacggtcagattaacttcagctgtatcaatgccaacaacataaattacatcactgagggcatcaatgaggctgtcctcctcacagagagctcagagatgtgtcttccaaaggaaaaaaaaacactgattggaataaaactttagtctttgcaaaaa

SEQ ID NO: 766 - DNA, 2945 bp, Homo sapiens
  source 1..2945: mol_type = genomic DNA
cgccgcgccgcttcccccacctcgcaccagacctctgaaattgccctcggagactcggcctctcctataaggacgatcgtcctctcagctggagaacaaggccatgcctcagctcctacgccaggcggaagcgggagaggaaggccgacccccaagagcgccccttcagggggtccatccggccttgatctcagatgggggggtgtttgcggagggcggggcatcgcctcaacagctgggggctgcatcatggcaggaacgagtttccctgagccacggagctgcaggtcgcctcctctactaccctgctacccggttacctcttcgcctcttggtcgtcgagcagctccggctcggtcgccgccattaccacatcgcactccgcggcagccgccatcttaccgccgggaccagagagctgggtgggaggccggcggtgaagagcacttccggttggagcatagagcagctccgcggcgccgcgcccagaagggctccctcgggctcgtctaccagagagaggctccgcttggggccagagcggcctcccgcccccggatgtccacggtggtctccgcgccggggcgggagcccaggggctgtgccggttgaaaactaagcatggggaagagctgcaaggtggtcgtgtgtggccaggcgtctgtgggcaaaacttcaatcctggagcagcttctgtatgggaaccatgtagtgggttcggagatgatcgagacgcaggaggacatctacgtgggctccattgagacagaccggggggtgcgagagcaggtgcgtttctatgacacccgggggctccgagatggggccgaactgccccgacactgcttctcttgcactgatggctacgtcctggtctatagcacagatagcagagagtcttttcagcgtgtggagctgctcaagaaggagattgacaaatccaaggacaagaaggaggtcaccatcgtggtccttggcaacaagtgtgacttacaggagcagcggcgtgtagacccagatgtggctcagcactgggccaagtcagagaaggtgaagctgtgggaggtgtcagtggcggaccggcgctccctcctggagccctttgtctacttggccagcaagatgacgcaaccccagagcaagtctgccttccccctcagccggaagaacaagggcagcggctccttggatggctgaagagctgccgttcctctttcacgatcccagccccatttcagtgtctggggctctggtagatgtgttgagggcaaagtagaggacaagctgtctttcccagtcagccagggagctccccgccaggccacgccccagccactttgctccctctcacctctgggaagtgcaaatactcttggttgacatccccttcctcagccctcccagcctactccccatcccagcttttagaggatctgctccactgtctcctggggcagttgtgggtcactgtcccttccagctgccccagacaggaagcagagtcaccacgcagcagtgtcccttcttgggtctgagttcctattataggtaggggccccaccctctgggcttcccatcagcgacacacacacacttatggcaccagcctggactccagaaaaagggtgtccaggtattgtgtgtatgcatttagttgtgcacacacaaatatgctcctatactggcattaggcgtctcctcatccctcaccctgacctttctcctgtccttttcttggctggaagaagttggcctcctgggagtgtagttttctgttttaaatcccccacccctggctgggctcagtggctcacccctgtaatcccagcactttgggaggccaaggcgggtcgattacttgaggtcaggagttcacgaccagcctggccaacattgtgaaaccccatctctgccaaaaatacaaaagttagccgggcgtagtggcacatgcctgtaatcccagctacccggggaggctgaggcaggagaattgcttgaactcagaaggcggaggctgcagtgagccgagatcgtgccactgcactccagcctggtcaacagagcaagactccatctcgaagaaaaaaaaaaaaaattccccacccctaccaattgttttacttcctcttcctgctcagggagcagatgggcctcactggttgagatggaatagaataactgggctatgagtcaccagcccactttgtgacccagcaagacctttcccctctctgggcatcagtttctcatctgtaagatgaccagagttgcttagatgatctcctagatcctttccagttctcttgatttcgtaaagccaatggcttctccctctttaaggtgctatgccaaccagccctggaggctgggatctgccgctccctccagccaccagggggcaggagtgcactacctgctgtcagtcaccagagtggccgctcagtgcccagcccgccagcctcgctcttggaggctgctctttatcctgcctgtggttttcagctcagagctggacttctatttataagttacctgtatttatatttatatgcccgctctcatggtgaaggctggacaaggtgctcctctggcccctccttcttacctcagatgcctgaacagaacaaggcaaacccgtagcagcctctcaggagctgacaggtcctctttcggggctcaggagggtgggcacacacccagcggcctgcagagtaagcttattacccacaactgtgcccgctttgtgcttctaaggtgcacacctagcctaggtgagacactgcagccaggcaaccaccgacacacgccccttctcaaagccagaggtgagtggggcaggtgcccggggctgggtgagtggaattaggacacacacaggcttgggcttcaagttcatttattgatgcattggttggacacaataaaaccacaattgttatcaaaaa

SEQ ID NO: 767 - DNA, 5032 bp, Homo sapiens
  source 1..5032: mol_type = genomic DNA
cttgattatgtgtgccctctccgggcgcccgcgttagcggccgggtggaggtggggagggaagacgctgaggaggaggaggaggcggaggaggcggtggaggggaggtggggggaatcagcaaggacatggctcctgactcctgtgcggaacgtgagtgactgagcggcaaagcccgaatggtctctagcgaccggcccgtgtcactggaggacgaggtctcccatagtatgaaggagatgattggaggctgttgcgtttgctcagacgagagaggctgggccgagaacccgctggtttattgcgacgggcacggctgcagcgtcgcggtgcatcaagcttgctatggcattgttcaagtacccactggaccgtggttttgcaggaaatgtgaatctcaggagagagcagccagagtgagatgtgaactttgtccccataaggatggagctttaaaaagaacagataatgggggttgggcccatgtggtttgtgccctgtatattccagaggtacaatttgccaatgtttccacaatggaaccaattgttttacagtctgttccgcatgatcgttataataagacttgctacatttgtgatgaacaaggaagagaaagcaaagcagccactggtgcttgcatgacatgtaataaacatggatgtcgacaggctttccatgtaacatgcgctcagtttgccggactgctttgtgaagaagaaggtaatggtgccgataatgtccaatactgtggctactgtaaataccattttagtaagctgaaaaagagcaaacggggatctaataggtcatatgatcaaagtttaagtgattcttcctctcactctcaggataaacatcatgagaaagagaaaaaaaaatataaagagaaggacaaacacaaacagaaacacaagaagcagccagaaccatcacctgcattggttccatccttgactgttactacagaaaaaacttatacaagcactagcaacaactctatatctggatcattgaagcgcttggaagatactactgcacgatttacaaatgcaaatttccaggaagtctctgcacacacctctagtggaaaagatgtttcagagactagagggtcagagggcaaagggaagaaatcttcagctcacagctcaggtcaaaggggaagaaagcctggtggtggaagaaatccaggaacaactgtgtcagcagctagcccttttcctcaaggcagtttttcaggaactccaggcagtgtaaagtcatcttctggaagttcagtgcagtctccccaggatttcctgagctttacagactcagatctgcgtaatgacagttactctcactcccaacagtcatcagcaaccaaagatgtacataaaggagagtctggaagccaggaagggggggtaaatagttttagtaccttaattggcctcccttcaacctcagctgttacttcacagcctaaaagctttgaaaattcacctggagatttgggtaattccagccttcctacagcaggatataagcgggctcaaacttctggcatagaagaagaaactgtaaaggaaaagaaaaggaaaggaaataaacaaagtaagcatgggcctggcagacccaaaggaaacaaaaatcaagagaatgtttctcatctctcagtttcttctgcttcaccaacatcatctgtagcatcagctgcaggaagcataacaagctctagtctgcagaaatctcctacattgctcaggaatggaagtttacagagcctcagtgttggctcatctccagttggttcagaaatttccatgcagtatcggcatgatggagcttgcccaacaactacgttctcagagttgctgaatgcaatacacaacggtatttataacagcaatgatgtagcagtatcgtttccaaatgtagtatctggctcgggatctagtactcctgtctccagctctcacttacctcagcagtcttctgggcatttgcaacaagtaggagcgctctctccctcagctgtgtcatctgcagcccctgctgttgctacaactcaggcaaatactctatctggatcttctctcagtcaggcaccatctcatatgtatggcaatagatcaaattcatcaatggcagctcttatagctcagtctgaaaacaatcaaacagatcaagatcttggagacaatagccgcaacctagttggcagaggaagctcaccccgaggaagtctctcgccacgatcccctgtaagcagcttacagattcgctatgatcaaccaggcaacagcagtttggaaaatctgcctccagtagcagccagcatagaacagcttttggagaggcagtggagtgaaggacagcaatttttactagaacagggtactcctagtgacattttaggaatgctgaagtcattacaccaacttcaagttgaaaaccgaagattagaggaacaaattaaaaacttgactgccaaaaaggaacggcttcagttattgaatgcacagctttcagtgccttttccaacaataacagcaaatcctagtccgtctcatcaaatacacacattttcagcacagactgctcctactactgattccttgaacagcagtaagagccctcatataggaaacagctttttacctgataattctcttcctgtattaaatcaggacttaacctccagtggacaaagtaccagcagctcatcagctctttctaccccacctcctgctgggcagagtccggctcaacaaggctcaggagtgagtggagttcagcaggtcaatggcgtgacagtgggggcactagctagtggaatgcagcctgtaacttccaccattcctgccgtgtctgcagtgggtggaataattggagctttgccaggtaaccaactggcaattaatggcattgtaggagctttaaatggggttatgcagactcctgtcacaatgtcccagaaccctacccctctcacccacacaaccgtaccacctaatgcaacacatccaatgccagctacactgactaacagtgcctcaggactaggattactttctgaccagcaacgacaaatacttattcatcaacagcagtttcagcagttgttaaattctcaacagctcacaccagaacaacatcaagcctttttgtatcagttaatgcaacatcaccaccagcagcaccaccaacctgaacttcagcagctgcagatccctggaccaacacaaatacccataaacaaccttcttgcaggtacacaggcacccccacttcacacagctaccaccaacccatttctcaccatccatggagataatgcaagtcagaaagtagcaagacttagtgataaaactgggcctgtagctcaagagaaaagttgacacctgagaaacatctagaaattgcctatcctgctgttctagcacttcatctggctgcctttgcagtccttttactacagctatgaagaaacgcaacaagaaactcaatgcacaacaaaggattaattgctgcaaggacattcttgtaaggctttgattagttttcttgttgctttgttgcactgaaatggaattcccatgcccctaccccttaccccagttttttgaacatggaaagaaaatttaataactttttaaagtgacataatttacatgcaatatgtttatcaactcaagaatttaatatagttggtacacaactagttttgtttataaattggagatgcaaatagcaaaactaaatacttgctccatttacaaactacttgattttattgtacaagttgaaatatgctcttttgtttgggttacagtatgcttgctctaagtcaaattccaaggaactaatttcttctcctggagttgcattgattcagtattacaaatatatagcacatcacctgggacttggcaatctttgttaaaaaaaaatttcctttctaatgggatttggccaattttggtaatgaagttaggatggtaatgtctgcatctgctaaaggtaattttcttttgagaattgctttctttagtgttaagacctactcatattttgaagaaatcttgagttaagtgagttctgaggctgctgggggaaccagatcaattcaaagctaaatacttctttcagaaaggggccactgtggaaagtgctggtggggtttgcccttgatcaagtgcctccattgtgctgcaagggctgtagacagcagggtgggacagtcagtcctccgagcagcaggaatcatcccgtcacctgcagccttcccatgcttccgcctttattcagaactttctgtgccactgtagatagctcaggcaaaactattacctgggtatttatccactaatgagtcacaagaaaaggagtggatttggtaagaatagagatttgttttatttaaaccacttcccattactgaccattaaaagctcaccactagagttcctgaaacaggtgaaacctgtatgacagcccttccactttggggagccacgcttttgatgtgacagtaccgcagagtgattcccccactgaggatgtcatcatcaaactcttctttggtgtgtgaattattagtggaaaagacccagctgtaattagacctccactgtgtacttagctggaagaacatgttaattctgcaatatgtttcttggttaaacattgcacagttcttacctcatttctgtaaataaagttttgtgaatctgttttgtattgtgacaaattcataagataacattgatattttgatttgtaatatttctaattggtagatttaattgaaaagtaaaattaatttatttttatatgttcaggggaattttaaagtcaaatcttttgtagataatttaaaaaatcagtgtggtttattttacttatttaacccactggttgttattctgtaacagtttgtataaatggtaaattttgaatgtgttgttattttacctagatgtaaaattccacatgtattaaaatgtacaaaatgttttgttaataaaatttaataatgtttataa

SEQ ID NO: 768 - DNA, 5390 bp, Homo sapiens
  source 1..5390: mol_type = genomic DNA
cagtcagttggtctgggcactgcagcaggctcggctctgtcccagcacttgtctgggagaaaagtggtgttactcacccagggagagtctctctttctaccttccttctttctcgatctccttgtgtgcttttgtgtttctttatttcttttccttttttttctttttttttttttgttacttaattatattcctaatcctggatgaagttgctggattctgcagcacaagtcttcatgaacaagcagcaccgctcagagatttcacggcattcaaaggtcacagaactgccactatggttaaatgtcttgtttaatggttgagaggtgtggcgaaatcttgtttgagaaccccgatcagaatgccaaatgtgtttgcatgctgggagatatacgactaaggggtcagacgggggttcgtgctgaacgccgtggctcctacccattcattgacttccgcctacttaacagtacaacatactcaggggagattggcaccaagaaaaaggtgaaaagactattaagctttcaaagatacttccatgcatcaaggctgcttcgtggaattataccacaagcccctctgcacctgctggatgaagactaccttggacaagcaaggcatatgctctccaaagtgggaatgtgggattttgacattttcttgtttgatcgcttgacaaatggaaacagcctggtaacactgttgtgccacctcttcaatacccatggactcattcaccatttcaagttagatatggtgaccttacaccgatttttagtcatggttcaagaagattaccacagccaaaacccgtatcacaatgctgttcacgcagccgacgtcacccaggccatgcactgctacctgaaagagccaaagcttgccagcttcctcacgcctctggacatcatgcttggactgctggctgcagcagcacacgatgtggaccacccaggggtgaaccagccatttttgataaaaactaaccaccatcttgcaaacctatatcagaatatgtctgtgctggagaatcatcactggcgatctacaattggcatgcttcgagaatcaaggcttcttgctcatttgccaaaggaaatgacacaggatattgaacagcagctgggctccttgatcttggcaacagacatcaacaggcagaatgaatttttgaccagattgaaagctcacctccacaataaagacttaagactggaggatgcacaggacaggcactttatgcttcagatcgccttgaagtgtgctgacatttgcaatccttgtagaatctgggagatgagcaagcagtggagtgaaagggtctgtgaagaattctacaggcaaggtgaacttgaacagaaatttgaactggaaatcagtcctctttgtaatcaacagaaagattccatccctagtatacaaattggtttcatgagctacatcgtggagccgctcttccgggaatgggcccatttcacgggtaacagcaccctgtcggagaacatgctgggccacctcgcacacaacaaggcccagtggaagagcctgttgcccaggcagcacagaagcaggggcagcagtggcagcgggcctgaccacgaccacgcaggccaagggactgagagcgaggagcaggaaggcgacagcccctaggggccggcccaacttagacgcggctctcctccggcagggcccccagagggcagaagcagcgtggaggggccctcacgcagcagcccagccactttctgagtgttgtcctggggctctttggaacgccatcttcctcccacttacctgcctcccctccttttcgcaaatgtacagaagccatttgtcacctcagcattcgctgccgaaatgagcaactccattcagtaacgtgggagctgatcccacgggcaggctctccctgctccaggagaagactaggaggaagaatgaggtgctcctgccgtgtccgccttgttccgggtcgcactggaacaggcagcaattcctaagtccggagcgtttgagcgtttgctatctgactgctgatctgcgtgacagaaacaccagcatatttgcaacgccaaggatattggtcttaagtgcaagagcacaaatgagagtgtgagagaaagtaccttctattttaataataatattattataaaaataataaatctttttaacttttatattttatgcactagacaatggatctgcaactttggactaaggtcattcaatgtacccaaacttgaacagggggttcattgttttgctattgactttattatgccactttggggcagagacttggcatcttcgcagtttaagaaaccacgtttcctatccaatccgaagggaaggtgctgtacagttcattcctttgcaccattagccaatctgtcttttatggattctgtgacatgtttatattcacccatgtacattttctgtaaataccaaacgctactgattcccatgccaaaatacatgagtattatgggattgctacctgtataaacaatggcactgtgaaaatactgttagttttaatacaagagaatgcatttgtaaatatggtatagagtttattaatatactattgtttgcagataaaggccttaactttaaacatctttcatcttctgaaagctgcccaacttaaatcctcatagatgtctttctcaactgccttcccatgttcatctgtatgttttccagctaaggtcacaaaccaaaactgaataaagtctttgaggaaacattttggaaacttcacatgcattccgcttgagaccatagtgtttaatctatggcaccaagcatcgtttcctcagattaatgagacccttcaacaagcctgaatcagtcacttttcaacacagcgatgttttaacaagccagctgctaagcttgtgtttatgtgactcttgttacagatcatggcggtgcgtcagcctcacaggagacatagcaggtctcagaaaccttctatgaccctgtcatctaaccatcagggaattccctgctcccatgccacacatttgtctattatggctatagtaccaaagtacttttggtgtttggttggtgtgcatttctttagtgtcgatagtaactggatttttctttttccttaatctcatgtgaacaactacccaactgtttagctgaagttcatattatttaagtaaagaaaatatttcagttttataacagactttaccttcctggcaggtcattgtagttaattatgtctctagcttggagtgtcaccttggaatttcgttgccattttttctcagacacctggccgtaaaatcagtttgttacagcattcttctctaggctgctaaacgctgtgcattgaaccttttctttagaagtttcagcgtaactaatgttagatgaaaattgttgatgcccctttctttttactttaaacaatgtggtagtgggagaatgactgtttctgccactatcaacctgatcctcatgctgatagaatgacagctagcacttatttcctaagtgcaactgttttagagatttttctcctaacatgcaaaggaaatactgattggcctataataagttcctatagggagactgaggcttgcagaattaaggttcaggggaaattttggaaagttggttgtattttcattgaagtaggagagattatcagatggtgctaaagaaagtgtgaagatcttatgaaataggtggatggtaagttgaaattattgatgtgggtaagaagggaggttgtggaaagttaacactagctttgtatttttttttctgtaaaactgtgaactgatatattttcctttatcactttagtattctgcagttctcagcttggtgaggctccaaaagagaatatgtcagatgtattcctacttccaaacctgtcttactttggtttgatggtacacatagggcttttgaacagtctatttttaatgtatatgaggtcaaatcaaggaaggcaattgctggggacaagaaaagtagaggtaggaaagaagacactattttagctaatggggtttcttgggactaaaaaatggctttgtttaaattataattatataataatttaaataaatgagattggaggtattcttagtagttctgagttgatagtttacattacaattaggtcttgaagaagagctcacagagaaaaaactaccaaatatccaatgggtaagcccatgatgtagccactagtacaataaaaatctgaagtaaaatgaggcataaacttgatgcagctgcctccctcattcaactggggagttcttgagttcctcatttgttggtaaaaagaaaaagaatgtgaaaatgtctctttttttcttggctattagtggctgtcttgcaatatttcaataggagtccaattactagttaaaacactggcggggtgcggtggctcacgcctgtaatcctagcactttgggaggccaagttgggcagatcacaagttcaagagatcgagaccattctggccaacatggtgaaaccccgtctctactaaaaatacaaaaattagctgggcatggcagtgcgtgcctgcaatcccagctactcaggaagctgaggcaggagaatcgcttgaacctgggaggtggaagttgtagtgaactgagatcgcaccactgcactccagcctggcaacagagctagaatccgtctcaaacaaacaaacaaaaaatcccacagctattggatcatccacagattttttctttacaatcttgttctccttgtccatggaccatcaatagttgacttgccaggtttaattctttcattgcttgagaagaaaggaatcaaaggactgtgtgtagtaagctgacggtaaagttaagattaaattaagacagagagagaatacatatcactgccaggcctgataggaaaaatctgctcttccttttaataacagtgatgaattgtcaggaccttatttaggaaaccctgacctacccataactccctgctaggctaagtagaaaccaggttatttctccctgcttatggctccccgcaaagggacttgcagcgtgtcctgcaactttgtcttcagatagtgcttcctacaaaactaggtcttgttttgtaatcttttctcgtgttgaatcagatctgcttacttatttaggtttggttatgagcttgtatctcactgtatttctcatgctttgttcttttaaacaaatcctttaaactgtgtcattttgtatacacatgtgaggtttgaaaaaaaaaaaaaaaaaaaaaagaactaccttgtgagttttgctcaaaatgtggcctaagtagccattggcatgtctagatgaacaaataaaaataaagataatttctttaaaatatca

SEQ ID NO: 769 - DNA, 6535 bp, Homo sapiens
  source 1..6535: mol_type = genomic DNA
tgctgatcgctcgtgccggtgcggccgttaaccgcccttgccggagccctaggctcaaaagcagccccttacccttcctgggcttcccccaacccctttcccggtctgccctggggcatgagcagcgatggccggctgcatccctgaggagaaaacttaccggcgcttcctggagctattcctgggcgagtttcgcggaccgtgcggcggcggcgagccggagccggaacccgaacccgaacccgaacccgaacccgagtccgagcccgagcccgaacctgaactggtagaagctgaggcggccgaggcttcggtagaggaacccggggaggaggcggccacggtagccgcgacggaggagggggaccaggagcaagacccggagcccgaggaggaggcggcggttgagggtgaggaggaggaggagggcgcggcgacggcggcggcagccccggggcactcggccgtgccgccgccgccgccccagctgccgcctttgcccccgctcccgcgaccgctgtcagagcgcatcacccgcgaggaggtggagggcgaaagcctggacctgtgcctgcagcagctctacaaatataattgcccttcctttttggctgctgctttagccagagccacatcagatgaagtccttcagagtgatctttctgcacattatatcccaaaggaaacggatggcacagaagggactgtggagattgagacagtgaaattggcccgttctgtcttcagcaaactacacgagatttgctgcagctgggtgaaagacttccccctccgcaggagaccccagctttattatgagacatcaatccatgccatcaaaaacatgcgcaggaaaatggaggacaaacatgtctgcattcctgactttaatatgctcttcaacctagaggaccaggaagaacaagcttactttgcagtgtttgatggccatgggggagtagatgctgctatttatgcctccattcacctccacgttaacttagtccgccaggagatgttcccccatgatcctgctgaggccctgtgcagggccttccgggtcactgatgagcggtttgtgcagaaagcagccagggagagcttaagatgtgggaccacaggagtggtgactttcatcagaggcaacatgctacatgtggcctgggtgggtgattcccaggttatgcttgtgagaaagggccaagctgttgaactaatgaagccacacaaaccagacagagaggatgaaaagcagagaattgaggcccttggaggttgcgtagtctggtttggtgcctggagggtgaatggaagtctgtcggtttccagagctattggagatgctgaacataagccatatatctgtggggatgcagattctgcctccactgttctggatgggaccgaagactacctcattctggcctgtgatggcttctatgacaccgtgaaccctgatgaggcagtgaaagttgtgtccgaccacctgaaagagaataatggagacagcagcatggttgcccacaaattagtggcatcagctcgtgatgctgggtcaagtgataacatcacggttattgtggtattcctgagggacatgaacaaagctgtaaatgttagtgaggaatcagattggacagagaactcttttcaaggagggcaagaagatggtggggatgataaggagaatcatggagagtgcaaacgcccttggcctcagcaccagtgctcagcaccagccgacctaggctatgatgggcgtgtggattcattcactgatagaactagcctgagcccagggtcccaaatcaacgtgctggaagacccaggctacctagatctcacacaaatagaagcaagcaaacctcacagtgcccagtttttgctaccagttgagatgtttggtcctggtgcaccaaagaaagcaaatcttattaatgagttaatgatggagaaaaaatcagttcagtcatcattgcctgaatggagtggtgctggagagtttcccactgctttcaatttgggttcaacaggggagcagatatacagaatgcagagcttgtctcctgtctgttcagggttggaaaatgaacagttcaaatccccgggaaacagagtttctagattgtctcatttacgccaccactactcaaagaagtggcacagattcaggtttaatccaaagttttattcatttctctctgctcaagagccttcccacaaaataggcactagcctgtcctcacttactggaagtgggaagagaaataggataagaagttctctgccatggaggcaaaatagttggaaagggtacagtgaaaacatgaggaagctcagaaagactcatgatattccatgcccagatcttccttggagctataaaatagaataatttttctttcaagtaggttagctagctctcccccaataaaaataccactatcagagtagaaacaaggtagacatttctaaaacatatgtgcttcattatgaatccatggatggctcaattcttaaatgtaaatagatctctaggaaactcaaagtacagtgttttcaatctaaaaagaagtattggcagtttcacttgcaaaattacacagctggtccctgtgatgtgtctcgacaccaatacacaacccccttcccaccatccttcatgtcactagatacacaacccccttcccaccatcccttcagtcactagtggaagctttcaagttagttatttcagtcaggatatacagtgttgaaatctcaatgcagttgaaatctggtctgatgtgcctaatttatctgtggaaaatttaatgctgaattacatttggttgggaaatgtccctcaaaatcctgggcactatgaaggaaccccctgccccctcacctttttgggtaggtaaaagactaaaagccatatggattttaactgataacaatgaaagtggtaaatcagtgtaaaagtgtcatattctcagacttgtgaggcggtttatagtcagaaagatttacggatttttttcctgtaacataaaagattgtgaactttttttaattaaaaaatatttcctagggctgtagttatttgggagtttcataacctgttatggtgcttttggtggaaatttttattatttagcattttaggagaccgctgtcaactggttttaatctatgatgctaatgtgttttccactgtaccctcatctcaggaataaaactgctttaacggagatgatgtcaggtacaaatacactatagagtcaaaataccatttacaaagaaaatcaaaagcatttctatattttgtctttttttagttcagacagcaaaggcatgtactactataaaatacaaagtgattttagagaatgaaaaatgctacttttatcttctctaaaattatttcccccaaggtagtgaagtaattggaatgaaggaggctgaaagtattgtctaaagtgagcccagaggccactgagaatgcagattactgacagccaggtctgtttagttgtaattggaagacacatgagtgtcctgcttacatgtagcttcagactgcagagacaggacgtgtgcttttcatttcaatatttagttatatttgatattttgaaactgtctgctttttgctatttctgcagtttcaagttagttagaagcatgttgtcaactaaagacaacaaactatcagattcattcattcagtgaagcagcctctgattctctaagagtcacgaatgtcttagtgttaccctcccctagtcaacagcagaccagcctggccaatgcctatgggtggcccctctggagtgctcactaacaagggtgagtgctctcgctaagaagtgtcccccgcctaatcatgtgtttataggatagtacacgttccccaggcccataacagaggactaaaatctctgaattttaaagacacagatgactggcatattttggataccagtatagctatatcaaatagacaaaaacagcttcactttagcaatgatcagattgttaatctacagattttattttttaaaatttggatgtaagtagagactttcagtatttgttttctcttgattttgaagtcatttcttcttctcacgtctgtgacaaatggttgaaaaggagtcaacatggccccaactatagtgccggaaccttttcatcattctgaggctttgccccacacatggtcctcactcatatctgtcaccttctgaagcctagatcttgttaacccatcaggtgcagtgtcagtttcaaatcaaattatctaagaaaacaagaaaacaaaggcagcagactattggtacacattatagtccaaagtgcttagcgaagtaaaaaaaaaagctttttaaaatttctattgttgtctattggtaatgtttttgatcagaataaagagggtaaagggaaaaagttactacacatgctaggctttctcagtggggaaaaaaatggctggatagaactgggacaaacacagacccatctttaggggtctggattttgtaggtccgactacacagcagtgttaactcatttctcatgccattagctctctacaaaataaagcaaagtagttctagtgtggtcgttataaaccaatattgtgaaaaatagcaactattcatttgttcacaacatgcgtatttatagagtagttaggtaccatttgtaaggtaaatcctttaaaattctataatacatactaaaatagtggttattggtctgatatatgctgctcttggttctataaactagataaaagcagtgctttgtgaaatgcagtgttctctcttaacgccactggtgataggaagtagttcccttcagttcaaatcctgtgcccttatttgctgcttgctgacgtaagcaataagtaaccctctaactaatggtatctacatatttctgtaacttgtatttaatgatggtgtacctggtgattgtaaaaatattagacagatataaaagtatctatataatatctataaactgttaatgctgaggtatagtctgtgaattatgtgttttgtatttttattcattgtgtaatttagtggtggtgaaagttctacactcaatccttaaagagtggcagtatccctttttcaatttaacatggtctgcatcaatctgtttgcctgctaaacaagttagaataggaaatagtaaaataaatccaaacaagagtgtaatattggttagggaaacaaacttcaggtcaccaactgaagtcattacaaactccttgtacattcactgtgagtttcaaagggagtcagtccctaatttacaggtttcctttgttcactttctagatgtgtacttttgagggacatgaggttaggcaacattacagcaacacacactggggctattaatcccatttaggtctgtactaaagaggatgggtagaaacacatatgtatataccttttctttacctagaagtgccatccattgtccttgaattattatgattaaagttactgttgcatttaggaggctccttgaaagtaacaccttttccaaggacaatggcaacaatgtcaatgtcaacactgagtctaattttgaccacatttatagtggtatagtgtcaatactgcattttcatgacaaccacactccactgttgaaacactgtgccagtgagaagtgcaacatccagtgggcagatgaaaatgatgcatggccaagttcagtgtttacagataaaactgctgtggttcaagtgcttccttccccatcaaatccttgataaggctttgtgggaaaatgatctaaattattgttttaatttttaaacctaatttattcactcagtgaacattcttacctaagcaaggctataaaagggaatactacagttttgtccacactttaatttgagaccatttttctttgaatcgtaagttagcaaaagaaatttttttcacctttgaaaatcacgtgatgttaaaggacaaatgcccactcttctattctgatctgcaaatagcttaaatgtctcttgcaaaacaaagtaagataccaccagtattacaacacaatgattttccagacaaatggtatggtgttgaaaaataactgttacttcttaaagcagcattttatcttctattttgaagactatttattgtaataattagaaaacatgaaatagggaactccagactgacacagcagttgtttttgaaaaggaaataaactttgatgaattagataatccagatacatcattgtaaactcttactctaggtgctctttggtgagagacaggctttgttctcttgttcataacatttctctgcaaagaattctctatggagtgaagcgaatgaagtgaataatttcttaccaaataaatttatcaatttacaaatctgctctacatctcacttttgagttcagttgtagtcatgagtgatccttcatattttattaaaagtgttcattcaggtaaggtgtatgttgaaattttgccaattatcttaataaaacctggcaattt

SEQ ID NO: 770 - DNA, 1829 bp, Homo sapiens
  source 1..1829: mol_type = genomic DNA
gaggcgcgtgtggaagcgcttccgggcggtagcacgctgtgttggcggcggctccccgcttgcctcagctgcagcagcgggaagctcggtggcaagcccttgtagtcctgtgcgatggcgtctcgatatgacagggcgatcactgtcttctccccagacggacacctttttcaagttgaatatgcccaggaagcggtgaagaaaggatccaccgcggtcggaattcgaggtaccaatatagttgttcttggggtagaaaaaaaatctgttgccaagcttcaagatgaaagaactgtgaggaaaatttgtgcccttgatgaccatgtctgcatggcttttgcagttttgacaatttttataggacttactgctgatgctagagtagtaataaacagagcccgtgtggagtgccagagccataagcttacggttgaggacccagtcactgtagaatacataactcgcttcatagcaactttaaagcagaaatatacccaaagcaatggacgaagaccttttggtatttctgccttaattgtaggttttgatgatgatggtatctcaagattgtatcagacagatccttctggtacttatcatgcttggaaggcaaatgcaataggccgaagtgctaaaactgttcgagaatttctagaaaagaattacacagaagatgccatagcaagtgacagtgaagctatcaagttagcaataaaagctttgctagaagttgtccagtctggtggaaaaaacattgaacttgctataataagaagaaatcaacctttgaagatgtttagtgcaaaagaagttgaattatatgtaactgaaatagaaaaggaaaaggaagaagcagagaagaaaaaatcaaagaaatctgtctaattcttaggatgaccactgggaggtcttaatgttttgttttattgtactgcctgaggttgtttagtgaaattttagaggaaaacagttattttgcagcattacatgcagtacttgtgtgatgttttgagaatgccagatctgtggctgtcttcattctattacatagtcaaacataggtttatgtgaagattttctttgaaaggggatttcagtaattgttgagagcagtcataattccacataagcctgagactctataatttgtccagtgtcttacttaccttcatatatgcaaatataattttaaaaaattttttaattaaaaaaatttaataatttggtgatgtttgaatattgactgtcagttaaggacatagctattccaaataaactaaatataatattgagctgcatttctcaaagaatgacaaaagcatccttatactgatgagttcttaaaattttgtcagagccttcttcattttacaatattttgttatttttattttacctttttcattttacaatatttcgttatttttattttacctttttcattttacaagttgcaatatattgtttcgttcatggaacaaatataggctgaattcaaacatgcaattaaagcatgggaagagcttctaagggcatcttaacaggatgctacatgaaaataaggaaagaaattaatacatatcacttttagtttagatttttattttatctcaagtatgtccagtgtgttcggtttgttacatattccatgaaatatctgagtgtgtattttatgattggtattatggaaggcttattgggggaacaagaaaaatataaaaagtgatctctgcccacggaaaggatttaatccaaatggtccacaagaggaatgtgcttaattcctacagtgagtttatatttttgaaaataaaagctagtaaatattc

SEQ ID NO: 771 - DNA, 4595 bp, Homo sapiens
  source 1..4595: mol_type = genomic DNA
gctcgggaaaggggttcggaaccggtctaggctcaagttaaatctccctctaaagagccaacactggtttctttggcgactcggtttctactctaaacaggtcccgctccacagtctgggcgggcctgtgtgtgcgttgagtagcctctagcgtgaaaacttcatggttaaaagggaagtaccggaggcaagaaatagctttcgaggcactggtttgttagagtagtggtacgtagtgcgccgccctgaacgggggctgagacgctgcttttccagaagtgccagtgaggacgtggcaagaccgcctcggacgtacgcttcctctacctcagcccgtcgggttaggggcgcgggaggcgcagaggctgctgggaacgcgcatgcgctcagcgcggcggggagtccacctttaacgtccgcgggcgcggggtgtgtcgggtgtcgacggcggcgctttgcggccggtcgtgcgggtcgggcgcgggcgggcgcggcggcagtggcgcgcacaggtgattgactggccagctgcctgaaggagcgccaggtcctccttgctggcaggtggcgaagcccattggggcggcggtgcagaccgcggcggcggctgcggcggtctggctcgggaggcgttcctggggccaaggccatggccccgcggctgcagctggagaaggcggcctggcgctgggcggagacggtgcggcccgaggaggtgtcgcaggagcacatcgagaccgcttaccgcatctggctggagccctgcattcgcggcgtgtgcagacgaaactgcaaaggaaatccgaattgcttggttggtattggtgagcatatttggttaggagaaatagatgaaaatagttttcataacatcgatgatcccaactgtgagaggagaaaaaagaactcatttgtgggcctgactaaccttggagccacttgttatgtcaacacatttcttcaagtgtggtttctcaacttggagcttcggcaggcactctacttatgtccaagcacttgtagtgactacatgctgggagacggcatccaagaagaaaaagattatgagcctcaaacaatttgtgagcatctccagtacttgtttgccttgttgcaaaacagtaataggcgatacattgatccatcaggatttgttaaagccttgggcctggacactggacaacagcaggatgctcaagaattttcaaagctctttatgtctctattggaagatactttgtctaaacaaaagaatccagatgtgcgcaatattgttcaacagcagttctgtggagaatatgcctatgtaactgtttgcaaccagtgtggcagagagtctaagcttttgtcaaaattttatgagctggagttaaatatccaaggccacaaacagttaacagattgtatctcggaatttttgaaggaagaaaaattagaaggagacaatcgctatttttgcgagaactgtcaaagcaaacagaatgcaacaagaaagattcgacttcttagccttccttgcactctgaacttgcagctaatgcgttttgtctttgacaggcaaactggacataagaaaaagctgaatacctacattggcttctcagaaattttggatatggagccttatgtggaacataaaggtgggtcctacgtgtatgaactcagcgcagtcctcatacacagaggagtgagtgcttattctggccactacatcgcccacgtgaaagatccacagtctggtgaatggtataagtttaatgatgaagacatagaaaagatggaggggaagaaattacaactagggattgaggaagatctagcagaaccttctaagtctcagacacgtaaacccaagtgtggcaaaggaactcattgctctcgaaatgcatatatgttggtttatagactgcaaactcaagaaaagcccaacactactgttcaagttccagcctttcttcaagagctggtagatcgggataattccaaatttgaggagtggtgtattgaaatggctgagatgcgtaagcaaagtgtggataaaggaaaagcaaaacacgaagaggttaaggagctgtaccaaaggttacctgctggagctgagccctatgagtttgtctctctggaatggctgcaaaagtggttggatgaatcaacacctaccaaacctattgataatcacgcttgcctgtgttcccatgacaagcttcacccggataaaatatcaattatgaagaggatatctgaatatgcagctgacattttctatagtagatatggaggaggtccaagactaactgtgaaagccctgtgtaaggaatgtgtagtagaacgttgtcgcatattgcgtctgaagaaccaactaaatgaagattataaaactgttaataatctgctgaaagcagcagtaaagggcagcgatggattttgggtggggaagtcctccttgcggagttggcgccagctagctcttgaacagctggatgagcaagatggtgatgcagaacaaagcaacggaaagatgaacggtagcaccttaaataaagatgaatcaaaggaagaaagaaaagaagaggaggaattaaattttaatgaagatattctgtgtccacatggtgagttatgcatatctgaaaatgaaagaaggcttgtttctaaagaggcttggagcaaactgcagcagtactttccaaaggctcctgagtttccaagttacaaagagtgctgttcacagtgcaagattttagaaagagaaggggaagaaaatgaagccttacataagatgattgcaaacgagcaaaagacttctctcccaaatttgttccaggataaaaacagaccgtgtctcagtaactggccagaggatacggatgtcctctacatcgtgtctcagttctttgtagaagagtggcggaaatttgttagaaagcctacaagatgcagccctgtgtcatcagttgggaacagtgctcttttgtgtccccacgggggcctcatgtttacatttgcttccatgaccaaagaagattctaaacttatagctctcatatggcccagtgagtggcaaatgatacaaaagctctttgttgtggatcatgtaattaaaatcacgagaattgaagtgggagatgtaaacccttcagaaacacagtatatttctgagcccaaactctgtccagaatgcagagaaggcttattgtgtcagcagcagagggacctgcgtgaatacactcaagccaccatctatgtccataaagttgtggataataaaaaggtgatgaaggattcggctccggaactgaatgtgagtagttctgaaacagaggaggacaaggaagaagctaaaccagatggagaaaaagatccagattttaatcaaagcaatggtggaacaaagcggcaaaagatatcccatcaaaattatatagcctatcaaaagcaagttattcgccgaagtatgcgacatagaaaagttcgtggtgagaaagcacttctcgtttctgctaatcagacgttaaaagaattgaaaattcagatcatgcatgcattttcagttgctccttttgaccagaatttgtcaattgatggaaagattttaagtgatgactgtgccaccctaggcacccttggcgtcattcctgaatctgtcattttattgaaggctgatgaaccaattgcagattatgctgcaatggatgatgtcatgcaagtttgtatgccagaagaagggtttaaaggtactggtcttcttggacattaatctttgaatacttgctgactgctaagaaatgaccagaggggaagaggagtttgacatgttagggcattaaagcaaaggtggatttaagaattaaaccattacatgccccttccaaaaggcagaaatccattcaaacgtgactgtcccaaatgccttatgtcaaataaagcagattgcactgatggacatcagacttgaaggaaatgtttccaattttatatttaaggggggtggtgggtgggagggggcaagtaaagacggaacaagtttagtagcagtaatagtaaatcatgtttacatatgagatttatagtcgtgggaggggaataaagttctgttatatttccttgctcgagtttcataccagatgcgttggtccataaaggattgtatcaagtagatgggacaacattctgctctgaacgaaaagtaattttagagacataacctgcttaccaatgcctgtctttgattcatattctactttcaataaagcatgaaagtgaagaacttgtcctaagtgtggaaaagtgtcttcagatttagactcttctccatgtcagctgcagcgccacccgccttacacctgcccggccgtctgtctcttggtattgggtaaaggagggggcacctgcatgtctcctgcaatgagcaaggaattatgtctcatgttttgacttcagaggctttttgctttggtgcatttcagaaaggatggagaacatttattatgtgtgaaagcatcctcttccggttttgctgttattcaaaagtgggaaatgtacctggcacgtttgaaaataaaaaatctgactacctatcagaagagtaaatcaga

SEQ ID NO: 772 - DNA, 4397 bp, Homo sapiens
  source 1..4397: mol_type = genomic DNA
gtcggtgcctgcagggctctccgtggccgctcgggagaggtgctcttcgctcaggctcccccggagacttgagggggtgcgcgctggcgtgcatggggcctgttctgtccttggtttggggatgctcctaaggggggagaaagggatacctcgggtgcttggaggtcgagagacggatacgtaagtgcgcaagggccactgattagggcacgggaagggctcgctagaatgagctcttaaactggttgggtgtaagcggttttgggctagtctaaaccaaacaactgagaataaacgcggggttcctgcaggttgagagagtacctgtctgcaaatgtccagtagtgatggattgccttgtaggccccagagcaatcggggaagttagcattcttgttcaagaagctgctggttcacttagagctataaaagaatgttgtgagtttggattttcttccaaacgttcaggattgaggttagggctggtggtgagggatcatgtaaagaggtttgagtggctcagccttaggtcccggtgtggaaagcttattcttttggtgtcatcacgtggccgtgggaattatttagaatgtgatctgccctcatgagaagaaaggagctctgaagccgttgcagttcttcctccctatgtggaaaatcgaatttctggaaacatcctccgtattgggagattttgcctatgtaaaggctatccttattggctagcggcactaattactttaaaagtaggatggaagtacaagtatctcaagcatcattgggtttcgagctcacttctgtggaaaagagtttaagggagtggtctagactttccagggaagttattgcctggctgtgtccctctagtcctaattttatacttaactttcccccacctccttcagcctcatctgtttcaatggtgcaactcttttcatccccttttggttaccagtcaccttcaggccattcagaggaggaaagagaggggaatatgaagtcagccaagccccaagtgaaccacagtcagcatggggaaagccagcgggccttgagccccctgcagtctactctgagttctgctgcatctccttcccaagcgtatgagacctatattgaaaatggactcatatgccttaaacacaaaattagaaacatcgagaaaaagaagctcaaactggaggattataaggatcgcctgaaaagtggagagcatcttaatccagaccagttggaagctgtagagaaatatgaagaagtgctacataatttggaatttgccaaggagcttcaaaaaaccttttctgggttgagcctagatctactaaaagcgcaaaagaaggcccagagaagggagcacatgctaaaacttgaggctgagaagaaaaagcttcgaactatacttcaagttcagtatgtattgcagaacttgacacaggagcacgtacaaaaagacttcaaagggggtttgaatggtgcagtgtatttgccttcaaaagaacttgactacctcattaagttttcaaaactgacctgccctgaaagaaatgaaagtctgagacaaacacttgaaggatctactgtctaaattgctgaactcaggctattttgaaagtatcccagttcccaaaaatgccaaggaaaaggaagtaccactggaggaagaaatgctaatacaatcagagaaaaaaacacaattatcgaagactgaatctgtcaaagagtcagagtctctaatggaatttgcccagccagagatacaaccacaagagtttcttaacagacgctatatgacagaagtagattattcaaacaaacaaggcgaagagcaaccttgggaagcagattatgctagaaaaccaaatctcccaaaacgttgggatatgcttactgaaccagatggtcaagagaagaaacaggagtcctttaagtcctgggaggcttctggtaagcaccaggaggtatccaagcctgcagtttccttagaacagaggaaacaagacacctcaaaactcaggtctactctgccggaagagcagaagaagcaggagatctccaaatccaagccatctcctagccagtggaagcaagatacacctaaatccaaagcagggtatgttcaagaggaacaaaagaaacaggagacaccaaagctgtggccagttcagctgcagaaagaacaagatccaaagaagcaaactccaaagtcttggacaccttccatgcagagcgaacagaacaccaccaagtcatggaccactcccatgtgtgaagaacaggattcaaaacagccagagactccaaaatcctgggaaaacaatgttgagagtcaaaaacactctttaacatcacagtcacagatttctccaaagtcctggggagtagctacagcaagcctcataccaaatgaccagctgctgcccaggaagttgaacacagaacccaaagatgtgcctaagcctgtgcatcagcctgtaggttcttcctctacccttccgaaggatccagtattgaggaaagaaaaactgcaggatctgatgactcagattcaaggaacttgtaactttatgcaagagtctgttcttgactttgacaaaccttcaagtgcaattccaacgtcacaaccgccttcagctactccaggtagccccgtagcatctaaagaacaaaatctgtccagtcaaagtgattttcttcaagagccgttacaggctacttcttctccagttacttgtagctcaaatgcttgcttggttactaccgatcaggcttcttctggatctgaaacagagtttatgacctcagagactcctgaggcagcaattcccccaggcaagcaaccgtcttcactagcttctccaaatcctcccatggcaaagggctctgaacagggcttccagtcacctccagcaagtagtagttcagtaaccattaacacagcaccctttcaagccatgcagacagtatttaacgttaatgcacctctgcctccacgaaaagaacaagaaataaaagaatccccttattcacctggctacaatcaaagttttaccacagcaagtacacaaacaccaccccagtgccaactgccatctatacatgtagaacaaactgtccattctcaagagactgcaaattatcatcctgatggaactattcaagtaagcaatggtagccttgccttttacccagcacagacgaatgtgtttcccagacctactcagccatttgtcaatagccggggatctgttagaggatgtactcgtggtgggagattaataaccaattcctatcggtcccctggtggttataaaggttttgatacttatagaggactcccttcaatttccaatggaaattatagccagctgcagttccaagctagagagtattctggagcaccttattcccaaagggataatttccagcagtgttataagcgaggagggacatctggtggtccacgagcaaattcgagagcagggtggagtgattcttctcaggtgagcagcccagaaagagacaacgaaacctttaacagtggtgactctggacaaggagactcccgtagcatgacccctgtggatgtgccagtgacaaatccagcagccaccatactgccagtacacgtctaccctctgcctcagcagatgcgagttgccttctcagcagccagaacctctaatctggcccctggaactttagaccaacctattgtgtttgatcttcttctgaacaacttaggagaaacttttgatcttcagcttggtagatttaattgcccagtgaatggcacttacgttttcatttttcacatgctaaagctggcagtgaatgtgccactgtatgtcaacctcatgaagaatgaagaggtcttggtatcagcctatgccaatgatggtgctccagaccatgaaactgctagcaatcatgcaattcttcagctcttccagggagaccagatatggttacgtctgcacaggggagcaatttatggaagtagctggaaatattctacgttttcaggctatcttctttatcaagattgaaagtcagtacagtattgacaataaaaggatggtgttctaattagtgggattgaaggaaaagtagtctttgccctcatgactgattggtttaggaaaatgtttttgttcctagagggaggaggtccttacttttttgttttccttcctgaggtgaaaaatcaagctgaatgacaattagcactaatctggcactttataaattgtgatgtagcctcgctagtcaagctgtgaatgtatattgtttgcacttaatccttaactgtattaacgttcagcttactaaactgactgcctcaagtccaggcaagttacaatgccttgttgtgcctcaataaaaaagttacatgc

SEQ ID NO: 773 - DNA, 1513 bp, Homo sapiens
  source 1..1513: mol_type = genomic DNA
agggaggagccggaaactcagggcgcgaggcctgtgggcccagcggtgaggcagcagctgggggcggggggagggcggacctagcttcccagggcaggtgattcgtcggccccggtggcggcggcgcgtgcgacggtcacctcggtttggggaagatggaagagttgagtcaggccctggctagtagcttttctgtgtctcaagatctgaacagcacagctgccccacacccccgcctatcccagtacaagtccaagtacagttccttggagcagagtgagcgccgccggaggttactggaactgcagaaatccaagcggctggattatgtgaaccatgccagaagactggctgaagatgactggacagggatggagagtgaggaagaaaataagaaagatgatgaagaaatggacattgacactgtcaagaagttaccaaaacactatgctaatcaattgatgctttctgagtggttaattgacgttccttcagatttggggcaggaatggattgtggtcgtgtgccctgttggaaaaagagcccttatcgtggcctccaggggttctaccagtgcctacaccaagagtggctactgtgtcaacaggttttcttcacttctgccaggaggcaacaggcgaaactcaacagcaaaagactacaccattctagattgcatttacaatgaggtaaaccagacctactacgttctggatgtgatgtgctggcggggacaccctttttatgattgccagactgatttccgattctactggatgcattcaaagttaccagaagaagaaggactgggagagaaaaccaagcttaatccttttaaatttgtggggctaaagaacttcccttgcactcccgaaagcctgtgtgatgtgctatctatggatttcccttttgaggtagatggacttctcttctaccacaaacagacccactacagccccggaagcactcccttggtgggctggctgcgcccctacatggtgtcagatgtccttggtgtagctgtgccggctggcccgctgaccaccaagccagactatgctgggcaccagctccagcagattatggagcacaagaagagccagaaggaaggcatgaaggagaaactcacacacaaggcctctgagaatgggcactatgaattggagcacctgtctactcccaagttgaagggttcttcccatagcccagaccaccctggatgcctcatggagaattaaagagagaagcctccttaaggagccacaggatggtacctggccccaaaaggaatcctggagaggaggacagtgacaacaggtgacttcattctttagagtgaactttccaaacccagtccagctggaaacagcttatctataatctgaaatgctggctcaaacagttatggggaggttcccagattgcgtagcattcagattgatttgagcagctcctactgtgataagtgtatcccagatccacaatgtaaatatatgtgatttgtaagaaagaa

SEQ ID NO: 774 - DNA, 2446 bp, Homo sapiens
  source 1..2446: mol_type = genomic DNA
ctcattcataaacctctaaagagagcaatcactacacttatggctgggattttgcgcttagtagttcaatggcccccaggcagactacagactgtgacaaaaggtgtggagtctcttatttgtacagattggattcgtcacaaattcaccagatcaagaattccagaaaaagtgtttcaggcctcacctgaagatcatgaaaaatacggtggggatccacagaaccctcataaactgcatattgttaccagaataaaaagtacaagaagacgtccatattgggaaaaagatataataaagatgcttggattagaaaaagcacatacccctcaagttcacaagaatatcccttcagtgaatgcaaaattgaaagtagttaagcatttgataagaatcaagcccttgaagttgccacaaggacttccagcagaggagaacatgtctaacacgtgcctcaaaagcactggggagttagtagtgcagtggcatctgaaacctgtggagcagaaagcacatgagtcctaatgccccagcagcttccgattggaaaatgcaaattgtttttatttaaagatggtgagaaagtgttttcattaaaatatgttttcaaaaccattttcaggccgggcacggtggctcacctgtaatcccagcactttgggaggccaaggcgggcagatcacctgaggtcaagagttcgagaccagcctgaccaacatggagaaacccccatctctactgaaaatacagaattagccaggcatggtggcacatgcctgtaacccagctactcgggaggctgaagcaggagaatcacttgaacccgggaggcagaggttgcagtgagctgagatggtgccactgtactccagcctgggtgataggatgagactccatctcaggggaaaaaaaaaaatttttttttcactgactaaacctgctgcagctctcttttactacagacttggagattttagtttaatttggtttaattctctgtcctttccctttcactgtttcactccaaaacatgtaagaatggcaatgtttgaacatctgcgtttgggtctactgccaccttagcaagcctcattaaccattttataaaaattgcgttagtattgttgttgttgtttttgagacagggtcttgctctgtcacccaagctggaatacagtggcatgatttcagttcactgcagcctcgacctcccaggctcaagtgatcctcccacctcagcctccagagtagctaggactacaggcagtgtgccaccacatccagctaattttttaaagttttttcatagagacagggactcactatgttgtccaagctggtctcaaactcctgggttcaagccatcctcccacctcagcctcccaaaatgctgggattacaggcatgagccactgtacccagccaaaattgttttcttttttaagtgaattcaacaatttctgtgagtggctctttgcatgaacactgtgcaaggtgttggagaaatccaaagctgaccaaaacatggtccccaccttttggagcttacagtctgttctggggaacagagattcagccaaagtcaagaaacactggatgccagctagattatctgttctgtgctttggtgtctataagtacatatgtggatatgggttcattttatccctaaacttagtaccaaaccagcatttaatatctaattataaatctaatttggcctaaactttattattgcacactgcctgaacaaaacctatttgtctctatgtaaattttttcctcatggaacaagggtgtgaaatgaaaatattttaggatttattcaaaaacagactattctgttttcagcttcagaattgttctttgaatcctaaggaacctctgtcaacagttgaggttgctgttgaaaagaaagaagaaggaggcggaaatctctcagggagaattatttcctttcttttctattttagatacctggaggggtggggagaagtaagaattgtaagggaggttcagtagtggggaattctgtgacagctgattgaagatgatgatgaagaacctctgcattctagttaccctttgcttcccttcacctcttgtaaaatttggcttggcaacaatgacattgtcatgcttattgtcccaatatccatcctgtcgtagatcttaatgtttttgatcgttgcgttaaagtggaagtgccacccacagtgaaaccagatcccattaataaataagcttaaaggcaactgcagttttaattccatagttattgaatatccagtgtgtgtaaggcctggaggggagccaaaggacactaacttctaagagctccgtctagttggagagaaacctgtgtgccacaacatacagtgtccttgcttatgtggggtcgaagacatctgtgaaaataaaagcagcctctgctaatttagcgcca

SEQ ID NO: 775 - DNA, 1699 bp, Homo sapiens
  source 1..1699: mol_type = genomic DNA
tcaggaagtcggcgtgtcgagtggctcttcctggctgctgaggcgggttaaggtctgagggtcttgtggggccacggcgctgatcaccaggtgtttggcttggtcggttcttatttctcgcctggcaatggcgacgtacacctgcataacttgccgggtggcgttccgcgacgcggacatgcagcgggcccactataagacggactggcaccgctacaacctgcggcggaaggtggccagcatggccccagtgaccgccgagggcttccaggagcgagtgcgggcgcagcgggccgtcgcggaggaggagagcaagggctcggccacctactgcaccgtttgcagtaagaagtttgcctctttcaacgcctacgagaaccacctcaagtcccggcgtcacgttgagctggagaagaaggccgtgcaggcagtgaatcggaaagtggagatgatgaatgaaaagaacttggagaaaggactgggcgtggacagtgtggacaaggatgccatgaacgcggccatccagcaggccatcaaggcccagccgtccatgtctcccaagaaggcgcccccagcgcctgcaaaggaggccaggaatgtcgtggccgtgggtactggtggccgtgggacccacgaccgagacccgagtgagaaaccaccccggctccagtggtttgaacagcaggcgaagaagttggcaaagcagcaggaggaggacagcgaggaggaggaagaggacctggatggagacgattgggaagatattgattctgatgaagaattggaatgtgaggatactgaagcaatggacgatgtggtggagcaggatgcagaggaggaagaggctgaggaaggcccaccccttggtgccatccctatcacggactgcttattttgttcccatcattccagctcgctgatgaagaatgtggctcacatgaccaaagaccacagtttctttattcctgatatagaatatctttcagatattaagggactgattaaatacttgggagagaaagttggtgttggcaagatttgcttgtggtgcaacgagaaagggaagtccttctactccacagaagctgtacaggcacatatgaatgacaaaagccactgtaagctcttcacagatggcgatgctgctttggaatttgcagacttctatgattttaggagtagctatccagatcacaaggaaggggaggaccccaataaggctgaggagttgccctcagaaaagaacttggaatatgatgatgaaaccatggaattgattctgccttctggtgccagagtgggtcatcgctccttgatgagatactacaaacagcgatttggcttgtcaagagctgtggcagttgccaaaaatcggaaggccgtgggccgagtacttcagcagtacagagccctgggatggactggcagcacaggagcggctcttatgcgagagcgagacatgcagtatgtccaaaggatgaaatcaaaatggatgctgaagacaggaatgaagaacaatgccaccaagcagatgcactttcgggtccaagtgagattctgagagtctgctgggattgagcaatcatctcctgcccaagtttcctccttgccctgaggaccagtgaaagacagatcataggagagacccttttgctgctacttcattcgttctgacctaataataaaagttagaaccata

SEQ ID NO: 776 - DNA, 3326 bp, Homo sapiens
  source 1..3326: mol_type = genomic DNA
ggggtcctggcgagaagcgagccggcggcctgaggaggcgactgactgagcagcgcacccggggagcaaggaggcgcggtgaactgagcggcccctgagctgacagatacactgcgcagctggaacggcgagcgagccgacgggcgagtgaggggcgcagccatgatcacctcggccgctggaattatttctcttctggatgaagatgaaccacagcttaaggaatttgcactacacaaattgaatgcagttgttaatgacttctgggcagaaatttccgagtccgtagacaaaatagaggttttatacgaagatgaaggtttccggagtcggcagtttgcagccttagtggcatctaaagtattttatcacctgggggcttttgaggagtctctgaattatgctcttggagcaggggacctcttcaatgtcaatgataactctgaatatgtggaaactattatagcaaaatgcattgatcactacaccaaacaatgtgtggaaaatgcagatttgcctgaaggagaaaaaaaaccaattgaccagagattggaaggcatcgtaaataaaatgttccagcgatgtctagatgatcacaagtataaacaggctattggcattgctctggagacacgaagactggacgtctttgaaaagaccatactggagtcgaatgatgtcccaggaatgttagcttatagccttaagctctgcatgtctttaatgcagaataaacagtttcggaataaagtactaagagttctagttaaaatctacatgaacttggagaaacctgatttcatcaatgtttgtcagtgcttaattttcttagatgatcctcaggctgtgagtgatatcttagagaaactggtaaaggaagacaacctcctgatggcatatcagatttgttttgatttgtatgaaagtgctagccagcagtttttgtcatctgtaatccagaatcttcgaactgttggcacccctattgcttctgtgcctggatccactaatacgggtactgttccgggatcagagaaagacagtgactcgatggaaacagaagaaaagacaagcagtgcatttgtaggaaagacaccagaagccagtccagagcctaaggaccagactttgaaaatgattaaaattttaagtggtgaaatggctattgagttacatctgcagttcttaatacgaaacaataatacagacctcatgattctaaaaaacacaaaggatgcagtacggaattctgtatgtcatactgcaaccgttatagcaaactcttttatgcactgtgggacaaccagtgaccagtttcttagagataatttggaatggttagccagagccactaactgggcaaaatttactgctacagccagtttgggtgtaattcataagggtcatgaaaaagaagcattacagttaatggcaacataccttcccaaggatacttctccaggatcagcctatcaggaaggtggaggtctctatgcactaggtcttattcatgccaatcatggtggtgatataattgactatctgcttaatcagcttaagaacgccagcaatgatatcgttagacacggtggcagtctgggccttggtttggcagccatgggaactgcacgtcaagatgtttatgatttgctaaaaacaaacctttatcaggatgatgcagtaacaggggaagcagctggcctggccctaggtttggttatgttgggctctaaaaatgctcaggctattgaggacatggttggttatgcacaagaaactcaacatgagaagattctgcgtggtcttgcagttggcatagctttagtaatgtatgggaggatggaagaggctgatgctctcattgaatctctctgtcgtgacaaggacccaattcttcgaaggtctggaatgtatactgtagccatggcttattgtggctctggtaacaacaaagcaattcgacgcctgctacatgttgctgtaagtgatgttaatgatgatgtcaggagggcagcagtagaatcacttgggttcattctattcagaacccctgaacagtgcccaagtgttgtctctttgttgtcagagagttacaaccctcatgtgcgctacggagctgcaatggccttggggatatgctgtgctggtacaggaaacaaggaagccattaatttgctagaaccaatgacaaacgaccccgtgaactacgtgaggcaaggggcactcatagcttcagctctcatcatgatccagcagactgaaatcacttgtccaaaggtgaatcagttcagacagctgtattccaaagtcatcaatgataagcatgatgatgtcatggccaagtttggcgctattctggcccagggcatactggatgcaggtggtcataatgtcacaatctccttgcagtccaggactgggcatactcatatgccttctgtggttggcgtccttgtatttacccagttttggttctggtttcctctttcacacttcctgtcattggcttatacccctacctgtgtcattggccttaacaaggacttaaagatgccgaaagttcagtataaatcgaactgtaaaccatccacatttgcatatcctgcccctctggaagtaccaaaagaaaaagaaaaggaaaaggtttctactgctgtattatctataactgccaaggctaaaaagaaggaaaaagaaaaggaaaaaaaggaggaggagaaaatggaagtggatgaggcagagaaaaaggaggaaaaagagaagaaaaaagaacctgagccaaacttccagttattggataacccagcccgagttatgcctgcccagcttaaggtcctaaccatgccggagacctgtagataccagcctttcaaaccactctctattggaggcatcatcattctgaaggataccagtgaagacattgaggagctggtggaacctgtggcagcacatggcccaaaaatcgaggaggaggaacaagagccagaacccccagaaccatttgagtatattgatgattaagggccagaggatctcacttgcttatctgaagaagattgtccaggctcatattgggaatgcttatgaggaaattcatgccgagacctgctattcaatgcatgtatcgttgcctctgcactgacctgaagaaccctgtctccaagtctttggttgaagagaagatatatgactgttgagtgtgctctttcacagaacttggttttcaaataaatataagatctccagatggacaagacatttgtttttcagcctgggtttttaataaatgtatctaatcctccccacaccatgaaatgcctaaa

SEQ ID NO: 777 - DNA, 1665 bp, Homo sapiens
  source 1..1665: mol_type = genomic DNA
ctcttttcaggctgagtcctaaacctgaagaaagtttagagcctggggctctaaactacctgagtctttccaaacgacaagccaagaagacctgttgaaagtttcctcttaagtttcgtggagagagactcaggtatagaaatatccttactgccacctgacctgaagcagaagaaatcacagacagcttccagaccaggcccaacatgtgtagcaccagtgggtgtgacctggaagaaatccccctagatgatgatgacctaaacaccatagaattcaaaatcctcgcctactacaccagacatcatgtcttcaagagcacccctgctctcttctcaccaaagctgctgagaacaagaagtttgtcccagaggggcctggggaattgttcagcaaatgagtcatggacagaggtgtcatggccttgcagaaattcccaatccagtgagaaggccataaaccttggcaagaaaaagtcttcttggaaagcattctttggagtagtggagaaggaagattcgcagagcacgcctgccaaggtctctgctcagggtcaaaggacgttggaataccaagattcgcacagccagcagtggtccaggtgtctttctaacgtggagcagtgcttggagcatgaagctgtggaccccaaagtcatttccattgccaaccgagtagctgaaattgtttactcctggccaccaccacaagcgacccaggcaggaggcttcaagtccaaagagatttttgtaactgagggtctctccttccagctccaaggccacgtgcctgtagcttcaagttctaagaaagatgaagaagaacaaatactagccaaaattgttgagctgctgaaatattcaggagatcagttggaaagaaagctgaagaaagataaggctttgatgggccacttccaggatgggctgtcctactctgttttcaagaccatcacagaccaggtcctaatgggtgtggaccccaggggagaatcagaggtcaaagctcagggctttaaggctgcccttgtaatagacgtcacggccaagctcacagctattgacaaccacccgatgaacagggtcctgggctttggcaccaagtacctgaaagagaacttctcgccatggatccagcagcacggtggatgggaaaaaatacttgggatatcacatgaagaagtagactgaaatatcagatttgtcatcaggaatactctttgtctactgtggtcctgtgcacgttggcctcagatggactacaggagattacaacgtacaaggcagatggagcattgacgttttcaaaaccattattcctgtgactggagaggcatcaggagaggtctcgttcgtctccagctcataaaatgtagcagcatcatccttgacagtgatgtttttcaggccctccattgagaacctgaggaaatctgtaaagataagtggtgatgttgtttcaaacgttcagaacagataccatcatcctgcctttgttagctgctgtagggaaagtgcgttacagatgtctgctgacctcacaagagtgaaaagataaactgtgcatgtgtttccacttccgtttctagtactatttatttttaaactacacttggggtggcctaatacctaggaagatgttgctattcacgttagtaaacagcct

SEQ ID NO: 778 - DNA, 3843 bp, Homo sapiens
  source 1..3843: mol_type = genomic DNA
gttggagcggcgctgctcggccgcggacacacgagggacgcgcccgaggagctgcaggtggcagcccaggcggtccgaacccgtcggccggccgagcctggagtattgcctaagtgtaatcttgaacatgggcggtgctgtgagtgctggtgaagacaatgatgagctgatagataatttgaaagaagcacagtatatccggactgagctggtagagcaggctttcagagctatcgatcgtgcagactattatcttgaagaatttaaagaaaatgcttataaagacttggcatggaagcatggaaacattcacctctcagccccgtgcatctactcggaggtgatggaagccctagatctgcagcctggactctcgtttctgaacctgggcagtggcactgggtatctcagctccatggtgggcctcattctaggtccttttggtgtgaaccatggggtggaacttcactcagatgtgatagagtatgcaaagcagaaactggacttcttcatcagaacaagtgatagttttgacaagtttgacttctgtgaaccttcctttgttactgggaattgcctggagatttctccggattgttctcagtatgatcgtgtatactgtggggctggcgtgcagaaagagcatgaagagtacatgaagaatcttctcaaagtgggagggatccttgtcatgccactggaagagaagttgactaagataacacgcacaggtccttcagcttgggaaaccaaaaagattcttgctgtttcttttgctcctctgatccagccctgccattcagagtcaggaaaatcaagacttgtccagttaccaccagtggcagttcgcagcctccaggacttggctcgcatcgccatccggggcaccattaaaaagattattcatcaggaaactgtgagcaaaaacggaaacggactaaagaacacccccaggtttaaacgaaggagagttcgccgccgtcgaatggaaacgattgtctttttggacaaagaagtctttgccagtcggatttccaacccctcagatgacaacagctgtgaagacttggaagaggaacggagggaagaagaagagaagaccccgccggaaacaaagccagaccccccagtgaacttcctacgccagaaggtcctgagcctccctctgccagatcccctgaaatactacttgctttattacagagaaaaataagtctcctgtttgaaagggggaaataggaagagcagattgctgagtgtgaagttcgtgctgcctgtgtgctgttgaagggtcacctggaggcagacgttgtggggaagggaactgctgggctcatccacaccatggttttcttctagttcctgattgacctctaaaattctattcagttgtatgatttgtttacatagttccacaagaccttcattgcatagaagattgttttcccaaagtggagagaatcttcatagagaaaaagagaaggctgtttctttttcggctctgacgaaacactgaagtctgcgtaagagagactgtttgatgaccgtccctcatgcaacatgcacggtactcactaaaaatgaaaactgaagtggaaactaacctgtgttgcttataaagtgtgaaagcacaagcttataaatgtataaaatcttttctgggtgtgacgcacctgcgtccaagtttgaatttttatgatatgtaccacttaattactggcactgagtatcactgaatttcttagttttctagtggggaaacattattgagaagccctcccttattttaagtaagttgattaaatcttatgtgagttgccagttgtaatttttcaaaggaaaaattttgatggggtggaggaatgaattgccagataatctttctggaattccgagagaattccaaagagggtttttttttttttttttaggacatcttttgatacctttaaaagaaccactgtcaagtaatccttaaaagaatatcttggaaaaggaaacagattttttcctgtgtgtaagcaataagtgaagttacatttgccctaaccctagggatgattctttacccagttttaaagcccatcatggtattctaaggtgttgacaccctccatcctcagagcaggtcgaaaatattaaatagactggggactctatgatgggcagcctgtgctttttgacttcagtttgctatttttctgtgatcacattagtactgattcatagattctatcttttataattctggagaaaaagatttgttagttttgtaatttttttgtaagaccaaatgtatgtattttagtagctccattgcatgagaagagtgtaactcacactgacttgtgatatcagccttctctgggccttgtgtgtggagagctttctatcttaccaagtggtagggctaaaagaacaacagcctttttggtagtcacatagcagaatgatcagagttacattgcttattccaaaacattggttctttttaaaacatttttttttacccaaagaaaagaataatagaaattactaacaataaatataaattcagagtgttgatataggattcagtatccagagtttatttttaatcttaatcctcagcttcttgggagttgctgggcttcagtgtctctgtggtttcaccagcttagcttgagctctggttattttggatcttttctgctttttttaagtaactgagtcatttttaccacacagtccagtttgcatgtatagctaggaaacatgtattgctctagattgggcagtttaagtcattttaaagaaagttagttcatagttgttgccttttaactcatagtcaagcttcagtctttcaaagagaaatgtgtgattttcatttacttgctgatattttgtagtttggagatccttgtgggcattattctaactgatacgtagacacttacttggaaatttttggacattatattaaatgagtgctatctgtgaaattggttatattaggtggcttgactaatgttttttctataattgtatatggactgcatttttaaaaaaaccgcatttgcctttatgctagattgtaaaaaattatattagaatgcataagacatgtttttccttcatatgctagacttttcctagcatttcgtatttctgtgttgtcagtgtgtgatttttaaaccggaatttggtttaaaaaaaatctggtggtaatatatgtgagaaatactttggtgtttaccttatgaaaataaaggattgtaagtaaagtttcctgcgcaccttataccagaattcagtataatacactactttctgttttcaaacagataaatcataatatagtctgtattatctgtaagatctgtcttgtaaaccacattcttgacaactatttgcttttgagtagtttgtattttaatatgtgacttttgtcttgaaaagtagtaaagccatagacttgtgcaaaacaagtttcaagtttatagatattaagtttgtaatgtgagcatcaaatgtgtatgtaaaaatactttttaccagtctggaacttgggaaaatccagggaatttgaaacatagattttaatgagctggtaaacacaaatcatgtcaataaaggtagtcaggatattttatccttagcattgcttctgcatcctgtgtaggattccaattcttgaatatgttcttttcaaaatcttaagaaaagaaccttttttctttattaacatcatgtgtttactttcagcaaatatttgtattactgcttgattctgtgacagtcacaatagatgtagagaaggcattatttttcattaataaatgtgaaattggaatggacaaa

SEQ ID NO: 779 - DNA, 6066 bp, Homo sapiens
  source 1..6066: mol_type = genomic DNA
ccgcgcgcgctcctcgggtctgcgcggagccggcgtcggcgcgcgcttgggcgcctggcgaagaccgagagaggctggcgggatctcagcggcgcggccgcggaacctgaggcggtctggggcggcggcgctccggctctgaagggctccagccaaacggagcccgcggccaaacggtgcctgcggtgcctgagctgagtgaggccgaggccgggaggccgtgcccggagtaaggcgaaagagaatgaaagacgtagataacctcaaaagtataaaagaagaatgggtttgtgaaacaggatctgataatcaacctcttggtaataatcaacaatcaaattgtgaatattttgttgatagcctttttgaggaagctcagaaggttagttccaaatgtgtgtctcccgctgaacagaagaaacaggtagatgtaaatataaaattatggaaaaacggattcaccgtcaacgacgatttcagaagttattccgatggtgccagtcagcagtttttgaactccatcaaaaagggggaattaccttcagaattacagggaatttttgataaagaagaggtggacgttaaagttgaagacaagaaaaatgaaatatgtttgtctacgaagcctgtgttccagcccttttcaggacagggtcacagactaggaagtgccacaccaaaaattgtttctaaagcaaagaatattgaagttgaaaataaaaataatttgtctgctgttccactgaacaacttggaacccattactaatatacagatctggttggccaatggaaaaaggattgtccagaaatttaacattactcatagagtaagccatatcaaagacttcattgaaaaataccaaggatctcaaagaagtcctccgttttccctggcaacagctcttcctgtcctcaggttgctagatgagacactcacactggaagaagcagatttacagaatgctgtcatcattcagagactccaaaaaactgcatcttttagagaactttcagagcactgatttttgatagactaagtggaaaatttgcagagaaatgatggttgtaagtggacatgcaaaccaaaattggggattggagaagtcagactcactagacttttggttcgagtactattgaactctctcctgatgagaagatgtttagataagtacaagttaagaaagtagcatatgactggaaactatattcagtgcactttctccaaaagactacccagaaaaatagacttattttcaaataccagttatcaagatatattaaatagctgtattgtttagaatcttaatatggtataaattagcatatgtattcacaatattcattcagacatcattcccagacagcagggatttatttaaatgttagctgtctgagtttttaaatagctaatacgaccgggtacagtggttcatgcctgtaatcccagaacttcgggaggccgagacaggcagatcacgaggtcaacagattgagaccatcctggcaaacatggtgaaaccccatctctagtaaaaatacaaaaattagctgggcgtggcggtgcgcaactgtagtcccagctactcgggaggctgaggcaggagaatctcttgaacctggcaagtgtaggttgcagtgagctgagattgagcaactgtactccagcttggcgacagagcaagaccccctctcaaaaataaataaaataaagtaaaataaatataaataattgtggccgggtgcaatggctcatgcctgtaatcccagcactttgggaggctgagatgggaggatcacttgaagccaggagtttaaaaccagaatgatcaacagagtgagacccctgtctatatatttttttaatttaaaaaataaaagaataaaattgtgtagctcagtatagtatcaagattaatctgcctactcacatttctacactttataaaaatgtaataaaagaaaattatctttctaaaaagcctattccctttccattttattttctttcaaaaattatggatttgtttttggctaacatttgggattagccattcatttgccaccactcacttagaatataatgccggtgtgtgtcacattactagtattttttaaatgcatcatataaagtatggttttctgtttctttttcgtttgtttgagatggagtttcgctcttgttgcccaggctggagtgcagtggcgcaatctcagctcaccacaacctccacctcccgggttcaagagattctcctgctcagcctcccaagtagctgggattacaggcatgcgccaccatgcttggctaattttgcatttttagtagacacgggatttcaccatgttggtcaggctggtctcgaactcccgacctcaggggatctgcctgcctaggcctcctgaagtgctgggattacaagtgtgaaccaccgtgcccagctggttttctgtttcatacatcagagtcaacttgtgaatacatttaaagattatttcattttgatatcacgaagaaaaacaggctttatatctcagactttaactaaatccagttagacctcaatttttcactgtcagattaaatccccatacctgaaaataagtttaacatttttttttgcaaatgatctattgaatcagatttaaaatgaagcatgcattgagtgtgccaaggaactaagtggtccatagcagcagtaatgttcatagggtgcgagatgcctgctatgaaacagcaactctcaaacatttttatctcaagaccatttgtttatgtgagctatatatattattatattaaatattaaatttttaaaatatttatttatgggccaggcacggtggcttacgcctgtaatcccagcactttgggaggctgaggcaggcggatcacaaggtcaagtgattgagaccatcctgtccaacatggtgaatccccgtctctactaaaaatacaaaaaaaattagctgggtgtggtggcatgcgcctgtagtcccagctacgtgggaggctgagggaggagaatggcttgaacccgggaggtggaggtttcagtgagccgagattgcgcccctgcactccagcctggtgacggagcgagactctttctcaaaaaaaaaaaattattcatttaaaaataacttctggctggacatggtgtctcacgcctgtaatcctagcactttgggaggccaagacaggtggatcacttgagcccaggagtttgagaccagcctgggcaacaaggcaaaactctatctataaaaattacaaaaattagtgcagtagctcacacctgtaatcccagcactttgggacactaaagcgggcagatcacctgaggtcaggagttcgagaccagcctggtcaatgtggtgaaaccatgtctgtactaaaaatacaaaaattagcctggtgtggtggcacatgcctgtaatctcagctactagggaggctgagggaggagaattgcttgaactcaggaggcagaggttgcagtgagccgagattgcgccactgcactctagcttaggcaacagagtaagaccctgccgtaataataataacttttttttttttgagatagagttttgctctttcccccagactagagtgcaatggcgcgatcttggctcactgcaacttgtccccccgggttcaagcgattcttctgccacagcctcccgagtagctgggattataggcgcccactaccacgcctggctaatttttgtatttttagtagagacggggtttcgccatgttggcctggctggcctctaactcgtaacctcaggtgatccgcccgccttggcctcccaaagtgctaggattataggcgtgagccactgtgcccagccaataataacttataaaacatgaaacgatttagtgagaaaagtggccggttttttggggggaattactttctgtcataaagaagatagatgggttctcatgtcttctacattcagtctgttgtgcagtcacatatcatgtagactctggaaaacacctctgtatactggtgaaagaatgaaaagaagcaaataatgccttagtatgattatgaaaaacgttttgacttcacagtgccctgaatgggtcttgggaatctccagggatccctcaggcacactttgagaaccaatctatataaagtgatggttcacaatgattctgaagccttagtttcagaatcatttggggcagcttttcaaaaatgccattcctgccacctaccacaaagattctgattcactgtatctgtgatgggtctcagatctctgcatttttaatctcacgtgattcttaagtatgtggtggaagtacctttcttcaggaaattctgtcctaagcttttaccctgagaaaataaaacctgcatgctttcaccatggacggtgggagactccactgaaacacatctgctagaccactaagtttatccttgtcacccagtttgctcttggaaagagtctgttcccttttgtcactgaaccaatcatgacataaacttgtgctttacctcctatagcacagccgagacaaggctggaacatttaattaaggtttttactaaggactcaggaataacaacagggaaatatctatgtaactagatgacctgacataaaatctatcttctgattgcagtctattgtgagaatgctgcttttcctagctcccagccttccatggggcagaaggctcttttaattaggaagagagggaggacaaaggagagccttttcttttgtccattactcttagaaatgaacaggtacataatagaaaataaataattattgttggtaatgtttacacagcagtgttagagcctctctgtagtgaaacaaaaataatgttcttaccaaaaaaaaaaaaaaaaaaaagaggcaatgataaaatcaatgagcttatctttctgatatagaaaataacaggatgacagttaatacatgttcaggaatctaagaaaatgtttcatataggcctatcatgtagcatttttatttgcataattatagtcaacatatgattctccatgtaggggtctctcattgagaatgtttcctgtgtacctatagaaaagcctctttggtagattttccggtttataattatttaaccagaagatacatgggaggttcttttgtatgtacctgtagaatacatcccagtaagggtcctatggagaaagacctgttgtcatcaataaccttcattattctaactgtgaaacgttcattaatgcgaataatatcctcaaagattttctacaatgagaatcatccagtaaagctttttaactgagaatttaaaagttgtaaaattgttagttaaatgtgtataattatcaaaagaggttgactttggaaaacaaacaatttgctaagggaaggaaaacttgaaaataatcaccttagatggggcatacaatttgacctaagcaattgtttcaaaactgtcttcagtttcttgaaaataattgttagggctgatatatagaaatacatatctaggccaggcacggtgactcatgcctgcaatcccagcactttgggaggctgaggtggatggatcacgaggtcaagagatcgagaccatcctggtcaacatggggaaaccccgtctatactaaaaatacaaaaattagctgggtgtagtggtgtgcgcctgtagtcccagctactcaggaggctgaggcaggagaatcacctgagccccggaggcagaggttgcagtgagccgagatcgtgccactgcactccagcctgggcaacagagcgagactccgtctcaaaaaaaagaaaaaaagaaatacatatctaatgttacagattgtggtttattggttaattactatgcatttttttcagtttaaaaaataatcttattttatatacttctctcggtataatttttcatgacatttcagcatgttgataatatgtgtgcatctatttcagtgccttaaagtattttgagagcaatcttttgctgacagttgaagaactgttaatgaaatactgttcattaaaaggatctgtgaaatca

SEQ ID NO: 780 - DNA, 1223 bp, Homo sapiens
  source 1..1223: mol_type = genomic DNA
gttccttggagagcttggagccgcgcgccggagggaataggaaagcttggttacaacccgggacacccggagcttcaggatggttcgtactaagacatggaccctgaagaagcactttgttggctatcctactaatagtgactttgagttgaagacagctgagctcccacccttaaaaaatggagaggtcctgcttgaagctttgttcctcaccgtggatccctacatgagagtggcagccaaaagattgaaggaaggtgatacaatgatggggcagcaagtggccaaagttgtggaaagtaaaaatgtagccctaccaaaaggaactattgtactggcttctccaggctggacaacgcactccatttctgatgggaaagatctggaaaagctgctgacagagtggccagacacaataccactgtctttggctctggggacagttggcatgccaggcctgactgcctactttggcctacttgaaatctgtggtgtgaagggtggagaaacagtgatggttaatgcagcagctggagctgtgggctcagtcgtggggcagattgcaaagctcaagggctgcaaagttgttggagcagtagggtctgatgaaaaggttgcctaccttcaaaagcttggatttgatgtcgtctttaactacaagacggtagagtctttggaagaaaccttgaagaaagcgtctcctgatggttatgattgttattttgataatgtaggtggagagttttcaaacactgttatcggccagatgaagaaatttggaaggattgccatatgtggagccatctctacatataacagaaccggcccacttcccccaggcccacccccagagattgttatctatcaggagcttcgcatggaagcttttgtcgtctaccgctggcaaggagatgcccgccaaaaagctctgaaggacttgctgaaatgggtcttagagggtaaaatccagtacaaggaatatatcattgaaggatttgaaaacatgccagctgcatttatgggaatgctgaaaggagataatttggggaagacaatagtgaaagcatgaaaaagaggacacatggaatctggaggccatttagatgattagttaatttgtttttcaccatttagcaaaaatgtatactaccttaaatgtcttaagaaatagtactcataatgagtttgagctacttaataaaatacatttaagtggtatgtaa

SEQ ID NO: 781 - DNA, 3307 bp, Homo sapiens
  source 1..3307: mol_type = genomic DNA
aaatttcccgggccgggagcgctgggcctgccgggaaggcgctgggacggttacccagcgggccgccggcggtcgtgggcaagcttcgccatgcagagcactgacctaggcaacaaggagagcggcaagatatggcaccgcaagccgtccccggccacgcgggacggaattatagtgaacattattcacaacacttccgattaccatccaaaagttttgcgatttttgaatgtggcttttgatggcacaggcgactgcttaattgctggggaccaccaaggaaatatttatgtttttgacttacatggaaacaggttcaatcttgttcagcgaacagcacaagcttgcacagctctggcctttaatcttcgtaggaaatctgaattccttgtggcattagctgattattctattaaatgttttgatacagtcaccaaggagctagttagctggatgagaggacatgaatcatcagtattttcgatctctgtgcatgcatcagggaaatatgccatcacaacttcttctgatacagcacaattatgggacttggatacctttcagagaaaaagaaagctgaatattcgccagtctgtgggtatacagaaggttttctttctaccattaagtaataccatcctcagctgttttaaagataattccatttttgcctgggaatgtgacacacttttttgcaaatatcaattgccagctccacctgaaagctctagtatattatacaaagtgtttgctgtaaccagagatggccgaatcctggctgctggaggcaagtcaaatcatcttcatttgtggtgcttggaagctaggcagctctttagaattatccagatgcccactaaagttcgagccattcgccatctggaatttcttcctgatagttttgatgctggttctaatcaggttcttggagtactaagtcaagatggtattatgagatttatcaatatgcagacttgtaaacttctctttgagattgggagcctcgatgaaggaattagctcatcagcaattagcccacatggacggtacattgcatctattatggaaaatggaagtctaaacatatattcagttcaggctttaacacaagaaataaataagccacctccgcctttagtgaaagttattgaagatttgcccaagaataaactgagttccagtgatcttaagatgaaagtaacatcagggagagtacagcagccagcaaaatctagggaaagcaaaatgcaaactagaatattaaaacaagacctgactggtgattttgaaagtaaaaagaatgaattaccagatggattaaacaaaaagcgtttacaaatcttattaaaaggctatggtgaatatccaacaaaatacagaatgttcatttggcgctctctgctacaactgcctgaaaatcatactgcgtttagtaccctcatagataaggggactcatgtggcatttctcaaccttcagaagaaataccccatcaaaagtaggaagctactcagagtattacagagaaccttatctgcattagctcactggtctgtcatttttagtgacacaccatatcttccactcttggcatttccatttgtaaaattattccagaacaaccaactcatctgttttgaagttattgctactctcataatcaattggtgtcaacactggtttgaatattttcctaatcctcctatcaatattcttagcatgatagaaaatgttttggcatttcatgacaaggaactgctgcaacacttcatagatcatgatataacctcccagctatatgcatggcctcttcttgaaactgtgttctcagaagtgctgacaagagaggagtggctgaaattgttcgataatatcttttccaaccatccttccttccttctgatgactgttgtagcctacaacatatgttctagaacgcctctgctcagctgtaatcttaaagatgactttgagtttttttttcaccatcggaataacctggatataaatgttgtgattagacaagtttatcatctcatggagaccacgcctactgacattcatccagacagcatgcttaatgtttttgttgcactgacaaaagggcagtatccagtatttaatcaatatccaaagtttattgtggactatcaaacacaggaacgagaaagaataaggaatgatgaattggattacttaagagagaggcagacagttgaagatatgcaagctaaagtcgaccagcaaagagttgaagatgaagcttggtaccagaaacaggagctgcttcgtaaagctgaagaaacaagaagagaaatgctcttacaagaggaggagaaaatgatacaacaaagacagaggctagctgctgtgaaaagagagctgaaagtaaaggaaatgcacttacaagatgctgcaagaaggcgttttctgaagcttcagcaagatcaacaggaaatggaactaagaagactggatgatgaaattgggagaaaggtatatatgagagatcgagaaattgctgccacagccagagacctagaaatgagacagctggaactcgaatcacaaaagagactttatgagaagaatcttactgaaaatcaagaagctcttgcaaaagaaatgcgagcagatgcagatgcctatagacgaaaagtggatcttgaagaacacatgtttcataagctgatagaagcaggtgaaacccagagccagaaaactcagaagtggaaggaagctgaaggaaaagagttccgtttgagatcagcaaagaaagcttctgctctttcagatgcgtctagaaagtggtttttaaagcaagagataaatgcggctgtagaacatgctgaaaatccatgtcataaagaagaacccaggttccaaaatgaacaggactcaagctgtttgcctagaacctcacaattaaatgactcttctgaaatggatccctcaacacagatttctttaaatagaagagcagtagaatgggacaccacgggacagaatcttattaagaaagtgagaaatcttcgccagagactcactgcccgggctcgtcacagatgtcaaacccctcatcttttggctgcatagaatgcatgtcaccttgagacggtcgagagagagacctattttgcaatcagtgacattgatttttagattatttatttaaaattcctataaagatcagccctttgtacagaaaaatgtgtctataaaaattatgtgttatttaattctgatactttttggcttgtaaatggcttcttgaactttttacaataaaaatgttttagaaactgtt

SEQ ID NO: 782 - DNA, 6963 bp, Homo sapiens
  source 1..6963: mol_type = genomic DNA
gagcgctacccacttccgccccctccccctgccattggaactagctgagccgaactagttgcggccaccgagcagccggctctcggcacctcctcctccgcctccctgtctcctgttccattcgcctttcctcttctttcctggcccacgccgctccgaggcctcgcgaccgccgagcctgcagcctgccccgcggccaacatgagcttcttgtttggtagtcgctcttctaaaacttttaaaccaaagaagaacattccagagggttctcaccagtatgagctcttaaaacacgcagaagccacacttggcagtggcaaccttcggatggctgtcatgcttcctgaaggggaagatctcaatgaatgggttgcagttaacactgtggatttcttcaatcagatcaacatgctttatggaactatcacagacttctgtacagaagagagttgtccagtgatgtcagctggcccaaaatatgagtatcattgggcagatggaacgaacataaagaaacctattaagtgctctgcaccaaagtatattgattacttgatgacttgggttcaggaccagttggatgatgagacgttatttccatcaaaaattggtgtcccgttcccaaagaatttcatgtctgtggcaaaaactatactcaaacgcctctttagggtttatgctcacatttatcatcagcattttgaccctgtgatccagcttcaggaggaagcacatctaaatacatctttcaagcactttattttttttgtccaggaattcaaccttattgatagaagagaacttgcaccactccaagaactgattgaaaaactcacctcaaaagacagataaaaggatgcagagctgtgcaaattgttcctcaaatgaagcagtgtggagtgtattggggattttgttatattttgtttttatctggattgtttttgtcctaggtttgggggcgggggcttgtttgggttcctttttctttattctgattatgtgaaaccatattctattgctaggggaagccaagaaccattctctatacacttgataagggtaaatttatcttagtgtttttaaacttggttttggttacttgaggagttttttaataatattgtgtgctgcaagaaagtgcttgttgattgaactgccgatggattggtttctgtgtggtataaattgtggcccatttatgaagtccccaaaagagttatgtttttaagtgccttggcaggctcacttctgaggtgcaaaacatagatatagaactgaacagggcttgaaacaatattaggattactacccagggcacttactggtgcatgttgtaacatatctatgataaaagccatagtttacctaaaatggtgatttccagcctttactgctttgaagaaacagaatttgtaaaggtatgcatgtagaacataaaaaatatttcttaattattttttatattgatggtaatatattacgttcaacaatgcttaaagctctacaagcaggtcttttcccacctcttgatatctgtgatactgaaacttgaggatgttgaaatgtattacattttggcttctttctacatgttaactgcactgtagatgtaaaaattcaggttatatataggattgccatcttcagaggtgatgctgaactgtgaggtttcctagtaattgccaaatgagccgtaagtctgcagaattcccttctactttgaagagaaggggataggaatgtatatttggctgggggcatggagatgttcgtatgtatgaggagttagggatggggagtcaagttctagaaagttttgtctgaaaacctttgaatagaatggcatgaagattttaatcaattacttataaacaaagtcttagagacttccttttaggaatcaacttccatgagaagttaaaaataaattattaattttaggtacagacattaaacatggaatttaaggactgttgggggaaattgatcacttcttagcatttccattcagtgaatggagctgatgtttgcctgtcattttaagatgataccataccttctttggttattataggtccagtttgaagcattctgacttctggtttttccaccctgaaaggaaatgtttttctttgcagcagtattagataatgaaaaatgctaattcagtagttattaacttctaaattttattcgccatgactttctagtgaattattaccataaataacaatttcagaaacttagtttttagaataaatattaatttttccacttcagttttattctagaaaataccctttttagaaatccagttttagttttgtcattttcgataaatctttcttcagttagaaatatatatccttccttcagttgaaacatatacctttttcacatctaggaagaaatgcttgctctgaaatagtatagattaaaaacactcagtagaaaagaatctaaaattaaatgaatttgttttgccattaaagtagagcagtgatacaatttaatgccattacaattatgttgactagaaactgcctttttctccacttcatttctagcaattatttaccaagtaccaacagtagaagtaacaggaaagcctggcagagttaaatatcttggacatttattggtaaagcttatttataaactgcagtcagagctagttaatttccttaaatctttttgtattcagatagataatatgaatcattatgggttgattcagaaataaaatttgtgaggtgattttgaatcttgtccatataggaaaatgaagcacagaattactcagtcttccatattgtatttgacttcatatcaatctagtaaaaaaggagttgcaatagccaagtatagagagaatagtgaaaaattaatcttgccctttcaagccttatacagtagtacactgtacttgtttttagtagtaagacctactttcccactatatgtagatagtttgttttcactgtgccagaatctcaggtgcctgcttagagtatttctttaatcacagtcactgggaagtaaggagatgtatatatgtgtatatatggtaacaaagcatagcagttctctaggggagaggcctggcattgcacatggtgttacatggctacaagtaaggaaaaaatcagaaagtgaaagaactgatgtaataaaaggttgatttggttggttcccatgaaagttagtaagatgcccttttaaatataaggatcagtgctttgttctgcagcagagtttgctgataaatgtctgttggattctttttggatttctttaattaatttgtaagtaaccaagataattattttcccccttgctctctatattaatacgtagctataaagcaacagttggttttcttatcctttgataaaagcatcccataaaatataaagtagtaagttaacatagtattattgtcacacacaatgctttttttggttaaatgttgatacgaagcaatgttttggaattactttaattgatggagtagtggtggtagagagaaattaataacaaaaagagtgaaaatattttaattagcagtagatggtgctactggctttcatttgctgacttgattattccctttctcttaaaaaccatggcattagactgcactaaattaacaagcatgttagttgctggtagaggttttggaggttaatttaccttaaattggaagacttttaattgcagtctctttctaccttccctctgttagtcatttgtaaattctaaatggtcaccataaaatgtattaggtaggagaagatacgttttatgtataatatatctcagactgagttactgcctgtcttatcaggatggataaaacactacagtctcttatcaggaaatagagatgatgtggatatttatatattacatatataaccaccagactccattttatatattagcattttccttgcttatgggaaaatagcaaaacaacatttcatttatacttttgtttacccctctctgagacaggttttgataaccactgaaatggtagaatatgtgagatacaaatattgagttgtagaactttctttttaaggtgaataagtcatgccttaacatccaaataagagttcatcttcagagtggttcttttgggagcactgtttattccagctatactgcaaaagtataatgtttttggaactgttctagagcataccatgaaaagcagtttgttattatgcaggaaaatcagtttcatcattttagttacactaaacacttttggcagcttaatatgacctttttaaattttttttattttttttatttttatttctttaagatggagtcttgctctgttgcccgggctggagtacaatggcatgatctcagctcactgcaacctccacctcctgggttcaagcatttctcctgcctcagcctcccaagtagctgggattacaggcagcaccacacctggctaattttcatatttttagtagagatggggtttcaacatattggccaggctggtctcaaactcctgacctcaagtgatccgccctccccagcctcccaaagtgctgggattacaggtgtgagccaccacagccagccagtatgacctatcttaatcatcagctcaactgtaatttaaatttggctgttctctggagctaaaccattagggaagttcaaaggaatgtgccatgatttccgaatttgcacaagagaatgttttaagcattggtagcataattgaataaaagaatagtttcctgatgtcactattttgaagtggaaattatcacttggatgtggaggttttactttttaaaaacattcagcttaattaccttaccttaattaccttagttagatatactaatggaaaaaaaccaagtcctttctctagaacttgttttctatttttgttccttttcatgaaaacttctcaatttaattttaactactgtaggatagtattgattgaatggatactatggaaaagtggatccaatatttaagatagaagtagtttaaggagacaacagcctttactgccatttttttttaaatgttttcactcagatgaacaatttgactttaataaaagactggagatttttgtacaaagaaataggaataagtttcatatactaattatgctgagttttaagcctacatatcacaaaatatttagaattgtataaccttttcatatatttataacttttaatgtctttttaaaagatgtgggaccaaaaatatatttataatttggaaatgtgactgcataccaataagaaaacttaccttattttgaaatttatctgggatattaaagaatctaccaattcttaaaaacacagatttatactttaagcttattttaaaattaaagaatatataccaattcttagaaacactttaaggactactcttaaataacttaaatatcagagttttgttgtaatattaaaatttaccgtggaaatcactgttgttcagctatcaccttaattgtgtatgatatgataaatgtttagcagtaaagctatcttaagatttaatggaaaagtttaatttgaagatgtaacaaaaattctgaccacagttgattctgaatttttaaggctttcctaataggctgatcacagagaataatccattttgaaggtataaaactgcactgtatgtctgtcacttgtagctgaactgattcacattttgacaaaagagagaaaatacaaaaatgagttttgcaaatgtaataactttttctgcatatagaactaaataattgaaaaatatgggctatagttctcaaaggtagatagtaaaatcactggctttttccagctgtatgtttttccactgtgcgtgtacacacacactggaaaataattaggctgattttgcaggtcttcattgttagagattctgaagtatttactgtcaattcataggtttcagtttatttaggaaattagtgtttgacagctttttttaaattatttcactgaagctgagattattagtgatacaaagttaaaatttcaatatttaatttctctatatattattaatattaaattgttttttacttataaattcatgttctcatctgatttaatattaaatttgtataggtgggcgtttcttaccattttgcacaagtttttgtttttctgaaatacttaattgtgcaggttgtaaaaaagattagtgcattttcattttaaggatgctttgctccttaaattgttcgacagaaatgactttttagggaaagtagtttttttggagctactaacttgtatttattattgtacatgcataaccagggtggtgagggcactaatcttgtaggaaacacttacttgatgttttatttgaacttttcctataggtttaacttttactgcatagaattaacactaggaacagtgtcatgaaatctgggttgaaggagaatacagtatatatgagaacacttaaagttcaaatagaaatcatttctgaagacaaaagcagaggaatattgtcagtgccaagtaatggaagaataagggcggcatttacactgtgcaagtattgagaagagtgcataaagacagggaactactctcatggagacagtttctctcttataatcaagtaactagaaggggaaaaatcatctaagttatgaaatccaacataggcgctatattacaaactgtgccggattatgcaaattgtagttgttactgatcaaagtttaattgcttcatttttgtttaaaaagggatactgatgtcagaaaatctgtaatatgttttattcaaaagatgtaaataatgtatacagacttgtatgtgatgggatgggaaatatttaaattctaggtgtttttttttttttaaagaagaaactcaatgtttataagaaaaaaatgaataaatagttacgtttggccatgaa

SEQ ID NO: 783 - DNA, 624 bp, Homo sapiens
  source 1..624: mol_type = genomic DNA
tagggggcgcggcggggcggggcgcacctttcggcgggcctcgcggatggcggcgcagggcgtagggcctgggccggggtcggcggcgcccccggggctggaggcggcccggcagaagctggcgctgcggcgcaagaaggtgctgagcaccgaggagatggagctgtacgagctggctcaggcggcgggcggcggtatcgaccccgacgtgttcaagatcctggtggacctgctgaagctgaacgtggcccccctcgccgtcttccagatgctcaagtccatgtgtgccgggcagaggctagcgagcgagccccaggaccctgcggccgtgtctctgcccacgtcgagcgtgcccgagacccgagggagagacaaaggcagcgctgccctcgggggagtattggccctggcggaacgcagcaaccacgagggatccagccagaggatgccacgccagcccagcgctaccaggctgcccaaggggggcgggcctgggaagagccctacgcagggcagcacctaggatggggcagagacttgtcacatctttgtccccagcaaaggctacatgttacctccttcagttgataataaacctttctgagatgcagagggtccaggtca

SEQ ID NO: 784 - DNA, 1949 bp, Homo sapiens
  source 1..1949: mol_type = genomic DNA
aagatggcgatggctgcggtagcagcggcggcggctgttgcctggcccggtaccctggggacgggggccgagtagcgccttccccgggccccgtgaaccggctgcgggtcgcccttggggggcagcggccgcagccccccacctgggccctcggtccgccctcccggcgcgtccatgaactcagtgtcgccggccgccgcgcagtaccggagcagcagcccggaggacgcgcgccgccggcccgaggcccgcaggccgcggggtcccagaggcccagaccccaacggcctggggccttccggagccagcggccccgctcttggctctcccggggctggcccgagtgagccggacgaagtggacaagttcaaggccaagttcctgacagcctggaacaacgtcaagtacggttgggtggttaaaagccggaccagctttagcaagatctccagcatccacctctgtggccgccgctaccgtttcgagggcgagggtgacatacagcgtttccagcgggactttgtgtcccgcctgtggctcacataccgccgggacttcccgccccttcctgggggctgcctgacctcggactgtggctgggggtgcatgttacgcagcggccagatgatgctggcacagggccttctgctgcatttcctgcccagagactggacatgggccgagggcatgggcctgggcccccctgagctgtcagggtcagcctctcccagccggtaccatgggcctgcccgctggatgcccccacgctgggcccagggtgcccctgagctggagcaggaacgccggcaccggcagattgtgtcctggttcgccgaccacccccgggccccctttggcctacaccggctggtggagcttgggcagagctcaggcaagaaggcaggtgactggtatgggccatcgctagtggcacacatcctcaggaaagccgtggagagctgctccgacgtcacccgcctggtggtgtacgtttctcaggactgcacagtgtacaaggcggatgtggcacgcctggtggccaggccagaccccacagccgagtggaagtctgtggtcatcctggtgcccgtgcgactgggtggcgagactctcaaccccgtgtatgtgccctgcgtgaaggaactcctgcgttgcgagctgtgcctgggcatcatgggtgggaaaccgcgacactcactgtacttcattggctaccaagatgacttcctgctgtacctggaccctcactactgccagcccactgtggatgtcagccaggccgacttccccctggagtccttccactgcacctcgccccgcaagatggcctttgccaagatggacccaagctgtaccgtgggcttctatgctggagacaggaaggagtttgagacactctgctcagagctgaccagggtcctcagctcctcctcagccacagagcggtaccccatgttcaccctggccgagggccatgctcaggaccacagcctggacgacctctgctcccagctcgcccagcccacactccggctccctcgcacagggcggctcctcagggccaaacgccccagctctgaggactttgtgtttttataaagggaggggatgaggggaaagatacaacactatttatttttttatttatgtcatgtcgggtgtgggatcttgagctctggcagtgatgatggtacttcctgttgtcagcccctcaagcccagctgcaaccagtctggggccattcagccagggacagagcccacagagcccatacacctgtctcccaccagcggggccctcctggcagggtagggaaggaggaccccgggcacccccctcagggcctgactcacgtactgtagtttgcactggacgcccgggccctccctgtcccaaagcccccttgggggaactgtggctgctgggggccaataaagctgtgtaacttg

SEQ ID NO: 785 - DNA, 1912 bp, Homo sapiens
  source 1..1912: mol_type = genomic DNA
ccccgccttgtggcgtcacggggacgccgggggcgcgcgggctgcagggccgcgtaggtccccgcccccagagtctggctttccgcggctgcccgcctcgcgcgtcttccctgcccgggtctcctcgctgtcgccgccgctgccacaccatggccttcgtcaccaggcagttcatgcgttccgtgtcctcctcgtccaccgcctcggcctcggccaagaagataatcgtcaagcacgtgacggtcatcggcggcgggctgatgggcgccggcattgcccaggttgctgcagcaactggtcacacagtagtgttggtagaccagacagaggacatcctggcaaaatccaaaaagggaattgaggaaagccttaggaaagtggcaaagaagaagtttgcagaaaaccttaaggccggcgatgaatttgtggagaagaccctgagcaccatagcgaccagcacggatgcagcctccgttgtccacagcacagacttggtggtggaagccatcgtggagaatctgaaggtgaaaaacgagctcttcaaaaggctggacaagtttgctgctgaacatacaatctttgccagcaacacttcctccttgcagattacaagcatagctaatgccaccaccagacaagaccgattcgctggcctccatttcttcaacccagtgcctgtcatgaaacttgtggaggtcattaaaacaccaatgaccagccagaagacatttgaatctttggtagactttagcaaagccctaggaaagcatcctgtttcttgcaaggacactcctgggtttattgtgaaccgcctcctggttccatacctcatggaagcaatcaggctgtatgaacgaggtgacgcatccaaagaagacattgacactgctatgaaattaggagccggttaccccatgggcccatttgagcttctagattatgtcggactggatactacgaagttcatcgtggatgggtggcatgaaatggatgcagagaacccattacatcagcccagcccatccttaaataagctggtagcagagaacaagttcggcaagaagactggagaaggattttacaaatacaagtgatgtgcagcttctccggctctgagaagaacacctgagagcgctttccagccagtgccccgagtgcctgtgggaatgctctttggtcagacattccctcacacagtacagtttaataaatgtgcattttgattgtaatctatcgaagtgattattacaccagttacagcagtaatagattctccattaagaaataattcccttttttagtctgttcatttctgtgtattttctaaacagctttacacccttggtgccttggagcaaacatgttttttgaaccttgtcatttttgtgaagaattgcctagattccttctctcatcaacgggaaagtacttcctctgagagtgcgagtgcaccatgctcactgttgctgcgtgggagagtcacaagccactggcaagcaagtggtatagtctgtgaagcactgcagcgagcagcacctggatcttgcctttataagaacattttactacctgcagctttgagtcttgccctacattttgggcatgacataagatgtgtctttattcagctcgtcgtgaagatgctgctgctgaatgggtcagcatatctctgtttgcatggtttgcaggaggtcggttttcatggtcattcagttccacagatctgaatgattactgtctgtctgtgtcttttttccatgagaaatcactgttgcaaattgcctataaattgactctactaaaataacaatgtttcagtctgaaaatttgaattgaaaaaaatgtataatataaaattgtaatacactcaaatgattataaaagtaaaagttggtaatttaggcagaagcta

SEQ ID NO: 786 - DNA, 2337 bp, Homo sapiens
  source 1..2337: mol_type = genomic DNA
cgagggagtccagagccttgagcccggtgctcctccctcgcgcagcggtggctctgcggccgctggagtaaacactgcctttgttccctagcgcctcgtctttcgtcgccccgtgccctcacgccgccgggctctggccggcccgccctcggtccttgaaccccatttcggctcgtgccgtgcggatgcagctgccgggcctgggtttgggcattgagcgggaggaggaggaggagcggcggcgcctgggcggcatgcgatggggaactgctgctggacgcagtgcttcggactgcttcgcaaggaagcggggcggctgcagcgagtaggcggcggcggaggatccaagtattttagaacatgctcaagaggtgagcacttaacaatagagtttgagaatctagtagaaagtgatgaaggggagagcccaggaagcagtcataggcctcttactgaggaagaaattgttgacctaagagaaaggcattatgattccattgccgaaaaacaaaaagatcttgataagaaaattcaaaaagagcaagaaaggcagagaattgtgcagcaatatcatccttccaacaatggagaatatcaaagttcaggaccagaagatgacttcgaatcttgtttgagaaatatgaagtcacagtatgaagtttttcgaagtagtagactctcatcagatgctacagttttgacaccaaatacagaaagcagttgtgatttaatgaccaaaactaaatcaactagtggaaatgacgacagcacatccttagatctagagtgggaagatgaagaaggaatgaatagaatgcttccaatgagagaacgttccaaaacagaggaagacattctacgggcagcacttaagtatagcaacaagaagactggaagtaatcctacatcagcctctgatgattccaatgggctggagtgggaaaatgattttgttagtgccgaaatggatgataatggaaattccgagtattctggatttgtaaatcctgtattagaactgtctgattctggcataaggcattctgacacagatcaacagactcgatagggtaaaattgtgtgaccttgtttatcagttatgaccaaatgttaaaaaccaactagaatgtataagtgattgtgcttagcctttttgtaagggagatgtgtaagaaaccatgttgtaaatgcttattttattacaaaggagtagggatgataggatctgaattgatacagaattaagtgcaatttcatcatctgccttctgcttttcaagaccaatttaatggtcctgtcatgttactgattaaatttactttgtcttgtctttatagcatttctgtttactatggtagatttccactttcaatttttaaaattaattttactttgaatgatttatgaagcctatttcattgtctaactatgaaaatattaagacttttttgttaattctcagccgatgtgaaggaagcatgaggagggatcgtcagattcagatttagaatagtgttcccgtttccagcattatttatttctatgacttctttggattttattatctaatagtaagtacagttgatgtgggtagatgactctaagaaatgctgaagtatcggcattacatgtgtttatttacatgtcctagtatgataatgttgattcaatctgaacaaaagataatataaaaataacccttcagagtttggacatttcaagttggtaataataaaaaataatatttaagaagatatatatatatatatatttagttttttccacttcattttacatgccactatattgactttaattgatatacagtattaagtttttaggtgccattatttttaaaaaattctatatttccaatgaacgatgttagattttacacagaacatattctctgcatgatttcagaaaagaaaatctaaaaaggtaatacgggtatttcaaataaaatcctttctggtatgaaaggctccattgattttattaagccttcctttaccttgtagtacaaggtgctttaatgggatagaactaagcatatcaatatctataactgcattttgtgctagacaattactgttcttttctctaaaatgtatatgtcaatttacaaggccagggatagaaaacactccataattgctttccttgattttgctgaggatttggtatgattttagtaagcaaactgttttttggtttttccttaatgtttttaattttttttcctcttgcaacaatgacggtgcatgttcttataaatataggaaggtccagatataaatagtaacctaaagttcttgctgtgcttaaaaaaaaaaa

SEQ ID NO: 787 - DNA, 1619 bp, Homo sapiens
  source 1..1619: mol_type = genomic DNA
attggccgagcgcggccgttgggggtgaggccgcgtcgggggaggacaacaaagggccgcgggcggcgggcagtggtgtcccagtctcccggtgcttccctgaggctgaggcgcccggcctcccgcccgccgcgctccagatgaagtgtgagcactgcacgcgcaaggaatgtagtaagaaaacaaaaactgatgaccaagagaatgtgtcagccgatgcaccgagtccagcccaggaaaatggagagaagggagaattccacaagttggctgatgccaagatatttttgagcgactgcctggcatgtgacagctgtatgactgcagaggaaggagtccaactttcccagcaaaatgccaaggacttcttccgcgttctgaaccttaacaagaaatgtgatacctcaaagcacaaagtgctggtagtgtctgtgtgtcctcaatctttgccttattttgctgctaaattcaacctcagtgtaactgatgcatccagaagactctgtggtttcctcaaaagtcttggggtgcactatgtatttgatacgacgatagctgcggattttagtatcctggagagtcaaaaagaattcgtgcgtcgctatcgccagcacagtgaggaggaacgcaccctgcccatgctgacctctgcctgtcctggctgggtccgatacgccgagcgggtgctgggtcgccccatcactgcccacctctgcaccgccaagtccccccagcaggtcatgggctctttggtgaaggattatttcgccagacagcagaacctgtctccagagaagattttccacgtcattgtggccccttgttatgacaagaagctggaggctcttcaggaaagccttccccctgctttgcatggctcccggggcgctgactgcgtgttaacatcaggtgaaattgctcaaataatggagcaaggtgacctctcagtgagagatgctgccgtcgacactctgtttggagacttgaaggaggacaaagtgacgcgtcatgatggagccagctcagacgggcacctggcacacatcttcagacatgcggccaaggagctgttcaacgaggatgtggaggaggtcacttaccgagccctgagaaacaaagacttccaagaggtcacccttgagaagaacggagaggtggtgttacgctttgctgcagcctatggctttcgaaacatccagaacatgatcctgaagcttaagaagggcaagttcccattccactttgtggaggtcctcgcctgtgctggaggatgcttaaatggcagaggccaagcccagactccagacggacatgcggataaggccctgctgcggcagatggaaggcatttacgctgacatccctgtgcggcgtccggagtccagtgcacacgtgcaggagctgtaccaggagtggctggaggggatcaactcccccaaggcccgagaggtgctgcataccacgtaccagagccaggagcgtggcacacacagcctggacatcaagtggtgaagtcaggccagggccttccagctgctcttggggccagagccaagagcctctcagtagagggaggggctgccctgagtggagtattaaagacacttaagaaaaccgctc

SEQ ID NO: 788 - DNA, 1038 bp, Homo sapiens
  source 1..1038: mol_type = genomic DNA
taagtgtacatgcttaggccttctgaagcagcatttgaagctgcagtcctgaaaaccatgcaggccggaagagtagataaagaaatatttatttgagatggcacatgtttcttcagaaactcaagatgtttcccccaaagatgaattaactgcttcagaagcctccactaggtctccattgtgtgaacacaccttccctggggactcagacttacggtcaatgattgaagaacatgcttttcaggttttgtcacaaggatccttgttagaaagtccaagttacacagtttgtgtctctgagccagataaagatgatgattttctttctctgaactttcccaggaaactttggaaaatagtggaaagtgaccaattcaagtctatttcatgggatgagaatggaacttgcatagtgattaatgaagaactcttcaagaaagaaattttggaaacaaaggctccttacagaatatttcaaactgatgctatcaaaagttttgttcgacagctcaacctttatggatttagtaaaattcaacagaattttcaaagatctgcctttctagccacctttctgtcagaagagaaagaatcgtctgtcttaagcaagatacgcttcaccaaaatgaaactttccagatcttcaacttatgaaaacaggtatttatgttgcaacttacatttaaaagatgagtcgaattactcataatccttagaagttagcttgtccgcatctgaaaattcacttttaccttgaagttcaatctgtctctgggaaagactagattggaagaataaaattcaagaatgtgatgttttagtaatggaaaagccaagagcgtcaggtggcaaaagtccttctgttactcaagaaaatgctctgaaaaattccttttctcttttttttttgtaaagattaactccacctcaccaccacaatgaggtatttttctcagcaattgacacctgtttactcagttactccctgtaactatgttatgctgtgaagtaggcaatacagttgttaaagaagaataa

SEQ ID NO: 789 - DNA, 4326 bp, Homo sapiens
  source 1..4326: mol_type = genomic DNA
ctgccaacccgcgagcccgcatcatggatgtcgagctcccctatttcgcattgctagccctggaattcgagaccccagacgaggaccaggattcatgaaatcagtcgcaggggccggggcaggggcctctggctcccgacactggccgagaggtgatgagtgaggttcgaagaacggaagatttaaaaagcagccggggcctccgtattgaatgaaagacccagtgcaaagacatcaccatgaacactagcattccttatcagcagaatccttacaatccacggggcagctccaatgtcatccagtgctaccgctgtggagacacctgcaaaggggaagtggtccgcgtgcacaacaaccacttccacatcagatgcttcacctgtcaagtatgtggctgtggcctggcccagtcaggcttcttcttcaagaaccaggagtacatctgcacccaggactaccagcaactctatggcacccgctgtgacagctgccgggacttcatcacaggcgaagtcatctcggccctgggccgcacttaccaccccaagtgcttcgtgtgcagcttgtgcaggaagcctttccccattggagacaaggtgaccttcagcggtaaagaatgtgtgtgccaaacgtgctcccagtccatggccagcagtaagcccatcaagattcgtggaccaagccactgtgccgggtgcaaggaggagatcaagcacggccagtcactcctggctctggacaagcagtggcacgtcagctgcttcaagtgccagacctgcagcgtcatcctcaccggggagtatatcagcaaggatggtgttccatactgtgagtccgactaccatgcccagtttggcattaaatgtgagacttgtgaccgatacatcagtggcagagtcttggaggcaggagggaagcactaccacccaacctgtgccaggtgtgtacgctgccaccagatgttcaccgaaggagaggaaatgtacctcacaggttccgaggtttggcaccccatctgcaaacaggcagcccgggcagagaagaagttaaagcatagacggacatctgaaacctccatctcaccccctggatccagcattgggtcacccaaccgagtcatctgcgctaaagtggataatgagatccttaattacaaagacctggcggctctccccaaggttaagtctatctacgaggtacaacgccccgacctcatttcctatgagcctcattccagatacatgtccgacgagatgctggagagatgtggctatggagagtcgctgggaacattatctccctactcccaggacatctacgagaacctggacctccggcagagacgggcctccagcccggggtacatagactcccccacctacagccggcagggcatgtcccccaccttctcccgctcacctcaccactactaccgctctgggcccgagagtggccggagctctccataccatagccagttagatgtgaggtcctccactccaacctcttaccaggctcccaagcactttcacatcccagctggagacagtaacatctaccggaaacccccgatctacaaacggcatggtgatttgtctacagcaaccaagagcaaaacaagtgaagacatcagccagacctccaagtacagtcccatctactcgccagacccctactatgcttcggagtctgagtactggacctaccatgggtcccccaaagtgccccgagccagaaggttctcgtctggaggagaggaggatgattttgaccgcagcatgcacaagctccaaagtggaattggccggctgattctgaaggaagaaatgaaggcccggtcgagctcctatgcagatccctggacccctccccggagctccaccagcagccgggaagccctgcacacagctggctatgagatgtccctcaatggctcccctcggtcgcactacctggctgacagtgatcctctcatctccaaatctgcctccctgcctgcctaccgaagaaatgggctgcacaggacacccagcgcagacctcttccactacgacagcatgaacgcagtcaactggggcatgcgagagtacaagatctacccttatgaactgctgctggtgactacaagaggaagaaaccgactgcccaaggatgtagacaggacccgtttagagcgccacctgtcccaggaagagttctaccaagtctttggcatgaccatctctgagtttgaccggctggccctctggaagaggaatgaactgaagaagcaagcccggctgttctaggcagaggctctataaatatatatgcatttatataaagatatatgtaaaatctctctactgaagctcggtataatcctctcttgtgtaatgggacacactgcctgccatgagacttgcttttctgtactgtcaggcaagcccacgtcatcgagatatttttatgctccttactttctcttttctaagtgctgtgggatctgggaagggatttgaggggactctgtccttttattggggatcctttttatactgaaacatctgtcctaacttgagtgccccaaggtccaactctctttcctaaagaaggtgcctgaagaagtctctcttctctctgcttcgtggcccctttcttaaatttctagggctgatgctgaccatgtggtttccacaccttattggccccagaggggccctcccatgggaagatctgcagcagtctccccaaatcagtgagcacctttgagcgcccacgaagaactttctcaacacccccaattaggagctcagtgctctcttggggcaatgcagttaaaagggtgagcctcaaatctagtcattacaccagtcaacagaagtggacagggcctaggcctctcctcagctccttaaccctcctccttctgccctggattgtaacctctcccttgtccaaatctaggattcctggtaggaaaaggaaaaggcccttcccttccctccaccacttccaactggcccctttgcctgacctggacttggagaaccagaggaaaagagagggagcggaagtgggagatggagcagggcacctgttagaatcagagctgcaggatttcttgggaccctcctctctccctcactgctcccagcacctcctgacccttccctctttcaaggagaagcccatgattgcagcttgtattctttagccttattacaatctatgtgcctgacaactcaacacaccgcagggctaatgttcccaccagagctccaactgaacaaccagacagacaactctcatcatcctccagagagaaaataggccgtgtctcaaagaaaggttcttggtctatgcctctggtctgtgggctggcagggcaaccataccatacccccgccagtcctcggctcctgctgcaaagttggccatgtttcacagggaaacttttggaagagtggctgcttatgagattccaaaatgaagtgttggccaacaccgctcatggccatcctggattttcccagtggcttcccttcctgctcgcctccctgaacaggggagaaagcttaacctctcttctcctctccaaacctttcaccttgaatgggtaatgtttggtgggggctgttccttcttggagaagccttgagtcggaccattttgagatcatggaggaaggatgaagaagtgaaaatgacaataatgactctcaagaggctggcgatgtgacatggcaaatgtagaactgacttaaattgaacaaaccctcactgagcacctctgatgttgagcacctgctgaatactgagcactgaatgggggagggggaggggagcacggggtgagtcaacctgggactcggtctcagggatatgcctaccaatagcgggtatcgtaaggcatgtacccaaacataacggatgtaaggcagaaagtgatcggagaaggaatgagaaagtgtgcgtgatgttaatgaaaagtcatatgcagctagagcagacccaggaaagctttctggaagagattgcatctgaggaaattcaggaaggatctttgtagattggggggagattctaaattgaaggggtgatggggtgaggggccagagggaagtctgctgtgttctcatgtaggatgtcagccctccctgcaacttctctttttggccaatgtcttttcactttcctgaccctttagaatcatccccagccagacgcaatcatggaagttgccttattgtcactggttaagaacttggcgagattgaagggcttttgttattgttgttggatatttttgtttcccataaaagcacatcatttcaaccctaaa

SEQ ID NO: 790 - DNA, 5714 bp, Homo sapiens
  source 1..5714: mol_type = genomic DNA
agctgattctatcacattgtaagatgcctttggataattctacagtcctcttaaatgaatctttagaacttggcaagtctcactagataccttcaatcatcattttgagctcaaagaattctgagacttatggttggtcatatagaagagtaccttgaacctatagtttcctgaagaatcagtttaaaagatccaaggagtacaaaaggagaagtacaaatgtctactacaagacgaaaacgtagtatgttatgttgtttaccgtaagctgtagtaaaatgagctcgattgttgacagagatgacagtagtatttttgatgggttggtggaagaagatgacaaggacaaagcgaaaagagtatctagaaacaaatctgaaaagaaacgtagagatcaatttaatgttctcattaaagaactgggatccatgcttcctggtaatgctagaaagatggacaaatctactgttctgcagaaaagcattgattttttacgaaaacataaagaaatcactgcacagtcagatgctagtgaaattcgacaggactggaaacctacattccttagtaatgaagagtttacacaattaatgttagaggctcttgatggtttttttttagcaatcatgacagatggaagcataatatatgtgtctgagagtgtaacttcattacttgaacatttaccatctgatcttgtggatcaaagtatatttaattttatcccagaaggggaacattcagaggtttataaaatactctctactcatctgctggaaagtgattcattaaccccagaatatttaaaatcaaaaaatcagttagaattctgttgtcacatgctgcgaggaacaatagacccaaaggagccatctacctatgaatatgtaaaatttataggaaatttcaaatctttaaacagtgtatcctcttcagcacacaatggttttgaaggaactatacaacgcacacataggccatcttatgaagatagagtttgttttgtagctactgtcaggttagctacacctcagttcatcaaggaaatgtgcactgttgaagaacccaatgaagagtttacatctagacatagtttagaatggaagtttctgtttctagatcacagggcaccacccataatagggtatttgccatttgaagttctgggaacatcaggctatgattactatcatgtggatgacctagaaaatttggcaaaatgtcatgagcacttaatgcaatatgggaaaggcaaatcatgttattataggttcctgactaaggggcaacagtggatttggcttcagactcattattatatcacttaccatcagtggaattcaaggccagagtttattgtttgtactcacactgtagtaagttatgcagaagttagggctgaaagacgacgagaacttggcattgaagagtctcttcctgagacagctgctgacaaaagccaagattctgggtcagataatcgtataaacacagtcagtctcaaggaagcattggaaaggtttgatcacagcccaaccccttctgcctcttctcggagttcaagaaaatcatctcacacggccgtctcagacccttcctcaacaccaaccaagatcccgacggatacgagcactccacccaggcagcatttaccagctcatgagaagatggtgcaaagaaggtcatcatttagtagtcagtccataaattcccagtctgttggttcatcattaacacagccagtgatgtctcaagctacaaatttaccaattccacaaggcatgtcccagtttcagttttcagctcaattaggagccatgcaacatctgaaagaccaattggaacaacggacacgcatgatagaagcaaatattcatcggcaacaagaagaactaagaaaaattcaagaacaacttcagatggtccatggtcaggggctgcagatgtttttgcaacaatcaaatcctgggttgaattttggttccgttcaactttcttctggaaattcatctaatatccagcaacttgcacctataaatatgcaaggccaagttgttcctactaaccagattcaaagtggaatgaatactggacacattggcacaactcagcacatgatacaacaacagactttacagagtacatcaactcagagtcaacaaaatgtactgagtgggcacagtcagcaaacatctctacccagtcagacacagagcactcttacagccccactgtataacactatggtgatttctcagcctgcagccggaagcatggtccagattccatctagtatgccacaaaacagcacccagagtgctgcagtaactacattcactcaggacaggcagataagattttctcaaggtcaacaacttgtgaccaaattagtgactgctcctgtagcttgtggggcagtcatggtacctagtactatgcttatgggccaggtggtgactgcatatcctacttttgctacacaacagcaacagtcacagacattgtcagtaacgcagcagcagcagcagcagagctcccaggagcagcagctcacttcagttcagcaaccatctcaggctcagctgacccagccaccgcaacaatttttacagacttctaggttgctccatgggaatccctcaactcaactcattctctctgctgcatttcctctacaacagagcaccttccctcagtcacatcaccagcaacatcagtctcagcaacagcagcaactcagccggcacaggactgacagcttgcccgacccttccaaggttcaaccacagtagcacacgtgcttcctctcttgacatcaagggaggaaggggatggcccattaagagttactcagatgacctgaggaaaggagggaaagttccagcagtttcatgagatgcagtattgagtgttctagttcctggaattagttggcagagaaaatgctgcctagtgctacagatgtacattaaataccagccagcaggaggtgatcataggggcatagccagttctgacagtgttttaggtgcctggatattttttgatggaaaaagaatatattgccaaatattaagaagctcagctatgaaatgacctccagggaatcagaaaggcactaatgatgttagtaacttttagtggttctgtgcctcttatcaagtgttacagaggacataccactgccatgtcaggggtttgcttacagtgatgccatgaagacagtccagtagacttggtagcgaccccctcccccaacccctctcccttttcagataatgatggaacagtaattactttcagaatgttgtgtgggttcaaattctctatgtacagatgatgtaaaaatatgtatatgtctagataaaaggagagaaagcaaaacattttgtatgctgcatgaaagcgttatctcttccttacaggtgtgagcacctttcctgaaattctgacaccatgtgcaaactgatccatcctgtttttccttttgtttacaacacagtagtgttctgttcacttttccggggcacaagtttttttgttcatactttggctgtgatgtcacagtttgttcagtgaggtatgatgtgctgctgggaatggattttttttttcaggttaaattattgatacaacaggattttcaagttattcagaaatatccctcatttcattatttttcaattatgtttgaaaataggatttgcactgctttattttaggtggctgggagttttgattgcatattttgttatagttcatagttggaaatatttgcgtaaatggttttcaacaagcctgaaagtaatttcaagaatgtttcagttatagaggtaaaatttgcacacaaaacatcttaggcactttttaacattctcaatcatgggaattttaacttttgggatttgttgaaatcttttttattatccttcacaatttcaatgcttcttttagtcagaaatgattcagggttatttgaggggaaaaaaccccatagtgccttgattttaattcaggtgataactcaccatcttgaagtcattgtccggtttccgtagcagttttgaaaccttagtacctttttaacagcatgtgggtgtcagtgtcattattagtctcctaataagttcctctgaagactgctatcagtctcttggactggaggtacaaataatttagaaataaaagatgataacctaacactatcatagttattaatgtgatcctaaaattgtttcctaaatcagcatttttctttagtcatttaagaatttaccagaaatatttgctcaatatgatcttgatattcctacaaagaaaaaagaaggggtagggatttggctatgccttcactacaacattagaatattgtaactcacatgccttctaaacgtgaactaagatttcctttggcaatatcatattctaaaagtaataaattccaatacaagttacatacatttaaaaaacattttacagattttatggtactaatgaaatttacagtgatagaacaaaagaggattagtagaaaatacattattagaatataaaaaatgttattactgaggaaagggaggagaggacaagtgtaataaatcaaaattgacctcaaaagaaaatgtgtaacagagttgaggttgttaaaacagaaaaggttctgaataatgaagattaacctaatgcagaattgctaggtaaagaggtcaggggaatgctaagccagttcttaagacttctctgtcctctgctttgctgttatccttaaggcatatactttgtctttctgcagaaaattctacctggctacaattactttgaacattaatgttgaaaaagaaaacaaccaaagaaaattggtacttacccttctacaaaagaagtgtgactagatatcaatcagtaattaacatatcaaggagctcttctagctaaatgaccatccagtagagatttcccacattcccatgaatatcaagaatagttgtcagaatatgtatgtacctgagcatatgtacacagacaagggggatgttgtggaatatggcaatagcattgttcttctcccctttcaaattgcctttcttgaccttatgccattccatatatatctgagttgtgcctcatttatttattggcaatacctagtgatacggatttagctaacaaaagatatgaagaactattatattgaggcctgtcctctacataccacacttaaaagatggtgaactgtgagtactacttaggttgacagcaacaaagcataagacaagccccaggtaaacgtctaaactgtttactcacattgtcctactccagccccttcaattatttcccatctccacaaatagtcgggggaaaaaattaaaattttcctttatgattcttactgttcttcgcagctcatcttttcctgcttagaattaaccattgctaatttaaaggagcagctagctgcttttctgtcagtctgaagcgtagtagtggaagaggtagtaagcaccagctgcctctttgctgctttgttttcctcctgattctcttaaatttgggttgcaaagctatcccgccccccaccctgccccatgaaacttgagcattcaaatgaagattcagcagtgtctgttcttcatttctatagccaaagctgttagttaaaatcccaaatctatagcatttaaagataccaaatagaaacaccttccagcttt

SEQ ID NO: 791 - DNA, 1815 bp, Homo sapiens
  source 1..1815: mol_type = genomic DNA
taggattgacactggctgtcaaactcatccttcaaggtgattcctggcctgccctcctcctccaggcagcctgtcctcctcctccaggcagcctgtcctgaccctcagcagcctctcctggccttggcagagcccctcgtgtcctcccttgcagcacgcatgggaagaaaggccatcgtcctcgccattgctaacaccagccttgcgtttcctctttgccagcacctggtgacgttctgcctgggtgaggacgatggcgtgcataccgtggaggatgcctccaggaagttggccgtcatggatagccagggccgagtctgggcacaggagatgctgctgcgagtgtctcccgaccatgtcacgctgctcgacccggcctccaaggaggagctggagtcgtacccactgggcgccatcgtgcgctgtgacgcggtgatgccacccggcaggagccgctcgttgctgctgctcgtgtgccaggaacccgagcgcgcgcagcccgacgtgcacttcttccagggcctgcgcctcggggcggagctgatccgagaggacatccagggggctctgcacaattaccgctcgggccgcggggagcgcagggcggcggcgctcagggccacgcaggaggagttgcagcgcgaccgctcgcccgccgctgagaccccgcccctgcagcgccgcccgtcagtccgcgcagtgatcagcaccgtagagcggggcgcgggccgcggacgaccccaggcgaagcccattcccgaggcagaggaggcgcagaggcctgagccggtggggacctcgagcaacgctgactcggcctccccggacctgggtccccggggtcctgacctggcggttctgcaggcggagcgggaagtggacatcctgaaccacgtgttcgacgacgtagagagctttgtatcgaggctgcagaagtcggcggaggcggccagggtgctggagcaccgggaacgcggccgcaggagccggcgccgggcggctggggagggcttgctgacgctgcgggccaagccgccctcggaggccgagtacaccgacgtgctgcagaagatcaagtacgccttcagcctgctggcccggctgcgcggcaacatcgccgacccctcctctccggagctgttgcacttccttttcgggcctctgcagatgattgtgaacacgtcgggggggccggagttcgcgagcagtgtgcggcggccgcatctgacatcggatgccgtggcgctgctgcgggacaacgtcactccacgtgaaaacgagctctggacctcgctgggggactcgtggacccgccccgggctggagctgtccccggaggagggacccccatacagacccgagttcttcagcggctgggagccgccggtcactgacccgcagagccgcgcctgggaggacccagttgagaaacagctacagcacgagcggaggcgccggcaggtgacccaagcgacacagcagggccgaggctgggaagtccgggggcgcggccggtccgcctggccccgcctgacccgactgtcttacttcctacagcaaagcgccccccaggtcgctgtcaatggtcaccgagacttggagccagaatctgagcctcagctggagtcagagacagcaggaaaatgggtcctgtgtaattatgacttccaggcccgcaacagcagtgagctgtcggtcaagcagcgggacgtactggaggccctccaggacaaagagaaagtgtcagagctggaggcagtgatggagaagcaaaagaagaaggtggaaggcgaggtggaaatggaggtcatttga

SEQ ID NO: 792 - DNA, 4122 bp, Homo sapiens
  source 1..4122: mol_type = genomic DNA
aggagaagtcgggaaggtggcggcggcggcggcggttgtcccggctgtgccggttggtgtggcccgtcagcccgcgtaccacagcgcccgggccgcgtcgagcccagtacagccaagccgctgcggccgggtccggcgcgggcggcgcgcgcagacggagggcggcggccgcggccagggcggcccgtgggaccgcgggcccccggcgcagcgctgcccggctcccggccctgccggcctcctcccttggcgccgcggccatggcggccagcgcgaagcggaagcaggaggagaagcacctgaagatgctgcgggacatgaccggcctcccgcacaaccgaaagtgcttcgactgcgaccagcgcggccccacctacgttaacatgacggtcggctccttcgtgtgtacctcctgctccggcagcctgcgaggattaaatccaccacacagggtgaaatctatctccatgacaacattcacacaacaggaaattgaattcttacaaaaacatggaaatgaagtctgtaaacagatttggctaggattatttgatgatagatcttcagcaattccagacttcagggatccacaaaaagtgaaagagtttctacaagaaaagtatgaaaagaaaagatggtatgtcccgccagaacaagccaaagtcgtggcatcagttcatgcatctatttcagggtcctctgccagtagcacaagcagcacacctgaggtcaaaccactgaaatctcttttaggggattctgcaccaacactgcacttaaataagggcacacctagtcagtccccagttgtaggtcgttctcaagggcagcagcaggagaagaagcaatttgaccttttaagtgatctcggctcagacatctttgctgctccagctcctcagtcaacagctacagccaattttgctaactttgcacatttcaacagtcatgcagctcagaattctgcaaatgcagattttgcaaactttgatgcatttggacagtctagtggttcgagtaattttggaggtttccccacagcaagtcactctccttttcagccccaaactacaggtggaagtgctgcatcagtaaatgctaattttgctcattttgataacttccccaaatcctccagtgctgattttggaaccttcaatacttcccagagtcatcaaacagcatcagctgttagtaaagtttcaacgaacaaagctggtttacagactgcagacaaatatgcagcacttgctaatttagacaatatcttcagtgccgggcaaggtggtgatcagggaagtggctttgggaccacaggtaaagctcctgttggttctgtggtttcagttcccagtcagtcaagtgcatcttcagacaagtatgcagctctggcagaactagacagcgttttcagttctgcagccacctccagtaatgcgtatacttccacaagtaatgctagcagcaatgtttttggaacagtgccagtggttgcttctgcacagacacagcctgcttcatcaagtgtgcctgctccatttggagctacgccttccacaaatccatttgttgctgctgctggtccttctgtggcatcttctacaaacccatttcagaccaatgccagaggagcaacagcggcaacctttggcactgcatccatgagcatgcccacaggattcggcactcctgctccctacagtcttcccaccagctttagtggcagctttcagcagcctgcctttccagcccaagcagctttccctcaacagacagctttttctcaacagcccaatggtgcaggttttgcagcatttggacaaacaaagccagtagtaaccccttttggtcaagttgcagctgctggagtatctagtaatccttttatgactggtgcaccaacaggacaatttccaacaggaagctcatcaaccaatcctttcttatagccttatatagacaatttactggaacgaacttttatgtggtcacattacatctctccacctcttgcactgttgtcttgtttcactgatcttagctttaaacacaagagaagtctttaaaaagcctgcattgtgtattaaacaccaggtaatatgtgcaaaaccgagggctccagtaacaccttctaacctgtgaattggcagaaaagggtagcggtatcatgtatattaaaattggctaatattaagttattgcagataccacattcattatgctgcagtactgtacatatttttcttagaaattagctatttgtgcatatcagtatttgtaactttaacacattgttatgtgagaaatgttactggggaaatagatcagccacttttaaggtgctgtcatatatcttggaatgaatgacctaaaatcattttaaccattgctactggaaagtaacagagtcaaaattggaaggttttattcattcttgaatttttcctttctaaagagctcttctatttatacatgcctaaattcttttaaaatgtagagggatacctgtctgcataataaagctgatcatgttttgctacagtttgcaggtgaaaaaaaataaatattataaaatatgctattgtttttgtgttcttgctgcaatgcctttaccaaagtggccttaaatatgagtagtgaattgagaacatcttgaattcttaaaagacttcttagtgactttttataaaaaggccatgtagaaaatttattaaaactactatgactgctacattcaggaatatgccagtggtaaagcatttaaatgtagcttgtcagatttaccataatcctactaatttctttgcagcttattaattttgtgaaatttgtatatatgaagaatttgcatgtatgtgtatttacaaatttttctaagtatcttgaattctcagactgcaaaaggcctattttaactattgattttttttaaaaaaaattgtctttgaatgtattggaagtagacatgcattaactgtgacattattgcacctcagtttttttctttctttttttgggcaaactgatattatctataggatatttgtttatgtttgttttttgggggaaagaaactggaactcagtgttaccttaaagttacggaatactttgttttaaaggaaaagataataagtttagttatatctttttgttaatattcaaatgaacttgtttaagtatctatgtacagtaatgcctcattcatctagaggtaatctggcagtcttgtgaaaaccgaacacaactcagaaacttggaatcgttttttttaaaaatgcctctgagcaacccatataagtcacaaagtctgtgtgttagagcttatgcatttgtttttatgagagattttaataaatttaattatttgcttgtccagactatagcatattagctgtttagaagggatggcttgaaaggaaggagactgaaaaacactctgagagcatacactgtccaaggccattagtgtaaggaccgctacccagcctagaggacatcactatactacatcatctgatgattattctttattatgcctctaggtaattaagtaaaggtgaaattgcatacacagatatgtagtacatattttaaaagttttatcttaaattgattaaaactttttaaaaagctttggtattaaaagaggtaaacatcagtttcctcaaacattttattcatgttgaatgcctttttgcaatgatgactgagttgttatcatagtattttaaaacctgtatagtgttttagacttgttaaaacattgctgtctagtgtacatctagctaaaagtgtggtttatctaaaccgttttaataagcaagatgactgggaaatctctgccccttttctgagcagtatgcctcttcttttagaattaaatgaatgctgcacaggtccagatgtgtgttgatgtagacttgaaatgtctccacattttggaggacttcctcagcccttttcattgagggaaaatatatttgaatttctgttttagattgtatcgggtcccagttgattcatgtgtacaaagttatgctacctaattacagaccattacccaaatatcctaccaggctttccatctgaatagtaaattaaacagttgttatcaaaatga

SEQ ID NO: 793 - DNA, 2552 bp, Homo sapiens
  source 1..2552: mol_type = genomic DNA
gaaggagggacggccggtcccgtcagtcaggcagcgggagccgccgggagcggatggcggcggccgtagcggctccactcgccgccgggggtgaggaggcggcagccacgacctccgtgcccgggtctccaggtctgccggggagacgcagtgcagagcgggccctagaggaggccgtggccaccgggaccctgaacctgtctaaccggcgcttgaagcacttcccccggggcgcggcccgtagctacgacctgtcagacatcacccaggctgacctgtcccggaaccggtttcccgaggtgcccgaggcggcgtgccagctggtgtccctggagggcctgagcctctaccacaattgcctgagatgcctgaacccagccttggggaatctcacagccctcacctacctcaacctcagccgaaaccagctgtcgctgctgccaccctacatctgccagctgcccctgagggtcctcatcgtcagcaacaacaagctgggagccctgccccctgacatcggcaccctgggaagcctgcgacagcttgacgtgagcagcaacgagctccaatccctgccctcggaactgtgtggcctctcttccctgcgggacctcaatgtccggaggaaccagctcagtacgctgcccgaagagctgggggacctccctctggtccgcctggatttctcctgtaaccgcgtctcccgaatcccagtctccttctgccgcctgaggcacctgcaggtcattctgctggacagcaaccctctgcagagtccacctgcccaggtctgcctgaaggggaaacttcacatcttcaagtatttgtccacagaggccgggcagcgtgggtcggccctgggggacctggccccttctcggcccccgagtttcagtccctgccctgcagaggatctatttccgggacatcggtacgatggtgggctggactcaggcttccacagcgttgatagtggcagcaagaggtggtctggaaatgagtcaacagatgaattttcagagctgtcattccggatctcagagctggcccgggagccccggggacccagagaacgcaaggaggatggctcagcggacggagaccctgtgcagattgacttcatcgacagccatgtccccggggaggatgaagagcgaggcactgtggaggagcagcgaccacccgaattaagccctggggcaggggacagggagagggcaccaagcagcaggcgggaggagccggcaggggaggagcggcggcgcccggacaccttgcagctgtggcaggagcgggaacggcggcagcagcagcagagcggggcgtggggggccccgaggaaggatagcctcttgaagccagggctcagggctgttgtgggaggggccgccgccgtgtccactcaagccatgcacaacggctcgcctaagtccagtgcctcccaagcaggggctgcagcggggcagggagcccccgcccctgcccctgcctcccaagagccccttcccatagctggaccagcgacagcacctgctccacggccacttggctccattcagagaccaaacagcttcctcttccgttcctcctctcagagtggctcaggcccttcctcaccagactctgtcctgagacctcggcggtacccccaggttccagatgagaaggacttaatgactcagctgcgccaggtccttgagtcccggctgcagcggcccctgcctgaggacctggccgaggctctggccagtggggtcatcctgtgccagctggccaaccagctacggccgcgctccgtgcccttcatccatgtgccctcccctgctgtgccaaaactcagtgccctcaaggctcggaagaatgtggagagttttctagaagcctgtcgaaaaatgggggtgcctgaggctgacctgtgctcgccctcggatctcctccagggcactgcccgggggctgcggaccgcgctggaggccgtgaagcgggtggggggcaaggccctaccgcccctctggcccccctctggtctgggcggcttcgtcgtcttctacgtggtcctcatgctgctgctctatgtcacctacactcggctcctgggttcctaggccccaaaatcggccctccctcacccctttcccttcctctctatttataaggtccctgctccacccgaccccacctgcggtgccttcagccccaaccaaagacactagtgcacccccttcacagacactgacctcagaggccccactctggtgcccccagaccctgggcccccagcctctggcctccctccagtagccccacgagtccccacctctcagtgctgacggtgccttcatgtccccgccggccctgcccctgccctctgtaccccgtgaggggtggcaggagctggagtctcccccttcctcctgtgccctccccttccccccccaacagctgctatgggggggctaaattatctctattttgtagagaggatctatatttgtaggggttcggggcccaggccgggtccctatctctgtgtataaactgtacagaccgtg

SEQ ID NO: 794 - DNA, 691 bp, Homo sapiens
  source 1..691: mol_type = genomic DNA
ccgcctcagactcagagctgcgctcctcgacctcaacgccaggcggttactttgctgctcctcccgctcgctatgtcaacgtccactagctgcccgattcccgggggccgggaccagctgcccgactgctacagcaccacgccggggggcacgctatacgccactacccccggaggcaccaggatcatctacgaccgaaagttcctgctggagtgcaagaactcacccattgcccggacacccccctgctgcctccctcagattcccggggtcacaactcctccaacagcccctctctccaagctggaggagctgaaggagcaggagacagaggaagagatacccgatgacgcacaatttgaaatggacatctaatccagtgcagatgacctggcatgtggagttacagagggatccctcatgccactgctgccaccacctcttcctggggcatccaaaggccagctggcctcatctaatctggaagggagtgacttgttagttccaggcctcctttagttctgaggcagctagaccagggataggagtgggcaacttgccaagcccttaactctacttcctcttcagtctgtggtactcctcctaaccctaaaccctctatgctcaggggctggaactggggaatggagtaagtcaccttctgactgcttagtaaacattcaaagaaatg

SEQ ID NO: 795 - DNA, 3708 bp, Homo sapiens
  source 1..3708: mol_type = genomic DNA
atgcctatggagtcagcatcttcagataataagaaacagatacctaatgaagcttctgctagaagtgaaagagacacatcagacctagagcaaaactggtcattgcaagatcattatagaatgtattcacccataatataccaagccctctgtgagcacgtgcagactcagatgtcactgatgaatgacttgacttcaaagaacatccctaatggaattcctgctgtaccatgccatgctccctctcattctgaatctcaggcaactcctcattctagttatggcttatgtacctccaccccagtctggtcacttcagcggccaccctgccctccaaaggttcattctgaagttcaaactgatggcaacagtcagtttgcatcacaaggtaaaacagtttctgcaacctgtactgatgttctacggaattcatttaataccagtcctggagttccatgtagcctgcccaaaactgacatatcagctattccaacattgcagcaactgggccttgttaatggaattctgccacaacaaggaattcataaggaaacagacctactaaaatgtattcaaacatatttgtctctttttcgatctcatggaaaagaaacgcatctggacagtcagacacaccgaagccctactcagtcacaaccagctttcttggccactaatgaagaaaaatgtgccagagagcaaattagagaggccacaagtgaaagaaaggatttaaacatacatgtgcgagatacaaaaacagtgaaggatgtacagaaggcaaaaaatgtgaacaagacagctgaaaaagttagaattataaaatatttgttgggagagctcaaggccctggtagcagaacaagaggattcagaaattcagaggttgattacagaaatggaggcatgtatatctgtacttccaacagtaagtggaaacacagatattcaagttgagatagcactggccatgcaaccattaagaagtgagaatgctcagttacgaaggcagttgagaattttgaaccagcaactcagagaacaacagaaaactcaaaaaccatctggtgctgtggattgcaaccttgaattgttttctcttcagtcattgaatatgtcactgcaaaatcaattggaggagtcactaaagagccaggaattactgcagagtaaaaatgaagagctgttaaaagtgattgaaaatcagaaagatgaaaacaaaaaatttagtagtatatttaaagacaaagatcaaactatacttgaaaataaacagcaatatgatattgagataacaagaataaaaattgaattggaggaagccctagtcaatgtgaaaagctcccagtttaagttagaaactgctgaaaaggaaaaccagatattggggataacattacgtcagcgtgatgctgaggtgactcgactaagagaattaaccagaactttacagactagcatggcaaagcttctctccgatcttagtgtggacagtgctcgctgcaagcctgggaataaccttaccaaatcactcttgaacattcatgataaacaacttcaacatgacccagctcctgctcacacttccataatgagctatctaaataagttagaaacaaattacagttttacacattcagagccactttctacaattaaaaatgaggaaaccatagagccagacaaaacctatgaaaatgttctgtcctccagaggccctcaaaatagtaacactaggggcatggaggaagcatctgcacctggaattatttctgccctttcaaaacaggattctgatgaagggagtgaaactatggctttaatagaagatgagcataatttggataatacaatttacattccttttgctagaagcactcctgaaaagaaatcaccactttctaagagactatcccctcagccacaaataagagcagctacaacacagctagtcagcaacagcggacttgctgtctctggaaaagaaaataaactgtgtacacctgtaatctgttcctcttcaacaaaggaagcagaagatgcacctgaaaaactttccagagcatctgatatgaaggacacacagctcctcaagaaaataaaggaagcaattggtaagatccctgctgccaccaaggagccagaggaacaaactgcatgtcatggcccatcaggttgtcttagcaacagccttcaagtgaaaggcaatactgtctgtgatggtagtgttttcacttctgacttgatgtctgactggagcatctcttcgttttcaacgttcacttctcgtgatgaacaagacttcagaaatggccttgcggcattagatgccaacatagctagactccagaagtctttaaggactggtcttctggagaaatgaattcagaagaaaactcatcaggtgcttctttttaaaactagaacttggctatattgaatgtgtatttttctttagtgaaatgatgttttatgttattatgtgtgaagtaatatattgtacaagtaataaatgtattgttgagatatattgacactgaggagcttataaaaacaagtcatcttaagttcacaattgctacaagaagaaagttgtggataactaggaaattattgtaagtaatgttttatttcagtacttagcaattagagttcttttattaagatgtatctgctggattaagggtacaggttgaaatagttctgtggctgtcctaagaaataatgggaaaagaatctctggatgtaagtttttctgttgaaactagagggttttttttttctgtttacatatacttttttttaatagcaatgtgtttttattaaacatgctgtgtgccacaggccagtgttgttggtgaaatatataaacatttatttaaagagaaaagttaccagtatctacacctcttaaaaaacattgattggtctaaaaaatatatagataacatcctaagttaacatatggcttcttaaaacttgggcacttttatttgtttttatcccaaattcatgttttaaggcctttaaagaatagtcagactgataaagaagtgctaacagataagctatagttggggaaatttgtgggttttttttaaataagaaatgtttatttttgtccttatatttaaacatgatggaatttgtaaatcttggcattgattgtaattctgcctttttggaagaattttttctcccagcatgttagctgagaatattctctattttataaataatatgaagtaggttggtctctctgcttctctataccaggacttcttagctcagtatcatctcccttcatgtaagcagcacgttttaactcttaggaagctgaatgttgtgttatcactaatactttgtacaggtcacctgcctactctaattgtccttagtacttggacaggctttatcattaaagagtgttctcctaatcccagaacctcctcgtgttttttgtttttttggtggttttttttttttttttaggtgttagtgctacagcgtttgaaggagccagctgtagtctctttgatatgttcagattttccagatagagatttaagtctaaaaatttattaagtgaattctaaactatttcacacaagagtccattagcatctttaattttatttagtattcatgaattaatttattggcatcttatttggaggtaataggccacaactctttaacaaataagttc

SEQ ID NO: 796 - DNA, 1521 bp, Homo sapiens
  source 1..1521: mol_type = genomic DNA
cgggtccctcaaggccggaaagaaagtcgggcttctctagcccctggaggactcgactcactggtgcgcgatttaggtccggaggaggcgttgtgaggtgagctttttcagaagcgcgatcccaggacacgtcgggaagcaagcatccccagagctgcttggaaagaggaccaaagacgtctaaaaagtcatttggaaatatctctaaatatttgttaccatgtataagctgctaaagagaaattgggcccaacaaaactaattgaataattgaggcagatttgtgtgtatcatcaaattctatccagaagttgaagaatctgaatttaaagattgtgtgcatttaataagaggatgacctttcagtttaatttcactatagaagaccatctggaaaatgaattaacacccattagagatggagctttgaccctggattcctcaaaagagctgtcagtctcagaaagtcaaaaaggagaagagagggacagaaaatgttctgcagaacaatttgacttgcctcaggatcacttgtgggaacataagtcaatggaaaatgcagctccctctcaagacacagacagtccactcagtgcagccagcagttcaaggaacttggagccacatggaaaacagccctccttgagagctgccaaagagcatgctatgcctaaagatttaaagaagatgttagaaaataaagtcatagaaacattaccaggtttccagcatgttaagttatcagtagtgaaaaccatcttgttgaaagagaacttccctggagaaaacatagtttcaaaaagcttttcttctcactctgatctgattacaggtgtttatgagggaggcttaaaaatctgggaatgtacctttgacctcctggcttatttcacaaaggccaaagtgaaatttgctgggaaaaaagtcttggatcttggttgtggatcaggtttactaggtataactgcattcaagggagggtccaaagaaattcactttcaagattataacagtatggtgattgatgaagtaaccttacctaatgtagtagctaactccactttggaagatgaagaaaatgatgtaaatgagccagatgtgaaaagatgcaggaaaccaaaagtaacacaactatataaatgccgatttttttctggtgagtggtctgagttttgtaagcttgtactaagtagtgaaaaactttttgtaaaatatgatctcattctcacctcagaaaccatttacaacccagattattatagtaatttgcaccagactttccttagactgttaagtaaaaatggacgtgtacttttggccagcaaagcacattattttggtgtaggtggaggtgttcatctctttcagaagtttgtagaagaaagagatgtttttaagaccagaatactcaaaataattgatgaaggattgaagaggttcataattgaaataacttttaagtttcctggttaattaacattcactgagtatccaaaatgaaataaacagaaggaccaaaaa

SEQ ID NO: 797 - DNA, 920 bp, Homo sapiens
  source 1..920: mol_type = genomic DNA
ggttccgcggcggccacgctccgggagacttccggcagggcgggcgcggggtcttggcgaacggtcttcggaagcggcggcggcgcgatgaccacgctacgggcctttacctgcgacgacctgttccgcttcaacaacattaacttggatccacttacagaaacttatgggattcctttctacctacaatacctcgcccactggccagagtatttcattgttgcagaggcacctggtggagaattaatgggttatattatgggtaaagcagaaggctcagtagctagggaagaatggcacgggcacgtcacagctctgtctgttgccccagaatttcgacgccttggtttggctgctaaacttatggagttactagaggagatttcagaaagatatgaggaaagcactttccagggatactgagaagaaatccatcataccattacctcatcctgtgaggcctgaagacattgaataaccctgggcagtggttcttaggcagatactctagatgctttatggacaatattattttcattggatgattctggagctctattaggagaaaagtaatcattttaggtcttaaagacttcaagaaaatacaggttatcaatttattttaaatctcattgtttccagttagcaatatcatacctattaaagctgttcattgtaacaaaattcaatcaaaaaggcagctaggtcagaaggaaacataccactctcatggttcatagtattcactgtatgtatgctagggaaaagacttgctccagtctcctcctcagttctgtgcctgagaaccactgctgcatatatttgtttttaaattttgtattgaactgttaattgaagctttaaaagcatatatgaaatgtataaatctaagatgtataatacattattgactctatgaa

SEQ ID NO: 798 - DNA, 2112 bp, Homo sapiens
  source 1..2112: mol_type = genomic DNA
ggcagcggcagcggcggcgggacgcggaggctcccccgggattcggcctcagcagcgaggcggcggcggcggctgcggaggcgcaggcagcaactgaggcagcggcaggctcaggtgcagccgctgctcaaagaaaatgaacggcaccctggaccacccagaccaaccagatcttgatgctatcaagatgtttgtgggccaggttccaaggacctggtctgaaaaggacttgcgggaactcttcgaacagtatggtgctgtgtatgaaatcaacgtcctaagggataggagccaaaacccgcctcagagcaaagggtgctgttttgttacattttacacccgtaaagctgcattagaagctcagaatgctcttcacaacatgaaagtcctcccagggatgcatcaccctatacagatgaaacctgctgacagtgagaagaacaatgcagtggaagacaggaagctgtttattggtatgatttccaagaagtgcactgaaaatgacatccgagtcatgttctcttcgtttggacagattgaagaatgccggatattgcggggacctgatggcctgagccgaggttgtgcatttgtgacttttacaacaagagccatggcacagacggctatcaaggcaatgcaccaagcacagaccatggagggttgctcatcacccatggtggtaaaatttgctgatacacagaaggacaaagaacagaagagaatggcccagcagctccagcagcagatgcagcaaatcagcgcagcatctgtgtggggaaaccttgctggtctaaatactcttggaccccagtatttagcactccttcagcagactgcctcctctgggaacctcaacaccctgagcagcctccacccaatgggagggttgaatgcaatgcagttacagaatttggctgcactagctgctgcagctagtgcagctcagaacacaccaagtggtaccaatgctctcactacatccagcagtcccctcagcgtgctcactagttcagggtcctcacctagctctagcagcagtaattctgtcaaccccatagcctcacttggagccctgcagacattagctggagcaacggctggcctcaatgttggctctttggcaggaatggctgctttaaatggtggcctgggcagcagtggcctttccaatggcaccgggagcaccatggaggccctcactcaggcctactcgggtatccagcaatatgctgctgctgcgctccccactctgtacaaccagaatcttctgacacagcagagtattggtgctgctggaagccagaaggaaggtccagagggagccaacctgttcatctaccacctgccccaggagtttggtgatcaggacctgctgcagatgtttatgccctttgggaatgtcgtgtctgccaaggttttcatagacaagcagacaaacctgagcaagtgttttggttttgtaagttacgacaatcctgtttcggcccaagctgccatccagtccatgaacggctttcagattggcatgaagcggcttaaagtgcagctcaaacgttcgaagaatgacagcaagccctactgagcgtgctcccctctgagactggagtgagagggtcttctgattcctgccgtttgttcatcgttgtgcctaaagcatgtcgatgtggcgtcaagtacatcgtccaaatccctgtctcttcagcttctctgatgcttgaactctcacctttgaccttgtgttgacctttgatgctgatgtgtatttttattatgtttgtttctttcttcgtttttttttctttttttctttcctttttttttccttttgtgctgccaaattggttttgctagaacgactgctgaaggggaaatatttaaacttgcatttgaatataaaaaaaatctatttttctagaacttcataagataaccacttgattttgtgattccaattctttgtaattgtcttcagagcagccctactagcacataccgcgtggtgtttgtatttctgtgaacacacagccagtccgtttctaggctttgtttctctgtgtgcttagttttaaagacaactttgaagtaaacaatgaaataaaagatgtcact

SEQ ID NO: 799 - DNA, 1613 bp, Homo sapiens
  source 1..1613: mol_type = genomic DNA
ctgcctgtcagatgcctcattcccacctgtgatgctcagagagaaaccatgagccctgaaaaacaccatattgttttgtgatgtcacctctggaatgttctgagtgttttggtgaccaacttctgcataggacctatacctggcaactcacattgcactcaaggccaaattatacaagaaaaagagataccagatctgaaagcctagaaattccaatcagtgtggttctacctcagaggggcacagccgaacccttcccgaggctccacaacttgtacagcacccctcgctgcgcgcagcaggccgccctgccccggctgagccgcaggatggcgagccagcactcctatccactgaaccgcttctcctccgtgcctttagaccccatggagcgccccatgtcccaggccgacctggagctggactacaacccgccgcgggtgcagctcagcgacgagatgttcgtgttccaggacgggcgctgggtaaatgagaactgccgcctgcagtctccctacttctccccatccgcctccttccaccacaagctgcaccacaagaggctggccaaggagtgcatgctgcaggaggagaacaagtctctgcgggaggagaacaaggccctgcgcgaggagaaccggatgctcagcaaggagaacaagatcctacaggtcttctgggaggagcacaaggcctcgctgggccgagaggagagccgggccccctcgccactgctgcacaaagacagcgcgtccctggaggtggtgaagaaggaccacgtcgccctgcaggtgccccgtggcaaggaggacagcaccctgcagctcctccgggaggagaatcgcgcgctgcagcagctgctggagcagaaacaggcctactgggcgcaggcagaggacacggccgcccctgccgaggaaagcaagcccgccccctcaccccacgaggagccctgcagccccgggctgctgcaggaccagggctccggcctctcctcccgcttcgaggagcccaaagggcctccggcccggcaggaggactccaaggagctgcgcgccctgcggaagatggtcagcaacatgtccgggccctccggggaggaggaggccaaggtgggcccgggcctgcccgacggctgccagcccctgcagctgctgagagagatgaggcaggcgctgcaggccctgctcaaggagaaccggctcctgcaggaggagaacaggaccctgcaggtgctacgggcagagcacaggggcttccaggaggagaacaaggccctgtgggagaacaacaagctgaagctgcagcagaagctggtcattgacaccgtgaccgaggtcaccgcgcgcatggaaatgctcatcgaggagctctacgccttcatgccggccaggagccaggaccccaagaagcctagcagggtctgaggcctcggccttgcaccgggacgccgagtttgggacaccgaacactgggcaaaagagaatcccctgccttcctttgtcgtcctcgccttccccagccagttcgtacctattgaaaagcagcgttagcagccttcctaaactcagagttttaataaaggtgtgaggaggctggggccagttgacacc

SEQ ID NO: 800 - DNA, 1520 bp, Homo sapiens
  source 1..1520: mol_type = genomic DNA
gaggtggtaaccgtgatagtagcagctccggcggcagcaacagcgactacgagggatggcggcggctgcagcaggaactgcaacatcccagaggtttttccagagcttctcggatgccctaatcgacgaggacccccaggcggcgttagaggagctgactaaggctttggaacagaaaccagatgatgcacagtattattgtcaaagagcttattgtcacattcttcttgggaattactgtgttgctgttgctgatgcaaagaagtctctagaactcaatccaaataattccactgctatgctgagaaaaggaatatgtgaataccatgaaaaaaactatgctgctgccctagaaacttttacagaaggacaaaaattagatagtgcagatgctaatttcagtgtctggattaaaaggtgtcaagaagctcagaatggctcagaatctgaggtgtggactcatcagtcaaaaatcaagtatgactggtatcaaacagaatctcaagtagtcattacacttatgatcaagaatgttcagaagaatgatgtaaatgtggaattttcagaaaaagagttgtctgctttggttaaacttccttctggagaggattacaatttgaaactggaacttcttcatcctataataccagaacagagcacgtttaaagtactttcaacaaagattgaaattaaactgaaaaagccagaggctgtgagatgggaaaagctagaggggcaaggagatgtgcctacgccaaaacaattcgtagcagatgtaaagaacctatatccatcatcatctccttatacaagaaattgggataaattggttggtgagatcaaagaagaagaaaagaatgaaaagttggagggagatgcagctttaaacagattatttcagcagatctattcagatggttctgatgaagtgaaacgtgccatgaacaaatcctttatggagtcgggtggtacagttttgagtaccaactggtctgatgtaggtaaaaggaaagttgaaatcaatcctcctgatgatatggaatggaaaaagtactaaataaattaatttgctctcatcgtattgtgtatattcacctaatgcccattgtgtattgatattgcattcttgaattttgaacactgaatatctttttgaaagattatacttctttacctctttgtgctttagaaattattttccttcaagtgttcaagtctaatgaagaatgaagataacattttatcacttctgtccttaaaggtttcagacatggtgaaactgaataaagcatgtcatttgctcctagatagattcattctatctagttgtggggatggagaaatctttaatggtatattttcggttattgccttatttttgatacagtattctgtcagtaatttattagacctggcagctttgggtgagcttagatttttcaccttcagtgttacattgtgtttgcttttaaaaactgcttttgaatggagttgtaaatacaatttttctatgaagatgt

SEQ ID NO: 801 - DNA, 6351 bp, Homo sapiens
  source 1..6351: mol_type = genomic DNA
aaaacggaaggtggttgtcgtccgttcccaagctggtttgaaactaggggtcgggctcggccgtcgtcgttgtttgtcgccgcatccccgcttccgggttaggccgttcctgcccgccccctcctctcctcccttcggacccatagatctcaggctcggctccccgcccgccgcagcccactgttgacccggcccgtactgcggccccgtggccaccatgtccctgcacggcaaacggaaggagatctacaagtatgaagcgccctggacagtctacgcgatgaactggagtgtgcggcccgataagcgctttcgcttggcgctgggcagcttcgtggaggagtacaacaacaaggttcagcttgttggtttagatgaggagagttcagagtttatttgcagaaacacctttgaccacccataccccaccacaaagctcatgtggatccctgacacaaaaggcgtctatccagacctactggcaacaagcggtgactatctccgtgtgtggagggttggtgaaacagagaccaggctggagtgtttgctaaacaataataagaactctgatttctgtgctcccctgacctcctttgactggaatgaggtggatccttatcttttaggtacctcaagcattgatacgacatgcaccatctgggggctggagacagggcaggtgttagggcgagtgaatctcgtgtctggccacgtgaagacccagctgatcgcccatgacaaagaggtctatgatattgcatttagccgggccgggggtggcagggacatgtttgcctctgtgggtgctgatggctcggtgcggatgtttgacctccgccatctagaacacagcaccatcatttacgaagacccacagcatcacccactgcttcgcctctgctggaacaagcaggaccctaactacctggccaccatggccatggatggaatggaggtggtgattctagatgtccgggttccctgcacacctgtcgccaggttaaacaaccatcgagcatgtgtcaatggcattgcttgggccccacattcatcctgccacatctgcactgcagcggatgaccaccaggctctcatctgggacatccagcaaatgccccgagccattgaggaccctatcctggcctacacagctgaaggagagatcaacaatgtgcagtgggcatcaactcagcccgactggatcgccatctgctacaacaactgcctggagatactcagagtgtagtgttggtggcgctgtgcccacgaggcaggggcttttgtatttcctgcctctgccccacccccaaagtaagaagaaacatgtttccagtggccagtatgtctttcattgctttgcacccactgttaccagaagctgctctaggagttcctggccagtcaccccatcgccctctgtggcagactcagtgctgtgtggcgcctcctcagcccagggctgagttttaagattttctctcctttcctcttctcctttggttcctcaattaaaaaatgtgtgtatatttgtttgtcaggcgttgtgttgaggagcagttcacgcactggctgtgtctattcctctgcccaggtgtctctgtttgctgcccaaggcagcagttcatgtctcgtccatgtccatgttcgtgttagcacttacgtgggaacaaataccaatttgtcttttctcctagtatcagtgtgtttaacaaattttaactttgtatatttgttatctatcaggctaatttttttatgaaaagaattttactctcctgcttcatttctttgtcttatagtcctccctctttgcaccttcttctcttccctcagtgcctggagctggtactgggcccctggccccatgagcagtttgccttcttgagtcactgcctgtgtagtacatacctgaccgggagtccaaaccaccttggtgctctgaagtccactgactcatcacacctttcttagcctggctcctctcaagggcattctgggcttgtaaacagacataggaagcctctgtttaccctgaagcaccactgtccagcccattggttcccactggcagcatggtagagctgagagaaacaggctctcagggtacctgacttgaggggaatcgtttcatgaagctgaacttcaagcatatttccagtacattctttcagagtctgtttttccatccaaatataagccccaggccattccacttagtgtcttttcaatgataggcaagaatgatatctgagttgaacttcggtgcttctgttgtttgagtttactgtgcctggtggtatattgggcattctttggattgagtgttctgaggtgagagagtcttcccgaggcatcctgtctgtgcttccaaccctgaacaagaccttacatgagagatggactgatggactgcggcaatcctgggctgtcaagtggatagatagttaaaaagcattatactgtgggtaatgaaaagggaggaaaaaaaaagaaggaaaaggaattatagacccccagggtcagccagttaagagctctacccacacctgtcaacccctctctcccccagtttaggttctgagcagtattggacttgtagcctgcagttgtcttttgacttgcaggccgcaggtgtctttctgttatgtgaatgagttccatggaggggcatatgtgtgattccaccgttagatgagcccttggggcaggcagtttgggatgtgctcttgggggaaagttggctgtttccttgcgctctgctcctacccgaaggtttttaagtccctctgaattgctcatctgagattagtagagtagcaggcctgaaggatgatggttttgtcctctttggttctcacctgcttgagaagtaaaacagtaactttgttcttctgggcccttaagcttttttggttaagtcttccttttcagaagtagatgtcattatatgccaaaagtctagctctttgctttaccatacagggacctgtcccaaagaaaaaggctctttttttagccagcatatttccccttctacccttttactttgttgttctgattttaggactctggctggccatgtgcttgtggttgcctctcctgcatttgccactggatttgcactgcatcgtttggagatacaaagcgagcagttcttggtcagaaccctcctctgcttttcattgtgtttgataatggttactgggtccttctctcaagggtagcaaggccaagctgatggctgcttgtttaggaggccatcagttccttcctgtggagaagggtctgaaatggaagtcagtggtagaaggggctggtctgctgggcagggcttacatccactgagttctaagattcctttcctgatctgcacctacgcctggtctgtatggtggaatttgtcagctggaactcagaaacaacaacttgaaaaaaaaataataattagaacatatttgcataagatagctatttactctggaaaccaacaacttttgagatttcccttgccctgtggacgcccagctcctgtcatccttccttaggtcctgcagtacagtcttcccctgaatgccaccggggacccagggggactccacccccctaagcaagcacacacatactcacagttgatgagttgctggtctttgagtcccagctctcttaccctccctttactccaccagcccgacgacccatgactgaggaggggatttctacagtctcaggatttagaaagtctgtaagccatccatgctccagaaagcaccgatctgttgtagttgcaaaaacaactctgtaatttgttgaggttctcaaactgacagccagcgagactgggtgggaggccctggatctgttctccctgactgcgggaggagcagccactaggactttagcaggaagcccacatggaggctccgccaggctgtggcccagctggtgatggcccttttgctcctggcagcctgaggcacagctgcctgtattgtcctcatctgttctgactgaaggatggaggtgctgaataaattaggcctcaggcctctaccaccagagagctggagaatgggtccacgtcattcaaggacctgaattttttatgctcaggagcattggaatcctcttcttccagggaggaattagcctgcaaggttaggacttgaagagggaaggtatttaataactgggcgaggatgggtgtggtggctcacacctgtaatcccagcattttgggaggctgaggtggccagatcccaaggtcagaagatcgagaccatcctggctaacatggtgaaaccccatctctactaaaaatacaaaaaaaaattagccgggggtggtggcgggtacctgtagtcctagctacttgggaggctgaggcaggagaatggcgtgaacctgggaggtggagcttgcagtgagccaagatcgtgccactgcactccagcctgggcgacagagcaagactccgtctcaaaaaataaaaaaaaaaaaaaaataggtgaaaattccttataaatccaggattggctctgagagaactggctaagattcaggaagaaacaaaaaattcagaatcctacaaggttttgatgacaattagggccaaaattttaggaggagatgtaggatgcaggagaaaattaaagtgttttctttatatcagaggaggaaatagtagaggtcagtgaaggtctggggtagggaaacattcagactgtccattgcatggctgtggagtgagactgcccttagcctgggtcagccttcctgggccataaattgggcatccgtgatgctaggtaactgtgggaacaaaatgacagcttagagcagccatgggtgatgtttggtggtaaaaaacctacaggcgtttggggtcccatgattgttccagaccatgactcttcctggttgtgggtttgttacagagcaggagaagcagaggttatgacagttatgcagactttccccctcctttttctcttttctcttccccttgcttttccactgtttcttcctgctgccacctgggccttgaattcctgggctgtgaagacatgtagcagctgcagggtttaccacacgtgggagggcagcccagtactgtccctctgccttccccactttgagaatatggcagcccctttcattcctggcttggggtaggggagaccattgaagtagaagcctcaaagcagacttttccctttactgtgtgtactccaggacgaagaaggaagatcatgcttgatacttagattggttttcccagggaagagggcggagcagagcaaagtcactgtgaaccctgggccaggccctggctgggccagctcctgagagcgtctcgtgttgcagacccttgcccacttcacccacctgcaccttctccccctctcacagtgtcactgctgctaatggtcaaagtcaaatgtgtggccacatgggatgggccaggtcctctcaggctactttctggatgtcatttttaaaatatggaaacatgcaggtgccttcccaaagaggcttggactggtatatccaacgagaaacaaataagctaaagaaagtttaaactcaagaagaaagatgttgacagtctatgtaacagctggaaagtttataggcacccacctttgggacaacccagtgattatgaacatgtgatatctactatttaaaagaaatgttctcaccttgggttgattgtggtataccatgtgttatgaaaattgttgagctgaagctttgaatcgatttagttgagtctgactcacttgctttggttcctgtgtattttactacccctcttgtcagtgaccttccttccccaccccacccagagtgaatttgtagcatgattgtataaacctctatgtagaaaatggagatttcttgctctgaaatgttaagctctaactgatccatttctgtgtcctttagcctagtatgtctgaacttccattcttgttatatatttaaactttccctctatattataggttttgtggcatccacggtcaggtgtagaggaagctgccccttgcagaactgtactgtaatatttttcttttataaatattttcacaggactgattgtacacagggcttgtaataaaattttaacactgtgctgtgaaacaactatggggaatctccattgaaggctacttcatgggcacctgaaagtggagtgttatagctatgactttctatttcttgtttcctaagtaaattaaacctaattttcaccctttcattctgtttcagcctcctgtataagaagtaccgtattttctgcccatcatactttgtaataaaacttgaacatgtatagattgactg

SEQ ID NO: 802 - DNA, 2717 bp, Homo sapiens
  source 1..2717: mol_type = genomic DNA
gggcaatcggcgcaggcccttcgtcgtgccccgcctcgtctgccccgccagcgcgtcgagggaggggccagcgacacatggcctagtaactgtccggccgcggcgctggcttaagccatggctgagggtagccggattcctcaggcccgggcgctcctacagcagtgcctgcacgcccggctgcaaattcgcccagccgatggggacgtcgcggcccagtgggtggaggtccaaagaggactggtgatctacgtgtgctttttcaagggagctgataaagaacttcttcccaaaatggttaatacactgttaaatgtgaaattaagtgagacagaaaatggcaagcatgtctctatattggatctacctggcaacattcttattatccctcaagctacccttggaggaagactaaaaggaagaaacatgcaatatcactctaactctggaaaagaagaagggtttgaactttactctcaatttgtgactctatgtgaaaaagaagtagctgctaatagcaagtgtgctgaagctagggttgtagtggaacatggcacttatgggaacaggcaggtgttaaagctggacaccaacggaccattcacacacttaattgagttttgaaaatgaaaaactagtttctatagctgttttctggtatgaaatgatctaaagtataattagattttcttccccttaatcttgaatatactaatcttcagcatttttagacaggaaaatcttgggtttcatatataactctgcacctgctaattggatgactttgccaagtcacctaaactctggatctcagtcaccttttgtcctacattcctctacccttctacttgaaaatttgaaatatgctgtctattcacttcatagtcattaaggaaatgttcttaattgtttttttgtttttgttttttttttgagatggagtcttgctctgtcgccagactggagtgcagtggcgcaatctcggctcactgcaacctccacctcctggattcaagcgattctcctgcctcagcctcccaagtagctgggattacaggcgcatgccaccatgcccagctaatttttttgtatttttagtagagatggggtttcaccgtgctggccaggatggtctcgatctcctgacctcgtgatccgcccacctcggcctcccaaagtgctgggactacaggcatgagccaccgtgcccggcctcttagttgttttttaaaaattatgtacattttaagtattttgcaatgaagaaattcatgcaaacaagaaaaacacatttcttataccatcaaatttgtgtagcatgtaataaaaataactatttgtattaaaattaggtaaacttcagcacaacccaattataactttgttaattttgtttactatttcagttttctgtatttccatatgtaagtcaccatttcttttaataatatgcatgaaaatgtaatatagggccaaatgtggtggctcatgcctataatcccagcactttgggaggccgaggtgggaggatcacttgagcccaggagtttgcgaccagcctgggcagaatagcaagacccagtctctaacatatacatatacatatagatatatatgtaatatagaagggttattgtgtgttatattactttccagggacattcaaatgttttacattactttaagaatctttacttgatataagaacaaagtataagggtttaaaagttgtttttattaaacatactatataaatgggttaatggtctatttttcagtttttaccaaaatcatgtgtctcactttttgtcttcgctttttaaagaactggttcatgaaattagtgttagttcataaattgtttaagaagttccttttccattgaattagattgctgtaaaagggagaaaaagggaagcttcccataagaatagtttgaaaacaaattgacttgttcatttccatattatctgcttgatgatatggagccagtgtcaatttttctgttagtgaatgttttggactagatgttcccgtccccaaaatttatatgttgaagcccttattaatgtgatggtatctggagatggggctcctccaaccatcccatcctggaacatataagccagaaagaaagtagtctccagaaacagaccatgctgacaccttgagtttgaacttctaatcaccagaactgtgaggaaataaatttctggtgtttaaaccacccagtcctatggtattttgttagggcagtctgagctacgacagtgatataagatagacagctagtaaggtaaacttttcaaaggcaagagaggaagatatacaagaaattgaaagaataattaagtcagtaagaggtaatattcagttttggcaaactcctctgacttgagttgaaaatactttttttttttaagagtaaaaaccaaataactaattctaattggcaaaaaaaggtaaataaataaacatcctaagtagctgctgaaatttccgttgtgtcttatagtttctttaggtctgtgttcctaagatgcttaaaatttttatcatgaaaaatcctattttctctatacccttcctgtactgttctattttggaaccagagaatcaataactggcttggtaatgagctcattgtccttaacttttgctttattgattcacaatacacttactgaaatgtaataaactattcataaacttgcaaa

SEQ ID NO: 803 - DNA, 4258 bp, Homo sapiens
  source 1..4258: mol_type = genomic DNA
atggaaggggcgctgactgcccgggacaaggtcggggttcaggattttgtgctattggacgcgtacaccagcgaatctgcctttgtcgacaacctccgcaagcgtttcagcgagaacctcatatacacatatattggcaccctccttgtgtctgtgaatccataccaggagctcggaatctacactgtgagccagatggaactttatcaaggggtcaatttctttgaactgccaccacatgtctacgctatagccgacaacgcttaccgaatgatgtgtgctgaactaaataaccatttcatcctcatttctggagagagtggggcagggaaaacagaggcctccaagaaaattctcgagtattttgcagtgacctgcccaatgacccagtcactacaaatagcccgtgacagactgctgttctccaacccagtgctggaggcttttggaaatgccagaacgctccggaatgacaactccagcagatttgggaaatacatggatatacaatttgattttcagggcattcccgtaggtgggcatatcatcagttacttgatagagaagtcccgagttgtctaccaaaacgaaggcgagcggaatttccacatcttctaccagctgctggcaggtggcgaagaggagcgcctgtcttacctgggactcgagcgagacccccagctgtataaatacctctcacagggtcattgtgccaaagagtcatccattagtgacaagaatgactggaaaactgtttccaacgccttttctgtcattgattttactgaagctgacctcgagaatctctttggaattattgccagtgtcttacacctggggaacattggttttgaagaagacgaccaaggctgtgccactatcccagacacccatgagatcaagtggatagccaagctcctgggggtccacccatcagtccttctggaagctctcacccacagaaaaattgaagccaaaactgaggaggtgatctgcccgttgacactagaactctctgtctacgctagagatgcaatggcaaaggctgtttatggacgaacgtttacttggctggtcaacaaaatcaattcctccttagttaacaaggatttcaccaggaaaactgtaattggattactggacatctatgggtttgaagtctttgacaagaatggttttgaacagttctgtataaattactgcaatgagaaactccagcaactgttaattgagaggactctaaaagcagaacaggcagaatatgaaatggaaggcatagagtgggagccaattaaatatttcaacaacaagatcatctgtgatttggtagaagagagacataaaggaatcatatctattctggatgaagaatgcattcggcctggtcctgctacagacttgagtttcctggagaaattggaagagaaagtgggcaaacatgcacacttcgaaacccgtaagctggctggtccaaagggccgaaagaggattggctggatggagttccgactcctccactatgcaggagaggtcacatactgcaccaagggattcttggaaaaaaacaatgatcttctttacagacatctgaaagaagtgctgtgcaagtccaagaacattatcctgagggaatgcttcctgctggccgagttagaaaaccggaggaggcccccaacagtggggactcagtttaaaaacagtctgagcagccttctagaaaccctcatctctaaggagccctcctacatccgttgcatcaagcccaacgacaggaaagaacccagcaaatttgatgacttcctcataaggcatcagatcaaatacctggggctgatggagcacctgcgggtgagacgggctggttttgcataccgaaggaaatacgagcatttcttgcaaaggtacaagtccttatgcccagacacctggccgcactggcacgggcctccagcagagggcgtggaacggctgatcaagtacatcggctacaaacccgaggaatacaagttaggcaaaaccaaaatattcattcgtttccccagaactctgtttgctaccgaagatgcctttgaatttagtaaacatcaactagttgcaagaatccaagccacttacaaacgctgcctaggaaggagagaatacgtgaaaaaaagacaagcagccatcaaactggaagcccactggcgtggggccctggctcggaaggcaatccaaaggagaaagtgggccgtgcggattatcagaaagttcattaaaggattcatcagtcgcaacaaacccctctgtcctgacaacgaggaatttatcgtgtttgtgcggaagaattacatcttgaatctccggtatcaccttccaaagactgtcctggacaagagctggctgaggcctcctggcatcttggaaaatgcatcagatctgctcaggaaaatgtgcgtgaggaacctggtgcagaagtactgccgcgggatcacagctgagcggaaagcaatgatgcagcaaaaggtagttacaagtgaaatcttcaggggaaggaaagacggctacacagaaagtttaaatcaaccctttgtcaacagtcggatagatgaaggagacattaatccgaaagtgcttcagctaattagccatgagaaaatccagtatggtgtcccggtcattaaatatgacagaaaaggcttcaaagcacggcagcggcaactcattcttactcagaaagcagcttacgtggtggaacttgccaaaatcaagcagaaaatagagtactcagctctcaaaggtgtctccactagcaatctgagtgatggaatcttagtcattcatgtttcaccagaggacagcaagcaaaagggggatgccgttttgcagtgtggacacgtgtttgaagcagttactaaactcgtcatgctggttaagaaggagaacattgtcaatgttgttcaaggaagtttacagttttttattagtccgggaaaagaaggcacaatagttttcgacactggactggaagaacaagtctataaaaataaaaatggacaattaacagtggtgtcagtccggaggaagtcctgatagaggatgacgtctgacctctaccatcgccatttttgctccaactgaggaaactacaggggaagtggggattggatccagttagctacctcttcaaggtaccaggcccgcagcactaacagatcacatctgaagaaactgaggggcgttaggccaaagcctaatcccagctcctcagctgccccatggcaccttatttaaaatgtcaccttctggaagcagaccccaggtcacccgaaggcgcaattctaaacaccctcgacaggatctatgttcagtgcgcagtccaacgtgtcattagagggtgggcaagattctctacctctgtcaagctgccctgagacatgatgaaatactgtgtacagcaagttctcaaataacatttcgttatatgttgataagacatctgattcctgggcagggccactgtctgggtggagtctgtatgttctccccatgtctctgggtttcttctgggtgctctggtttcctcccacgtccccaaggtgtgtgtgtcaggtgcactggcgtgtctatgcggtcccagtctgagtgagtgtgggtgcgtgagccccgtgagaggaggacatcctgtccagggtgggtcccgccttctgccctgagctgctgggattgggctctggccatctgcaaccctgaacgtgcaggttggagaacgaatgaatacaaattttattgtaaaataaaaatgtatataaagcatatgagcacacaaatggacaataaatgccacagcgcaaaagcgtgtagcgagcctgccacgcttgtgactggggaggggctccgtataatctcacctttgcaagcgtttatttactgatgtatgcggccaccactgtgaccaccatcacttaccgattcaccaaaacttaggtaatatggtcttatttttgatttaattaaatatacgtgtagctcatgtatttcacagtttaatatgagaagtgctttggtctttatttagaaattgggtgatgtttttgtgcccagcaacatgctgtaggaatttaactcttgtttacatccattagcctcatggttttgcttcaagtctcagcttccaagaacctatcgatgacttactgtgcatggtctgagactaagtaaaggaaatttcctaaagctgtgaaatttgaattttgctttaaataaatggaactcacatgtg

SEQ ID NO: 804 - DNA, 1447 bp, Homo sapiens
  source 1..1447: mol_type = genomic DNA
gaggtgggggcgggggccttaccccaccctggcaccggcaggcgcgggcggatggggggatgtcgcctagagccccccggccggcccacaaactcccgtcccccttccggctctgcctggacgtccctgcgggccccgggggaaagcacccaacttctcccgcctcggcttctagcagaaacgtgacggggctggactttgatcgccgagggctctctgctcttcagagtctgcttggaacgggataagagggatggtgccatccagggaagctctgctgggaccaggcacaactgccattaggtgccccaagaaattacagaaccaaaattacaagggccatggattgtcaaagggaaaagagcgagagcagagagcatcgatccggttcaagaccaccctcatgaacacactcatggacgtccttcgccacaggccaggatgggtggaagtgaaggacgaaggggagtgggatttctactggtgtgacgtcagctggctccgggagaacttcgaccacacctacatggatgaacatgtgcggatcagtcacttccggaaccactatgagctgacccggaagaactacatggtgaagaacctgaagcggttccggaagcagctggagcgtgaggcaggaaagctggaggcagccaagtgtgacttcttccccaaaacctttgagatgccttgcgagtaccacctgtttgtagaggagtttcgcaaaaacccaggaatcacctggatcatgaagcctgtagcccggtctcaagggaaaggcatcttcctcttccgtaggctgaaggacatcgtggactggaggaaggacacaagaagctctgacgaccagaaagatgatattcccgtggagaactatgtggctcagcgttacattgaaaatccttacctgataggaggccgcaagtttgacctgcgtgtctatgtgctggtgatgtcgtacatcccgctgcgggcctggctctaccgggatggctttgcccgattctccaacacccgcttcacactgaacagcattgatgaccagtatgttcacctcaccaacgtggctgtgcaaaaaacatctcccgactaccacccaaagaagggctgcaagtggacgctgcagcgcttccggcagtacctggcgtccaaacacgggcccgaggcagtggagacactcttcagggacatcgacaacatctttgtcaaaagcctgcagagtgtgcagaaggtgatcatcagtgacaagcactgcttcgagctgtacggctatgacatcctcatcgaccaggacctcaagccgtggctcctggaggtcaatgcgtccccatcactgacagccagcagccaggaagactatgagctcaagacctgcctcctggaagacaccctgcatgttgtggacatggaagcgagaagtttgagggctgattctccttgctggtaa

SEQ ID NO: 805 - DNA, 2711 bp, Homo sapiens
  source 1..2711: mol_type = genomic DNA
agtcggagcgaagcggctggcggagcagaacggattgcagggtcagccatgtcatctgagcctcccccaccaccacagccccccacccatcaagcttcagtcgggctgctggacacccctcggagccgtgagcgctcaccatcccctctgcggggcaacgtggtcccaagcccactgcccactcgccggacgaggaccttctcggcgacggtgcgggcttcacagggccccgtctacaaaggagtctgcaaatgcttctgccggtccaagggccatggcttcattactccagctgatggcggccccgacatcttcctgcacatctctgatgtggaaggggagtatgtcccagtggaaggcgacgaggtcacctataaaatgtgctccatcccacccaagaatgagaagctgcaggccgtggaggtcgtcatcactcacctggcaccaggcaccaagcatgagacctggtctggacatgtcatcagctcctaggagatggtggaagcaccccttgtcctgtgcttgtgggagactttgcagggaggaggcagcagacactggagatgacattcttccacacgagacggggcttcagccgggcatggtccctctcaagtatctcctggaggaaggggtatggggggcaggtgtggggtgtggggtgttcccggccatcagcacagcctatgaccattgcaacaacctctcaccatctgaagagcattaaaagcatttaaaaaggagaggtgcccactggtggctgagtggaggttccaaccccatcccagggagtggatcaagggtggtatttctccagctgctcagacacatgggctcaacccacagaatccctcttcctcctggagctggaggccccagattcccagatctggccccctggcagcctgacagggaccttgcgtgacttctccaaggcaaatttccacctaagtgccccttgcgcctctcctggggcctgggcaaagcagttttctaattcttggcttggttggttctaggggagctggcttgaagtgggtggggaaaggcgggggtggcggtctttggattggacggatgttgccttttggtgcctttgcagtgggaggcggcatagctgcctgtctggggaagacagttctcccagcactcccacccctgggcacagcaggctggtactgggaggctgaacccctcttagagcctgaccttttcatctgccttctggttgtgtgaccatcactcaacagccatttcacagcccctgtaattatggcggcggggggctggggtggtggtggtgggaagggcttgtggagaggacacagtctttgtttaaaaactttgtcccgatccatccagaaaagagtaggtagcttgcatcctgacagcctggcaaagtcaagaaagttgaaggagaaacatacctttggagagggggttttctttaaaactagtgttaagaaatgcttagggattttttttttcttatttttcataactaaagctttcacccagagccggctctgtttgcactttgctgccgacattgcaaactttttggcagggtgggagactgagtctcattctgtcacccaggctggagtgcagtggcccgatctcagcttactgcaacctctgccctccagggttctggcaattccgcctcagtctcctgagtagctgggattacaggcatgcgccaccacacccggttaatttttgtatttttagtagagaccaggtttcatcatgttgggcaggatggtcttgaacccctgacctcagatgatctgcccatctcggcctctcaaagtgctgggattacaagtgtgagccatcgcgcccggcctgcaaacttttttgtaggtatttctggtaaacaaatccttaggttatctttgctgtggttgtggtttggctttagtcatgatttcaaagtagaaatagctaggcattattttttgaaatatatgacctatatgtagtcaagaatccactgaacagaggcaagcaaaccttttggaaactggcttttgggcagacagtaaacgtccagtttgatgctggaagcatgaacagcttcatcaggtaggtactcctcaactctgatgagtttgtcctttcagcctaagggggtggaagggagttgtttgagaatagcaaatacgcatgttgattgcgagtgtgtggagacaaaggcagttcccaccacagttaggtcctggccattgtttcctcgcctgcgatgctccttgtacatcctcaccctcctctcccgcctctgccttctgctgggtcaaaggtggccttttctctccagccttgaattgttccctgttggcttcccaagggcccatctgctggtacagtccacacttccacagccaagacccgagagggctttcactgccccaagcctctctcctgtgaccctgggattctgtcttggcagaatcctttgtcagcggctcttactctgtccttcctgtttggccacagctctttcaatcaatgggtattctagaaccgcaggatgtcagagctggaagggacgcgataccggtttacacaaggggaaactcctcgaggctctgggagggacggagggttttggtgacagagcgagagctaaaattgaggattcctgaatccagatcttgcctcccatcagccatctttctcccaataaatttttgttttgtgcaagg

SEQ ID NO: 806 - DNA, 1562 bp, Homo sapiens
  source 1..1562: mol_type = genomic DNA
cgagcaggccgtttctgccgcgtccaccacaacctctgctgtatcagagggggccttcgccgccgccgcccccaccaccgcccctgccgccatcgccacctccgccgctgccgccttggggccctcctccttcaccgcccccttcaccacctctacacgttctaggccttctgtcctggagaagaagctatagtcgttctcccttgtgggcccggggcgcagccatggcggacggcggcggcggcgggggaactggcgcggtgggcggcggcggaactagccaggcctctgccggggcagcgactggcgctactggggccagcgggggcggtggccccatcaacccggcctcgctgcctcccggcgacccgcagctcatcgctctcatcgtggagcagctcaagagccggggcctttttgacagcttccgccgggactgcctggccgacgtggacaccaagccagcttaccaaaacctgaggcagaaagtggataattttgtgtcaacacatctggacaagcaggaatggaatcctacgatgaacaaaaaccagttgcgaaatggtctgaggcagagtgtggttcagtcagggatgttggaagctggagtagacaggattatttctcaggtggtggatccaaaacttaaccacatcttcaggccacaaatagaacgagcaattcatgagttcctggcggcccagaaaaaagcagctgtgccagcaccccctccagagcccgaaggccaggaccctccagctccatctcaggacacttcctaagaatacgccagacaccttttgaaagctaatttttggtgaagaaatggattcggttacataagagtgcaacttcagactgaagataggccaaggtcgtcactgatctcaagatttcaaccttgaccatgggcagtgaccagattgaaaggggagcaagttcggcagtgggagagttgaccgtgtcaccccctgcattgtgctgccatttggccagcctgtccaagggcatgacaccaagtagacactacagagagagaaacactacagcaacccagggttgtcctgaaacagacttttatacttgaacatggagactgcacatggactttagggtttgtgctgtgggataaacggaagctacagtgagaacatagccagtcccaaagacaatttcaaagaaaaatgacagtaaagattagctgggagtagtctttgacagtgcttatttgatactgtctctcagagtttgcaaaccagattgtacaagtcattagcgtcagatagctttaaagttgtgaccttcttgtacatgaatcttctagccagtttcctttcctttgtaacgaaacatgaaatcctagaatgtatgagaagttcagacattaggcataaggaaactcgtttgcaggctctctgtccagggctgcttcctgtcctggaggggccagtgagtcttaggtatgtttattttattctcacatttgtgtttttttagaaaagtgaatggtcaataaatggcttatctttcataataaaattatttgatacttttactccgaa

SEQ ID NO: 807 - DNA, 10242 bp, Homo sapiens
  source 1..10242: mol_type = genomic DNA
ccgagccgggagccgagcgcgctgggcgcggccgtcccgctgccgccgccaagcccggagtgcgccagcggccatggttcccgcggcggcgccgggcgcctgagccccgggacgcaagcgctggaggcgggctgccggctgtgcgggcgctccggagagaccgacagaaggtgagcactgtgggctatgggatggatgaggtggagcaggaccagcatgaggcccgactcaaggagctgtttgacagttttgacacgacgggcacagggtccctggggcaggaggaactcaccgacctttgccacatgttgagcttggaggaggtggccccagtgctgcagcagacattacttcaggacaacctcttgggcagggtacattttgaccaatttaaagaagcattaatactcatcttgtccagaactctgtcaaatgaagaacactttcaagaaccagactgctcactagaagctcagcccaaatatgttagaggtgggaagcgttacggacgaaggtccttgcccgagttccaagagtccgtggaggagtttcctgaagtgacggtgattgagccactggatgaagaagcgcggccttcacacatcccagccggtgactgcagtgagcactggaagacgcaacgcagtgaggagtatgaagcggaaggccagttaaggttttggaacccagatgacttgaatgcttcacagagtggatcttcccctccccaagactggatagaagagaaactgcaagaagtttgtgaagatttggggatcacccgtgatggtcacctgaaccggaagaagctggtctccatctgtgagcagtatggtttacagaatgtggatggagagatgctcgaggaagtattccataatcttgatcctgacggtacaatgagtgtagaagattttttctatggtttgtttaaaaatggaaaatctcttacaccatcagcatctactccatatagacaactaaaaaggcacctttccatgcagtctttcgatgagagtggacgacgtaccacaacctcatcagcaatgacaagtaccattggctttcgggtcttctcctgcctggatgatgggatgggccatgcatctgtggagagaatactggacacctggcaggaagagggcattgagaacagccaggagatcctgaaggccttggatttcagcctcgatggaaacatcaatttgacagaattaacactggcccttgaaaatgaacttttggttaccaagaacagcattcaccaggcggctctggccagctttaaggctgaaatccggcatttgttggaacgagttgatcaggtggtcagagaaaaagagaagctacggtcagatctggacaaggccgagaagctcaagtctttaatggcctcggaggtggatgatcaccatgcggccatagagcggcggaatgagtacaacctcaggaaactggatgaagagtacaaggagcgaatagcagccttaaaaaatgaactccgaaaagagagagagcagatcctgcagcaggcaggcaagcagcgtttagaacttgaacaggaaattgaaaaggcaaaaacagaagagaactatatccgggaccgccttgccctctctttaaaggaaaacagtcgtctggaaaatgagcttctagaaaatgcagagaatgtgttagcagaaaagtttggtgacctcgatcctagcagtgctgagttcttcctgcaagaagagagactgacacagatgagaaatgaatatgagcggcagtgcagggtactacaagaccaagtagatgaactccagtctgagctggaagaatatcgtgcacaaggcagagtgctcaggcttccgttgaagaactcaccgtcagaagaagttgaggctaacagcggtggcattgagcccgaacacgggctcggttctgaagaatgcaatccattgaatatgagcattgaggcagagctggtcattgaacagatgaaagaacaacatcacagggacatatgttgcctcagactggagctcgaagataaagtgcgccattatgaaaagcagctggacgaaaccgtggtcagctgcaagaaggcacaggagaacatgaagcaaaggcatgagaacgaaacgcacaccttagaaaaacaaataagtgaccttaaaaatgaaattgctgaacttcaggggcaagcagcagtgctcaaggaggcacatcatgaggccacttgcaggcatgaggaggagaaaaaacaactgcaagtgaagcttgaggaggaaaagactcacctgcaggagaagctgaggctgcaacatgagatggagctcaaggctagactgacacaggctcaagcaagctttgagcgggagagggaaggccttcagagtagcgcctggacagaagagaaggtgagaggcttgactcaggaactagagcagtttcaccaggagcagctgacaagcctggtggagaaacacactcttgagaaagaggagttaagaaaagagctcttggaaaagcaccaaagggagcttcaggagggaagggaaaaaatggaaacagagtgtaatagaagaacctctcaaatagaagcccagtttcagtctgattgtcagaaagtcactgagaggtgtgaaagcgctctgcaaagcctggaggggcgctaccgccaagagctgaaggacctccaggaacagcagcgtgaggagaaatcccagtgggaatttgagaaggacgagctcacccaggagtgtgcggaagcccaggagctgctgaaagagactcttaagagagagaaaacaacttctctggtcctgacccaggagagagagatgctggagaaaacatacaaagaacatttgaacagcatggtcgtcgagagacagcagctactccaagacctggaagacctaagaaatgtatctgaaacccagcaaagcctgctgtctgaccagatacttgagctgaagagcagtcacaaaagggaactgagggagcgtgaggaggtcctgtgccaggcaggggcttcggagcagctggccagccagcggctggaaagactagaaatggaacatgaccaggaaaggcaggaaatgatgtccaagcttctagccatggagaacattcacaaagcgacctgtgagacagcagatcgagaaagagccgagatgagcacagaaatctccagacttcagagtaaaataaaggaaatgcagcaggcaacatctcctctctcaatgcttcagagtggttgccaggtgataggagaggaggaggtggaaggagatggagccctgtccctgcttcagcaaggggagcagctgttggaagaaaatggggacgtcctcttaagcctgcagagagctcatgaacaggcagtgaaggaaaatgtgaaaatggctactgaaatttctagattgcaacagaggctacaaaagttagagccagggttagtaatgtcttcttgtttggatgagccagctactgagttttttggaaatactgcggaacaaacagagcagtttttacagcaaaaccgaacgaagcaagtagaaggtgtgaccaggcggcatgtcctaagtgacctggaagatgatgaggtccgggacctgggaagtacagggacgagctctgttcagagacaggaagtcaaaatagaggagtctgaagcttcagtagagggtttttctgagcttgaaaacagtgaagagaccaggactgaatcctgggagctgaagaatcagattagtcagcttcaggaacagctaatgatgttatgtgcggactgtgatcgagcttctgaaaagaaacaggacctactttttgatgtttctgtgctaaaaaagaaactgaagatgcttgagagaatccctgaggcttctcccaaatataagctgttgtatgaagatgtgagccgagaaaatgactgccttcaggaagagctgagaatgatggagacacgctacgatgaggcactagaaaataacaaagaactcactgcagaggttttcaggttgcaggatgagctgaagaaaatggaggaagtcactgaaacattcctcagcctggaaaagagttacgatgaggtcaaaatagaaaatgaggggctgaatgttctggttttgagacttcaaggcaagattgagaagcttcaggaaagcgtggtccagcggtgtgactgctgcttatgggaagccagtttagagaacctggaaatcgaacctgatggaaatatactccagctcaatcagacactggaagagtgtgtgcccagggttaggagtgtacatcatgtcatagaggaatgtaagcaagaaaaccagtaccttgaggggaacacacagctcttggaaaaagtaaaagcacatgaaattgcctggttacatggaacaattcagacacatcaagaaaggccaagagtacagaatcaagttatactggaggaaaacactactctcctaggctttcaagacaaacattttcagcatcaggccaccatagcagagttagaactggagaaaacaaagttacaggagctgactaggaagttgaaggagagagtcactattttagttaagcaaaaagatgtactttctcacggagaaaaggaggaagagctgaaggcaatgatgcatgacttgcagatcacgtgcagtgagatgcagcaaaaagttgaacttctgagatatgaatctgaaaagcttcaacaggaaaattctattttgagaaatgaaattactactttaaatgaagaagatagcatttctaacctgaaattagggacattaaatggatctcaggaagaaatgtggcaaaaaacggaaactgtaaaacaagaaaatgctgcagttcagaagatggttgaaaatttaaagaaacagatttcagaattaaaaatcaaaaaccaacaattggatttggaaaatacagaacttagccaaaagaactctcaaaaccaggaaaaactgcaagaacttaatcaacgtctaacagaaatgctatgccagaaggaaaaagagccaggaaacagtgcattggaggaacgggaacaagagaagtttaatctgaaagaagaactggaacgttgtaaagtgcagtcctccactttagtgtcttctctggaggcggagctctctgaagttaaaatacagacccatattgtgcaacaggaaaaccaccttctcaaagatgaactggagaaaatgaaacagctgcacagatgtcccgatctctctgacttccagcaaaaaatctctagtgttctaagctacaacgaaaaactgctgaaagaaaaggaagctctgagtgaggaattaaatagctgtgtcgataagttggcaaaatcaagtcttttagagcatagaattgcgacgatgaagcaggaacagaaatcctgggaacatcagagtgcgagcttaaagtcacagctggtggcttctcaggaaaaggttcagaatttagaagacaccgtgcagaatgtaaacctgcaaatgtcccggatgaaatctgacctacgagtgactcagcaggaaaaggaggctttaaaacaagaagtgatgtctttacataagcaacttcagaatgctggtggcaagagctgggccccagagatagctactcatccatcagggctccataaccagcagaaaaggctgtcctgggacaagttggatcatctgatgaatgaggaacagcagctgctttggcaagagaatgagaggctccagaccatggtacagaacaccaaagccgaactcacgcactcccgggagaaggtccgtcagttggaatccaatcttcttcccaagcaccaaaaacatctaaacccatcaggtaccatgaatcccacagagcaagaaaaattgagcttaaagagagagtgtgatcagtttcagaaagaacaatctcctgctaacaggaaggtcagtcagatgaattcccttgaacaagaattagaaacaattcatttggaaaatgaaggcctgaaaaagaaacaagtaaaactggatgagcagctcatggagatgcagcacctgaggtccactgcgacgcctagcccgtcccctcatgcttgggatttgcagctgctccagcagcaagcctgtccgatggtgcccagggagcagtttctgcagcttcaacgccagctgctgcaggcagaaaggataaaccagcacctgcaggaggaacttgaaaacaggacctccgaaaccaacacaccacagggaaaccaggaacaactggtaactgtcatggaggaacgaatgatagaagttgaacagaaactgaaactagtgaaaaggcttcttcaagagaaagtgaatcagctcaaagaacaactctgcaagaacactaaggcagacgcaatggtgaaggacttgtatgttgaaaatgcccagttgttgaaagctctggaagtgactgaacagcgacagaaaacagcagagaagaaaaattacctcctggaggagaagattgccagcctcagtaatatagttaggaatctgacaccagcgccattgacttctacacctcctttgaggtcatagccaaaccaaagggtacactcatatttgtgcactttactgaaatagatgaacatttcagtaggttctcaacttaaaattaagcctaacctaaaactgccagcaacacaactggagtttccatttatcataattagtttttctaaatagacccttatgggagtttgaaaataaatactcacatatttcactacttaaattattcccaagatttgaatttattttaaaattttaatagccaccaagaatgtggacatatgaaaattcaagaacctaaaaaataccagttttgaatgagtttttgtggttttggttttttttttaattattacaaatctatgtgtaaaatctagatatttgaagtttgagatctgatgagaatggttgttataaactttattttaaaaccaaatttaggtgttcttacatatttaaatactggaaagtcattataatagttttggttctttgaattggtagacaattagtagagtataattggttaggaggcagggcttattaagtggttattaaccgctgacatcagacaaacccaaatctgtagaattctaaccttctaacacctgtgacagtattaccactcttcttgtattatagatttagaactgatttactcaattgcactcttaactaatgttaaaagcttacttgctttaaacagccttttcttctttctcttaaaagtttcatttggggagctggtcttctaagaaacggataaagccacataattaaagcagttgaactatagggaaagcactgaacaaaccactttggagtaaatagctactcttagaaaagagggataagcagaccatgtaggttttctgtctctcaaatcttagagttcataaatttacttgaggttgcctcaagaactcagggaacaatactgtaaactgtcttcctgaactactgtagggcctctctaagaatttgaaatgtataaaccatgtgacctcatttatttgtcttatatatttacagccatactagaatttttatttctacgtttttagtaaatttaatattctgggggaaaaaaggccttgattttagggttaaaaacctgacttatagaagagtttatttaatataggtcaaaattttctgtgtttcttattccttctatacctcaaatctgattctaagaatttcttactgtgataatcattggcatgccacctgaggtcaaggagtgccaaataggactttccactcatgctcaagatcaaaactttatagaacagtcaacattttagattcggtaaccttttttttcttccaattataatctctgctagccacttccgccagcagttggtggaagacttactaggtgcagggcactttccaagttcatcacaacaacctgcttgttttcatgagacaataatccgaaaagttcgctttgatatattcctggagggccaagcccatctatttacaaaaggtgaacagcaaaatcaagcactgctttatgggcaggaacacaagagaaagcaaactgcccaagaagtcatcatgtcagaaactcaatctcaacaaaataatttccatcagggaacttcagggtttcttgggggcttatgagtctcaccggtcaacccaggaggcctcactacaagagccttgacaaggcactgttttttgtgggactgggagttcacactgatgaagcaaacctttgaatttttgcacagctcttgtcagaaagccctgagttccccctggataaagagttaattttaatccttccctataattatacttcaaaatatttgacatctgctattatgccttctttagatctttcttctgtggtgcagacatttctagtaagtgtttgactacttgtatggcattagctttcacagaaaattgtttcacttaaaactgtggattggcctaggctaaggacaaaaataaactaagtacctgtagtgtatttatgtgatatgtgtcaagttactcaaagttattgctgttggaactgaacaataatatttcccagatagctggccttagcatgtgatcacggttgttgtatttttaatttttgtcttttacagtatgagaggtgtaggttaatttgtttatttcctataaatttgtatttatgtgtatataaaatgtacaatgaatgtaaatatgactttctggaaagtttagactacatttagaatctctattcaaaatcaaaatgctgctcaaatgaatttaaccaacatctaggtgcttaatttctcattttatcccacttatgagattgggaaaaagatcaatatgagaaataccatacagataccttaaatgtatgcatttgtgcaacaatttttgagaaggtgagtggcaatttataatttagttggcaatttataatagaacttatagcttttaaaagaccttttaaagacattaaatgtaaacttaaaaatgtttagatcttgtttcaaactttacaatagcattcttcaaaatattaagttatatattttataggcatttagttgcttattaaaagcactgattttcaaactttttgatttaagaacaattatttaagatcgtctcagaagatgggatcttcgtttcaagaaaagggaatcaagtttgcctttgagataatacgttacactaagaaaaggaaaatgtggatagtaaaacccacctctctcatcctattgtactctcttctgctttttagaagcctgcacttaagcttagatttgtgaagggagagtagaaggggagaagtagaaccacagtgttttatttatttttctaaaactcttactaaatccagattttttaaactgttttaaatgtgaattcttcccagaaatttcaatgcattgcatatttagccttcggcatatttttcatgaatagatcatgaagtcataggcttccaaggcataggaagagatcttgcaggtctagtattttaataatgcactattacccagggcagatattatgagaaactgtttcttctctaagggtttatggcagactttgcttttttaacatgtgagaaatgaattttttattttgtgatttatgtgatttcttttgctgagtgaaggaaaggagaaattgttgctattgtcagcatcttaaaggtatttccagtcaaggcaaggctaagtgctttgtgatagtattaagcaagtcatgttttgaatggattacctgtagtgactcattggaatgatataattatacaagtaatgccaaaaaccaagtcaaagcctaattaaccaaagcactcatttaaaaatcatcatgtttggacctatctggacctctcagcactgtaaaatagttttggttttgtggcatatgaatagctgtttaacaaatcaaagttagctttttgcttctcagcttttttgggcaatacaagttaagttcttaatggggagacattatcatggcatgacttaagggaacattggtttgtgaaggaaaaacagattatctaaagccatctctatgtttctgttcagataaagattaatgagttctgtgtttatatcagctttgtatatttcatcttagccattctatcctagaaagattttaatgtgagcttaagatgtaaataaataattttgcaaacatgccttttgttttctatataccctgaccttttaataaagtttcagtgtatttatca

SEQ ID NO: 808 - DNA, 3662 bp, Homo sapiens
  source 1..3662: mol_type = genomic DNA
gccggggtgcggagggagtccctgaaacttctcccaacagccccagggccaatcttccctcagcccactcccctcttcgccagctcccaggtccccactcctgtaccgggggtggggtggggagccaggcccgtctcccgctgggacacacacaggggccgggagcggggacgggacccccgaggcgggggggacgaaccgacagacagacggctgggcgcccgccccagcgggcaggcaggcaggaggaggcggaggcgggggtacgacggggagcactgggtctggggagtttcctctcaactatcgggggagaaactccccgcagccggaggaaagacccagacagtgttttcctcccgggggccgtgctcccccgccccgcgtagcggcggtcgccgccaccggcgcctccacctctaccatctcctctttctccaccacctcgggccccggtgtccccggccagcactatgcccatcttactgttcctgatagacacgtctgcctctatgaaccagcgcagccatctgggcaccacctacctggacacggccaaaggcgcggtagagaccttcatgaagctccgtgcccgggaccctgccagcagaggagacaggtatatgctggtcactttcgaagagccgccctatgctatcaaggctggatggaaagaaaaccatgcaacgtttatgaatgaattgaaaaaccttcaggctgaaggacttacgactcttggccaatccctaaggacagcttttgatttattaaatttaaatagattagtaactggcatagacaactatgggcagggaagaaacccttttttcttggagccagcaataattatcacaattactgatgggagcaagttgactaccaccagtggagtccaggatgagcttcatttacctcttaattctcctttgcctggaagtgaattgaccaaggaaccttttcgttgggatcagagactctttgcattagtgttgcggttgcctggcaccatgtcagtagaatcagaacagttgacaggtgtgcctttagatgactctgcaatcacaccaatgtgtgaagtgacaggcggccgttcatattctgtgtgttctccaagaatgcttaatcagtgtctggagtccttggtgcagaaagtacaaagtggggtggtaataaactttgaaaaagcaggaccagatccttcccctgtagaagatgggcagccagatatatcaaggccttttggatctcagccttggcatagctgtcacaaactcatatatgtcagaccaaatcctaaaactggggttcctataggtcattggcctgttccagagtctttttggccagatcaaaattcgccaacactaccacctcgtacatctcatcctgtagtgaagttttcctgtacagactgtgaaccaatggttattgataaacttccttttgacaaatatgagttggaaccttcaccactgactcaatttatcctggaaaggaaatctcctcaaacatgttggcaggtgtacgtgagcaatagtgcaaaatacagtgaacttggtcatccttttggttacttgaaagccagtacagcactgaactgtgtcaacttatttgtgatgccttacaattatccagtccttcttcccctcttagatgacttgtttaaagtgcataaagcaaaaccaacattgaagtggagacagtcatttgaaagttatttgaagacaatgcctccctactatcttgggcccttgaagaaagctgttaggatgatgggagcacctaacctaatagcagacagtatggaatatggacttagttacagtgtcatttcatacctcaaaaaactgagtcaacaggccaaaatagaatctgatcgagtcattggatctgtaggcaaaaaagtagtacaggagactggaataaaagtccggagccgatcacatggtttatcaatggcatataggaaagattttcaacaactcctccagggaatttcagaggatgtccctcacagactgctagaccttaatatgaaggaatacactgggttccaagttgctttgctgaataaggatttgaagccacagacatttagaaatgcttatgacataccaagacgaaatcttttggatcacttaacaagaatgagatctaatcttttgaagagcactcgcagatttctgaaaggacaggacgaagatcaagtgcacagtgttcctatagcacaaatggggaactaccaggaatacctcaagcaagtaccttctccactaagagaacttgatcctgatcagccacgaaggttgcatacatttggcaacccctttaagctggataagaagggtatgatgatagatgaagcagatgaatttgtggctggacctcaaaataaacataaacgacccggagaaccaaatatgcaagggatccctaaaagacgtcggtgtatgtctccactactaagaggcagacagcagaatcctgttgtaaacaatcatattgggggaaaaggaccacctgcacctacaactcaagcacagccagatcttattaaacctcttcctcttcataaaatttcagaaaccactaatgattcgataatacatgatgtggttgaaaatcatgttgcagaccaactttcatcagacattacaccaaatgctatggatacggaattttcagcatcttctccagccagtttactggaacggccaaccaatcatatggaggctcttggtcatgaccatttaggaaccaatgacctcactgttggtggatttttagaaaatcatgaggagccaagagataaagaacaatgtgctgaagagaacataccagcatcttcactcaacaaaggaaagaaattgatgcattgcagaagccatgaagaggtcaatactgaactaaaagcacaaataatgaaagagatccgaaagccaggaagaaaatatgaaagaatcttcactttactgaagcatgtgcaaggcagtttacaaacaagactaatatttttacaaaatgtcattaaagaagcatcaaggtttaaaaaacgaatgctaatagaacaactggagaacttcttggatgaaattcatcgaagagccaatcagatcaaccatattaatagcaattaaaagaaaatagaatgtggccacttatttcactatcttcttcaaatacaaagtaaatacaagactgttgtgatcttgcattcattttctgacatgcattgttggctatttgaaatactaaaagcaaatctacagatcctttttccatcattttacagtgaccttttcttcattttggtttatttttgtaatgtgaaaagtatcactctaaaaaacatttttaatttaacaaactaaaaatattcctccaaatctcttgcttgtcattgactcttgcgtgtcaatttccctcaggttctattttcttaaaccaacctttaaaattgtcacctctgttaaggttgaactttgccaaaaaaaaaagaagttactttgtaatttttggggaaaaaagcacatacattaaaactaggtaatgttttgtatatacagttattttggatatattattgtaagttgtacaaatgtattttgaagaatatttaagaaaagcacttttgttattccatcaataaatgctctatttta

SEQ ID NO: 809 - DNA, 7333 bp, Homo sapiens
  source 1..7333: mol_type = genomic DNA
acttccttcgtctgggtggttgccccagcgacacgttgggccgaagagcggtgttgggtacccgagagacccggcggtggggaagtcacttcctcccgaagacgctgtttcctagcaaccgccctccgcctctgttattagcccctcctcctcgctcggtccaggaccggctctgcgggcgccgccaggcccagaccaagctactatcagaagttgaattctaataattagctattttataaaggtaacgagaaaaaatacactatgtctgatgaagtttttagcaccactttggcatatacaaagagtccaaaagttaccaaaagaactactttccaggatgagctaataagagcaattacagctcgctcagccagacaaaggagttctgaatactcagatgactttgacagtgatgagattgtttctttaggtgatttttctgacacttcagcagatgaaaattcagttaataaaaaaatgaatgactttcatatatcagatgatgaagaaaagaatccttcaaaactattgtttttgaaaaccaataaatcaaacggtaacataaccaaagatgagccagtgtgtgccatcaaaaatgaagaggaaatggcacctgatgggtgtgaagacattgttgtaaaatctttctctgaatctcaaaataaggatgaggaatttgaaaaagacaaaataaaaatgaaacctaaacccagaattctttcaattaaaagcacatcttcagcagaaaacaacagccttgacacagatgatcactttaaaccatcacctcggccaaggagtatgttgaaaaagaaaagtcacatggaggagaaggatggactagaagataaagaaactgccctcagtgaagaattggagttacattctgcaccttcttcccttccaacgccgaatggcatacaattagaagctgagaaaaaagcattctctgaaaaccttgatcctgaggattcatgcttaacaagtctagcatcatcatcacttaaacaaattcttggagattctttttcaccaggatctgagggaaacgcatctggaaaagatccaaatgaagaaatcactgaaaaccataattccttgaaatcagatgaaaataaagagaattcattttcagcagaccatgtgactactgcagttgagaaatccaaggaaagtcaagtgactgctgatgaccttgaagaagaaaaggcaaaagcggaactgattatggatgatgacagaacagttgatccactactatctaaatctcagagtatcttaatatctaccagtgcaacagcatcttcaaagaaaacaattgaagatagaaatataaagaataaaaagtcaacaaataatagagcatccagtgcatctgccagattaatgacctctgagtttttgaagaaatctagttctaaaaggagaactccatcgacaactacctcttctcactatttagggactttaaaagtcttggaccaaaaaccttcacagaaacagagcatagaacctgatagagcagataacataagggcagctgtttatcaggagtggttagaaaagaaaaatgtgtatttacatgaaatgcacagaataaaaagaattgaaagtgaaaacttaaggatccaaaatgaacagaaaaaagctgctaaaagagaagaagcattagcatcatttgaggcctggaaggctatgaaagaaaaggaagcaaagaaaatagctgccaaaaagaggcttgaagaaaaaaacaagaagaaaactgaagaagaaaatgctgcaagaaaaggagaagcactacaagcttttgaaaaatggaaagagaaaaagatggaatatcttaaagagaaaaatagaaaggagagagaatatgaaagagcaaagaaacagaaagaggaggaaactgttgccgagaaaaagaaagataatttaactgctgttgagaaatggaatgaaaaaaaggaagcttttttcaagcaaaaggaaaaagaaaaaataaatgagaaaagaaaggaagaactgaaaagagctgagaaaaaagataaagataaacaagctattaatgaatatgaaaaatggctggaaaataaggaaaaacaagaaagaattgaacgaaaacagaagaaacgtcattcctttcttgaaagtgaggcacttcctccgtggagccctccaagcagaactgtgttcgcaaaagtgttttgataattctagttcttacattatttggttatttatcggtttgccaatattagccatagatttaaaaccattcaattatttatagttagaggaatatattttaattaaatgccagacactcctgctgacaatgaaagaaatactttggaatgtaatcagtgaaagcatttttttgaactgtagataaactgcctcaaacaaagacctaataatcagattgtttttaccattaagatacataagattttatcatgtcctgataattcttatggtggagtgattcatgatctttttcattaagctctgtatgttatttaagtatatttaattccagtaataaaaaggaaatcatctaggtaccataatgatagaaattattccttttgtggatgattgtgaatctagattcaggtttttaaatgaagggtcgctgggaagtgcgcatatattattccttctgaaactgatgtttagctcaaagcagttgcatttgtactgtgctagttagaattttcatcagttgaggcagtagctcagtagaactctaatcatcaaggctttttatttaagaattttgccttatgttttaatatgagtgtactttatctgttccaggcttatgtgataatcataggtactttataatgagtccacctctgaaatttttctttctgaattctatctcactttattatttcagtgataccaaaagacatcaatgtcacagtagtgatatacttatgtattagttatggaaattccacaggagttcaaggtcattatcactataattattttcctgactaaagccataaaggtgatttaggcaattattgtcatcttagctagtcctgttttatagcttatattcagcagacagctgtatgggaaggtaaatatgttgacaatgtccacaaagcctttatttatttatttatttgatctctgcatgtcctcgtagtaactggtctcatacttgacctggtcatctggtttaagacagaccaagtgtatgctcacggagctgaaatgcattagtcagttgtgcaatgaggagatgatggatgagaatatatagttcctatttattgagcatctaatatataatctctactggacctttacaaatgtatttaacatctttacaacaacttttcagggtaggtgttaccggcttcatcttacatataaaaatactggcgctcagataaaccaagtaacttaccgtccatctggagtgtgcctgagttgagatcaaacgggattcagtacgtctgactgaatctgcctccttctgaaatctctatgctctttttcacacttctctgtagcctcagagactgccaagttctgtcaagacctctgcataatatcaacgttacaaacacgttttaacttttagagcctaaaatcatgtattgttatccaaagatgatctttctctacagaaatagctgcttgttcttagagatggtggaggtcattaaatctataaagtgagataaaaatccataagatttcatgagttactcaggcatcttataactactatcagaatatcagaaaactcagcaagttatgtgacaaaggctttgagatgatcactccagacgttccacatactgagcatcagccttcttgctgcagtgcatgtgcaagataagatgtcataggcagctttgtaagattgtatcagtgctatagacaattaagagaaatttcatagataaaactagaaccctttctatatggccagaactgtaatactttatgaaattgatctgattatcagcaatatgtagtatcagcatggaatttaggacctctcttactcattcctgtgtcccccatagtaccaaaaacagtgcctgccaaaatagattaaaagtgtttattgtattagctgtttagagctgaaaagatatttacaaattccagggaagtaaaaggaaaaaaactgaaaaaggtacagctacttttggggatgtgagatcatggatgtgtatcttatagatttcacattatttatttactttccattattttcttctacattatcatatttagtggctaaccattattacttcttaggttgttgtgagaaccgagttaattaatgtaaactatttgacacataataaggacttaaatgttcattgttgtcattattgatttattaccatgagccctacatttccccattcatgagtgtgcgaacattaacatagatagggttgataatggttatttgacattacacatttttaggaagaagaaatttctgtcttgctggccagtccaggctgtaacactcaaaaaaacaaaacaaaacaaaacaaaacaaaaaaacagaaagatgccttgtattagggccttcctaaaaagaaagctaagtaagtattaatttcttaggattgcttctgaggtaggatgaggtgtttgcatagacccaacaagtcattcacttcaaattttttttgtcttactatgataaataacatattatttcctgtttacagcaacctgcactgaaattaactagttgaataaaatcacctcttctagcacaaataaagctgagttcggggaggtgggtgaaaatacagtactgttgtttacttcctaagatccaagggagagaatcaagcttggtaatattctcttgaatatacatttacctatttaaaaggtatgattttcccatatttccttaggaagtatgtcatgtcaatatagatatttactcattaggtttacattaatttgtattataagggaatgtttaattcaaattaaggacattaaaagtatatagactttcatataaaagttccggttttataaattgcgttgatcacttaaagaatgcagagatctcaaagtaaagaaaacaaattttatgaatattttaaaacattacttaaaacaagtttccttagaaagcacatttgtggataaatttaaatattaatactaaataataaagtagtatacagaatttaaatttcataataatgaagaaagtggtaatgctatttaacttaaaagatgcaatatggcattttagatcaagaggttaaagttttcttaatgaaagaaagtaacgatttatgggataaaaatattccagtggtttgtatttgcttcatacttcaaaagtgttagtccatttattgtttaaagttatattgaaactgatattttcactgctgccaaagcagtacctgacagtagataggtatccacagtcttatgttccttagagttatagaactatgcctctgaaaggggttttaatactttaataaacctggcctaaactgttttatttctaagttgaagaaactgattgtcaagtactttgacttgtccaatctcatacaactaactatggtacatctagagttagatctcagtatcaggggtcccagttgtattctgctcaccattccacaatttcgatattgataaaactttcacactaacttttgaactgtggttattattaatttagttgattcatgtcctcttatttatctccttactcctccactgctgccttcataactgtccaccagatcaaagctatttgggtacctacactttaaagtgaggggaaataatgaagtttcttaaatcctgtgtcatggactaagatacaataaagaaaaggaatttcacaaagtaggggaaattacgtgttagttataatcattcccaagaataaactagtaaaagaaacttagatttccctaatttaatcttgactccgattttgatagtgctatataaaaaggtatttaaacccatatgcttccttttacataaaagaaagatatcaactttcctagtttgcatttacactggctaataggataataaaatgctgtgtaaatgttaaactggaagtttctctgagttatttttactttaaaatttcatgtgattatgccattttgaatatgtatattacatgtaattgtataatgttaactcgggtaggcaaaattcttggtattaaatttaggatgttttaaaaattattaagaagatattaatgtctgctttttgatagcatatattttcatgtaatgtttagtgtattaaaatcaaccattcaagatttattttattgggtgacactattgactgtgttccaaaatgcccatagtgttaggaaatgtggtgtgagttttatttgtgggctaaggataaaataatcatatgctaatataccttttattataaatgactaaaaatttggatataaaactgatgttttactacacaaattacagagagagataatataattatataattattaaataattagaaaatgcaaataagcaaaagtcacccatgttcccagttctcatctcctgaagatagttataactaacatattattttgtactcttcctgttaattagtttctagtgtactttctcctgtagctgaaattaagctgagaaaaaaggaagagatagttcctccctcctctttctctctcccactctgtctctctcctgtgctatctgtgtgtatatacaaatatgtatgcatatatatataatgatgtacataatatatataaaatacaaatactaatgtgcatattttcaaacatacacatattttttattatttgaaataagaatgagtcagactacatatttggtagccagatttttttcactcagtgatatatcatgaacatatttccatgctaatataattttctaataattttagatgctgtaactacaatttcattgttaatgggcaatttgttgctttacaaatggtaaattatatgataaataatatgatcattattcttgtagccaatatcattattagaaatgatggaccgcattaaagctataaaattaaataagaatttataaatgtaaggagttattcagacatcttgtatctagtattacaatatcagaaaactcagcaggttatatgacatatacactttgagatagtcactcagaggttttcacatacaggattaaccttgctgcagtgcgtgtgcaagattaaaaaagatgtcacgggtcactttgtaatgtcatatcgttgctgttgataaataaaggaaatgttataaataaaa

SEQ ID NO: 810 - DNA, 1363 bp, Homo sapiens
  source 1..1363: mol_type = genomic DNA
cgccgccgcgggctcaagcggggcggccgggccagcgcggggcggcggcgggcaggggcggcgagtgcgcgggcgctcgccgccgcccttctcggcgggcagcgcgcgaggaccaggccgaggaggaagtggcggcggcggcggcgggactgcgcgccccagctccgatccccgttccgcgtccccgccgccgggaggaggtgcccactcgctcgcggcgcgcgccggccgccagactcggcctgtgggcgatttcctccggacccaggctccccgcccgaggaggaagatgcagacctttctgaaagggaagagagttggctactggctgagcgagaagaaaatcaagaagctgaatttccaggccttcgccgagctgtgcaggaagcgagggatggaggttgtgcagctgaaccttagccggccgatcgaggagcagggccccctggacgtcatcatccacaagctgactgacgtcatccttgaagccgaccagaatgatagccagtccctggagctggtgcacaggttccaggagtacatcgatgcccaccctgagaccatcgtcctggacccgctccctgccatcagaaccctgcttgaccgctccaagtcctatgagctcatccggaagattgaggcctacatggaagacgacaggatctgctcgccacccttcatggagctcacgagcctgtgcggggatgacaccatgcggctgctggagaagaacggcttgactttcccattcatttgcaaaaccagagtggctcatggcaccaactctcacgagatggctatcgtgttcaaccaggagggcctgaacgccatccagccaccctgcgtggtccagaatttcatcaaccacaacgccgtcctgtacaaggtgttcgtggttggcgagtcctacaccgtggtccagaggccctcactcaagaacttctccgcaggcacatcagaccgtgagtccatcttcttcaacagccacaacgtgtcaaagccggagtcgtcatcggtcctgacggagctggacaagatcgagggcgtgttcgagcggccgagcgacgaggtcatccgggagctctcccgggccctgcggcaggcactgggcgtgtcactcttcggcatcgacatcatcatcaacaaccagacagggcagcacgccgtcattgacatcaatgccttcccaggctacgagggcgtgagcgagttcttcacagacctcctgaaccacatcgccactgtcctgcagggccagagcacagccatggcagccccctcaggggagttccgcgctggggatttgtgctgtgatttgggcaaatcattccaggtctttgggcctccacccccttgtctctag

SEQ ID NO: 811 - DNA, 852 bp, Homo sapiens
  source 1..852: mol_type = genomic DNA
atgctgcggtgtggacagatgatctttgcccaagccctggtgtgccggcacctaggccgagattggaggtggacacaaaggaagaggcagccagacagctacttcagcgtcctcaacgcattcatcgacaggaaggacagttactactccattcaccagatagcgcaaatgggagttggcgaaggcaagtccataggccagtggtacgggcccaacactgtcgcccaggtcctgaagaagcttgctgtcttcgatacgtggagctccttggcggtccacattgcaatggacaacactgttgtgatggaggaaatcagaaggttgtgcaggaccagcgttccctgtgcaggcgccactgcgtttcctgcagattccgaccggcactgcaacggattccctgccggagctgaggtcaccaacaggccgtcgccatggagacccctggtacttctcattcccctgcgcctggggctcacggacatcaacgaggcctacgtggagacgctgaagcactgcttcatgatgccccagtccctgggcgtcatcggagggaagcccaacagcgcccactacttcatcggctacgttggtgaggagctcatctacctggacccccacaccacgcagccagccgtggagcccactgatggctgcttcatcccggacgagagcttccactgccagcacccgccgtgccgcatgagcatcgcggagcttgacccgtccatcgctgtggtacttggggtggggaagcagggaaggctggtgcgatctattccttgggctccacgtccgagttcatggtgcgccgctgtgctgggagctgcagtggtaatgtgtgggacaccttga

SEQ ID NO: 812 - DNA, 2682 bp, Homo sapiens
  source 1..2682: mol_type = genomic DNA
aacgatcccagtgtcggttgcgggatccgcctcctctcagtttgcccctttagccctccacctttcccttctcctctctcgcatttccgccagtcggcttacccgctggccgcctcctgacaagcgggagggatccgcggtggacccagggaagcggaggagcctggcggccaccccctcttcctcacttccctgtactctcatcgctctcggcctccgacacgaaaaggaagcaaatgagctgatggaagatctgtttgaaactgtgagtaatgatcctcaagtgagaacatgggattttccaagatgagatgggattctccaacatggaagatgatggcccagaagaggaggagcgtgtggctgagcctcaagctaactttaacacccctcaagctctacggtttgaggaactactggccaacctactaaatgaacaacatcagatagcgaaggaactatttgaacagctgaagatgaagaaaccttcagccaaacagcagaaggaggtagagaaggttaaaccccagtgtaaggaagttcatcagaccctgattctggacccagcacaaaggaagagactccagcagcagatgcagcagcatgttcagctcttgacacaaatccaccttcttgccacctgcaaccccaatctcaatccggaggccagtagcaccaggatatgtcttaaagagctgggaacctttgctcaaagctccatcgcccttcaccatcagtacaaccccaagtttcagaccctgttccaaccctgtaacttgatgggagctatgcagctgattgaagacttcagcacacatgtcagcattgactgcagccctcataaaactgtcaagaagactgccaatgaatttccctgtttgccaaagcaagtggcttggatcctggccacaagcaaggttttcatgtatccagagttacttccagtgtgttccctgaaggcaaagaatccccaggataagatcctcttcaccaaggctgaggacaacaagtaccttctaacctgcaagactgcccgccaactgacagtgagaatcaagaacctcaacatgaacagagctcctgacaacatcattaaattttataagaagaccaaacagctgccagtcctaggaaaatgctgtgaagagatccagccacatcagtggaagccacctatagagagagaagaacaccggctcccattctggttaaaggccagtctgccatccatccaggaagaactgcggcacatggctgatggtgctagagaggtaggaaatatgactggaaccactgagatcaactcagatcaaggcctagaaaaagacaactcagagttggggagtgaaactcggtacccactgctattgcctaagggtgtagtcctgaaactgaagccagttgccgaccgtttccccaagaaggcttggagacagaagcgttcatcagtcctgaaacccctccttatccaacccagcccctctctccagcccagcttcaaccctgggaaaacaccagcccaatcaactcattcagaagcccctccgagcaaaatggtgctccggattcctcacccaatacagccagccactgttttacagacagttccaggtgtccctccactgggggtcagtggaggtgagagttttgagtctcctgcagcactgcctgctatgccccctgaggccaggacaagcttccctctgtctgagtcccagactttgctctcttctgcccctgtgcccaaggtaatgatgccctcccctgcctcttccatgtttcgaaagccatatgtgagacggagaccctcaaaaagaaggggagccagggcctttcgctgtatcaaacctgcccctgttatccaccctgcatctgttatcttcactgttcctgctaccactgtgaagattgtgagccttggcggtggctgtaacatgatccagcctgtcaatgcggctgtggcccagagtccccagactattcccatcgccaccctcttggttaaccctacttccttcccctgtccattgaaccagccccttgtggcctcctctgtctcacccttaattgtttctggcaattctgtgaatcttcctataccatccacccctgaagataaggcccacatgaatgtggacattgcttgtgctgtggctgatggggaaaatgcctttcagggcctagaacccaaattagagccccaggaactatctcctctctctgctactgttttccccaaagtggaacatagcccagggcctccaccagtcgataaacagtgccaagaaggattgtcagagaacagtgcctatcgctggaccgttgtgaaaacagaggagggaaggcaagctctggagccgctccctcagggcatccaggagtctctaaacaactcttcccctggggatttagaggaagttgtcaagatggaacctgaagatgctacagaggaaatcagtggatttctttgagctaggagaataagagtctggagactgggagccttcacttcggcctccgattggtggcgcatagggtgtaaccaataggaaacccctaaagggtacttaaaccccagattttgcaactggggctcttgagcagcttgctttagcctgctcccactctgtggaatatacttttgcttcaataaatctgtgcttttattgcttcattgtttca

SEQ ID NO: 813 - DNA, 1142 bp, Homo sapiens
  source 1..1142: mol_type = genomic DNA
acagtgtcatggaggccgcggcggtgacggtcacccggtcggctacacggcggcggcggcggcagctgcaggggctggcggccccggaggcggggacgcaggaggagcaggaggatcaggagccgcggccgcggcggcggcggccgggaaggagcatcaaagatgaagaagaagagacagtctttcgagaggtggtcagtttttccccggaccccctgccagttagatattatgacaaggacaccaccaaaccaatcagcttttacttgtcttcgctggaggagctcttggcgtggaagccccgcttggaggatggctttaatgtggccctggagcccctggcgtgtcgccagccccctctgagcagccagaggccccggactttgttgtgtcatgacatgatgggcgggtacctggatgacaggttcattcagggctcggtggtgcagactccctatgctttctaccactggcagtgcatcgacgtctttgtgtacttcagccaccacaccgtcaccattcccccagtgggctggaccaacactgcccacaggcatggggtctgcgtgctggggactttcatcacggagtggaatgaagggggaaggctctgtgaagccttcctggccggggatgagcgctcgtaccaggcagtggctgaccggctggtccagatcactcagttttttcgttttgatggctggctgatcaacatcgagaactcgctgagtctggccgctgtggggaacatgcctcctttcctgcggtacctcaccacacagctgcaccggcaggtcccagggggcctggtgctctggtatgacagcgtggtgcaaagtgggcagctcaaatggcaagacgaactcaaccagcacaacagggtcttctttgattcctgcgacggcttcttcactaactataactggcgggaggagcacttggagcggatgctggggcaggctggggagcgccgggctgatgtgtacgtgggcgtggatgtgtttgctcgagggaacgtggtcggaggccgattcgacacagacaagtcgttggagctgatccgaaagcatggcttctccgtggctttgtttgcccccggctgctccgtgtttcctggcgttggcaatttactgtgctgctga

SEQ ID NO: 814 - DNA, 1503 bp, Homo sapiens
  source 1..1503: mol_type = genomic DNA
agccgtgtcaagatgagagggaagcgtagaccgcagacccgtgcagctaggcggctggctgctcaggagtccagcgaggctgaggacatgagcgtccccagaggacccattgcacagtgggctgatggcgccatttccccaaatggccatcggccacagctcagagcagccagtggagaagacagcactgaggaggccctggcagctgccgctgcaccttgggaaggtggtcctgtgcctggagtggacacaagcccctttgcaaagtctctgggtcattccagaggggaggctgacctttttgattctggggacattttttccacgggcactggatctcagtccgtggagagaacaaaacccaaggcaaagatagcagagaatcctgccaacccaccagtgggtggtaaagcaaagagccccatgtttcctgctctaggcgaggccagcagtgatgatgatctctttcagtctgctaaaccaaaaccagcaaagaaaacaaatccctttcctctcctggaagatgaggatgacctctttacagatcagaaagtcaagaagaatgagacaaaatccagtagtcagcaggatgtcatattaacaacacaagatatttttgaggatgatatatttgctacggaagcaattaaaccctctcagaaaaccagagagaaggagaaaacattggaatctaatttatttgatgataacattgatatctttgctgacttaactgtaaaaccaaaagaaaagtccaaaaagaaagtggaagccaagtctatatttgatgatgatatggatgacatcttctccactggtatccaggctaagacaaccaaaccaaaaagccgatctgcacaggccgcacctgaaccaagatttgaacacaaggtgtccaacatctttgatgatcccctgaatgcctttggaggccagtagagcacacagggtatccacatgttaccctgcagctacattgttgagttagtgatgatattgtatatgctcatggtcttaactggattacaaaaagcaaatactagaacagctagctcatcttttacccaatgtacttagtatttttctgcactggtttaatcatgcttaatactacaaaacaaaaataaatatttcacagtggttggtttgttttgtttttaaaccacagtttgatttagttagccttgctggggccataatatgcttcagggtgtgtaaaagaagaaatctctttgtggctttcatgggcagggaatctcagagatagcaaatgccacctgaccagaagtctttgttatatggatgggaaccctaacttagggcttgggcaggggaaagagaaagaagatgagagattatacttcatgagtcttagcaatatgggagcaggttttcactgaattctgagggtgcctctgcatgtcctccaaggcaaagtttggcaaactgtggcccccccactgtcatattttgttaataaaattttattggaacacaatcaca

SEQ ID NO: 815 - DNA, 1842 bp, Homo sapiens
  source 1..1842: mol_type = genomic DNA
tcggggtgagggccgtccgcggcctcgctttcgcctcctccgagccgggccggcgatggccgcagctgtgaggcgagcagaagaatagaaggaaggtgataggatgtgatgatagaatttgtgatagccaagcaacaacttttcctaattcggcatgttaaaaaataagggtcactcatctaagaaagataacttggcagtcaatgcagttgctttacaagatcacattttacatgatcttcaacttcgaaatctttcagttgcagatcattctaagacacaagtacaaaagaaagagaacaaatctctaaaaagagatacaaaggcaataatagatactggacttaaaaaaactacacagtgccccaaactagaagactcagaaaaagaatatgttcttgatcccaaaccgccgccgttgactttggcacagaagttgggcctcattgggcctccaccacctccactgtcatcagatgaatgggagaaggtgaaacagcgctctctcctgcaaggggactccgtgcaaccatgccccatctgtaaagaagaattcgagcttcgtcctcaggtgctgctttcatgctcccatgtgttccacaaagcatgtcttcaggcttttgaaaagttcacaaataagaaaacctgtcctctctgtagaaagaaccagtatcaaacccgagtgatacacgatggggcccgcctgttcagaatcaagtgtgtgaccagaatccaagcctactggagaggatgtgttgttagaaagtggtacagaaacctgaggaaaacagtacctcccacagatgccaagttaagaaaaaaattctttgaaaaaaagttcacagaaatcagccaccgcatcctgtgctcatacaacaccaacattgaagagctctttgcagaaatcgatcagtgcttggccataaatcgaagtgttcttcagcagttggaagaaaaatgtggccatgagatcacagaagaggaatgggagaaaatccaagtgcagaatgaaacttccgcatgtttcgaagacccatgtctcggggcacatggttcgcatttcagtttaagtaactttctgctgtgatgaaactaacccgcgtggcctcttcccgtcctgtgtgccgcaggctctgcgccgggagacccacgagtgctccatctgcctggcccctctctccgctgctggcggtcagcgcgtgggtgcaggcaggcgttccagagagatggccctcctgtcctgctcacatgtgttccaccatgcgtgtctgctggcactagaggagttctccgtgggagacaggcctcctttccatgcctgtcctctctgccgctcctgctaccagaagaagattcttgaatgttgaattcatagtcaaggaaagttaggtaattctgaggaaaaaagtttaccatcattttggatgaactgcatgagttctgggttaagtactacaatgtaatctgtttcccagggaaataagctattggtagttgtaggaaatcttagtatattttaaaagctgacatcccacctaattttaatctttggtctctaaaaagtaaatttcaaatttatgagtttaatcacttcaaatatgaatagcaaaaaatgagagcttgcttacttctaaaaattgaggttaagatatagctagtgtctgaacgacactccttaaagtaagttccaaatgtaaaacactccttaagttccaaatgttttccgctaatagtctgtcctaaagcctttgccattcctaatactcgttttgtaataattgctgtatttctgtgtaataaaatataaaaataaaatattcagtggtattcaacatcaaaaaa

SEQ ID NO: 816 - DNA, 3635 bp, Homo sapiens
  source 1..3635: mol_type = genomic DNA
aaggaggagtgcactggccgggatcggtgcagcgctcacactcactcacagtcactctctctgagcgcgtctcgctcgctctcatacacgcccggagcccaggagcgctcaggatcccgagcgccgcgaaaaagttcccccggcttttgctggagactcatcgctttgggaagtgcatttgcttcgtggctccgccgagcctgctgaatcctgtcctcgcggctcgggaccccgggatcgctgaccgctgccgccgccgcctctgcctcccggactatcggcagcctcggcaacaatagtggcggccgcccccagcgaggctccgggagcccttgcctgcgggggtccggggactcgagccggcctccgcctcccggacgcacagccagcgtggtccccgcgtgcaacgcgagcgccggggagtggctcctgctttgcccctcgtgggggccgagccaagaccagtctgcaaactccatcccgccggctggaagaagtcgcggagccggcaccaaacccgcagcgtcttcccgcgcggatcccgggacttaaaaagccggggccaccccggcccaggacgggatgcgggtcggtccggtgcgctctgccatgagcggcgcctcgcagccccgcggcccggccctgctcttcccagccacccgaggcgtcccggccaaacgcctgctggacgccgacgacgcggcggctgtggcggccaagtgcccgcgcctctccgagtgctccagccccccggactacctcagcccccccggctcgccctgcagcccgcagcccccgcctgccgctccgggggccggcggaggctccgggagcgcgccggggcccagccgcatcgccgactacctgctgctgcccctagccgagcgcgagcatgtgtcccgggcgctgtgcatccacactggacgcgagctgcgctgcaaggtgtttcccattaaacactaccaggacaaaatcaggccttacatccagctgccatcgcacagcaacattactggcattgtggaagtgatccttggggaaaccaaggcctatgtcttctttgagaaggactttggggacatgcactcctatgtgcgaagccggaagaggctgcgggaagaggaagccgcccggctcttcaagcagattgtctccgccgtcgcccactgccaccagtcagccatcgtgctgggggacctgaagcttaggaagttcgtcttctccacggaggagagaacccagcttagactagaaagtctagaagacacacacataatgaagggggaagatgatgctttgtcagacaaacatggctgcccagcctacgtgagccctgagatcctcaacaccactgggacctactccggaaaggctgcggacgtttggagcctgggggtgatgctctacacccttctggttggacgataccccttccatgactcagaccccagtgcccttttctccaaaattcggcgtggacagttctgcattcctgagcacatttcccccaaagccaggtgcctcattcgcagcctcttgagacgggagccctccgagagactcactgcccccgagatcctactgcacccctggtttgagtccgtcttggaacccgggtacatcgactcagaaataggaacttcagaccagattgttccagagtaccaggaggacagtgacattagttccttcttctgctaatccccaaaacctcagaaacctcataattcttaacacctggcatttccatttctaaagatggacaggccctttggcgtggtaccaaccagataatgactgcatcaggatgaaagctgctgaactcggcatggcgcctcctcttctctgttgggatgagtgactttattgatttgagcagcatatgctgtgattggctgccctgcaaatttgtttcccttaaggaaccctcaccaactatctctgctggatttgggagttccgcatcttttgtggagggcagagtatggacatcttacacccggtggtcaagtgtgtaataaacttgagcattcgaatgggagaaaaagcaaatcgcacaatgacatattttgagtaataaccgtatttttcacagggtgacaaattgggccaataaatctgccatctttgaactcatctttggtggctagactgctacggcagcttctctgatgggaaagttccttttttggcttaacactcaccctttcttcacactcacatttaccaatgactctgctccgtttttggagcagactgttttaagttgctcaggagcctgatggaaccatgaaccgagactcttctctgtttcctgccaagacctcatctgcactaatgccttctccctgaccttgacacttccccctttagctataaaagcacttaccagccgaacgtggaacagtatcacaaaagattccatctcccaacgatttcagaactctgagctcagagagactccagattttaaaaaataatttgagtgcttggaaactattagctttttaagttccttccaaatatgttagtacctaccctttactttttccccaagaccatctcagggtggagcattctgtctaagagaagaaagataaggaggctcccacccacctctcccaagagcagacattaaacatctttgtgctttgaagagagtgaattttggatagtcttgtgattctcagactaacttccagaattatactttaacccctcccagatatggtccgcctttggcattgtgtgtacatctgcagttttgcatggtgggttgttaatatttcaaatgtgtggtttatgaatacgtctgtataatcggcttctggagtgaaacagcaaaccccaaatcttcaaagttggaaggaactttaaaaatcatccggtccaatctctttcctctttctgccacctcccaaggcagaaatcccctcttcagcttcttttgtaggtgggaatccagcctctgttagatatgtccagagatggaaactcactcccctacaaaagatggagcttaatggagaaattgcaactttcattaaaaaacaaattcagatgaaatatcagtaactgtcttggacagtgctgaaatcaggtggttaaacgggtaaacaaaatatactgtattttgagaaatggcacaaaaacaggcagtcatctttaagggctatgcctaggcaaactactaacatgcattgtgagaatgccgtgtatacctcacgtactgtgtactttgtacatatattttaccttttatacctatgttcgattttgttttgttttgttttgttctggctttgaggcttgttttgttgtctgtgtctgtctgaataacctgcgtgtctaaaaccacgtgaaatgtgaatgattattggcaatattaccttgacagaatcatgggactttgagaagagggaggacagaggcctctgtcgcactaacgctctcgtggttgctcgactgttgtatctgtgatacattatccgactaaggactctgggctggcagggccttctgccgggaaagctagaaacactaggttcttcctgtacatacgtgtatatatgtgaacagtgagatggccgtttctgacttgtagagaaattttaataaacctggtttcgtaaata

SEQ ID NO: 817 - DNA, 4723 bp, Homo sapiens
  source 1..4723: mol_type = genomic DNA
actgccgctgccgcggctacctgcggttcatctccgcacattccacacgcggcccaaacggtctctctctctctctctcaaacaccgcctttccgtctttgttttatcttgagtagcttagaaagattggagaagaaagcttacgtggaatgaaaatcaacttttatggatattttgaggactaaaagaataaatagggcgtccgtactgtagcgaaagtgcgactaaggttaggcatctggatttcccccgtagccctctttcaccccccccccccggccattaccgaagcggatgaaaacaaacactaacgatggcggcgccgggaagcgaccggctgctgggcttaaggcgggagtgaccgcttaaccagtgagggaagcactgaagagcgccagtcgacgtgggtgcgacaactcgcggagtcttaggagcaaaacgtctggggcctgcgagccaggacccttctgaagccttaggtgtctatcggcgacgtgtacggtcactgcagctccggagcgcggaaccctcagccaggaggcgcggctggtcggtcccaggtcccggcctccgtaatgagagcccggaaccactctttgtgccgcagcttcgcagcatcttggactcaagtgattctcctgcctcagcctcctgagtagctgggactacagattcctataggcaatggaaactgatctcaattcccaggacagaaaggacctggacaagtttattaaattttttgccctcaagactgtccaagtgattgtccaggctcggcttggtgaaaagatttgcactcgttcatcatcttctccaacgggttcagattggttcaacttagcaatcaaagacatcccagaggttacacatgaagcaaagaaggcactggcaggacagctgcctgcagtcgggaggtccatgtgtgtggagatttcacttaagacttctgagggagattccatggagctggaaatatggtgtcttgaaatgaatgaaaagtgtgataaagaaatcaaagtttcctacacggtgtacaacagactgtcattgctgctgaagtcccttcttgctataactagggtgacaccagcctataggctctccaggaaacaagggcatgaatatgtcatattatacaggatatattttggagaagttcagctgagtggcttaggagaaggcttccagacagttcgtgttgggacagtgggcacccctgtgggcaccatcactctttcttgtgcttacagaattaacttggcattcatgtctaccaggcaatttgagaggaccccacctatcatggggattattattgatcactttgtggaccgtccctatcccagctcctctcccatgcacccctgcaattacagaactgctggtgaggacactggagtaatatacccgtctgtagaagactctcaagaagtgtgtaccacctctttttccacctccccaccatcccagctctcaagctctcgcctttcctatcagcctgctgccctgggcgttggatcagctgacctggcttatccagtagtgtttgctgctggcttaaatgctacacaccctcaccagctgatggttcctgggaaggaaggtggggtaccccttgctcccaaccagcctgtccatggtacccaggctgaccaggagagactggcaacctgcaccccttctgacagaacccactgtgctgccacaccctccagtagtgaggatactgaaaccgtatcaaacagcagtgagggacgggcctcccctcacgatgtcttggagaccatctttgtccgaaaagtgggggcttttgtcaacaaacccattaaccaggtgaccctgacgagtttggatataccctttgccatgtttgctcccaagaatttggagctggaggataccgatccaatggtgaatcctccagattccccagagactgaatctcctctccagggcagcctgcactcagatggctccagcgggggcagcagtggcaatacccatgatgactttgttatgatagactttaaaccagctttttctaaagatgacattcttccgatggacctggggaccttctatcgggagtttcagaacccacctcagctgagcagcctctccatagatattggagcacagtccatggctgaagacttggactcattaccagagaagctggctgtgcatgagaagaatgtccgcgagtttgatgcctttgtggaaaccctgcagtaaaagtatccttgagtcccagcagcaccccctttttgtggccccagggcataagcagcctcccatgcatcagctgctcccacccctcatcctgctctgagccaggtggaagggaggctggcttctcccatggggacccagaagtccctactcttggacctcctggagactccgtggcggcagtcaagcccagtgcccagttggagaagactcacgtgctggccttggagatgggaagaaccttcgtacgaaaaagccctcagcagggccatctgtgtgccctgcccatcaccaactgcttcccaagggtgtcatcctgttcctcctgctgccggcctcctgcctgggcctgccttgcagctggccccttccctgcctgctgtcaccatccactgtttgacattccagctggtggccaagagattggtgtggagtcgcagaaagaggaaggagacagtgccaggaggaagaaggaaggagtcccttagctctcttcattgtcccctttacttcctgctatcttcttctcctcttcttctctctcttgcctctatgcctgtatttctggcaatatgacaggcctgcctacccaagatcagaactccaaaaccactcccacccctgaaggtcgggagggtctgagcagccctggtggctgcctgtgctcaggtcctcagctccatgggaaataaaaatggcaccctgaatctctaggattttgtcacttggagtcacagcaaagttctcttcctcttgtccccccgttgctgctccttggttatagaacatggtaaatatttattactttcagagaaaccagatattttatagaggaaatatgtttgaggtgagttgtttttcacttggagaaggcggagggctcttcctgggacggagacctcctcctccggaggttattgagaatccgggctgctgctttgaggatcttcccaccatacagacagcgagatccaagaagagggctggccgggggcaaagtcacctcccagtgtggctgcactggaactgactaaaggctttaccttggatagttgcgtattcctggtgagagccttacatctcccacagtttctgcagagtgactgactccattctggcagcccaggaagtcctgggtgctaaatgtgatggccacatgtagtggttaggggatgttgtgtgtgtcccccaactgcctgggtacttgttcctgatccctggggctgtcctgtggagcttttcctcctgcttgggcctagctaccatctccctctaatcccaggttctctacactgccctggggtttaccagctggattggcttctggttgagaaatcaaagctgggcgtatgattgacttaacccttcaggtattgttacttgaataagtcaagtgcctagcctcacccacctatgatctgtcctttcccagcctcgctggtagtcctggtcaaggagatctaggtctactccattcctcctggcccacctggggcattcactggcagcagctgtgcttcagtggagcaggtggttctcagctgcttgttagtatactgcatgtgacactgttcccacatacaaggctgacttctgaggattggagcaggctctggcggggaccagagctctgcgtgctgctgctgccaccaagaagtgttagcagaagcagtagcagccaactggccctcctgactttggcccagagcacatgcgtggcttgctgaacccaggctcaggtttatccccaaggccccagctttgagaagggggaaggcccctggtaagttattgatgcccccatatttcagctactgctctctttccaaggccttgcatggaaaggcctagccattgtctgaggcagcaatctttggcatctacaggtggcagcagcctttcaccagggctccatctgtgaagagtctcagccatgactttgagctgagcttgggagaagtaaagcaactgttaaggccagcccttgcccctcagacctgccatgaaaggaatgagccctagactgactcctgcagcacccccgggacaggctgggaccagctgtttgtctccaggtgtcagagtccctcctcctcctccaacctctccaacctactttgtttggaaataccgagctacacttcaaaatgtattcaagggatttccaataaatttttttctgtactttacagcctcctgtcctgtaggttgtctgaagacctcgtaaccccttccccacccctgccccagtgcaggtctgggaaaggggagagtggtgcgttgtgaagcgcagaaagacctcaagtgtctgggcaagcctgttttgagtcgggtgtggcctcttaggggctgtataccctggggtttcctgggtcaggaaacttcttagtatttctctttccctggtcccctatcaggggcttgaatttgaatattcagttggagaatgcatttaaaatacacccatagtaaaatctccataaaatgc

SEQ ID NO: 818 - DNA, 2238 bp, Homo sapiens
  source 1..2238: mol_type = genomic DNA
acacgccgcgctgaggcccgcgggcccgtcatggaggcgcccaccgtggagacgccccccgacccctcgcccccttcggccccggcccctgccctggttccgttgcgcgccccggatgtggcgcggctgcgcgaggagcaggaaaaggaagaaggtagataatgactataatgcccttcgagaaagactcagcaccttgcctgataaattgtcttataatataatggtaccatttggcccttttgccttcatgccaggaaaacttgtccatactaatgaagtcactgttttactgggggacaactggtttgcaaagtgctcagcaaagcaggctgtaggtttagttgagcaccggaaagaacatgtaagaaaaacaatagatgacttaaaaaaagtgatgaaaaattttgaatccagagttgaattcacagaagatttgcagaaaatgagcgatgctgcaggtgatattgttgacatacgagaagaaattaaatgtgacttcgaatttaaagcaaaacaccgaattgctcataaaccgcattccaaaccaaaaacttcagatatttttgaagcagatattgcaaatgatgtgaaatccaaggatttgctagctgataaagaactgtgggctcgacttgaagaactagagagacaggaagaattgctgggtgaacttgatagtaagcctgatactgtgattgcaaatggagaagatacgacatcttctgaagaggaaaaggaagatcgtaacacaaatgtgaatgcgatgcatcaagtaacagactctcatactccttgtcataaggatgttgcaagttcagaaccattcagtggtcaagtgaatagtcagttgaactgttcagtgaatggttccagttcttaccacagtgatgatgatgatgatgatgatgatgacgacgacgacgacaacattgacgacgatgatggtgataacgaccatgaggctttaggggttggagataattctataccaacaatatatttttcacatactgttgagcctaagagggtccgaataaatactggaaagaataccactttaaaattcagtgaaaagaaagaagaagccaaacgtaaacgaaagaacagcactggcagtggccactctgcccaggagctgccgaccatcaggacgcctgcagacatttacagagcctttgttgatgttgtgaatggagaatatgtccctcgcaaatccatcctgaagtctcgaagtagagagaatagtgtgtgtagcgacactagtgaaagcagtgctgctgaatttgatgataggcggggagttttgaggagtatcagctgcgaagaagccacttgcagtgacaccagtgagagcattttggaagaggaaccacaagaaaatcaaaagaaacttttgcccttatcagtaacacctgaggctttttctggaactgttatagaaaaagaatttgtatcaccttccttaacaccacccccagccattgctcatcccgcactacccactattccagaacgaaaggaagttctgttggaagcatctgaagaaactggaaagagggtttcaaagtttaaagctgccagattgcaacagaaagactaggccctgtctaggaaatgggaatttacatcctaaaacctagttgttcatttgtttagagtatctatagcaaaataggttacatgtagtttgaaataaggtatcctgagttactttggcaacaagttcttttacccttacccgtggtatttgaaaaaaatcaaggtaactgtctgaatactttaatatcagcttgttttgtgaattctctgaatactgtcaacactcttatctaagtttgcctttatgatgcagtggcagcattttgaattacttttcaaagaatactgttcatatgcattgtttttgtgtttcaaactaaatacaggcagttttgtgccagctgtgatattgtgcataccatatggaccattttaaagaaaattttaaaatttcaaatagattcaacaattacattacttgctttcacattttaaaggcactttaaaaaaatctacttctcttgtaggttttgcggctagttggctattcaagaaacctcgcccctctgaatgtcatactgtaatctttaaggaagaaagctacatgaattaattgtactctatgggaaaatttctttggaaagatattttgtaaaacttttttttccaagtaaaaactttatgaaacttggtctc

SEQ ID NO: 819 - DNA, 1662 bp, Homo sapiens
  source 1..1662: mol_type = genomic DNA
gccctcgcgctgtcgccgccacagtctgcgacgggacccggcgtgcccatgtgtcaggtgggcgaggactacggggagccggcgcctgaggagccgcccccggcgccgcggcccagccgtgagcagaagtgtgtgaagtgcaaggaagcgcagcccgttgtggtgatacgagccggagatgccttctgcagggactgtttcaaggccttctacgtccacaagttcagagccatgctgggcaagaaccggctcatctttccaggcgagaaggtgctcttggcgtggtctggggggccttcgtccagctccatggtctggcaggttcttgagggcctgagccaagattctgccaaaagactgcgctttgtggcaggagtcatctttgttgacgagggagcagcctgtggccagagcctagaggagagatcaaagaccctggccgaagtgaagcccattctgcaagcaactgggttcccatggcatgtggtggccttagaggaggtgttcagcctgccaccgtcggtgctttggtgctctgcccaggagctggtgggatccgagggggcctacaaggcggccgtggacagcttcctccagcagcagcatgtgctgggggccgggggtggtcctggcccgactcaaggggaggaacagccaccccagcccccgctggacccccagaacctggcaagaccgcctgcccctgcccagactgaggctctttcccaactgttctgctcagtgaggacactgactgccaaggaggagcttctgcagaccctgcggacccacctgatcctccacatggcccgagcccacggctactccaaggtcatgactggggacagctgcacacgcttggctatcaagctcatgaccaacctggcgctgggtcgaggggccttcctggcctgggatacgggcttctcggatgagcggcacggggacgtggtggtggtgcggcccatgcgggaccacaccctgaaggaggtcgctttctacaaccgcctgttctccgttccttctgtcttcacaccagccgtcgacaccaaggcccctgaaaaggccagcatccaccggctgatggaggccttcatcctcaggctgcagacccagttcccctccactgtcagcactgtgtacaggacaagtgagaagctggtgaagggcccccgggatggccctgctgctggcgactccggcccccgctgcctcctctgcatgtgtgccctggacgtcgacgccgctgacagtgccacggcttttggggctcagacctcctcgcgtctctcccagatgcagtcacccatccccctgactgagacccggacacccccggggccctgctgttctccaggggtgggctgggcccagcgctgtggccagggggcctgcaggagggaggacccccaagcctgcattgaggagcagctgtgctacagctgccgcgtgaacatgaaggacttgggcctggggcttgcaggagatccgggactgtctgattgaggacagtgacgacgaggcgggccagagctgagcgtgaggacgtgcttgccgggacagcaggcagtggccacctggtacaccacactggagccggaaggcaaggacgggggactggcctctgattgtccatttgtataaataaaacattttttaatt

SEQ ID NO: 820 - DNA, 1670 bp, Homo sapiens
  source 1..1670: mol_type = genomic DNA
aagaaggcactccattctggctttcacaaatacagctctgcaacgcgtttgccctgataccatgtctcttcgactttccagtgcatccaggaggtcctgtcctcgtcccaccactggatcactcagactctatggtgggggaaccagctttggtactggaaattcttgtggcatttcagggattggaagtggcttctctagtgccttcggaggcagctcatcgggaggaaacacagggggaggtaatccctgtgctggcttcactgtgaatgagcgggggctcctttctggcaatgagaaggtgaccatgcagaacctcaatgaccgcctggcatcctacctggacagtgtgcatgctctggaggaggccaacgctgacctggagcagaagatcaagggctggtatgagaaatttgggcctggctcttgccgtggtcttgatcatgactatagcagatatttcccaataattgatgaccttaaaaatcagatcatcgcatccaccaccagcaatgctaatgctgttctgcagatcgataatgccaggcttacagctgatgatttcagactcaagtatgaaaatgagctggctcttcaccagagtgtagaggctgatgtcaatgggttacgaagagttttggatgaaataaccctgtgcagaacagatctggagattcagtatgaaaccctgagtgaggagatgacttacctcaaaaagaaccataaagaggaaatgcaagttctgcagtgcgcagctggaggcaacgtgaacgtggagatgaacgcagcccccggggtggacctcacagttctgctgaacaacatgcgagctgagtacgaagcccttgcagagcagaaccgcagggacgcggaggcctggttcaacgagaagagcgcctccctgcagcagcagatctctgaggatgtcggagccacaacctcagcccggaatgagctgactgaaatgaagcgcactcttcaaaccctggaaattgaacttcagtctctcctagccacgaaacactccctggagtgctccttgacagagaccgagagcaactactgtgcgcagctggcgcagatccaggctcagatcggggccctggaggagcagctgcaccaggtcagaaccgagaccgagggccagaagctggagtatgagcagctcctggacatcaagctccacctggaaaaagaaattgagacctactgtctccttataggaggagatgatggagcctgtaagtctgggggttacaagtctaaagattatggatctggaaatgtgggaagtcaagtcaaagacccagccaaagccatagtggttaagaaagttcttgaggaggtagaccaacgcagcaaaatacttaccaccaggctccactccctggaagagaaatctcaaagcaattaatttgagatgcaacagagaacgtatgccacatagcccctgcgaagaaaaggcattatgtatctgtccagaaaaatgtgcatgtctaagaaaaatgtctaacctgttgtctttctgttactttctttctgggcaatcaatgacagcatctccccattcatctagaagaatgccacacacaaatatgactcatttgattatcctacagaaatctgttgtcaattctttgtattcaataaacctcttctttagcaagtta

SEQ ID NO: 821 - DNA, 2679 bp, Homo sapiens
  source 1..2679: mol_type = genomic DNA
atggaccagccagaggccccctgctccagcacggggccgcgcctcgcggtggcccgcgagctgctcctggctgcgctggaggaactgagccaagagcagctgaagcgcttccgccacaagctgcgcgacgtgggcccggacggacgcagcatcccgtgggggcggctggagcgcgcggacgccgtggacctcgcggagcagctggcccagttctacggcccggagcctgccctggaggtggcccgcaagaccctcaagagggcggacgcgcgcgacgtggcggcgcagctccaggagcggcggctgcagcggctcgggctcggctccgggacgctgctctccgtgtccgagtacaagaagaagtaccgggagcacgtgctgcagctgcacgctcgggtgaaggagaggaacgcccgctccgtgaagatcaccaagcgcttcaccaagctgctcatcgcgcccgagagcgccgccccggaggaggcgatggggcccgcggaagagcctgagccggggcgcgcgcggcgctcggacacgcacactttcaaccgcctcttccgccgcgacgaggagggccggcggccgctgaccgtggtgctgcagggcccggcgggcatcggcaagaccatggcggccaaaaagatcctgtacgactgggcggcgggcaagctgtaccagggccaggtggacttcgccttcttcatgccctgcggcgagctgctggagaggccgggcacgcgcagcctggctgacctgatcctggaccagtgccccgaccgcggcgcgccggtgccgcagatgctggcccagccgcagcggctgctcttcatcctggacggcgcggacgagctgccggcgctggggggccccgaggccgcgccctgcacagaccccttcgaggcggcgagcggcgcgcgggtgctaggcgggctgctgagcaaggcgctgctgcccacggccctcctgctggtgaccacgcgcgccgccgcccccgggaggctgcagggccgcctgtgttccccgcagtgcgccgaggtgcgcggcttctccgacaaggacaagaagaagtatttctacaagtatttccgggatgagaggagggccgagcgcgcctaccgcttcgtgaaggagaacgagacgctgttcgcgctgtgcttcgtgcccttcgtgtgctggatcgtgtgcaccgtgctgcgccagcagctggagctcggtcgggacctgtcgcgcacgtccaagaccaccacgtcagtgtacctgcttttcatcaccagcgttctgagctcggctccggtagccgacgggccccggttgcagggcgacctgcgcaatctgtgccgcctggcccgcgagggcgtcctcggacgcagggcgcagtttgccgagaaggaactggagcaactggagcttcgtggctccaaagtgcagacgctgtttctcagcaaaaaggagctgccgggcgtgctggagacagaggtcacctaccagttcatcgaccagagcttccaggagttcctcgcggcactgtcctacctgctggaggacggcggggtgcccaggaccgcggctggcggcgttgggacactcctgcgtggggacgcccagccgcacagccacttggtgctcaccacgcgcttcctcttcggactgctgagcgcggagcggatgcgcgacatcgagcgccacttcggctgcatggtttcagagcgtgtgaagcaggaggccctgcggtgggtgcagggacagggacagggctgccccggagtggcaccagaggtgaccgagggggccaaagggctcgaggacaccgaagagccagaggaggaggaggagggagaggagcccaactacccactggagttgctgtactgcctgtacgagacgcaggaggacgcgtttgtgcgccaagccctgtgccggttcccggagctggcgctgcagcgagtgcgcttctgccgcatggacgtggctgttctgagctactgcgtgaggtgctgccctgctggacaggcactgcggctgatcagctgcagattggttgctgcgcaggagaagaagaagaagagcctggggaagcggctccaggccagcctgggtggcggcagcagttctcaaggcaccacaaaacaactgccagcctcccttcttcatccactctttcaggcaatgactgacccactgtgccatctgagcagcctcacgctgtcccactgcaaactccctgacgcggtctgccgagacctttctgaggccctgagggcagcccccgcactgacggagctgggcctcctccacaacaggctcagtgaggcgggactgcgtatgctgagtgagggcctagcctggccgcagtgcagggtgcagacggtcagggtacagctgcctgacccccagcgagggctccagtacctggtgggtatgcttcggcagagccctgccctgaccaccctggatctcagcggctgccaactgcccgcccccatggtgacctacctgtgtgcagtcctgcagcaccagggatgcggcctgcagaccctcagtctggcctctgtggagctgagcgagcagtcactacaggagcttcaggctgtgaagagagcaaagccggatctggtcatcacacacccagcgctggacggccacccacaacctcccaaggaactcatctcgaccttctga

SEQ ID NO: 822 - DNA, 2347 bp, Homo sapiens
  source 1..2347: mol_type = genomic DNA
gcgggcaggcgactcctgtcccgggtggaggcggcggagccggagccgggggagggggcagcggctgtctcacggaccacggcggcgcccgcagctcctcaccgaaacaaggagaccagtgctggtccagtggctgtgatgggaaaagattattacaagattcttgggatcccatcgggggccaacgaggatgagatcaagaaagcctaccggaagatggccttgaagtaccacccagacaagaataaagaacccaacgctgaggagaagtttaaggagattgcagaggcctatgatgtgctaagtgaccccaagaaacggggcctgtatgaccagtatggggaggaaggcctgaagaccggcggtggcacatcaggtggctccagtggctcctttcactacacctttcatggggacccccatgccacctttgcctccttctttggtggctccaaccccttcgatatcttctttgccagcagccgctccactcggcccttcagtggctttgacccagatgacatggatgtggatgaagatgaggacccatttggcgctttcggccgttttggcttcaatgggctgagtaggggtccaaggcgagccccagaaccactgtaccctcggcgcaaggtgcaggaccccccagtggtgcacgagctgcgggtgtccctggaggagatctaccatggctccaccaagcgcatgaagatcacaaggcgtcgcctcaaccctgatgggcgaactgtgcgcaccgaggacaagatcctgcacatagtcatcaagcgtggctggaaggaaggcaccaagatcaccttccccaaagaaggcgacgccacacctgacaacatccctgctgacatcgtctttgtgctcaaagacaagccccatgcacacttccgccgagatggcaccaacgtgctctacagtgccctgatcagcctcaaggaggcgctgtgtggctgcactgtgaacattcccactatcgacggccgagtgatccctttgccctgcaatgatgtcatcaagccaggcaccgtgaagagactccgtggggagggccttcccttccccaaagtgccaactcagcgaggagacctcattgttgagttcaaagttcgcttcccagacagattaacaccacagacaagacagatccttaagcagcacctaccctgttcctaggctctgccccagccagtccagagcctaccacagcaatacccccaacactcactccactcaatgtgcacccagcttgatgtccactggacactggcaactttttctaaaatgcaaaaaaaagccactggttttcaggaaaatgttcctgtccctgaccccttttagagctgggctgcctggggggagtgggagggaggtggggagagctagcccaggccaggggtcaatgttcatgtcactagctttcaatccagtttccactgcagtggctggagagtgacctgagtgctacttgaagatatgtagagattccttatccatgcctgtacatagcatgtcctcctcccctcagctttgctaataccagtcccctcccttccctttggcttcctgctgttgggggtggaaaagactagaaaggacattgctttctcagccccacccccaggtccacagtgtccaaggtaatggcacacatattcatgcacaagaagcactcacctagagctgtctgtgcctctctgggagaaaggagagaggataagaagggaaagttcacaacctgtgaacagggacttgagcacgagacacttttcatctggagcaggggggtgagctcctcagcagcctccgtaacagctgccctgcctacacctgcagagctggaggttctgtcctccctgctgctctcaggagtgttcaagggtggagggcagggaatggggcctgaggtattaaggctaagaggtgggggacagggcccatctaccagccttcatcaggaagggaaagggctttggggtcaggtggcagctattccccaccaagagattcagggtcacaggtttttccccacacctctgaactcagggcctagccacccccaaacttccaaatcccacttttgtgatatgtgaagctactcatttcttacccttggaggctgtgtggggaatttccagcccttttatgcctgtgtgatcccaccccacccccatagttgtataaaggtcatagtgaagaagctgggggaagactgcttcagccagatcctggggtggggtctttaggttttctcactttgacaacccccgaatgtttttatagtagtttttttgtatttttttgtaatgacagtattatgtaaaaaataaagtatttt

SEQ ID NO: 823 - DNA, 3073 bp, Homo sapiens
  source 1..3073: mol_type = genomic DNA
tctgccgttgggtgaggcgcggagcgaagtgaagggtggcccaggtggggccaggctgactgaaaaagatggatactatgatgctgaatgtgcggaatctgtttgagcagcttgtgcgccgggtggagattctcagtgaaggaaatgaagtccaatttatccagttggcgaaggactttgaggatttccgtaaaaagtggcagaggactgaccatgagctggggaaatacaaggatcttttgatgaaagcagagactgagcgaagtgctctggatgttaagctgaagcatgcacgtaatcaggtggatgtagagatcaaacggagacagagagctgaggctgactgcgaaaagctggaacgacagattcagctgattcgagagatgctcatgtgtgacacatctggcagcattcaactaagcgaggagcaaaaatcagctctggcttttctcaacagaggccaaccatccagcagcaatgctgggaacaaaagactatcaaccattgatgaatctggttccattttatcagatatcagctttgacaagactgatgaatcactggattgggactcttctttggtgaagactttcaaactgaagaagagagaaaagaggcgctctactagccgacagtttgttgatggtccccctggacctgtaaagaaaactcgttccattggctctgcagtagaccaggggaatgaatccatagttgcaaaaactacagtgactgttcccaatgatggcgggcccatcgaagctgtgtccactattgagactgtgccatattggaccaggagccgaaggaaaacaggtactttacaaccttggaacagtgactccaccctgaacagcaggcagctggagccaagaactgagacagacagtgtgggcacgccacagagtaatggagggatgcgcctgcatgactttgtttctaagacggttattaaacctgaatcctgtgttccatgtggaaagcggataaaatttggcaaattatctctgaagtgtcgagactgtcgtgtggtctctcatccagaatgtcgggaccgctgtccccttccctgcattcctaccctgataggaacacctgtcaagattggagagggaatgctggcagactttgtgtcccagacttctccaatgatcccctccattgttgtgcattgtgtaaatgagattgagcaaagaggtctgactgagacaggcctgtataggatctctggctgtgaccgcacagtaaaagagctgaaagagaaattcctcagagtgaaaactgtacccctcctcagcaaagtggatgatatccatgctatctgtagccttctaaaagactttcttcgaaacctcaaagaacctcttctgacctttcgccttaacagagcctttatggaagcagcagaaatcacagatgaagacaacagcatagctgccatgtaccaagctgttggtgaactgccccaggccaacagggacacattagctttcctcatgattcacttgcagagagtggctcagagtccacatactaaaatggatgttgccaatctggctaaagtctttggccctacaatagtggcccatgctgtgcccaatccagacccagtgacaatgttacaggacatcaagcgtcaacccaaggtggttgagcgcctgctttccttgcctctggagtattggagtcagttcatgatggtggagcaagagaacattgaccccctacatgtcattgaaaactcaaatgccttttcaacaccacagacaccagatattaaagtgagtttactgggacctgtgaccactcctgaacatcagcttctcaagactccttcatctagttccctgtcacagagagtccgttccaccctcaccaagaacactcctagatttgggagcaaaagcaagtctgccactaacctaggacgacaaggcaacttttttgcttctccaatgctcaagtgaagtcacatctgcctgttacttcccagcattgactgactataagaaaggacacatctgtactctgctctgcagcctcctgtactcattactacttttagcattctccaggcttttactcaagtttaattgtgcatgagggttttattaaaactatatatatctccccttccttctcctcaagtcacataatatcagcactttgtgctggtcattgttgggagcttttagatgagacatctttccaggggtagaagggttagtatggaattggttgtgattctttttggggaagggggttattgttcctttggcttaaagccaaatgctgctcatagaatgatctttctctagtttcatttagaactgatttccgtgagacaatgacagaaaccctacctatctgataagattagcttgtctcagggtgggaagtgggagggcagggcaaagaaaggattagaccagaggatttaggatgcctccttctaagaaccagaagttctcattccccattatgaactgagctataatatggagctttcataaaaatgggatgcattgaggacagaactagtgatgggagtatgcgtagctttgatttggatgattaggtctttaatagtgttgagtggcacaaccttgtaaatgtgaaagtacaactcgtatttatctctgatgtgctgctggctgaactttgggttcatttggggtcaaagccagtttttcttttaaaattgaattcattctgatgcttggcccccatacccccaaccttgtccagtggagcccaacttctaaaggtcaatatatcatcctttggcatcccaactaacaataaagagtaggctataagggaagattgtcaatattttgtggtaagaaaagctacagtcattttttctttgcactttggatgctgaaatttttcccatggaacatagccacatctagatagatgtgagctttttcttctgttaaaattattcttaatgtctgtaaaaacgattttcttctgtagaatgtttgacttcgtattgacccttatctgtaaaacacctatttgggataatatttggaaaaaaagtaaatagctttttcaaaatgaa

SEQ ID NO: 824 - DNA, 12394 bp, Homo sapiens
  source 1..12394: mol_type = genomic DNA
gagaccgctgcaagtcccggggccctgcctctatcgtcctaggggttccgcgggcaggagcaacccagaagcaccggtgaggccagcgcgtcctcgcagccatgagcagtgagcaggataaatcggccagcaaagaaaaatccaagaaaccagtaagatttctaccacagctgtctatggagaaattagccagcaaagaaaagttcaaggcaccagcaagagctttaccacagctgtctatggtgagtacaaagccccactggcagcaggcagctccatcattccatttgagtgtaaagcaggatgatgagagtccagaaccatttagtgttaaaaatgaacagtcccatgctgaatacatggaacgttttggaaaaaagggcaaattaccccaccaagttgatgatagttatgttggaccatctacttccaaatcaaagggcaaatctccacataaagaacgagaaaactttagaagtactcttgttaatgtcattatgcaacaagatgctgacttagactcagctgtccctgatggaagcacaattccaaaaccgaccgcttctgctatagagaaagacatcttgagatattactattatattcaccatggaattgatacagaccatgtagccccaatggaagattcttggctagaacacgtactggatttagttccacaacatctgaaagtcttcactgacagcatagttacattatctgatgaaatgagagaggattatcttcttagtgtaaggaaatccatagttgattttgttttaaaagatcctcgagagaaaggagatgataagaagacagatgaacttccagcccatcgtgctgaaatggaaattctgccaaaaccttggaggaaatcttttttagctgcaagcagttatattagggatcacttgaatgcaatgaaccccacaatgctggctgtactagatttgtggcacactaattttaaaaaattacgtttagttgatatcaaagaatttcataattgccaggatgcattagagctgtcaagttttcagaacattatcatgagacacatggactctgccaaagagactctacttaaaatgtggtttccagaagtgcagaatatttattaccaaggtaataaaaaaaagcaattgccaactggtgacagcagtgccaaattggaatcttttttcaactgtgctgctgcacttatgactttacagctgcaggacctcactttagtctccatgcaagatttcacggacttaattgcacaacccccagattctgttagagcttttgaacatccaggtttcatcatgaggctgattcttgataatgacaccattaagtttgaacctgagttgagtgactatatagatatctttctaaatgtttatgacgtcatgattaaagctgtcagttttgtgccaagagttgagacaaaattgtattccaagtgggaaagtaagtctaaaccaacaaccttgaagcccataattctgaatgaaattgtagatgctcacaaagaaaagatcaaggaagttattatgaaagagagtgtggcacctactgagcacctcagactctatgacaagtatgactttttaattaccagaaaagctgagcgagatgttgataacttcctcgcagaaaatcatagttatgaaaaaataatagatgaaatttgcaaataccagaaactaatagaggaaatacagtacacatccataaagactattcgtttaggaatgtttgaaatgcactgtgaggaattaatcagagctttggtgaagcgagcagatattatttgtgggaaacttctagctaaaatgttcagagatcatcaggaagtaaatacaagattatgcgatgaatttgagaggatagctgaaaaagctcttagcactcctccaaatacagcagaactaatggaaatgaaggcttacattcagaaagtggaggtaactgatatgattgaactagaacagagattagtggattccaaaaactgcctcgccttcctcatcgagtatgtcaacttttctccagcagacatgaggctaaataatagtgttttccagtggtatggaaggatgggagaaatttttgaagaacacaggaaaatcattaaagagaaaatagaacaatatcaagaaggtctgaagttacggtgtgaacggtttgtggaggaattggagagttatgctaagcaatcagaagaattttattcatttggagatcttcaggatgttcagcggtacctaaaaaaggctcaaatactgaatggaaagttggatttagctgcagataagattgagcagtttaatgctgaagaggaagcatttggttggctaccatctgtatatcctcaacgtaaaaaaatccaagatggcttgaacccttatcttcgtctttatgaaactgctgtcgaatttagcagcaactatagagcatggacagaagggccatatcataaagtgaatccagaccaagtagaagcagatattggaaattactggagaggattatataaactggagaaaacctttcatgattctccatatgcattggcaatgacaaaaaaagtaagatcaaaggtggaagatttcaagcagcacattcctctcattcaagtgatctgtaatcctggtttgcgccccaggcactgggaggccatgtctgccattgttggttaccctttgcagccatcagatgactccacagtctcctcttttttagacatgaatctggaaccatatatagaccgatttgaaggtattagtgaagcagctagcaaagaatattctcttgaaaaggcgatggagaagatgattactgagtgggatgcagtggaatttgtcatccattcttatagagaaactgggacatttattttggcatcagttgatgaaattcagatgttgttggatgaccatattattaaaacacaaactatgcgaggatctcctttcattaagccttatgaaaaacaaatgagagaatgggagggcaagctcctactgcttcaggagattctggatgaatggctcaaagtccaagccacgtggctgtatctggagcccattttcagctctccagacattatgtctcaaatgcctgaggaaggcagacgatttacagctgtggataagacatggagagatataatgagaagtgtcatgcaggataaacatgttctgacagttgtaaccattgacagaatgctggaaaggctgaaaaaatctaatgaacttttggagctcattcttaaaggacttaatgaatatttggaaaagaaacgcctctttttccccagattcttttttttgtccaatgatgaacttcttgagatactatctgagactaaagatcccactagggtgcaacctcacttgaagaaatgttttgaaggaatcgcaaaggtagaatttacggaaactttagacattactcacatgaagagcagcgaaggagaggttgtagaactcatagagattatttcaacagccaaagccagaggtcaagtggagaagtggttggttgaattagagagagttatgattaactccatccacaaggtaactggagatgcaacttttgcctatacaaaatatgaacgaattaactgggtaagggattggcctggacagactgttctctgtgtatcccaaatcttttggacaaaagaagtacaaacagctattccaatggggataaaggctcttgagcaatacttgaaaacatgtaacagacaaattgatgatattgtcactttggtgcgtggcaaattgtccatgcagaatcgcgtaactctgggagcacttgtggtactggatgtccatgctagagatgtcctctcatcacttgtaaaaaaaaatattagcgatgactctgactttgaatggttaagtcagcttaggtactactggcaagaaaatcatttagaaacaaaaatgatcaatgctggtttgcgatatggatatgaatatctgggtaattcccctaggctggttattacaccactcacggatagatgttacagaaccttatttggagcccttcatttgcaccttggaggagcacctgagggtccagctggcactgggaagactgaaactaccaaggatttggcaaaagctgtagccaaacaatgtgttgttttcaactgctctgatgggttggattatttggctttgggaaaattctttaagggactgttatcttgtggagcctgggcttgctttgatgagtttaacagaattgatttggaagtactctctgtggttgctcaacaaatccttactatccaaagaggtattaatgcaggtgctgatatactgatgtttgaaggaactgaactaaaacttgaccccacatgtgctgtctttataacaatgaaccctgggtatgctgggcgatcagaactgccagataacctgaaggctctctttcggacagtagcaatgatggtacctgactatgccatgattgctgaaatagtcctatactcctgtgggtttgtcactgctcgaccactgtctgtaaaaattgtggctacgtatcgcttgtgttcagagcagctgtcatctcaacatcactacgactatggaatgagagccgtgaagtcagttcttactgctgctgggaatctgaagctgaaatatccaaatgaaaatgaagaaattttgctgcttagatctatcattgatgtaaatctgccaaaatttttatcccatgatttaccactctttgagggaattacttcggatttgtttcctggggtaaaattaccaaaaccagattacaatgatttgctggcagctatcaaagacaattgtgcctccatgaatttgcaaatgactgcattcttttccgagaagattcttcaagtatatgaaatgatgattgtgcgtcatggttttatgattgttggagaaccatttggaggaaaaactagtgcatatcgtgtcttagctggagcactaaatgatatatgtgaaaaggggctaatggaagaaaacaaagttcaaataactgttttaaatcctaagtctgtcaccatgggccaactgtacggacagtttgattcagtgtcccatgaatggtctgatggggtccttgctgtcagttttagagcatttgcctcttcagtgactccagataggaaatggttaatttttgatggcccagtagatgcagtgtggattgagaatatgaacactgtgctggatgacaacaagaagctatgtctgatgagtggggagattattcagatgtcaccacaaatgaatctaatttttgagccaatggatttagaagttgcttcccctgccactgtttccagatgtggcatgatttacatggagcctcacatgttaggctggagaccactgatgttgtcctgggtgaatctgttacctgcgtcagtcagtgttattcaaaaggaattcataatgggcttatttgacagaatggtccctgtttcggttgaatttattagaaagcatacaaaggaattatctcctacttccgatacaaacttggtccggtccttaatgaatctaatagactgttttatggatgattttgctgatgaagtcaaactaaaggagagaaatgatcgagaaacttactctttgcttgagggcatttttctgttttcattgatctggtccgttggtgcttcttgtacagatgatgatcgattgaaatttaataagattcttcgagaactaatggaaagtccaatttcagatcgaactcgaaatacgtttaaattacagagtggtactgagcaaacatcctcaaaggcactaactgtcccatttcctgaaaaaggaacaatttatgattatcaatttgtcactgagggaataggaaaatgggaaccatggataaagaaattgaaagaagctcctccaattcctaaagatgtaatgtttaatgaaatcattgtgccaactctggacacaattcgatactctgcattaatggaattgctgaccacccatcaaaagccttcaatatttgtaggaccaacaggaactgggaaaagtgtttacattacgaattttcttttaaatcaactaaataaggaaatctacaaacctctgctaattaacttctcagcacaaactacagcagctcaaactcagaatattgtcatgtcaaaattggacaagagaagaaagggagtttttggtcctcctttgggcaagagaatggttgtctttgtagatgatgtcaatatgcctgctcgggaggtatatggggctcaacctcccattgagttacttagacagtggttagaccactggaactggtatgatctaaaagattgttccatgattaaactagtggacattcagatcatgtgtgctatgggacctccaggtggtggtcgaaatccagtaactcctcgatacatgcgacatttcaatattataacaatcaatgagtttagtgataaatccatgtatacaatcttctctagaatcttaacttggcatttagaaatctgttataaatttccagatgaatttctagatttgaccacacaaatcgtaaatggcacaatgactctgtataaagaagcaatgaagaatctcttgcctactccagctaaatctcactacttgttcaacctccgtgatttctcccgtgtcattcaaggtgtttgtttgtcaagaccagaaacaacagaaaccacagaagtgattaaacgtctttgggttcatgaggtccttcgagtgtattatgaccgccttctggacaatacagacagaagctggctcatcaactacattcaagaaattttgagaaactacatgtatgaagattttcatgagctttttcagcgtttggattttgataatgatggcatggtggaagcagatgacttacgcagcttaatgttttgtgatttccatgatcccaagagggaggataccaactacagagaaatcgcagatgtggataatcttcgaatgatagtagaaattcacctagaagaatacaacaatataagcaaaaaacccatgaaccttgtcttgtttcgatttgccatagagcacatcagcagaatttccaggatcctgaagcagcctcgcagccatgctctcctagtaggggttggagggagtggaaggcagtctgtcaccagattagctgcccacatggctgattattcagttttccaagttgaaatctctaaggggtatgatactactgaatggcatgaagatttaaaagtgatcttaaggaaatgtgcggaaggtgagatgcagggtgtcttcctgtttacagatactcaaattaaagaagagtcttttctggaagatgtcagtaatctgctaaatgctggggagattccaaatctctttgcattagatgagaagcaagagatatgtgataagatgcgtcagttagatcgccagcgggataaaaccaagcaaacagatggcagccccatagcccttttcaacatgtttattgatcattgccgcagccaactgcatgtggtccttgccatgagtcccattggagatgcatttcggaatcgtcttagaaagttccctgctcttgttaactgctgtaccattgactggtttcagtcatggcctgaagatgcactccaggcagttgcctcacgattcttggaagaaattgaaatgtcagaggaaatacgagatggctgtatcgacatgtgtaaaagcttccacacttctactatagatttatccaaatctttctttgttgaacttcaaagatacaattatgtgactcctacctcttacctcgaattaatctccaccttcaaactgttgttagaaaagaaaagaagtgaagtaatgaaaatgaaaaagagatatgaagtgggtttggagaaactggattctgcttcatctcaagtagccacaatgcagatggagttggaggcactacatcctcaattaaaagttgctagcaaagaggttgatgaaatgatgataatgattgagaaagagtctgtagaagttgccaaaactgaaaaaatagtgaaagctgatgaaacaatagcgaatgaacaagctatggcttccaaagccatcaaagatgagtgcgatgctgacctggcaggtgccttgccaatattagagtcagcactggccgcccttgatactcttactgcacaggatattacagtggtaaaatccatgaagagtcctcctgctggtgtcaagcttgttatggaagctatatgcatcttgaaaggaatcaaagctgacaaaatccctgacccaacaggttcagggaaaaaaattgaggatttctggggcccagctaagagacttcttggtgacatgaggtttctgcagtcacttcatgaatatgacaaggacaatattcctccagcttatatgaatatcataagaaaaaattatattccaaatccagattttgtaccagaaaaaatcagaaatgcttctacagcggccgaaggtctgtgcaaatgggtcatagcaatggattcatatgataaagtggcaaaaatagtagctcccaaaaagataaaactggctgcagctgaaggggagcttaaaattgccatggatggtcttagaaagaagcaggcagcccttaaggaagttcaggacaagctggccaggcttcaagacacacttgaattaaataaacaaaagaaggctgacctggaaaaccaggttgacctttgcagcaaaaaactagaacgagctgaacagttgattggaggccttggaggtgagaaaactcgatggagccacacagctctggagctaggtcagctgtacatcaacttgactggggatatcctcatttcctccggagtggttgcttacctcggagccttcacatccacctatagacagaatcaaactaaagagtggacaactttgtgcaaaggaagagatatcccctgctcagatgattgctctcttatgggtaccctgggagaagctgtgacaattcgaacttggaatattgctggattaccttctgactcattttccattgataatgggataatcataatgaatgcaagaaggtggcctctgatgatagatcctcaaagtcaggctaataaatggatcaagaacatggaaaaagccaatagtctttatgtgattaaacttagtgaacctgactatgtcaggactctggaaaattgcatccagtttggtactcctgtgttgctagaaaatgttggcgaagaactagatcctattttggaacctcttctactaaaacaaacctttaagcagggtgggagtacatgtatccggcttggggactccacaattgaatatgcacctgacttccgcttctatattactaccaagttaagaaatcctcattatcttcctgaaacatcagtaaaggtaacattattaaacttcatgataacccctgagggaatgcaagatcagcttctgggaattgtggtggcacaagaaaggccagaccttgaagaagaaaagcaagccttgatattacaaggagctgaaaataaaaggcagttaaaagaaatagaagacaagattttagaagttctttcatcttcggaaggcaatatattagaagatgaaactgctattaagatattatcttcctccaaggccttggctaatgagatttctcagaagcaggaagtagccgaagagacagagaaaaagattgacaccacccgcatgggctatcgtcctattgccatccattcttccatcctatttttttctcttgctgatttagccaacattgagcccatgtaccagtattcactgacctggtttattaaccttttcatcctgtctattgaaaattcagagaaatcagaaattttggcaaaaaggcttcagattctcaaggatcactttacttattcactgtatgttaatgtctgccggtcactctttgaaaaggataagctgctcttttccttttgtctaaccataaatctactgctgcatgagcgggcgattaataaagctgagtggagatttctgctaactggtggcattggactggataatccttatgccaacctttgtacatggcttcctcagaaatcctgggatgaaatatgtcgattagatgatttgcctgccttcaaaaccattcgtagagagtttatgcgcttaaaggatggatggaagaaagtatatgatagtttggaaccacaccatgaggttttccctgaagaatgggaagataaagcaaatgagtttcaaaggatgcttattattcgttgcttgaggccagacaaggttattccaatgttgcaggaatttataatcaacagattgggacgtgcattcattgaaccacccccctttgatttagccaaggcatttggagacagtaactgctgtgcaccactgattttcgtgctctctcctggagcagatcccatggctgcccttctaaaatttgctgatgaccagggatatgggggatcaaaacttagctctttatctcttggtcaaggccaagggcccattgctatgaagatgttagaaaaagctgtcaaggaaggaacatgggttgttcttcagaattgtcaccttgccacctcttggatgccaacccttgagaaagtctgtgaggagttaagcccagagtcaacacatccagatttccgaatgtggctaacgagttacccatctccaaatttccctgtgtcagtactgcagaatggagtgaaaatgaccaatgaagcaccaaaaggtttacgggctaatatcattcgatcatacctcatggacccgatctctgatccggagttctttggcagctgcaaaaagcctgaggaattcaagaaattgctttatggcctgtgtttctttcatgctttggtacaagaaagacggaaatttggacccctagggtggaatattccttatgagttcaatgagacagatctgagaatcagcgtacagcagctccacatgttcctgaaccagtatgaggaactgccgtatgaggctctgcggtacatgactggcgaatgcaattacggaggcagagtgaccgatgactgggaccggcgcacgctgcgcagcattctaaacaaattcttcaatcccgaattagttgaaaattcagactataagttcgactcaagtggcatctattttgttcctccttctggtgatcacaaaagctacatcgaatacacaaagactctgccactgaccccagcaccagaaatctttgggatgaatgccaatgcagatatcactaaggatcagtcagaaactcagctgctatttgataacattcttcttacacagtctcgttcagcaggtgctggtgcaaaatcatcagatgaagtagtgaatgaggtcgctagtgacatcttgggcaaacttccaaacaacttcgacatcgaggctgccatgaggaggtacccaacaacttatactcagagcatgaacactgtacttgtccaagagatgggacggttcaataagttactgaagaccataagagattcgtgcgtaaatattcaaaaagcaatcaaggggcttgcagtcatgtctacagatcttgaagaagtggttagcagcattttgaatgtcaaaattccagaaatgtggatgggtaaatcctacccaagccttaaaccacttggcagctatgtgaatgacttccttgcaagactaaaattcttgcagcaatggtatgaggttggtcctcctccagtcttctggctttctggcttcttcttcacacaagccttcctgaccggtgcccagcagaactacgccaggaaatacacaattcctattgatcttcttgggtttgactatgaagtgatggaagacaaagaatacaagcatcctcctgaggatggtgttttcattcacggattatttctggatggagcttcctggaatagaaagatcaagaaacttgcagaatcgcatcccaaaattctttatgatacagtgcctgtgatgtggctaaagccctgtaagagggcagatataccaaaacggccaagttatgttgctccattgtataagacaagtgagcggagaggagtattatccaccactggccattccacgaattttgtgattgccatgactcttccctctgaccaacccaaggaacactggattggacgaggtgtagcactgttatgtcaacttaattcataaccagaagacatcatttccttgttcctatttcttgttggctggctgagtagagaaagcatattttactacttaaacctttttttttgtttgtttaaatacatttgactaaagttataattatgaatttacttatgagcaaatgcagctaaacttaatatgactcatacttaaatgtaaggaaatgttctgaaataaagactaaagaaaacacactggca

SEQ ID NO: 825 - DNA, 1836 bp, Homo sapiens
  source 1..1836: mol_type = genomic DNA
atgtcttcaagacaggataaatcggccagcaaagaaaaatccaagaaaccagtaagatttctaccacagctgtctatggagaaattagccagcaaagaaaagttcaaggcaccagcaagagctttaccacagctgtctatggtgagtacaaagccccactggcagcaggcagctccatcattccatttgagtgtaaagcaggatgatgagagtccagaaccatttagtgttaaaaatgaacagtcccatgctgaatacatggaacgttttggaaaaaagggcaaattaccccaccaagttgatgatagttatgttggaccatctacttccaaatcaaagggcaaatctccacataaagaacgagaaaactttagaagtactcttgttaatgtcattatgcaacaagatgctgacttagactcagctgtccctgatggaagcacaattccaaaaccgaccgcttctgctatagagaaagacatcttgagatattactattatattcaccatggaattgatacagaccatgtagccccaatggaagattcttggctagaacacgtactggatttagttccacaacatctgaaagtcttcactgacagcatagttacattatctgatgaaatgagagaggattatcttcttagtgtaaggaaatccatagttgattttgttttaaaagatcctcgagagaaaggagatgataagaagacagatgaacttccagcccatcgtgctgaaatggaaattctgccaaaaccttggaggaaatcttttttagctgcaagcagttatattagggatcacttgaatgcaatgaaccccacaatgctggctgtactagatttgtggcacactaattttaaaaaattacgtttagttgatatcaaagaatttcataattgccaggatgcattagagctgtcaagttttcagaacattatcatgagacacatggactctgccaaagagactctacttaaaatgtggtttccagaagtgcagaatatttattaccaaggtaataaaaaaaagcaattgccaactggtgacagcagtgccaaattggaatcttttttcaactgtgctgctgcacttatgactttacagctgcaggacctcactttagtctccatgcaagatttcacggacttaattgcacaacccccagattctgttagagcttttgaacatccaggtttcatcatgaggctgattcttgataatgacaccattaagtttgaacctgagttgagtgactatatagatatctttctaaatgtttatgacgtcatgattaaagctgtcagttttgtgccaagagttgagacaaaattgtattccaagtggagaaacaaagcaaaaccaggacatttttacttttctcatattcaaaggtctgtcacctttcagcattctgaagtttcgtctcctcagaactctcattttaagattgtgtcacccttcagtgttcttggctttacatggagatgccaattatgacttccaactttgctcgaccttgaggctttgtttcctggcagcccctcccatgcatccaccttgccggaaactcattaaagcaaagcttagaccaccaaggatcagcagggtccccagggcagctgctcacttctgcacataatgacctttcaactcatgctttctctcattttggtcccttagacttttttttttgttgttatttccttagctatacgttataaaagataaagtcagctttattatcctggcatatttatgtgttttgaattgagtagttgttttctggatatctattcctcatactaccatgaatagaagtctctcaag

SEQ ID NO: 826 - DNA, 1019 bp, Homo sapiens
  source 1..1019: mol_type = genomic DNA
agggatccctgggagccgcggtgcattgtgggagaacgaaagatggcggcgcccgtaaggcggacgctgttaggggtggcggggggttggcggcggttcgagaggctctgggccggcagtctaagctctcgcagcctggctcttgcagccgcaccctcaagcaacggatccccatggcgcttgttgggcgcgttgtgcctgcagcggccacctgtagtctccaagccgttgaccccattgcaggaagagatggcgtctctactgcagcagattgagatagagagaagcctgtattcagaccacgagcttcgtgctctggatgaaaaccagcgactggcaaagaagaaagctgaccttcatgatgaagaagatgaacaggatatattgctggcgcaagatttggaagatatgtgggagcagaaatttctacagttcaaacttggagctcgcataacagaagctgatgaaaagaatgaccgaacatccctgaacaggaagctagacaggaaccttgtcctgttagtcagagagaagtttggagaccaggatgtttggatactgccccaggcagagtggcagcctggggagacccttcgaggaacagctgaacgaaccctggccacactctcagaaaacaacatggaagccaagttcctaggaaatgcaccctgtgggcactacacattcaagttcccccaggcaatgcggacagagagtaacctcggagccaaggtgttcttcttcaaagcactgctattaactggagacttttcccaggctgggaataagggccatcatgtgtgggtcactaaggatgagctgggtgactatttgaaaccaaaatacctggcccaagttaggaggtttgtttcagacctctgatgggccgagctgcctgtggacggtgctcagacaagtctgggattagagcctcaaggacattgtgtgattgcctcacatttgcaggtaatatcaagcagcaaactaaattctgagaaataaacgagtctattactgtg

SEQ ID NO: 827 - DNA, 1231 bp, Homo sapiens
  source 1..1231: mol_type = genomic DNA
cgatccggtacttggaggttcgaagctcctagtttcgggttgagaccgatgtggagggcgatgacgcgcgggttccttgacatcgaggatcagtaacacccggagtgggtggggaacgaggggggcggcccctgagctcaggccccgcccctttccggggacgtttcaccggattggctgtccttccataacgacatgcggccccgccccggcgcgcgccccgccgcgtgcccagcccgggtagctgctgcagcctacgctgcctcggccactgcctgccgcgtgcggagccggagcccgagcctgagtggcgccgggcccgacgtggggctcctgggccgcggcggcgggcgggcgatgctccagaggcctgaccagccatggaggccgaggcaggcggcctggaggagctgacggacgaggagatggcggcgctaggcaaggaagagctagtgcggcgcctgcggcgggaggaggcggcgcgcctggcggcactggtgcagcgcggccgcctcatgcaggaggtgaatcggcagctgcagggccacctgggcgagatccgcgagctcaagcagctcaaccggcgtctgcaggcagagaaccgtgagctgcgcgacctctgctgcttcctggactcggagcgccagcgcgggcggcgcgccgcacgccagtggcagctcttcgggacccaagcatcccgggccgtgcgcgaggacctgggcggctgttggcagaagctggccgagctggagggccgccaggaggagctgctgcgggagaacctagcgcttaaggagctctgcctggcgctgggcgaagaatggggcccccgcggcggccccagcggcgccgggggatcaggagccgggccagcacccgagcttgccttgcccccgtgcgggccccgcgacctaggcgatggaagctccagcactggcagcgtgggcagtccggatcagttgcccctggcctgttcccccgatgattgaaggcactgcttcctccacgccgacgcccgcccggattgctccccgagccccgggaccgctgtggacctcgggacctggacgccgtcctggctgcgcaggaggggccgctggcatggactaagaaatcctgacaccaagaagggcccctcgctcttgctggcagggcagcagggggactgaaggctggagcggagggacttgctgggggttggattgggggtaataaacccggacggaagcgg

SEQ ID NO: 828 - DNA, 1540 bp, Homo sapiens
  source 1..1540: mol_type = genomic DNA
gtgcggcgcgcgtgggcaggtcattgcagttgggcgctcagcagctgtggcagccggttgaggtctggaagtagcgttgggctgaagcagcggagttcgccatgcgcgagtgtatctctatccacgtggggcaggcgggtgtccagatcggcaatgcctgctgggaactgtactgccttgaacatggaattcagcccgatggtcaaatgccaagtgataaaaccattggtggcggggacgactccttcaacacgttcttcagtgagactggagctggcaagcacgtgcccagagcagtgtttgtggacctggagcccactgtggtcgatgaagtgcgcacagggacctacaggcagctcttccacccagagcagctgatcaccgggaaggaagatgcagccagtaattacgccaggggccattacaccatcggcaaggagattgttgacctagtcctggaccggatccgcaaactggcggatctgtgcacaggactgcagggcttcctcatcttccacagctttgggggcggcactggctctgggttcgcatctctgctcatggagcggctctcagtggattacagcaagaagtccaagctagagtttgccatttacccagccccccaggtctccacagccgtggtggagccctacaactccatcctaaccacccacacgaccctggaacattctgactgtgccttcatggtcgacaatgaagccatctatgacatatgtcggcgcaacctggacattgaacgtcccacgtacaccaacctcaatcgcctgattgggcagatcgtgtcctccatcacggcctccctgcgatttgatggggccctgaatgtggacttgacggaattccagaccaacctcgtgccgtacccccgcatccacttccccctggccacctacgccccagtcatctcagctgagaaggcctaccacgagcagctgtctgtggccgagatcaccaatgcctgcttcgagccagccaatcagatggtcaagtgtgaccctcgccatggcaagtacatggcctgctgcatgttgtacaggggggacgtggtccccaaagacgtcaatgcggccatcgccaccatcaagaccaagcgcactatccagtttgtggattggtgcccgactggatttaaggtgggcattaactaccagccccccacagtggtccccgggggagacctggccaaggtgcagcgggccgtgtgcatgctgagcaacaccacggccattgcggaggcctgggcccgcctggtccataagttcgatctcatgtatgccaagtgggcctttgtgcactggtacgtgggcgaaggcatggaagagggagagttctctgaggcccgcgaggacctggcagctctagagaaggattgtgaagaggtgggcgtggattccgtggaagctgaggctgaagaaggcgaagcatactgaggggagggtgtggtgggttctcccctgccacccctaggatggctgctttcaagttgtttgcaattaaagattctgtataaaaccaa

SEQ ID NO: 829 - DNA, 3497 bp, Homo sapiens
  source 1..3497: mol_type = genomic DNA
gttttcctgctcccagcagggttaggcttgctgaggggcaggcacaggagtcctggctgagctcatggcctgaggctgcctagcggccacggggaatggttgcaatggcggaggcagaggcaggggtggcagtggaggtccgtggactgccccctgccgtgcccgacgagctgctcactctctactttgaaaaccgccgacgctctggagggggacctgtgttgagctggcagagactgggctgtgggggcgtcctcaccttcagagagcctgcagacgccgagagggtcttggcccaggcagatcacgaactacatggtgcccagctgagcctgcggccagctccaccacgagcccctgcacgcctgctgctccaaggactgccccctggcaccacgccccagcgcttggagcagcatgtccaggccttgctgcgggcctcggggctcccagtacagccttgctgtgccttggccagcccccggccagaccgggctctggtccagttgcccaagcccctttctgaggcagatgtccgtgtcctggaggagcaggcccagaatctgggcctggaggggaccttggtgtccctggcccgggttccccaggcccgagcggtgcgtgtggtgggggatggtgcctctgtggacctgctgttgctggagttgtacctggagaatgagcgccgcagtggtggggggcccctggaggacctgcaacgcctacccgggcccctgggcactgttgcctccttccagcagtggcaagtggcagaacgagtgttgcagcaggagcaccggttgcagggctcagagctgagccttgtcccccactacgacatcctggagcccgaggagctggctgagaacaccagtggaggggaccacccgtccacccaggggcctagggctaccaagcatgctctcctgaggaccggagggttggtgacggctctgcagggtgcagggactgtgacaatgggctctggcgaggaaccagggcagtcaggggcctctctgaggacaggtcccatggtgcagggtagagggattatgacaacaggctctggccaggaaccagggcagtcagggacctctctgaggacaggtcccatggggtctctgggacaggcagagcaagtcagctcgatgcccatggggtctctggaacatgaggggctggtaagcctgaggcctgtggggttgcaggaacaggaggggcccatgagcctggggcctgtggggtctgcaggcccagtggagacctctaaggggttgctggggcaggagggcctggtggaaattgccatggactcaccagagcaagaggggctggtgggtcccatggagatcaccatggggtctctggagaaggcagggcctgtgagcccaggatgtgtgaagctggcagggcaggagggcctggtggagatggtgctattgatggagccaggggcgatgcgcttcctgcagctctaccatgaggaccttcttgcgggcctgggagacgtcgctctcttgccacttgaaggaccggatatgactggctttcggctctgtggagcccaggcttcctgccaggcggctgaggagtttctgcggagcctgctgggcagcattagctgccatgtgttgtgcctggagcacccgggcagcgccaggtttctcctgggcccagaagggcagcaccttctccaggggctggaggctcagttccagtgtgtctttgggacagagcgcctggccacagccacgttggacacaggccttgaagaggtggaccctaccgaggccctcccagtgctccctggcaacgcccacaccctgtggaccccagacagtacaggtggtgaccaggaggacgtgagcctggaggaggtccgagaactgctggccaccctggagggcctagacctagacggggaggactggctgcctcgggagctggaggaggaagggcctcaggagcagccagaggaggaggtgaccccagggcatgaggaggaggagcctgtggcccccagcactgtggcacccaggtggctggaggaggaggccgctctgcagctggccctccaccggtcactggagcctcaaggtcaggtggctgagcaggaggaggctgctgccctgcggcaagccctaaccctctccctgctggagcagcccccgttggaggcagaagagcccccagatggggggactgatggcaaggcccagctggtggtgcactcggcctttgagcaggatgtggaggagctggaccgggcgctcagggctgccttggaggtccacgtccaggaggagacggtggggccctggcgccgcacactgcctgcagagctgcgtgctcgcctggagcggtgccatggtgtgagtgttgccctgcgtggtgactgcaccatcctccgtggcttcggggcccaccctgcccgtgctgcccgccacttggtggcacttctggctggcccctgggatcagagtttggcctttcccttggcagcttcaggccctaccttggcggggcagacgctgaaggggccctggaacaacctggagcgtctggcagagaacaccggggagttccaggaggtggtgcgggccttctacgacaccctggacgctgcccgcagcagcatccgcgtcgttcgtgtggagcgcgtgtcgcacccgctgctgcagcagcagtatgagctgtaccgggagcgcctgctgcagcgatgcgagcggcgcccggtggagcaggtgctgtaccacggcacgacggcaccggcagtgcctgacatctgcgcccacggcttcaaccgcagcttctgcggccgcaacgccacggtctacgggaagggcgtgtatttcgccaggcgcgcctccctgtcggtgcaggaccgctactcgccccccaacgccgatggccataaggcggtgttcgtggcacgggtgctgactggcgactacgggcagggccgccgcggtctgcgggcgccccctctgcggggtcctggccacgtgctcctgcgctacgacagcgccgtggactgcatctgccagcccagcatcttcgtcatcttccacgacacccaggcgctgcccacccacctcatcacctgcgagcacgtgccccgcgcttcccccgacgacccctctgggctcccgggccgctccccagacacttaaccgaaggggccaccctctggcctcctgcttcccaggctcccagctccgcacaggctgatgctccccgcccccaactgtggccgcctgagctgtccccggggacgcccctgcctccctctgcgggctccagaaggcggtgtgggggatggcggtcagcagcggccgaggggggccgggctaggtcccagcctgggccgaccccaccaccaggggtcagcagagcccaggaggcgacaccgcccgcccgccgctcccagacctcgcccgagtcggctctgttgtttgaataaacgtgaacgtgaacccaggcggaagggacccggg

SEQ ID NO: 830 - DNA, 974 bp, Homo sapiens
  source 1..974: mol_type = genomic DNA
agcgagtccgcgcgggcggtgccggggcggcggaggacggcttcaggcccaaaggggattgggcggcggctctaggtggcgggtcttggtttgcggaaggggctggagtcgctgcttctcggtgaccggcgcgtggcccggccaatcctgccgccgccacccacccgcaaccgcgtccgttgacggtcgggtccttggtcgccgggtccttgcgggcaccacagagcggggtggcgtccgctccctcgagtcctcggtgccagggaattcaccgctcaccaccccctgccccgccttgggtcctgctcggggaccaaaccactggaaggcagtggcgggaaacgggcgcctgtgccggagagttgagggaacatgagccatttgcagagcttattgttagacaccctcttgggaaccaagcatgtggacagtgcagccctcatcaaaatccaggagcggagcttgtgtgtagcatcaccaggtttcaatgtaacgcccagtgatgtccgaacactggtgaatggatttgccaagaaccctttgcaagcccgaagagaaggactgtatttcaagggaaaagattacagatgtgtccgggcagatgaatattctctttatgccaaaaatgagaacactggtgtggttgtcgtgaagacccatctgtatcttctggtagcaacttacactgagggcatgtatcctagcatctgtgtggaagccacagagagcctgggagactacctaagaaaaaaaggaagttaagtcatcagaggcccatgaaagacaattttattattttagaagaaaattgaagagcctaaagaaaaaatattttatggttgaaaaaacactagacagaaggcactaaaaaagaagaatgaattaagggagcaatttttattacttccagagatcctcttctttcactggaattacttgatcaactgttttttaataagtgttggtcatcggca

SEQ ID NO: 831 - DNA, 5549 bp, Homo sapiens
  source 1..5549: mol_type = genomic DNA
actcctgcacggcgagtgctggagcacgacgtaccgctcgctcggtcagggcgccccctccgcccgcctcctgcttcctcctccgctgcctgccgccgccgcctccaccattgtataatgctcggggcgcgcaggcagagaacggcggagtcttagcttcagcctcgcctgctgcccgctccccggcgccaccctcgggcccctggagcggggcactccgcatggagcgggagtagctgaggagtgggcggaaacccctcctgatgcgttagttcccaggtggagctgcatgtgatatatgttgggtaaaggaggaaaacggaagtttgatgagcatgaagatgggctggaaggcaaaatcgtgtctccctgtgacggtccatccaaggtgtcttacaccttacagcgccagactatcttcaacatttcccttatgaaactctataaccacaggcccctgacagagcccagcttgcaaaagaccgttttaattaacaacatgttgaggcggatccaggaggaactcaaacaggaaggcagcctgaggcccatgttcaccccctcctcccagcccaccaccgagcccagcgacagctaccgagaggccccgccggccttcagccacctggcgtccccgtcctcccacccctgcgacctcggaagcactacgcccctggaggcctgcctcaccccggcctcactgctcgaggacgacgatgacacgttttgcacctcccaggccatgcagcccacggctcccaccaaactgtcacctccagccctcttgccagaaaaggacagtttctcctctgccttggacgagatcgaggagctctgtcccacatctacctccacagaggcggccacggctgcgactgacagtgtgaaagggacctccagcgaggctggcacccagaaactcgacggtcctcaagagagccgcgcagatgactcaaaactgatggactctctgcctgggaattttgaaataacgacgtccacgggtttcctgacagacttgaccctggatgacatcctgtttgctgacattgatacgtccatgtatgattttgacccctgcacttcctcatcagggacagcctcaaaaatggcccctgtgtctgccgacgacctcctcaaaactctggctccttacagcagtcagcctgtcaccccaagtcagcctttcaaaatggacctcacagagctggaccacatcatggaggtgcttgttgggtcctaagacccagggacccagcgactatgcccacccagaccccagagcgttcccataaccctgacagttctccacactgtgcatgcacccttgcttgcctttttcagagaaaaagaaaattttacaacaggatcacactagtttttgctttgagcagagttggagtgccttcatccaagtatgaccacttttaatacacttttttgagtggttcctcagagacctactaccctggtataggaaagaatccatttgaagacaatgttgcaatgttgaatgacaaaaataaacagttcaagtgaagcacaaggattaagttggaaaagctgtaaattgcatgtgcatatttgtctattttttctataagttttattgcaagaggtaaagaagaaaactatatatatatatcttatttagataatctcagtaccttttctggcatttttgccctgtataggttgacttggcaattcggcctttttagaggcattaactactcctcgtaagtgttgcatttacatggctgtttagaaaactgctgcccaaatttattttatatttttgtacagattctgcagtttatgatattgtttttctaaaaacaaatgctgtttatacatatgagatagctattttgataggatttgctcacatagttcctgcaaacttcagatgtacaagttgcacttgtacttttatagagttgtaatgttttatatgtgtatggtgcaagagaaaattggatcaaatcaatctgcagttgatgtccccaaatgcaaacacaggcacacacatgcacacacccataaacacacacacagtgctttaagaaagggccaggtgatatcacacccaaatttcacaagcactgaccccctggcaccaacacccgccagtactgtgacttccaaagccagagccacatgtgctcatcaaacttgcattaagcagttggcgggagatggctgtggagctgggggtttaagtgatggttctcttttgctccctcttttgagggtaaagctactgtctttcttaagagtgtatttatgccaagtttgcgcttttaattgtttttattttgttttttaatgaaaacccagatctttcctttttggcataatttttatgatgacctgaaattttacatccgaacaaaattttacatccgaaaagcaaccaacttcttcatggaactcagccctgttgcaatgcttagggcccttaaagaagaaaatctccccagaaggcatccatcatgttgcttaattgtcttctgcagcttcctttccctagagctttccctgtgttgctaagagctgaaaatggcatcttcgtgatcaccacagtgagcttggctcgcctcggccggcccgggatgcactcttacaacatgtgtgactcttgaacctggagttcatcacattacgtcacagcttcccatctggttgctttcctgagtcagctacttcacacttgtcaaggctgttttaccccaaaactcagacaggactttctatgcatgttttccctcctccccccaattcccccccccatcaccttatctcccaggacacacttgagaagtagctttttattcctagtggtgtacatttaattttaaaaaggttgcaatgtatcatgcttgttgccgaaactgtttatggccttcttgtttcagttttttcttttcttccaatggtactttagctgttgagtgcaggttacaacctatattgttatgcagatggcttctttaggaataacttttatatttatttaaaaatttttaaattatgggatgttttgttgttgttgttgtctttgttgttggtcatttgtcaatattcagtcaccaattctgctcacttcttgccatggataaaattgggtctttctggctaattaaaaaagacaactttataaaatggcactttaagcaagccatagttagttttatttttgtaatgcacatggcaaagcaaagacgtttgtgatgaaggaactgctcatctaagcaaaagatttgagtatgatatgataaaggctttctacattctaatttactttttccccccacttgaatgtgttttaaaggctaattatcagctcagtagagcagtgagaaactgatcaaattgcacttgttctcctacaagcaacctccacgcagacacctcgtactgctacaggtgtgtcatttcctttaataggaccagggaccatgtaactgaggtgagggttgtagtagatgcttccagtgtcagtatgcctgttaattttaagagcttccctttcttgcagagaacaagtctgcccagattccatgctttctataactggaggacctggcaaacctgccgcatgctgcacacatctacctacgtacacatatacaatagtattgatgattctgaacaataacagggtaaaacagttggtttgccattgttaaaaactgatttacagtaacttacaacaactgtacttttgttggattagcaaatcatgtgtttaaacaaatcccatatgttgggcaacagttcaaataagcacggagaagtgttgcccaaacttggttctctgactcttatgtatttgtaaggctgggcttcaaaatcaaaacaaaaaccccaaaaacagcaggcaaatgctttttaactctgacaccgttgccataaatccctgatactcaaagtctaacaagaaagacatggaaaattagcagcccattttcagaaagatcaaaatgatctagggttctaattgcttttgcatcctattcttacaaagtgatgtcccaacagggaacagtaggagctggagtgggatctccaagtcccagtttgagtgtgggatgtgcttccagcagtgccttccctttatgaaagacatcacatggcatccagggccaggcaggcagcttgaggtgcctttacgagaaaaccgagctggggctgggagaggacagttattgacactgatgtgcaatgaagtgacaagatgagagcagaatcgtaagagctttgaatttgaagtgagtttttttccccccataagttatttattccttttttctgtgtaaatatatttattttactgtggagcgctaacatctggatcgtaacatgtgcagaatgtatggtaggaatgtattctcttgtaggaatgtaaatctgtattaaaagggggtccaagccaggcccccaggtcttctcattgtatgcacagtccgcattcatttttactcttctctaatatgggtctatttgaaatatgcaaaaggtatgaggaatgttttaatacctccaaatttttaagaaaagcatcaaagggttgatattttttaaagtttttttagtagcactttctctggatgacagaaggagcaaccacatgggcacccttgttcataccaaagggtgagcagtggccagagcctcctctgcacctctcgagtgtctttaccaattgagctttttatcgccatagccccttggagtgccccagctgccctgaggtcaatcaaggaaaatttcttaatgaaataagctccaaagagccaaagtatcaacttacagatcgtttttaaagcttaaatttatgaaccacctttgtggtaaacaatgaattatgaataccgcagggcagccttcttaaatgacaaatgtaaaaaaaaaaaaaaaaaagactctacttcgtgcagcaattgctactctatacgaattgtcttaatttgaaaaccttgctgttacaaattggacctttatacattttctgaaaacaatgaaaagagtatatttaaccttttctggctgtaaatggttaccttcctgtaactgccccgcacctggaggcatggagttgtgtgcatcctgcttatgtacaattgttttcagtgtttctaagaatgagtctgaatggttcttgaaaattagccaggatcaaatgctattgcagacaaagccaataaaaagttggacttcttttggggataacaagttttggaagagaaatgcaggccatatgtgcgcatgaccgagattttgaaaaaagatgtacatagtgacatgtttggtgcatggtttttgaggagggcttttgtcaaaaaggaggtataacctttcccccacagacctgagagctgtgccttttctatgcaatattacagacgttacatcggaacccagatggctgtattcacatgtaggtttgggctgtaatctaaacaattggacagattaaatgtacatggaaatgagcagtcttacttttgtagttttatattatacaataaacagttaaaagatga

SEQ ID NO: 832 - DNA, 3257 bp, Homo sapiens
  source 1..3257: mol_type = genomic DNA
agagacccgagtgcacgtgtggagaagcggcggcacaagcgcggcggcgggagacactcccgcccccaccagactcaagccctcactcgactctcgcggccttcgttgctcgcacagctccctgcccaggctaggaggccggcttgcggggttgagtggcccgagctaagggtgcggagacctaagggcggcgactacgacggcgttgatatcggtggtaacgacggcctcagcaggcggggaagatgaaaggtagccggatcgagctgggagatgtgacaccacacaatattaaacagttgaaaagattgaatcaggtcatctttccagtcagctacaatgacaagttctacaagaagtttggctttgagattattgagacaaagaagaactactataagaggatagagcccgcagatgctcatgtgctgcagaaaaacctcaaagttccttctggtcagaatgcagatgtgcaaaagacagacaactgaacaaattacaaatgaactttcttgcacttgcttgtcgccaaataaaagagaggcccattgattcctcccccaccccaacacttttcttttaaagcttttctccctccttgttcttgtttttctttcttcctttccttttctctgagagttttaatactttcaaggactttaaaaaaataatcatgtttgaattgttttctcttatttttgtgaggtggtttgaaggaaggacaaggtagatctgtttagttttgcagttgaagttagatggtcctaaacatttaattgtcaaataatttcaaatttaatgtcctgctttcacattgaagggcagagcctacaaaacattgtatatttcaaaagacaaaaagaagcagcagcagtatcttgttctctaattcatagacaagttgagtgtgtttgtggtactttgggtttttaaacactttgggatactaatccctagacattgccttcactccacctttagtccttctgagcactctctcgggagttggaacattgttatccttgtaagaaatactaagcttatgttgatttttaagtaattatatcttctcttcttgctggtgggtggggcagtttggtttagtgttatactttggtctaagtatttgagttaaactgcttttttgctaatgagtgggctggttgttagcaggtttgtttttcctgctgttgattgttactagtggcattaacttttagaatttgggctggtgagattaattttttttaatatcccagctagagatatggcctttaactgacctaaagaggtgtgttgtgatttaattttttcccgttcctttttcttcagtaaacccaacaatagtctaaccttaaaaattgagttgatgtccttataggtcactacccctaaataaacctgaagcaggtgttttctcttggacatactaaaaaatacctaaaaggaagcttagatgggctgtgacacaaaaaattcaattactgtcatctaatgccagctgttaaaagtgtggccactgagcatttgattttataggaaaaaatagtatttttgagaataacatagctgtgctattgcacatctgttggaggacatcccagatttgcttatactcagtgcctgtgatattgagtttaaggatttgaggcaggggtaattattaaacatattgcttctattcttggaaaaatagaagtgtaaaatgttaataatacaaatgtcactgtgacctcctccactgagaggactggtttatgccagatcattttccggcacacacggagtggctttgacagattgataactttgtaagatgggagacatctgaaatattcatgttttccttttgtagtcccatctccactatttagaaatgttctcagactttaaaataatgcacagggcttgagctttctgtcatttgactttaaaaggaagtttcattcatatttatcctcttatgtaaaattgcggtataaagtctcatttccaaatatgttaaatgacaaaattattttataaaatgtttatgcacactttataaccttaagtttttatttgagaatgtgaaagtacaaagtgcagtagacttcaacaatcttgagtgccaagaataatacagaaaaagaagacagttgatgaatgagtttatagggttctaatcttaagatggtaaaaatgtagaaagaccttgctggttttttgggggtattcgtttcttaaacaatccaaatctaagcttagaagaaaagtttagcgttaagcacctttatcttcatgaataagcttcagcttgctcttggcaagagaagagtgcttgagttacagaaggcataagtagtttgaagaatgcagcagcctttttgtaaacttcccagatatcaaaatagactttgatatataaatggttttctgagatgacactgcctctatttctataaccatttcacctggactatctaatcagtcctatgaatgtatccctaaatgtggttattgaaaacctaatagctgcctcatgacaagtacatgttatttaaggaggaaaaaatattaaattttgaattgagtgtgtaggctccctatcattatatatagagtttctttttccacggtagtcagtgacttaacctgaattgtaaatgtttgtaaagggttaattgtcctacatcaaacttagttaaataattccatccacttatggaggaggaggagaatgtggaagaggtaaaaagctgggcacaagttcatatgcctatgagtcagtaaagactgaagtaatgtcctatgttgagctggttattttgatatatgataataattatctttgaagtagaacaattctgttaactggaaaatcacaggatatatccatcatatttttcaggacagatagtttttactgtggggcaaataggttaaaattacactatgttagttgcatttaggttttaaagcaaagaatctgtagagaaatctatgcaatatatagtttgtccagattagctttcatttggggaatgaagttctgaaatatctaaagcagtttactcatcaattgaaaagtcctccaaaaagagaactattgggaaaccatggtgtggtggtggaaaagaaaagctccctcagttttttggagggaataacttaaaaaaatacttaaatggctaagtttacttggtgcagttaagaattaaacttgtcaattttaacattgctgttacatctgaaataaacttatgtgatgttctggt

SEQ ID NO: 833 - DNA, 3001 bp, Homo sapiens
  source 1..3001: mol_type = genomic DNA
gaccgggaggcgctgccgctctgggcagacggttccgggagccgcacggtcccctctccttccccatcctctcccctcccctctccgggttcccccacccacaggagccttgggccgaccactcccccgatggcctcagccacggaggaccccgttctggagcgttatttcaaaggccacaaagctgcgatcacctccttggacctcagccccaacggcaagcaacttgctactgcttcttgggatacctttctcatgctatggaatttcaagccacatgctagagcttacagatatgtgggtcacaaggatgttgtaaccagcgtgcagttttctccacatggaaacttattggcgtctgcctcacgagacagaaccgtgagactctggattcctgataagagaggaaaattctcagaatttaaagctcatacagctccagttcgaagtgtagacttttcagctgatggccagtttctagctacagcttctgaagacaaatccataaaagtatggagcatgtatcgccagcgcttcctgtattccttgtatcgacatacacactgggtacgctgtgccaaattttcacccgatggaagactaattgtgtcatgtagtgaggataaaactattaaaatttgggataccacaaataagcaatgtgttaataacttctcagattccgttggatttgcaaattttgtggactttaaccctagtggtacatgcatagcttcagcaggttctgatcaaactgtgaaagtctgggatgtaagagtgaacaaattactacagcattaccaagttcacagcggtggagttaattgcatatcattccatccttcgggtaactatctcatcacagcttcttcagatggtacccttaagattctggacctcttagaaggaaggctcatctatacacttcaaggacatacgggacctgtctttactgtttcattttcaaaaggtggagagctatttgcatcaggaggtgcagacacacaggtcttattatggaggactaactttgatgaattgcattgtaaaggtcttaccaaaagaaatctcaaaagattacattttgattcaccaccacatcttcttgatatctacccaagaacaccacatccccatgaggaaaaagttgagactgtagaaattaatccaaagcttgaggtaatcgatttgcagatctctactccccctgttatggatatcctttcttttgattctaccacaacaacagaaaccagtggtaggactctgccagacaagggtgaagaggcctgtggatatttcttgaacccttccttaatgtcaccagaatgtttgccaacaaccacgaaaaagaaaacagaagacatgagtgacctcccctgtgaaagtcaaaggagcatacctctcgctgtgactgatgctttagagcatattatggaacaactcaatgttttgacacagactgtttcaatcttggagcagcgactgactttgacagaggataagctgaaagactgccttgaaaatcagcaaaagcttttcagtgctgtccaacagaaaagctgaataaaaaattcattttcatttgttgggcagaggcccaataaatgaacaaatgtacatacactcaggaaggtagtacaagatactccatacaacacaaccatgtgctatttatcatggcatttcttaaaagggtgagcaacagaacaaaaggcagaaaaggcatacctaaggactaatttaaacacatatcaatgtgaaggactaatttaaattactatcatttatgattgcagtaataaagtgataagcattcaagcaactctgtattttccccatattattttaaatgtccattttcatttataggccaaatcctgccaggaaagtaaccagatctctggatttcactgttaagtcatttcagattgaccatattcagacagtcatggggtgaaataattcacttacctccaaaatagcatcctatatgccaataatgagttattgatctgactagttgtatgtctttctgttcaaaatagaaattatcctttcttactaatgccttgaaagaatgaacaaataaaaattcccagaccacagaatttccacagcaagaatacacttattttaattaacaatagcacagatatagcatagggcagtgggttttttagttaatttatggcgtactttgtttatccattggccaacctgaaggaaatgaaactcacctatctttctatcacagatgaatgtgctagatgaatgatttgggttgtatctgatcatggttcacaaaaattatgttagtgtgttttcagtatgctaaaaagtcagagtgatacaaaagtgatatttaaaaatatacacacatgtatgtacacatgcttcagaaatattgttgcttagggtgatttgggcagctaaatagtaagtactttttaaaatttttgcatcatcatcttcctatttaatgaattgtgatttaaaacaaaatgaaaataagccaggtattctaaaagatcctggatacaaattaagaattttgctttattttaaaccaaattgagattaaattgaagaaaagcaagcaaattaatttcagcttgattatcaacctgtatcaagaacaaaaatgggaggaggtgtccacatttatggtgtgtataggtaacatggggaaaatgctattctgtgttttggaaaagaagaaatagtgccgtcctatttatttctatatttagaaatttttctcaaagaaatttcaattgtatctatgagatgggtttctaagtatcttattgtgtgttataagtgccttttaatatcatactaagtgtgagcttctggacattttcaagagcttacaaaaactaagtggcattgtatttttataaccccattgagaagactaagtaagaaatgaaatgtcctatcaattttattttgtcatgcttcaaacaataaagacatttctgctttaaaagaaaaa

SEQ ID NO: 834 - DNA, 1544 bp, Homo sapiens
  source 1..1544: mol_type = genomic DNA
cttgcgagaagacacgtgcgcggaaggagcttgcagtagcgggcggcagagctggagtgaagggagctagtgtttaggtagcagtcaccattatgctcaaagcggtgatcctgattggaggccctcaaaagggaactcgcttcagacctttgtcttttgaggtgcccaaaccattgtttcctgtggcaggggtccctatgatccaacaccatattgaagcctgtgcccaggtccctggaatgcaggagattctgctcattggcttctaccaacctgatgagcccctcacccagttcctagaagccgcccagcaggagtttaaccttccagtcaggtacctgcaggaatttgcccccctaggcacagggggtggtctttaccattttcgagaccagatcctggctgggagccccgaggcattcttcgtgctcaatgctgatgtctgctccgacttccccttgagtgctatgttggaagcccaccgacgccagcgtcaccctttcttactccttggcactacggctaacaggacgcaatccctcaactacggctgcatcgttgagaatccacagacacacgaggtattgcactatgtggagaaacccagcacatttatcagtgacatcatcaactgcggcatctacctcttttctcctgaagccttgaagcctcttcgggatgtcttccagcgtaatcagcaggatgggcaattggaggactcaccaggcttgtggccaggggcaggtaccatccgcctagagcaggatgtgttttcagccctggcagggcagggccagatatacgtgcatctcactgatggtatctggagtcagatcaagtccgcaggttcagccctctacgcctcccgcctctacctgagccgataccaggacactcacccagaacggctggccaagcacaccccagggggcccatggatccgagggaatgtgtacatccacccgaccgccaaggtggccccctcggctgtgctgggccccaacgtctccatcgggaagggggtgaccgtgggtgagggtgtgcggctccgggagagcatcgtcctccatggagccactttgcaggagcacacgtgtgttctgcatagcatcgtgggctgggggagcaccgtgggacgctgggcccgcgtggagggtacccccagtgaccctaaccccaacgatccccgagcccgcatggacagtgagagcctcttcaaggacgggaagctgctgcctgctatcaccatcctgggctgccgagtccggatccctgccgaggtgctcatcctgaactcgattgttctgccacacaaggagctgagccgaagcttcaccaaccagatcatcctctgagtagggctgccagaaggcccccagctcctacccactccccttgaggctgctgcctgcttggccagcctctgtccagaaaggaccagagaaagccaggctggatcgtcacatgccggggagcaatgtggatggcctggggactcctgggttttctccctcccgactccctaataaaccccgtgaaccttg

SEQ ID NO: 835 - DNA, 3170 bp, Homo sapiens
  source 1..3170: mol_type = genomic DNA
gctaaccttgccgcgggccgagccctgcctcgccatggaccaggactatgagcggcgcctgcttcgccagatcgtcatccagaatgagaacacgatgccacgcgtcacagagatgcggcggaccctgacgcctgccagctccccagtgtcctcgcccagcaagcacggagaccgcttcatcccctccagagccggagccaactggagcgtgaacttccacaggattaacgagaatgagaagtctcccagtcagaaccggaaagccaaggacgccacctcagacaacggcaaagacggcctggcctactctgccctgctcaagaatgagctgctgggtgccggcatcgagaaggtgcaggacccgcagactgaggaccgcaggctgcagccctccacgcctgagaagaagggtctgttcacggtgacgcggctctgtgacctctcagtggaaggggactcagtgacctccgtgggctggtctgagcgggggaacctggtggcggtgggcacacacaagggcttcgtgcagatctgggacgcagccgcagggaagaagctgtccatgttggagggccacacggcacgcgtcggggcgctggcctggaatgctgagcagctgtcgtccgggagccgcgaccgcatgatcctgcagagggacatccgcaccccgccactgcagtcggagcggcggctgcagggccaccggcaggaggtgtgcgggctcaagtggtccacagaccaccagctcctcgcctcggggggcaacgacaacaagctgctggtctggaatcactcgagcctgagccccgtgcagcagtacacggagcacctggcggccgtgaaggccatcgcctggtccccacatcagcacgggctgctggcctcggggggcggcacagctgaccgctgtatccgcttctggaacacgctgacaggacaaccactgcagtgtatcgacacgggctcccaagtgtgcaatctggcctggtccaagcacgccaacgagctggtgagcacgcacggctactcacagaaccagatccttgtctggaagtacccctccctgacccaggtggccaagctgaccgggcactcctaccgcgtgctgtacctggcaatgtcccctgatggggaggccatcgtcactggtgctggagacgagaccctgaggttctggaacgtctttagcaaaacccgttcgacaaaggagtctgtgtctgtgctcaacctcttcaccaggatccggtaaacctgccgggcaggaccgtgccacaccagctgtccagagtcggaggaccccagctcctcagcttgcatggactctgccttcccagcgcttgtcccccgaggaaggcggctgggcgggcggggagctgggcctggaggatcctggagtctcattaaatgcctgattgtgaaccatgtccaccagtatctggggtgggcacgtggtcggggaccctcagcagcaggggctctgtctcccttcccaaagggcgagaaccacattggacggtcccggctcagaccgtctgtactcagagcgacggatgccccctgggaccctcactgcctccgtctgttcatcacctgcccaccggagccgcatgctcttcctggaactgcccacgtctgcacagaacagaccaccagacgccagggctgattggtgggggcctgagaccccggttgcccattcatggctgcaccccaccatgtcaaacccaagaccagccccaaggccagaccaaggcatgtaggcctgggcaggtggctcggggccactggcggagccagcctgtggatccaagagacagtccccacctgggcttcacggcatccttgcagccacctctgctgtcactgctcgaagcagcagtctctctggaagcatctgtgtcatggccatcgcccggcggtcagtgggcttcagatgggcctgtgcatcctggccaagcgtcaccctcacactggaggaggatgtctgctctggacttatcaccccaggagaactgaacccggacctgctcactgccctggctggagaggagcacaacagatgccacgtcttcgtgcattcgccaacacgtgccctcacagggccagcgtcctccttccctgcgcaagacttgcgtcccccatgcctgctgggtggctgggtcctgtggaggccagcagcggtgtggcccccgcccccaggctgcctgtgtcttcacctgtcctgtccaccagcgccaacagccgtggggaagccaaggagacccaaggggtccaggaggtgggcgccctccatccttcgagaagcttcccaggctcctctgcttctctgtctcatgctcccaggctgcacagcaggcagggagggaggcaaggcaggggagtggggcctgagctgagcactgccccctcacccccccaccaccccttcccatttcatcggtggggacgtggagagggtggggcgggctggggttggagggtcccacccaccaccctgctgtgcttgggaacccccactccccactccccacatcccaacatcctggtgtctgtccccagtggggttggcgtgcatgtgtacatatgtatttgtgacttttctttggatttgttttgtgtttttgttgactagtcctggaaatgtttgaggctagacggggaggggccaggacccacccactgctcctgggggatgaggtcctggttttaaagccccgtcatttcaagcgggtcgatcttccacattcactggagagactctccccacctctgtctgggtggggcgcggacccctcactgtgcgcctgtgcagggggtgctggtgcacgtggcagtgtggatttccagtggtcacggtcttactgtttcaaggtttttaaataagaaaaccaaccctgccttcgcccatgcccgcccctgcccgcagttgccaaagagccgccttgtcgctgtgggcgtcagggcttggctggctcagtgcacaacccacagtggccttcagaggctcctcctgggactgggaaccgccgcagggccaggcggacggcgtgaggtttgtgttggggctggttctgcccatgctagggggtgggggagctcccaggacagaccagccttgtttctcatgtaatgcagtgacgctgtcattaaacacgtggattcatgtgtgg

SEQ ID NO: 836 - DNA, 6283 bp, Homo sapiens
  source 1..6283: mol_type = genomic DNA
aaagcgtcctgggtattgtagtgtattggagggaaggcgtcttggcgccttctcttcgcaccgttttccggagactgttagaggaagagtcgctttttcctgcctcccaggctgcccagcggcgccggttgccggggaacgcaggcgccgtggggagggatggcgggaggatactgcttaggtgctggagacggagttgagctggtgaagaagagctcgggctcatcatgaaacaacgaaaaggccaagggtctgggggcagccgtgggcgcaaaaaaagaggtttaagtgacatttctccatctacaagcctgccacctctggttgaaggccagctacgctgttttctaaaacttactgttaatagagtcatatggaagattgcaaagcctcccacttgtgtacttgtccgagtgagatggtggggagaaacatcagatggaaccctcttttgtcccagggatgcattgcagactgaaccaaaagctgtgagaacaactacacgttacgctattcgttgtggtccaaaacagtttacctcttatctaacagatatggctgtgctggtgctggaagtaatcaccaaacttgatggtcttccaattggtagagttcagatcaatggactagctcaactttctccaacccatcaaatcaatggattttttaccattgtttcatcaacgtctaagaaacttggagaactccaggtctcacttgccctggaacctctgtcagaaacttacgacagctaccatccacttcctaccactgacatgacagaaaatgtgcttttatctaagcagggattcagagagaatactgaacccagcagtacccagtttcaggttccatcaaggcctcgcgacatacataccatcaaaattgatggaaaagagttagcagccaacagcagtagatcaaccactccgaggggaaaagaccatgtatgctttgcagagaaccctgatacaataaaggattcttcctttggactacagcacagtcttaattcaggacagagtttagagtctgtaactctgaaaggcagagctccacggaagcagatgtcccttctgaacagttctgaattccagcctcaaattagaacagttgccaagagtcacagtgactcatgcattctttcttcaaacaacctccctaccaaggatcttctttcagctctgttagaacaaggcaataaactgcgtaatgccatggtgatttctgcaatgaaatcaagcccagagaccagcatgttgttggaccaagttcatcctcctattaatgaagattctcttagagcatcaacacagatcagagccttttctaggaatcggtttaaagaccacattgaagatcacctcctcccttcaactgagaatacattttggagacatgacacaaaagctgataccagagctatacagctgctattaggcagtgctgaattatcccaaggcaatttctgggatgggctaggctctcctccagattccccatctcctgggagtgatgtgtattgcatcagtgagctgaatgaccctcagtatgaccagagtcttctggagaatttattttatacagcacctaaatctgataccagcatcagtgatttcctcagtgaagaggatgatatcgtcccttctaaaaaaataagccagtcaacagctcttgccagatcatctaaggttctggagtcaagtgatcataagctgaagaagaggtcagcaggcaagagaaatagaaatttggttgaacaacagatgctctcagaaactccagaagatgcccaaacgatgacactaagtgtggatagactggcccttttgggtagaacacattcagtcagaatcatcatcgaaaccatgggagttcctccagatagtcctcagatgacccctggcaaaaaaagctatgctggtccaccacctaaggtgactacagcaaaaaagcgcactttctttgtagaatatcactttcctgtgggcttttcggaaagcggattgggaaagacagctttgatcactgaggttgttcgactcgcctccagtaaaattacagatggaaaggtgaagttccagcagcgatttgtgtttccagtacagtttggtggcccaatgatagagcactggtggaattccaacctcactttccaaatttatgtaaagaaaactccacagaaaaagccagaagtcattggatctgtgtcactttctttgcgagctgtcattcaatcagagctgctttctttcagtgatcagcttccagtgcaacaagaaaatggtcagtctccatttggccccctcaaggtaaccatggagcttattacagataacaaagatttcactggtatcaatactaagttaagtggcaacacccattataccccactttgtgctcctacaagtccaaataaggcactaccagaacttaaccaagatatgacctgtaccaaaaatccacaaaacttaaaccaaattcatgaggaaactgcaaagaaagcacagaacttggtgctccccaaccgaaagtcaccaagccctgtagcaccacatccttcaaccttcgtagctacgccagcctcccataatttagtcaatcagacaaatgggacaacaaaagagagtgctttgctgttgcatgtgctgttgatggtgccagatgggaaagattttattagtggagaatctgagaaacaatcaccatgcaatgtttatttaaattgtaaactcttcagcacagaggaagtcaccagatctgtcatcgcatggggcacaacacaaccggtctttaacttttctcaggtgattcctgtctctctgtcttccaaatacctggaaaggcttaagaacaatgtgatggtaattgaaacttggaataaggtgcggagcccaggacaggacaagctgctcgggctggtgaaacttcccctccaccagttttacatgtcattcaaagatgctaagatttctcgcctgctgctggatgcccagtacccagttgttgctgtcgacagctacatgcctgtgattgatgtgttttcaggccaccaaaatgggagtcttcgagtctttttagctatgggttcttcaaatcaaataatggcactacaaagattaaagaatgaagaaggaacactccctcccttcagccctaggccagcccatttcctggaccagccaactgcagcatctgttgctatggcagaggaccgaggaaatggactgatggagcactgctttgagatccatatagagatggttaaagggctagcccctcttcaggcaacagtctggggagaagcagattgttatgtccagtactactttccagttcaacactctcaatccagtgtgctgaaaggacctgagttccttgaaaatggaattactctgaagcccttcagaactgcaaccacactctgtgttccagatcccatctttaatagtgaacaccatcactctctcctgttgccagctgaggttccagtgcaaaggctcctactaagtgctttctctgcacagggcctcgtgcctggaggtggagtccagtttgaaatctggtgcagatactattatcctaatgtgagagaccagaaggtcgccaaaggaaccttgccattatcaaggatctgtgctatggtaaccacccagcatcgtgaggatgtgggaatacagacctttaatctccctttaacccccaggattgagaacaggaaagaattgaggaaccagtcatcaggtttactggatgtgggcctaaggtacaggcgtagtccaagaacagcagagggagttcttgctgcccgaactgtttccatctcagtccagattatcagagcctgtggtctgcaagcagcagccaaggctttggctgaacgggaacccgctctacagtttagtgccacagtcggggtcaatgcctctgtcaccactcatctctccttcctgccccagggagaacagcgccgaacccaccctgtggcctgttctttctgccctgagttctcccatcacgttgagttcacatgtaacttggtgactcagcactgtagtggagaggcctgtttcctagcagagttgttggagtttgcagaagttatttttgctgtctatcatgaaaataccaagtcagcaagtgatataatcagtattgagtcatgcaaagagtatctgcttggagtagtaaaagttccaacaaaagagctgctgatcaagagatctgggatcacaggatggtatcctatcattttaccagaagacgggggcctacctcatggcctggagctcatgcagaagatcgtgggtggtctggagctttcgatttccttcacgcatcgtggagatagagaacgggtgttggaagctgctgagcatttgggctggagctttgagaacagcctgaaagattttgtcagaatggatgaaggggagccagccactgtcaccatctccaccccaaggctgtggctgcccatccattgtgtgctgcttgctggccacaaccacattcataagaatacatattgctaccttcgctacaagttctatgatcatgaagccttttggacccctctcaagaagcctaaggaatctgtaaacaaaaagcagattatggtcactttcaaggcatccaaaagagcagaagtcaccaggggcccatcactgctttggtacttcagggaggagaggctagagatccaagtgtggcgagcttatggcaatgacagtgtggagagaccccatcagacagacagctggattggctcagcctatgtggacctggccagacttggggagaggtcagcgaggacgctaactgtcagtggtgtgtatcctctgtttggacgaaatgcttccaacctctcaggagctgccttgcgagttcatgtggttctttcctctctttcctcacaccttgagcccactcatgagctggactccatggactgcagcagccacagtgagtctgagcagctccccagaaggaatgatgaggtccagctctctccaccagaagtcatctcctgccaccagaagtctcctgcctccacccaggtcccctgcagcagcaccacagctgaagtccgcctgacgcaggagggccctgctgatttggatggaacgtttgcagtcagcatcctagtagaaagagcaatgcacttgagcttgaaagggagccccttgacagagcggaaagtatcgatacccagttgttgtgtatcctttgcaacagccgatgagtcatctcctgtatacacccaagtggttgaaaacacagattcccccatctggaattttcaacagcagtcaaggctatcaaaagagctgcttctggacccacaacaaaccctggtcttcaaagtttggcataaaggagatgaggagagggtgattggctttgcctcggtggacctctccccacttctctctggcttccagtttgtctgtggctggtacaacatcacagacttcagtggagagtgccaggggcagataaaagttgctgtctcccctttggagagtttgatacacttcaaagaagaaaggcaagcaaggcgtggagtggagacctcaaaatcactgatcccaatatacagtcccttttccttccctgcctctgatacgtatgctgcattctccagccacatggcaaggcagaccctagaccaacttgctcatgcctcctcaaaggagcttgatttctcctctcctgggagaagtgataccacaagaagccaagcatcacgccatgaagagcatgtgcagaacattcgccggtttcatgaatccctgcatcttcagggagaggcacccttgccatgtgatgacaaactgaccacatcacctttgtcctcccaaacctccattctgacttctctcaggaagaatctgagtgagcttgatcagattcagaggtacttccgccagaagctcaccaagcctttcctacccctcagccctcagactcaaacggccatctcacagcaccaggagagctgtagggaccatcttgggccaggtgccagcagcctagaccctgggagccagtgtatcctggagaaatccagtaacctggtgttgcaagtcagctccttaatcacaggtagttactgaagtaactggaagcatgaacatgcccaccaggactcccagctcccaacgattcctgagcatgagcagatagtctctgaaagcatttccacagatgtatccacaactatagattagattctggtcctctgatattagaataaagtactaaaaattgtaccgccttg

SEQ ID NO: 837 - DNA, 6225 bp, Homo sapiens
  source 1..6225: mol_type = genomic DNA
aaagcgtcctgggtattgtagtgtattggagggaaggcgtcttggcgccttctcttcgcaccgttttccggagactgttagaggaagagtcgctttttcctgcctcccaggctgcccagcggcgccggttgccggggaacgcaggcgccgtggggagggatggcgggaggatactgcttaggtgctggagacggagttgagctggtgaagaagagctcgggctcatcatgaaacaacgaaaaggccaagggtctgggggcagccgtgggcgcaaaaaaagaggtttaagtgacatttctccatctacaagcctgccacctctggttgaaggccagctacgctgttttctaaaacttactgttaatagagtcatatggaagattgcaaagcctcccacttgtgtacttgtccgagtgagatggtggggagaaacatcagatggaaccctcttttgtcccagggatgcattgcagactgaaccaaaagctgtgagaacaactacacgttacgctattcgttgtggtccaaaacagtttacctcttatctaacagatatggctgtgctggtgctggaagtaatcaccaaacttgatggtcttccaattggtagagttcagatcaatggactagctcaactttctccaacccatcaaatcaatggattttttaccattgtttcatcaacgtctaagaaacttggagaactccaggtctcacttgccctggaacctctgtcagaaacttacgacagctaccatccacttcctaccactgacatgacagaaaatgtgcttttatctaagcagggattcagagagaatactgaacccagcagtacccagtttcaggttccatcaaggcctcgcgacatacataccatcaaaattgatggaaaagagttagcagccaacagcagtagatcaaccactccgaggggaaaagaccatgtatgctttgcagagaaccctgatacaataaaggattcttcctttggactacagcacagtcttaattcaggacagagtttagagtctgtaactctgaaaggcagagctccacggaagcagatgtcccttctgaacagttctgaattccagcctcaaattagaacagttgccaagagtcacagtgactcatgcattctttcttcaaacaacctccctaccaaggatcttctttcagctctgttagaacaaggcaataaactgcgtaatgccatggtgatttctgcaatgaaatcaagcccagagaccagcatgttgttggaccaagttcatcctcctattaatgaagattctcttagagcatcaacacagatcagagccttttctaggaatcggtttaaagaccacattgaagatcacctcctcccttcaactgagaatacattttggagacatgacacaaaagctgataccagagctatacagctgctattaggcagtgctgaattatcccaaggcaatttctgggatgggctaggctctcctccagattccccatctcctgggagtgatgtgtattgcatcagtgagctgaatgaccctcagtatgaccagagtcttctggagaatttattttatacagcacctaaatctgataccagcatcagtgatttcctcagtgaagaggatgatatcgtcccttctaaaaaaataagccagtcaacagctcttgccagatcatctaaggttctggagtcaagtgatcataagctgaagaagaggtcagcaggcaagagaaatagaaatttggttgaacaacagatgctctcagaaactccagaagatgcccaaacgatgacactaagtgtggatagactggcccttttgggtagaacacattcagtcagaatcatcatcgaaaccatgggagttcctccagatagtcctcagatgacccctggcaaaaaaagctatgctggtccaccacctaaggtgactacagcaaaaaagcgcactttctttgtagaatatcactttcctgtgggcttttcggaaagcggattgggaaagacagctttgatcactgaggttgttcgactcgcctccagtaaaattacagatggaaaggtgaagttccagcagcgatttgtgtttccagtacagtttggtggcccaatgatagagcactggtggaattccaacctcactttccaaatttatgtaaagaaaactccacagaaaaagccagaagtcattggatctgtgtcactttctttgcgagctgtcattcaatcagagctgctttctttcagtgatcagcttccagtgcaacaagaaaatggtcagtctccatttggccccctcaaggtaaccatggagcttattacagataacaaagatttcactggtatcaatactaagttaagtggcaacacccattataccccactttgtgctcctacaagtccaaataaggcactaccagaacttaaccaagatatgacctgtaccaaaaatccacaaaacttaaaccaaattcatgaggaaactgcaaagaaagcacagaacttggtgctccccaaccgaaagtcaccaagccctgtagcaccacatccttcaaccttcgtagctacgccagcctcccataatttagtcaatcagacaaatgggacaacaaaagagagtgctttgctgttgcatgtgctgttgatggtgccagatgggaaagattttattagtggagaatctgagaaacaatcaccatgcaatgtttatttaaattgtaaactcttcagcacagaggaagtcaccagatctgtcatcgcatggggcacaacacaaccggtctttaacttttctcaggtgattcctgtctctctgtcttccaaatacctggaaaggcttaagaacaatgtgatggtaattgaaacttggaataaggtgcggagcccaggacaggacaagctgctcgggctggtgaaacttcccctccaccagttttacatgtcattcaaagatgctaagatttctcgcctgctgctggatgcccagtacccagttgttgctgtcgacagctacatgcctgtgattgatgtgttttcaggccaccaaaatgggagtcttcgagtctttttagctatgggttcttcaaatcaaataatggcactacaaagattaaagaatgaagaaggaacactccctcccttcagccctaggccagcccatttcctggaccagccaactgcagcatctgttgctatggcagaggaccgaggaaatggactgatggagcactgctttgagatccatatagagatggttaaagggctagcccctcttcaggcaacagtctggggagaagcagattgttatgtccagtactactttccagttcaacactctcaatccagtgtgctgaaaggacctgagttccttgaaaatggaattactctgaagcccttcagaactgcaaccacactctgtgttccagatcccatctttaatagtgaacaccatcactctctcctgttgccagctgaggttccagtgcaaaggctcctactaagtgctttctctgcacagggcctcgtgcctggaggtggagtccagtttgaaatctggtgcagatactattatcctaatgtgagagaccagaaggtcgccaaaggaaccttgccattatcaaggatctgtgctatggtaaccacccagcatcgtgaggatgtgggaatacagacctttaatctccctttaacccccaggattgagaacaggaaagaattgaggaaccagtcatcaggtttactggatgtgggcctaaggtacaggcgtagtccaagaacagcagagggagttcttgctgcccgaactgtttccatctcagtccagattatcagagcctgtggtctgcaagcagcagccaaggctttggctgaacgggaacccgctctacagtttagtgccacagtcggggtcaatgcctctgtcaccactcatctctccttcctgccccagggagaacagcgccgaacccaccctgtggcctgttctttctgccctgagttctcccatcacgttgagttcacatgtaacttggtgactcagcactgtagtggagaggcctgtttcctagcagagttgttggagtttgcagaagttatttttgctgtctatcatgaaaataccaagtcagcaagtgatataatcagtattgagtcatgcaaagagtatctgcttggagtagtaaaagttccaacaaaagagctgctgatcaagagatctgggatcacaggatggtatcctatcattttaccagaagacgggggcctacctcatggcctggagctcatgcagaagatcgtgggtggtctggagcatttgggctggagctttgagaacagcctgaaagattttgtcagaatggatgaaggggagccagccactgtcaccatctccaccccaaggctgtggctgcccatccattgtgtgctgcttgctggccacaaccacattcataagaatacatattgctaccttcgctacaagttctatgatcatgaagccttttggacccctctcaagaagcctaaggaatctgtaaacaaaaagcagattatggtcactttcaaggcatccaaaagagcagaagtcaccaggggcccatcactgctttggtacttcagggaggagaggctagagatccaagtgtggcgagcttatggcaatgacagtgtggagagaccccatcagacagacagctggattggctcagcctatgtggacctggccagacttggggagaggtcagcgaggacgctaactgtcagtggtgtgtatcctctgtttggacgaaatgcttccaacctctcaggagctgccttgcgagttcatgtggttctttcctctctttcctcacaccttgagcccactcatgagctggactccatggactgcagcagccacagtgagtctgagcagctccccagaaggaatgatgaggtccagctctctccaccagaagtcatctcctgccaccagaagtctcctgcctccacccaggtcccctgcagcagcaccacagctgaagtccgcctgacgcaggagggccctgctgatttggatggaacgtttgcagtcagcatcctagtagaaagagcaatgcacttgagcttgaaagggagccccttgacagagcggaaagtatcgatacccagttgttgtgtatcctttgcaacagccgatgagtcatctcctgtatacacccaagtggttgaaaacacagattcccccatctggaattttcaacagcagtcaaggctatcaaaagagctgcttctggacccacaacaaaccctggtcttcaaagtttggcataaaggagatgaggagagggtgattggctttgcctcggtggacctctccccacttctctctggcttccagtttgtctgtggctggtacaacatcacagacttcagtggagagtgccaggggcagataaaagttgctgtctcccctttggagagtttgatacacttcaaagaagaaaggcaagcaaggcgtggagtggagacctcaaaatcactgatcccaatatacagtcccttttccttccctgcctctgatacgtatgctgcattctccagccacatggcaaggcagaccctagaccaacttgctcatgcctcctcaaaggagcttgatttctcctctcctgggagaagtgataccacaagaagccaagcatcacgccatgaagagcatgtgcagaacattcgccggtttcatgaatccctgcatcttcagggagaggcacccttgccatgtgatgacaaactgaccacatcacctttgtcctcccaaacctccattctgacttctctcaggaagaatctgagtgagcttgatcagattcagaggtacttccgccagaagctcaccaagcctttcctacccctcagccctcagactcaaacggccatctcacagcaccaggagagctgtagggaccatcttgggccaggtgccagcagcctagaccctgggagccagtgtatcctggagaaatccagtaacctggtgttgcaagtcagctccttaatcacaggtagttactgaagtaactggaagcatgaacatgcccaccaggactcccagctcccaacgattcctgagcatgagcagatagtctctgaaagcatttccacagatgtatccacaactatagattagattctggtcctctgatattagaataaagtactaaaaattgtaccgcctt

SEQ ID NO: 838 - DNA, 1968 bp, Homo sapiens
  source 1..1968: mol_type = genomic DNA
attgtcgctttcgctacccgcggggccgggcgagcgggaagctcggcacagtgggagcctggtggtgggtctcctggggccggtcgcaatgggtttccgggggtcccgcggctgctctgtggaccccttcggcccctggtgctccgggcgctggcagcgtcaccggacaaaggccaccgagcgcgggggtgtccccgaggtggacgcgcgggtttacttcctctccggccccacgggcgcgcttccctcctgacggattccgaagcccgccccaccaccgtcaccgcaccagtggcccaggcttcgtgggaccaacagggctaatcctgccccacggatctaatccggatcgggacccggtcccaggggaggcccccacctccccttctattgttctgtggcccaggttccggagcatttgctccatgccctcgcctgcctgcagggccccggtgtggccccggtgctgcgctgcgcgccgacccccgcgggtctgtctctccaactgcagcggtccgccgtcttcgagcgcgtcctcagcgccgtggccgcctatgccacgcccgcctcgcctgcctcgctgggccagcgcgtcttactacactgcccagcactgcgcagctccccctgcgcactccgcttgagccagctgcgtacggtgctcgtggccgatcacctggcgcgagccctgcgcgctcacggggtgtgcgtgcgcctagtgccagctgtgcgggatccgcacatgctgaccttcctgcagcaactgcgggtggactggcccgctgcctcggagagagcttcctcccacaccctgaggagccacgcccttgaagaacttacctctgctaatgacgggaggacactgtcccctggcatcctaggcagactgtgtctgaaggagctggtggaagaacagggccgcacagctggctatgaccccaacctggacaactgtctggtgactgaggatctcctctctgtgctggctgagctgcaagaggctctatggcattggcccgaggacagccacccaggcctggctggggcctcagatactggtacaggcggctgcctggttgtacatgttgttagctgtgaggaggagttccagcaacagaagttggacctgctttggcagaagttggttgacaaggctccactcagacagaagcacctcatctgtggccctgtgaaagtagctggtgcacctggcactctgatgactgcccctgagtactacgagttccggcatacccaggtgtgcaaggcctcagcactgaagcatggtggggatctggcacaagacccagcctggacagagatctttggtgttctctctgtggccaccatcaagtttgagatgctgagcacagccccacagagtcagctcttcctggctctggctgacagcagtatctccacgaagggcacaaagagtggcacctttgtcatgtataattgtgcccgtcttgccacactctttgagagttacaagtgtagtatggaacaaggtctgtaccccacttttcctcctgtgagcagtctggacttctcactgctacatgatgagggtgagtggttgttgctcttcaacagtatcctcccctttccggatctgctgagccggacagcagtgctggactgcacagccccggggctccacattgctgtacgcacagagatgatatgcaagttcctggtacagctcagcatggatttcagctcctactacaaccgggtacacatcctgggggagcctcgaccacacctctttggtcagatgttcgtccgcctgcagcttctgagagctgtgcgtgaggtgctccatactggcctggctatgctgggtctccctccactgagccacatttaaggccacagaggctccaatacctgggaatgttcacaaagtcatcaactggaaaaaaagcaaaaacccacggccaaaataaattggtactgtttgtt

SEQ ID NO: 839 - DNA, 2151 bp, Homo sapiens
  source 1..2151: mol_type = genomic DNA
gtgtttcaccacacggagatgtggtcacgtgacttgtcaactttcacccaggatgtctcccttctgacttccccttagcaaccaagtcgcggcgcttggttccccagcaaccgggagacgcgtctgctgcgtggaaccgccgagttcccagcgcttgagaagggtcttcctatgttgcccgggctggtcttgaactcctgaactcaagcagtccttccacctcggcctcccaaagagctgggattacaggtgaaaattctggatctgttatctgtgaggaggccactccgttgacagttgtgtaaaactctgctgctttccccagctccaacctctctggtcttcaacaacactatcatcagggaaaacgtgggggaagatgaaccagccgtgcaactcgatggagccgagggtgatggacgatgacatgctcaagctggccgtcggggaccagggcccccaggaggaggccgggcagctggccaagcaggagggcatcctcttcaaggatgtcctgtccctgcagctggactttcggaacatcctccgcatagacaacctctggcagtttgagaacttgaggaagctgcagctggacaataacatcattgagaagatcgagggcctggagaacctcgcacacctggtctggctggatctgtctttcaacaacattgagaccatcgaggggctggacacactggtgaacctggaggacctgagcttgttcaacaaccggatctccaagatcgactccctggacgccctcgtcaagctgcaggtgttgtcgctgggcaacaaccggattgacaacatgatgaacatcatctacctccggcggttcaagtgcctgcggacgctcagcctctctaggaaccctatctctgaggcagaggattacaagatgttcatctgtgcctaccttcctgacctcatgtacctggactaccggcgcattgatgaccacacaaaaaagcttgcggaggctaagcaccagtacagcatcgacgagctgaagcaccaggagaacctgatgcaggcccagctggaggacgagcaggcgcagcgggaggagctagagaagcacaagactgcgtttgtggaacacctgaatggctccttcctgtttgacagcatgtacgctgaggactcagagggcaacaatctgtcctacctgcctggtgtcggtgagctccttgagacctacaaggacaagtttgtcatcatctgcgtgaatatttttgagtatggcctgaaacagcaggagaagcggaaaacagagcttgacaccttcagtgaatgtgtccgtgaggccatccaggaaaaccaggagcagggcaaacgcaagattgccaaattcgaggagaagcacttgtcgagtttaagtgccattcgagaggagttggaactgcccaacattgagaagatgatcctagaatgcagtgctgacatcagtgagttgttcgatgcgctcatgacgctggagatgcagctggtggagcagctggaggagactataaacatgtttgaaaggaacattgttgacatggtaggactgtttatcgaaaatgtccaaagcctgatggctcagtgccgggacctggagaatcaccaccacgagaagctcctggagatctctatcagcaccctggagaagattgtcgagggcgacctggacgaggacctgcctaacgacctgcgcgcgctttttgtcgataaagatacgattgttaatgctgtcggggcatcgcacgacatccacctcctgaagattgacaatcgagaagatgagctggtgaccagaatcaactcttggtgtacacgtttaatagacaggattcacaaggatgagatcatgaggaaccgcaagcgcgtgaaggagatcaatcagtacatcgaccacatgcagagcgaactggacaacctggaatgtggcgacatcctagactagatgaatgtcagccacaggagcttcttcaaaacatagcaccagccccagccaggagaaggaagtgcacacgcctcacccgcacctctagagagttgctgggcatctctcaaccgcgatccccaacaccattcttcccccacccctggaaaaacttccaaaagtagagaaaataaaggactcatttcacatttcccctactc

SEQ ID NO: 840 - DNA, 2292 bp, Homo sapiens
  source 1..2292: mol_type = genomic DNA
ggcctgcggcgcgcgggaagcggcgcgcgctgcgcgggaggtgacggtgcctctgactgtccgggtccctccagcattttgcagctttctcctgtcttgaagaagtagaacggtgcccgagaaacgtttttccccttcgagactcaggaggatgaaagtcatcacttgtgaaatagcctggcacaacaaggagcccgtgtacagcctggacttccagcatgggacggctgggaggatccacagactggcgtctgccggcgtggacaccaatgtcaggatctggaaggtagaaaagggaccagatggaaaagccatcgtggaatttttgtccaatcttgctcgtcataccaaagccgtcaatgttgtgcgtttttctccaactggggaaattttagcatcgggaggagatgatgctgtcatcctattgtggaaggtgaatgataacaaggagccggagcagatcgcttttcaggatgaggacgaggcccagctgaacaaggagaactggacggttgtgaagactctgcggggccacttagaagatgtgtatgatatttgctgggcaactgatgggaatttaatggcttctgcctctgtggataacacagccatcatatgggatgtcagcaaaggacaaaagatatcaatttttaatgaacataaaagttatgtccaaggagtaacctgggaccctttgggtcaatatgttgctactctgagctgtgacagggtgctgcgagtatacagtatacagaagaagcgtgtggctttcaatgtttcgaagatgctgtctggaataggggctgaaggagaggcaagaagctaccggatgtttcacgacgacagcatgaagtctttcttccgtagactgagtttcactcccgacggatctttgcttctcacgccagctggatgtgtggaatctggtgaaaatgtaatgaataccacttatgttttctccaggaagaatcttaaaaggcccatcgctcatcttccatgtcctggaaaagccactcttgctgttcgctgctgtccggtctactttgaactgaggccagtggtggaaacaggtgtggagctgatgagtctgccctaccgcctggtgtttgctgtggcctcggaggattccgtgcttctgtatgacacccagcagtccttcccttttggttacgtgtctaatatacattaccacaccctcagtgacatttcatggtccagcgatggtgccttcctggccatttcttccacggacggttactgctcatttgtgacatttgagaaagatgaacttggaattcctttgaaagagaagccagttttgaacatgagaactcctgatacagcaaagaaaaccaagagtcagacacatcgagggtcttcgccaggacccagaccggtagagggaacccctgccagcagaacccaagaccccagcagccccggcacgactccccctcaggccagacaggccccagccccaacagtcatcagggaccctccctccatcactcctgctgtcaaaagccccttgccggggccttcggaggagaagaccctgcagcccagtagtcaaaacacaaaagcccacccatcccggagggtcactctgaacacactgcaagcctggagcaagacaacaccccggagaataaacttaacacccttaaagacggacactccaccaagttctgtaccaaccagtgtgatttccaccccttctacagaagaaattcagtcagagacgcctggagacgctcagggcagtcccccagagctaaagcggcccagactcgatgaaaacaaaggaggcacggaaagtctggacccttgatgggacctcggcttctgctcgaagcctaccaggctcccggtgtgtgcagggagacggtaaagctggaggtgcctgagaccagggcttccatggagcgggacacactgtaaatggatttctataacagaagtgacatgtgtactgatttttctccagaaatatggatgctgttgtattcagtatccatttttaacttgggacatgaacgttttaacgtagtaaatcctctttttgatgagtttctgaaactggagcggttcaacgttatccagtgtgaaaatcagtgagtcctccctggcatcctcgtgaaagtgcacacacttcatggagggactccttttcaataagaattaggaagatgagaaagtaatttgagattttactctgtcgaattttagagtatttgaagtgattgttagatttcacttctaaggagttgattgattaaactttggaaggta

SEQ ID NO: 841 - DNA, 1853 bp, Homo sapiens
  source 1..1853: mol_type = genomic DNA
ccccccgcccacccgggcccggacacgctgagcacactggaaggagtcatggcggatggtcaggtggcggaactgctgctccggcggctggaggcgtctgatggcggcctggacagcgccgagttggcggctgagctgggcatggagcaccaggcggtggtgggcgccgtgaagagccttcaggcgctgggcgaggtcatcgaggctgaacttcggtccaccaagcactgggagcttactgcggagggcgaggagattgcccgggagggcagccatgaggcccgtgtgtttcgaagcattcccccagagggcctggcccagagcgagcttatgcgactgcccagtggcaaagtgggcttcagcaaggccatgtccaacaagtggattcgggtggacaagagtgcggctgacgggccccgggtgttccgagtggtggacagcatggaggatgaggtgcagcggcggctccagctggtccgggggggacaggctgagaagctgggggagaaggagaggagcgagctgaggaagaggaagctgttggctgaagtgactctgaagacctactgggtgagcaaaggcagtgcctttagtaccagcatctccaagcaagagacagagctgagcccagagatgatctccagtggctcttggcgggaccggcccttcaagccctacaacttcttggcccacggtgtcctccccgacagcggccaccttcacccgctgctcaaggtccgctcccagttccgacagatcttcctggagatggggttcaccgagatgccgactgataacttcattgagagctccttctggaactttgacgccctcttccagccccagcagcacccagcccgtgaccagcacgacaccttcttccttcgagatccagcggaggccctgcagctcccaatggactatgtccagcgggtcaagcggacccactctcagggcggctacggctcacaggggtacaagtataactggaagctggacgaggcccggaaaaacctactgcgaacccacaccacatcagccagcgcccgtgcgctctaccgccttgcccagaagaagcccttcactccggtcaagtacttctccatcgaccgcgtattccggaatgagaccctggacgccacgcacctggctgagttccaccagatcgagggcgtggtggcggatcatggtctcaccttgggccacctcatgggcgttctgcgggagttcttcaccaagctgggtatcacgcaactccgcttcaagccagcctacaacccatacacagagcccagcatggaggtgttcagctaccaccaaggcctgaagaagtgggtggaggtcggaaactcgggggtcttccgtccagagatgctgctgcccatggggcttcccgagaacgtgtcggtcattgcctggggcctctccctggagcgcccaacgatgatcaaatatggcatcaacaatatccgggagctggtgggccacaaggtgaacctgcagatggtgtatgacagtcccctgtgccgcctggatgccgagccgaggccccctcccacacaggaggctgcgtgacatgggccactctaggacaggtcatcctccccgagtccctgctgctgcgctcctttgcatccctggccagtgaccttgtatttatgaggcctctgtgaggccagcccccaccttcctctttcccacctgtcccaggaccagaatcccagggacagaggactgggtagcaggttccttctgttgtcctgtgtggtgtgtctactgtgagggtgggccctgaggagacctgtgggccacctattgtctaataaagtgggcagttgcccccatctggtggc

SEQ ID NO: 842 - DNA, 2254 bp, Homo sapiens
  source 1..2254: mol_type = genomic DNA
gacaacaagatggcggcgctgcgggacggctagcggccctgcgtgggagttcctgacagctggattctagaagtagaactatgagctcacctttggcctcccttagcaagacccgaaaagtgcccctgccctcggagcctatgaatcctgggaggcgaggaatccgcatctatggagatgaagatgaggtggacatgttgagtgatgggtgtggctcagaagaaaagatctcagtcccttcctgctatggcggcataggtgcccctgtgagtcggcaaggggactcattggcgccccctgaggtggactttgacaggctgctggccagcctgcaggatcttagtgagctggtggtagagggtgacacccaagtgacaccagtgcccggcggggcacggctgcgtaccctcgagcccatcccgctgaagctctaccggaatggcatcatgatgttcgacgggcccttccagcccttctacgatccctccacacagcgctgcctccgagacatattggatggcttctttccctcagagctccagcgactgtaccccaatggggtcccctttaaggtgagtgacttgcgcaatcaggtctacctggaggatggactggaccccttcccaggcgagggccgtgtggtgggcaggcagctgatgcacaaggccttggacagggtggaggagcacccaggctccaggatgactgctgagaaatttctgaacaggctccccaagtttgtgatccggcaaggcgaggtgattgacatccggggccccatcagggacaccttgcagaactgctgcccattgcctgcccggatccaggagattgtggtggagacgcccaccttggccgctgagcgagagaggagccaggagtcacccaacacgccggcacccccgctctccatgctgcgcatcaagtctgagaatggggaacaggccttcctactgatgatgcagcctgacaacaccattggggacgtgcgagctctgctagcgcaggccagggtcatggatgcctctgcctttgagatcttcagcacattcccgcccaccctctaccaggacgatacactcacgctgcaggctgcaggccttgtgcccaaagcagcactgctgctgcgggcacgccgagccccgaagtccagcctgaaattcagtcctggtccctgtcccggtcccggtcccggccccagtcccggtcccggtcccggccccagtcccggtcccggtcccggccccagtccctgtcctggacccagtcccagcccccaataaagcacccgccccctcaacccgctgctccgccaggctcttgggtgggccatctcgccaggcacgtaggaaaggcctgggaccagctgggccagggagggggcggtgccgacccgccccttggtaactcgagccccggctggcgggcctggctgctgggtctttgtcttctaggttcctctttctcccaagaagggctaagtggatcctgtgaagggagggatgcagtggggggaaggagctggccccagctgggtttacattctcagctgggacagcagagcctcactgtgtatgtgtgcagccagcagatacctgtgcacaggcacagacccaccaactcgtggggacacttcaacaccgcacaaagccattttgccactagacccatgcccccaaattagcagaactgcagctgggtacccacctcccatgatacactcattcttagccattgtgctccaacacaggcgcatgggatggccacactcactgacaggcatggagatgtgcactacacaccaaggcacaagcatgatatggacacatgcatgtgaactggagggtggcccacccagacatctccagaaaccactggtccatacaggtatttgtgtgtcagacatatccaaacacatgcactaacaaacacagaggtgacagtcacaagagaacagctcagccacccttcccacagagcagtctcagcacagtcacaactaccaaccttgcccagggcagggacccaggaggcccaggccacaaccaaccagacacagtgccaatggaacaggacatcatttaattgcctctagggtcctcctgggagagggactgcggggcctttggcagagctctggctgatggaaccaacagaggtgcccatcagccagtgccaggcaggatggcggccccaatgcttggctgggggcagccagcatttggggctgttgcttaagacaatttctgagact

SEQ ID NO: 843 - DNA, 1536 bp, Homo sapiens
  source 1..1536: mol_type = genomic DNA
gacacaggaaactcccctgaaacctgtttctcagcttcccggcccagctggggcacccactggaaggagaggccaggcggaagaccctggctccgtcatggcctctgccctgaggccaccccgtgtccccaagcctaagggtgtcctgccttcacactactatgagagctttctagagaagaaggggccctgtgaccgggattacaagaagttctgggcaggcctgcagggtctcaccatttatttctacaatagcaatcgggacttccagcacgtggagaagctcaacttgggagcatttgagaaactcacagatgagattccctggggaagctcacgtgaccctggcacccacttcagcctgattctccgggatcaggagatcaagttcaaggtagagaccttggagtgtcgggaaatgtggaaaggcttcatcttaacggtggtggagctccgtgtcccgaccgacttgaccctgcttcctgggcacctatacatgatgtctgaagtcttggccaaagaggaggcgcgccgtgcactggagacaccctcgtgcttcctgaaggtgagccggctggaggcacaactgctcctggagcgctaccccgagtgcgggaacctgctgctgcggcccagcggggacggcgccgacggcgtgtcggtcaccacgcggcagatgcacaacgggacgcacgtggtccggcattacaaggtgaagcgggagggccccaagtacgtgatcgatgtggaacagccgttctcttgcacctccctggacgccgtggtcaactatttcgtgtcgcataccaaaaaggcgctggtgccattcctgttagacgaggactacgagaaggtgctaggctacgtggaagccgataaggagaatggcgagaatgtgtgggtggcgccctccgctccgggcccaggtcctgcaccctgcacaggtggccccaagccgctgtcacctgcgtctagccaggacaagctgcccccactgcccccactaccgaaccaggaagagaactacgtgacccccattggagatggcccagctgttgactatgagaaccaagatgtggcttcctctagttggccagtcatcctgaagccaaagaagttgccaaagcctcctgccaagcttccaaagccacccgttggacccaagccagtagagaaggggtttcaccatgttgcccaggctggtctcgaactcctgacctcaagtgatccacccacctcagcctcccaaagtgctgggattaccggcgtgagccaccacacctggcctcatctgtcttctcttccagagcccaaagtctttaatggtggcttgggcaggaagctgccagtcagttcagcccagcctctcttccccacagccgggctggcagacatgacggcagagctacagaagaagctggagaagaggcgggcactggagcactgattcggacacaccagggaccagcgggctagtcccagggcatggcccagcggccagattctttttcccaggattaaaactctgaccccagg

SEQ ID NO: 844 - DNA, 2919 bp, Homo sapiens
  source 1..2919: mol_type = genomic DNA
gagaggactgcgcctgcgcagagccgaggacgcgtccggcgccgagattcaaactagtggcgggaggctgtgagctgagcggtggggtctgcgtacgcctggagtccttccccgctgtgctcagcatggaccctatccggagcttctgcgggaagctgcggtctctggccagcacgctggactgcgagacggcccggctgcagcgagcgctggacggagaggaaagcgactttgaagattatccaatgagaattttatatgaccttcattcagaagttcagactctaaaggatgatgttaatattcttcttgataaagcaagattggaaaatcaagaaggcattgatttcataaaggcaacaaaagtactaatggaaaaaaattcaatggatattatgaaaataagagagtatttccagaagtatggatatagtccacgtgtcaagaaaaattcagtacacgagcaagaagccattaactctgacccagagttgtctaattgtgaaaattttcagaagactgatgtgaaagatgatctgtctgatcctcctgttgcaagcagttgtatttctgagaagtctccacgtagtccacaactttcagattttggacttgagcggtacatcgtatcccaagttctaccaaaccctccacaggcagtgaacaactataaggaagagcccgtaattgtaaccccacctaccaaacaatcactagtaaaagtactaaaaactccaaaatgtgcactaaaaatggatgattttgagtgtgtaactcctaaattagaacactttggtatctctgaatatactatgtgtttaaatgaagattacacaatgggacttaaaaatgcgaggaataataaaagtgaggaggccatagatacagaatccaggctcaatgataatgtttttgccactcccagccccatcatccagcagttggaaaaaagtgatgccgaatataccaactctcctttggtacctacattctgtactcctggtttgaaaattccatctacaaagaacagcatagctttggtatccacaaattacccattatcaaaaacaaatagttcatcaaatgatttggaagttgaagatcgtacttcgttggttttaaattcagacacatgctttgagaatttaacagatccctcttcacctacgatttcttcttatgagaatctgctcagaacacctacacctccggaagtaactaaaattccagaagatattctccagcttttatcaaaatacaactcaaacctagctactccaatagcaattaaagcagtgccacccagtaaaaggttccttaaacatggacagaacatccgagatgtcagcaacaaagaaaactgaaattccagtggatctatccaacacagaaactgaacaaaatgagatgaaagccgagctggaccgattttaacattcacattgccctgcctctgtccccctttaaacgttgacccattttaaagacaaacatgaacattaacatcataatatgctttttatgaagtttcaataaggtttaaccttagtcttgttgacatgtagcccagtcattcactctttaaggattattagtgtttcattgatactaaattacccagcttaatcaacagaatggtttaagtagtaccaggaagtaggacaagtaatttcaaaaatataaaggtgtttgctactcagatgaggccgcccctgaccttctggccagagagacattgctgccagccagctctgccttcccatcatctcctttcaggaccgtcccacaccttttacttgctcagtgctgtctgaagatgcagttgctgtttgcaaacaacaggaacaccagttaaactaattaggaaaagagggagatttccaggcctgggtaactatatactgtgaccattggaggtagagacaggtctcaacagttggaaccaggaactctgctgtcaggttgagagttttgtttctcttccagcttttcactgtgtgggggtcttttctcttatgtcagctctttctatcacatggcagctgacctctcacgctccactctgcagcttggacacccagtagaccctgaatttcactctctctaaaaggttctgagggctcatcctgggccaggggccctcctgtgcactgttagctatggccacgggagcctccagagctgcctggtagcttcaggttgacctgcttatcaggcctacgatccttctgatttaagtacagctggaaagtattatctaattaagttcatgatagtgcttttggagaacttgtcaaattacagccaatgagaaaataaggacctagcatactgtggagaaccattaaaaatttgagaagaaacaacaagtattatgtcaacttacttcaaaggcgtagttttgggaatttgatgcagtaaagattaccctgttttatgattgttccttgaaagtcaaatgggggacctgtccattgtgctctattaatcttgtcagaaaactgtcaccaaaacaaaacttgagtttgtccttgttctaggagttactgggtagttgtaagtattatttttattaaatataatgtaaaataaaatgttaagatacttagttttgtttttcaaagtaaagctgtagtcagccttatgtatgccattgactctgaaatgtataccagcctttcactgtgtaccgtgtgtatataaatccacagaaccggatgagctgcttagggagggaatatattcaaagtgtaccaaggaccaaatcctggagttctcccaactttagaggatggaaaggggcagagtaatctagcaaaggagactgaggccagtgaagtaggaagaaagtatttcaaggagagtgatgattctgtgaatattgctgagaattcaaataaaaagaggactgagaactga

SEQ ID NO: 845 - DNA, 3124 bp, Homo sapiens
  source 1..3124: mol_type = genomic DNA
ggaagcgagtaagagaaaggggaaggggaggtgggagaggcacctcaactttgatgtcccgagccttgagtggccactcgcaagctggccaagggcttcacacaatttgccaagatgacagaggggaccaagaagaccagcaaaaagttcaagttcttcaagttcaagggctttgggagtctctccaacctccctcggtccttcactctgagacgatcctcagcttccatcagtaggcagtcccatttggagcctgacacctttgaagccacgcaggatgacatggtgacggtgcccaagagtcccccagcctatgcccgctccagtgacatgtacagccacatgggcaccatgcctcgccccagcatcaagaaagcacagaactcacaggctgcccggcaggcccaggaggcgggtcccaagcccaacttggtacccggaggtgtacccgaccccccaggcttggaggcagccaaagaggtgatggtgaaggccactggccctctagaggacaccccagcaatggaacccaacccttcagcagtggaggtagaccccatcagaaagcctgaggtccccacaggagacgtagaagaggagagacctcccagggacgtgcactcagaaagggctgctggagagccagaggctggcagcgactatgtgaagttctccaaggagaagtacatcctggactcatcgccagagaaactccacaaggaattggaggaggagctcaaactcagcagcacggatctccgcagccatgcctggtaccatggccgcatcccccgagaggtctcggagaccttggtacaacgcaacggcgacttcctcatccgggactcactcaccagcctgggcgactatgtgctcacgtgccgctggcgcaaccaggccttgcacttcaagatcaacaaggtggtggtgaaggcaggcgagagctacacacacatccagtacctgtttgagcaggagagctttgaccacgtgcccgccctcgtgcgctatcatgtgggcagccgcaaggctgtgtcagagcagagtggtgccatcatctactgcccggtgaaccgcaccttcccactgcgctacctcgaggccagctatggcctgggacaggggagtagcaagcctgctagccccgtcagcccctcaggccccaagggcagccacatgaagcggcgcagcgtcaccatgaccgatgggctcactgctgacaaggtcacccgcagcgatggctgccccaccagtacgtcgctgccccgccctcgggactccatccgcagctgtgccctcagcatggaccagatcccagacctgcactcacccatgtcgcccatctccgagagccctagctcccctgcctacagcactgtaacccgtgtccatgccgcccctgcagccccttctgccacagcattgcctgcctcccctgtcgcccgccgttccagtgagccccagctgtgtcccggaagtgccccaaagacccatggggagtcagacaagggcccccacaccagcccctcccacacccttggcaaggcctccccgtcaccatcactcagcagctacagtgacccggactctggccactactgccagctccagcctcccgtgcgtggcagccgagagtgggcagcgactgagacctccagccagcaggccaggagctatggggagaggctaaaggaactgtcagaaaatggggcccctgaaggggactggggcaagaccttcacagtccccatcgtggaagtcacttcttccttcaacccggccaccttccagtcactactgatccccagggataaccggccactggaggtgggccttctgcgcaaggtcaaggagctgctggcagaagtggatgcccggacgctggcccggcatgtcaccaaggtggactgcctggttgctaggatactgggcgttaccaaggagatgcagaccctaatgggagtccgctggggcatggaactgctcaccctcccccatggccggcagctacgcctagacctgctggaaaggttccacaccatgtccatcatgctggccgtggacatcctgggctgcaccggctctgcggaggagcgggcagcgctgctgcacaagaccattcagctggcggccgagctgcgggggactatgggcaacatgttcagcttcgcggcggtcatgggtgccctggacatggcccagatttctcggctggagcagacatgggtgaccctgcggcagcgacacacagagggtgccatcctgtacgagaagaagctcaagccttttctcaagagcctcaacgagggcaaagaaggcccgccgctgagcaacaccacgtttcctcatgtgctgcccctcatcaccctgctggagtgtgactcggccccaccagagggccctgagccctggggcagcacggagcacggcgtggaggtggtgctggctcacctggaggccgcccgcacagtggcacaccacggaggcctgtaccacaccaatgctgaagtcaagctgcaggggttccaggcccggccggagctcctggaggtgttcagcacggagttccagatgcgccttctctggggcagtcagggtgccagcagcagccaggcccggcgctatgagaagttcgacaaggtcctcactgccctgtcccacaagctggaacctgctgtccgctccagcgagctgtgaccccagggacatttcccctctgcagctgcggacagcgtcaggggcagaggggcacacaactttccccagagcaccccaaggacactgtgatcaacccgagaatgttctgggttcaactcaagcatctcccttgcacctccagggtcctgcgtggactctgggttccatcccacctgctacatgctcaccaggtctccattgaggaagaacaggaacgccggttcccccaccagcttttgctgctccccttcctgctggggttccctgttttcgagccatgggaggcaggctgctcacgcctcctcactctctgtctgtccctcaccaacaccaaggcctccatctcactgtaaataagtctctgttctgtaaatagatgtacagaagccatgttatttctttcatataataaacttttatgactctt

SEQ ID NO: 846 - DNA, 850 bp, Homo sapiens
  source 1..850: mol_type = genomic DNA
gcgcctcggcccgggccttactctccaccgactgcgtcaggatgagctccaggttttctttgggccgatgcttcgtgtcctccaccagcttatagacgcgatgtcgccggtgcaggcgcggcttccggccctccccggccagcggtaccttccaccagcgctccacgatgaccgtgccctggcggccaggaaagcgacgcatcacttataaggaagaggaggacttgacactccagccccgtcctgcctccagtgctcctgagtccctagtaggcctccaggagggcaaaagcaccgagcagggtaaccacgaccagcttaaagaactgtattcggctgggaacttgacggtgctggctactgaccccctgctccaccaggacccagtacagttagactttcacttccgccttacctcccagacctctgcccattggcacggccttctctgtgaccgtcgactcttcttggatatcccatatcaggccttggatcaaggcaaccgggaaagtttgactgcaaccctggagtacgtggaagagaagacaaatgtggactctgtgtttgtgaacttccagaatgatcggaacgacagaggtgccctgctgcgggccttcagctacatgggctttgaggtggtcagaccagatcaccctgccctccctcccttggacaatgtcatctttatggtgtatccccttgaaagggatgttggccacctgcccagtgagcctccttgaacatgcttattccaacgctttgaggggctggaagccttgacacatggaatcaggggcccgggatgtgattcaggacactttccatcctaggaataaagggtagtgcaatc

SEQ ID NO: 847 - DNA, 3763 bp, Homo sapiens
  source 1..3763: mol_type = genomic DNA
acggtggtggcgtggagacgtgggggcgcttccggcagcggcggcggtggtgaaggccgatgctgtgggggtgggcgtggagagaattcttctgtgggtcctctggtgttgagtggtcggcttggtgtggtgtgcggaggagctccaggcccgtcggcgcggagtggtctcacgtgtgaaacatggctacagattggctgggaagtattgtgtccatcaattgtggagatagcttgggtgtctatcagggaagagtgtcagctgtggatcaggtcagccagaccatttctctcacccggcctttccataatggagtgaagtgtcttgttccagaagtcaccttcagggcaggtgacattacggagttaaaaattctggagataccaggacctggagacaaccaacattttggagaccttcatcaaacagaattaggcccctctggtgctggctgccaagtgggcatcaatcagaatggcacaggcaagtttgtcaagaagccagcctcttccagcagtgcccctcagaatatccctaagaggacagatgtgaagagccaggatgttgccgtttccccgcagcagcaacagtgctcaaagagctatgtcgacaggcacatggaatccttgagtcagtccaaaagtttccgtcgtcggcacaactcctggtcatctagtagcaggcacccaaatcaggcaactcccaagaaaagtggtttaaagaatggccagatgaagaataaagatgacgagtgcttcggggatgatattgaggagatcccagacacagattttgattttgaagggaacctggctctttttgacaaggcagctgtgtttgaggagattgatacctatgaaaggagaagtggtacccgttcccggggcatcccaaatgaaaggcccactcggtaccgccatgatgagaacatcttggagtccgagcccattgtctatcgacggatcatagtgccccacaacgtgagcaaggagttctgcacggactctggcctggttgtcccaagtatttcctatgagctgcataaaaagctgttgtccgtggctgagaagcatgggctgacccttgagcggagactggagatgacaggtgtgtgtgccagtcagatggcactgaccctcctcggaggacctaacaggttgaatcccaaaaatgttcaccagaggcctacagtggctctactgtgtggacctcatgtgaagggggctcagggtatcagctgtggaaggcacctagccaaccatgatgtccaggtcatccttttcctgcccaattttgtcaagatgttggaatctatcaccaatgagctgtcgctcttcagcaagacccaaggccaacaagtgtctagcctcaaagatctgcccactagccctgtggacctggtcatcaactgcctggattgccctgagaacgtcttcctgcgcgatcaaccctggtacaaggcagctgtggcctgggccaaccagaaccgggcaccagtactcagcatagaccctcctgtgcatgaagtcgaacagggcattgatgccaaatggtcactggcactgggcctgcctctgccactgggggagcacgcaggccgtatctatttgtgcgacattggcattccccagcaggtcttccaggaggtgggcatcaactaccactcgccctttggctgcaagtttgttatcccactgcactctgcttagagggttcctgcgcaggcaggactctgctgtcccctgctgctcctgataacaaacgccttaaggatatgaagcttcatggaccttgttaaagttttttctcttttgggtttgtttcttctgtgagagaacagaacttacttaaaactgacctgtcacttgctcttagccagggaagtctttcccactgggttccgggctgggtggcaggctgagcgtgcagcaactccaggcatctctaccctcagccccctgcacggccaggtgggcctttgtttacagccgtaggcagctctcaagactgtgtttcaggtttacagccactgggcctgggcacacacattgaagagtgggccaggtcctgtctgggggcctgtacctgctctatttcagagcttgtggctttgtgtctcccctgctttccccacgcagacagcccttcctctgtagaaccagctgcacggcagctgtccaccagagggcagacctgcactctccattcatgtccagggctgtgacagaccaggccttcccctagccccacaagttgatttggggggttttgacccttactcctgagctgatccaagttttatgctgatttttccaaggatctctccctccttttccctccatcactcagaggtagggaagggggcggcattaggatggtgttactgtattgggattttatgttgttctgtcgtcttcagcacaggtagtataaggttatattactgtagaaccacagtgcccatcttgccagcagtgcccgcccccaccctcaaagctgagcaggttgagcctttgcctagtctggggccagacccctcagatggggatatccctgggggagcctggtgctgaaccagaagaggcttcctggtgcttctgtcctaggccaccactcctccagccctttgcccgcacatacatgccccacctactctttcatcccctctgcccttcccctgaaacggtcctttgcagctgtcatcccagagcaggcagatgggctcccgtgcttgagctccaccccagctcttacatcatctgggctttgaaccttttacatttgtccagtctagatgagtaggcttggggccagcaccctgtctcaaagatggcaaaatgaggctagttctggatgagctagctggtgtgggttccaaccataggaacacactgatgctcaaatcctaaggtgccaagctctaggccctggaggctggtagaacaggatctatgcctggaatcctggcagggattcctgtcaaggacttgtgtttaagcctgcttcagggcttcaggctgcttctgctctgtgtctgcccaggctggctgagcgggtggatgggtggacagaagggctcaccaaggattgtggacatagggtaggccctggtaccacgggtttcaggctgttatcacttcccttgtaggaacatagccagaagcagatgagccagggtagagggctggcccctcctctcatcttcccttcagtcttaaattgtctccagcgatgggaagaggccagggactgtaacccttgtgctgtgtattctctgagcctctgctcactctcagggccaagcagctcccaagccggggccctctcttggccaaaatctgaggagcagtctaggttacaggctttttggtaggtaggttctggctgcctgttaatgcagttaggccccctgattaggtacagtgagaaacaagctagaacaaccctggcccagaagactgtccactccagcaagatccagggatgatagccttgcagggccactgggagtttgtgcccaagcttctccctcttctctccccagggggcactgggactggtccctgccctcatccttagcctgggccttccccagaggtattaaagagaagtatgattcctctgtcttcagttcttttcaggggcatcctgcccatagtacccagttcccaaggggcccccagtcacgtggtgaagcctagcactcatgcagctcttagggaaccaaaaaccagcactgaaataaagctgaatgactgactga

SEQ ID NO: 848 - DNA, 1364 bp, Homo sapiens
  source 1..1364: mol_type = genomic DNA
ggccaacagggggcgccgtcgtgggggcggcactgggagcgccttccggagagacgcagtcggctgccaccccgggatgggtcgctggtgccagaccgtcgcgcgcgggcagcgcccccggacgtctgccccctcccgcgccggtgccctgctgctgctgcttctgttgctgaggtctgcaggttgctggggcgcaggggaagccccgggggcgctgtccactgctgatcccgccgaccagagcgtccagtgtgtccccaaggccacctgtccttccagccggcctcgccttctctggcagaccccgaccacccagacactgccctcgaccaccatggagacccaattcccagtttctgaaggcaaagtcgacccataccgctcctgtggcttttcctacgagcaggaccccaccctcagggacccagaagccgtggctcggcggtggccctggatggtcagcgtgcgggccaatggcacacacatctgtgccggcaccatcattgcctcccagtgggtgctgactgtggcccactgcctgatctggcgtgatgttatctactcagtgagggtggggagtccgtggattgaccagatgacgcagaccgcctccgatgtcccggtgctccaggtcatcatgcatagcaggtaccgggcccagcggttctggtcctgggtgggccaggccaacgacatcggcctcctcaagctcaagcaggaactcaagtacagcaattacgtgcggcccatctgcctgcctggcacggactatgtgttgaaggaccattcccgctgcactgtgacgggctggggactttccaaggctgacggcatgtggcctcagttccggaccattcaggagaaggaagtcatcatcctgaacaacaaagagtgtgacaatttctaccacaacttcaccaaaatccccactctggttcagatcatcaagtcccagatgatgtgtgcggaggacacccacagggagaagttctgctatgagctaactggagagcccttggtctgctccatggagggcacgtggtacctggtgggattggtgagctggggtgcaggctgccagaagagcgaggccccacccatctacctacaggtctcctcctaccaacactggatctgggactgcctcaacgggcaggccctggccctgccagccccatccaggaccctgctcctggcactcccactgcccctcagcctccttgctgccctctgactctgtgtgccctccctcacttgtgggccccccttgcctccgtgcccaggttgctgtgggtgcagctgtcacagccctgagagtcagggtggagatgaggtgctcaattaaacattactgttttccatgc

SEQ ID NO: 849 - DNA, 2881 bp, Homo sapiens
  source 1..2881: mol_type = genomic DNA
cgttgtcgggttcgactggaggggcgggggagtcacctgcgagcggctgcgctggcggccagcccgcccaccgcgtctggatcgcgccggctgcgcggggctgcggacagcacacaccctggaaggccccggcggggaacgggcagagtccgcgccctgcgtccgcgaccaggaggatcggaccttcgccttcgctgtcgccgccgccgccgcccgcggccgtcggggctattagtgaaagatggtggatcgcttggcaaacagtgaagcaaatactagacgtataagtatagtggaaaactgttttggagcagctggtcaacctttaactatacctggacgagttcttattggagaaggagtattgactaagttgtgcaggaaaaagcccaaagcaaggcagtttttcttgtttaatgatattcttgtatatggcaatattgtcatccagaagaaaaaatataacaaacaacatattattcccctggaaaatgtcactattgattccatcaaagatgagggagacttaaggaatggatggctaatcaagacaccaactaaatcttttgcagtttatgctgccactgctacggagaaatcagaatggatgaatcatataaataaatgtgttactgatttactctccaaaagtgggaagacacccagtaatgaacatgctgctgtctgggttcctgactctgaggcaactgtatgtatgcgttgtcagaaagcaaaattcacacctgttaatcgtcgccaccattgccgcaaatgtggttttgttgtctgtgggccctgctctgaaaagagatttcttcttcccagccagtcctctaagcctgtgcggatttgtgacttctgctatgacctgctttctgctggggacatggccacatgccagcctgctagatcagactcttacagccagtcattgaagtctcctttaaatgatatgtctgatgatgatgacgatgatgatagcagtgactaaggacacatttgggagtatttaatcaggtgtggctatctgagaaatcaactttgggggaaatgtaagattctgagctctctctctgttttgttctagccatgaatttgcctgagaaacttgtaacctatgtgcctcaatatattccatagaaagtaggtccccctgccttctcccactcctcacactcttctacagggataggcttttgcaaatatatcagataaattttttgtttcttgtttatttttaggttattttcttggaaggttgggaaaagatgtttgttttaacaggtcatgtactacgttgttgttttcatttctgttataagtaaaactaaaagcacagaatggtgggaaaggggctataatgtggttcattaataatgttagcagcttttttctaaccatcctgtctaatggttaagacaccagtaacaaaaacacatgatttggaaatactttggctttttcatatacctagtggtgccttatcataatagcactgttacatgaaataagcccctaccttcttactttctggtttgttgaaaaaatacactggtgctctttgaagtgataaaatgagtgtttatgaatgggtgtaattaggaaatacttctcatctgacagctacaaataactaagtttggaggtattttcactctatatgaataaatatttttccataaaatagttgtgattatatttttgttttatataggtcccaaattataattgtcaaatatatattttaaattaataaaagttgtcattcttaggaatttggtttgaaatttatcagttatacagaattgtcatactgcattagcttctacctttagtaagacatattttttaggtataaattcttatgctttaacattatttctggattgaaaatcttataaaacccttgaaaataaacagtctcttttttacaaagcctgtgttagagcacagatttacctaggcttgaagatttggaagaaataatatgtaagaatggcctcaaggcagaccactttaagtttggctagacttcatatcgtggaagtattgtctatttcagtgtgaaactatcttgaatttgcaaatatagtgttatattttataaagttttgtaaaatcccaaacaatatttctatttttgtaaaacaattgtatgtataatctgtatttgaaatcattttgcaatctatggaaatagagtagcaattgctatttctaaattgtgaactttaagtcaatctagatttattttgagaagtaattgttcactctttacttttgaggcagccattaggttgaaagtatatatttatcatataaaacttgatgcgttttgcactactctttccatttatatgctgcaaacaactacagtctttgaaatatggaaaatcagcagtctaaagtttgttttaaattctaaatttaaaaaatcttcaaatctgaatataccgcaaatgtcatgagaagtttgattcagtaacttgtgatggaggattctttggtatcttactgtttggttaaggcactaattttacttacctattagattttgaaagtatctgagatatacaaatctccctgtaggaaatgtgaaagaaaagcacaacaaaactagggttttttgttcatttgcttgcttttatgattttttttggtttgttttaatatcaggtggatttttgtttctaagcaatatatacataaaatcaaccaacatatctgaaaaggatcatgaaacctgagaaatgctaatggagatttgctggtacataggaatctagcaaattcaggaaccaaggggaaatgttgtgagataacatttacattgtcaacctttattgactttgtttttacaataaaaaatattttacaactt

SEQ ID NO: 850 - DNA, 4458 bp, Homo sapiens
  source 1..4458: mol_type = genomic DNA
caggcggcggcggcgcagttgcgagtgcaggctccttgccagaggcctccactcactccagacccctatagcccgtcgctgtcagctgtcaacaaaggatgcgaatgctggccgcttcctgtgggcttcgtgtcacccagaggtgagcccaggccaggatgggggactccagggacctttgccctcaccttgactccataggagaggtgaccaaagaggacttgctgctcaaatctaagggaacctgtcagtcgtgtggggtcaccggaccaaacctatgggcctgtctgcaggttgcctgcccctatgttggctgcggagaatcctttgctgaccacagcaccattcatgcacaggcaaaaaagcacaacttgaccgtgaacctgaccacgttccgactgtggtgttacgcctgtgagaaggaggtattcctggagcagcggctggcagcccctctgctgggctcctcttccaagttctctgaacaggactccccgccaccctcccaccctctgaaagctgttcctattgctgtggctgatgaaggagagtctgagtcagaggacgatgacctgaaacctcgaggcctcacgggcatgaagaacctcgggaactcctgctacatgaacgctgccctgcaggccctgtccaattgcccgccgctgactcagttcttcttggagtgtggcggcctggtgcgcacagataagaagccagccctgtgcaagagctaccagaagctggtctctgaggtctggcataagaaacggccaagctacgtggtccccaccagtctgtctcatgggatcaagttggtcaacccaatgttccgaggctatgcccagcaggacacccaagagttccttcgctgcctgatggaccagctgcacgaggagctcaaggagccggtggtggccacggtggcgctgacggaggctcgggactcagattcgagtgacacggatgagaaacgggagggtgaccggagcccatcagaagatgagttcttgtcctgtgactcgagcagtgaccggggtgagggtgacgggcaggggcgtggcgggggcagctcgcaggccgagacggagctgctgatcccagatgaggcgggccgagccatctctgagaaggagcggatgaaggaccgcaagttctcctggggccagcagcgtacaaactcggagcaagtggacgaggacgctgatgtggacactgccatggctgcccttgacgaccagcccgcggaggcccagcccccgtcaccacggtcctccagcccctgccggacgccagagccggacaatgatgctcacctacgcagctcctctcgcccctgcagccccgtccaccaccacgagggccatgccaagctgtctagcagcccccctcgtgcaagccccgtgaggatggcaccgtcgtacgtgctcaagaaagcccaggtattgagtgctggcagccggaggcggaaggagcagcgctaccgcagcgtcatctcagacatctttgacggctccattctcagccttgtgcagtgtctcacctgtgaccgggtatccaccacagtggaaacgttccaggacttatcactgcccattcctggaaaggaggacctggccaagctccattcagccatctaccagaatgtgccggccaagccaggcgcctgtggggacagctatgccgcccagggctggctggccttcattgtggagtacatccgacggtttgtggtatcctgtacccccagctggttttgggggcctgtcgtcaccctggaagactgccttgctgccttctttgccgctgatgagttaaagggtgacaacatgtacagctgtgagcggtgtaagaagctgcggaacggagtgaagtactgcaaagtcctgcggttgcccgagatcctgtgcattcacctaaagcgctttcggcacgaggtgatgtactcattcaagatcaacagccacgtctccttccccctcgaggggctcgacctgcgccccttccttgccaaggagtgcacatcccagatcaccacctacgacctcctctcggtcatctgccaccacggcacggcaggcagtgggcactacatcgcctactgccagaacgtgatcaatgggcagtggtacgagtttgatgaccagtacgtcacagaagtccacgagacggtggtgcagaacgccgagggctacgtactcttctacaggaagagcagcgaggaggccatgcgggagcgacagcaggtggtgtccctggccgccatgcgggagcccagcctgctgcggttctacgtgtcccgcgagtggctcaacaagttcaacaccttcgcggagccaggccccatcaccaaccagaccttcctctgctcccacggaggcatcccgccccacaaataccactacatcgacgacctggtggtcatcctgccccagaacgtctgggagcacctgtacaacagattcgggggtggccccgccgtgaaccacctgtacgtgtgctccatctgccaggtggagatcgaggcactggccaagcgcaggaggatcgagatcgacaccttcatcaagttgaacaaggccttccaggccgaggagtcgccgggcgtcatctactgcatcagcatgcagtggttccgggagtgggaggcgttcgtcaaggggaaggacaacgagccccccgggcccattgacaacagcaggattgcacaggtcaaaggaagcggccatgtccagctgaagcagggagctgactacgggcagatttcggaggagacctggacctacctgaacagcctgtatggaggtggccccgagattgccatccgccagagtgtggcgcagccgctgggcccagagaacctgcacggggagcagaagatcgaagccgagacgcgggccgtgtgatctgctgggctagtctgtaagtcgccccggctggtccctccatggcactctgggtcctctcctcactctccagagaccctcacatgtccttttgaacatccaaagagcaggtccctgaaagcaccttcctggaggatgtgggagggccctggacatggcccggccccactgctgagtgcccgtgtccccacagccccatgtgccccaccccgcggaaggcgtgtttgtgcccagaagagaggccgggctgctgcagaaccccgccgtgtaaagaggcagaaaagttggtttggtttgcagtaacgctgcaactagaaaatatatgcacttcaggcttgttgaaacgaccaagactctgtgacgttaatttgggtctttgtcctggcagtgcctctgccagtcactgtcatcgttgtgtcccccacaactgtcctcttgctagctcggcccagctttgtccctggagcccgatgctacccctgtcagacagaggctgcggcctgggccagagtcagggagtagctgctgcttcacggcgtctccactgtgcgattggcccggagccccgaagactcggagggagctgctcagggccggtgagcgcagccagaagccctggccagtgaggagctcacaggtcctccctggtggtcccgccgcacctctgcatctcctgggcgtcaccaggaaggctctgaagtcccgggctgctctcagcacttctcctgcagactgaagactctggactcattgctgattggaacaccaggaggaggttggatttctgccagtgggggatgtttctggaggcagctggtcccccacaccgcgtcctgctgagcctgccccctggattggctgtaatttgcctcgaagttcagcagttcatcttcatgggaaatttgctgagcccccaccagggaaccggatgatgaaacagggatacctcacagcttggccatttgaggcaaaggcagcttcccgagctgatgctaaagaagacagactttcccttcctcccagcagcagcagtgcagagcccacctggagggatgtgggggctgtgcagggtgcagcgctcaggtggatcctgggaagcagcctctggatgctgagtggagggagccactgagcacagcaaggcaccaaagcccctggagaaaccgccagggcgaggtgcgaccatcatcaggatcaaagcagacggggcgtgggtggggaaggggctctgggaccagaccccccacactactgcgtctttgtttctatcagtctttgtagaagcaggtggtggtggaaattccagcaggtgggtcccgcagaggccctgaggcctcacttttcggatcttctgtcccagatcctgctccctccctgctgagcctggggttcccctggcattggccccagccttctgaaagccggcgctgcagccagaggccgcacgctgcactgtcgcgacgcagagaggcttctgtgcaggctgggatcgggccccatgtctgtgctgtctagtttgtgttcaaaatgtcagaataaacacagaataaatgtt

SEQ ID NO: 851 - DNA, 1755 bp, Homo sapiens
  source 1..1755: mol_type = genomic DNA
gcggccgccgccccaccgtaggtccgtagcaggtggtcgaagtcgggcctccccgcgggcgtcacccagcgccgccggctgccccagccctgcgtgaaggcgctggaaaacacgcagggcaggttgggcagcaagaagccccgcacaaagtcggcgtaggagaaggcgcccggctccgagacgaaggctacccggcccggagcctggccgacgccggggacatcgacccccaggcctcggaagtggctgtcggcgagggcgcgcgtctcgcggtccatccagctcagcacgggtcgaaggaccctcctcctcacttccgccggagcggaaacggtgaggaccagcctcggaaccagaagacgcagggcgccgcgtttctgccccgccagcgcctggggctccgggcctgcacgcatgcgcgcggctcgccgcggtcttcactgcgcaggcgccgagcggccgaggcgccgcggtcggctctgggactcgtctggcgtccctcagaggcagaagaggcctggaccttggcgcacacagacccaggaacagatgagcagggatgtctgcatccacacctggccgtgcacctactacctggagcccaagaggcgatgggttactggacagctgtccttaacatcgctgtcgctcaggttcatgactgacagcactggagagattctggtcagcttccccctctccagcatagttgagatcaagaaggaggcttcacattttatcttcagctccatcaccatcctggagaagggccatgccaagcactggttcagctccctgcggccaagtcgaaatgtggtcttcagcatcatcgagcatttctggagggagctgctgctgtctcagcctggagccgtggcagacgcatctgtcccaaggacccggggcgaggagctgacgggactcatggctggatcccagaaacgcctggaggacacggcgagggtcctgcaccaccagggccagcagctggacagcgtcatgagaggcctggacaagatggagtcagacctggaggtggcggacagattgctgacagaactggaatctcctgcttggtggccctttagctccaagctttggaagacaccaccggaaacaaagcccagggaagatgtctccatgaccagttgtgaaccctttgggaaagaagggatactgataaaaattcctgctgttatttcccacagaacagagtctcacgttaaaccagggaggctcaccgtccttgtgtctgggttggaaatacatgactccagttctttgctcatgcacaggtttgaaagagaagacgtggacgacatcaaggtccactcaccttacgaaattagcatccgccagcggtttattggaaagccagacatggcctatcgtttgatatctgccaagatgccagaggttatccccattttagaagtgcagttcagcaagaagatggagctgttagaagatgcattggtgctcagaagcgcaagaacctcttcccccgcagagaagagctgctcagtctggcatgcagcatctgggctgatgggccgtaccctgcaccgtgagccacccgcaggagaccaggagggcacagcactgcacctgcagacaagcctgccagccctttctgaggcagatacccaggaactaacccagggcttccggcctatgtcgctgtcaacccagacagtgttggtgatgctttgctccgagtctgcaggagctttgtggagacagagactttcctag

SEQ ID NO: 852 - DNA, 2103 bp, Homo sapiens
  source 1..2103: mol_type = genomic DNA
ctgttcttgtgaggctgagggtctggggtcgcctgcgaggccgctggccaggcctgagcctctgccaccatggccattgtgcagactctgccagtgccactggagcctgctcctgaagctgccactgccccacaagctccagtcatgggtagtgtgagcagccttatctcaggccggccctgtcccggggggccagctcctccccgccaccacggccctcctgggcccaccttcttccgccagcaggatggcctgctacggggtggctatgaggcacaggagccgctgtgcccagctgtgccccctaggaaggctgtccctgtcaccagcttcacctacatcaatgaggacttccggacagagtcaccccccagcccaagcagtgatgttgaggatgcccgagagcagcgggcacacaatgcccacctccgcggcccaccaccaaagctcatccctgtctctggaaagctggagaagaacatggagaagatcctgatccgcccaacagccttcaagccagtgctgcccaaacctcgaggggctccgtccctgcctagcttcatgggtcctcgggccaccgggctgtctgggagccagggcagcctgacgcagctgtttgggggccctgcctcctcctcctcctcttcctcctcctcttcagctgctgacaaacccctggcatttagtggctgggccagtggctgcccatcagggacgctatccgactctggccgaaactcactgtccagcctgcccacctacagcaccggaggtgccgagccaaccaccagctccccaggcgggcacctgccttcccatggctctgggcgaggggcactgcctgggccagcccgaggggtccctactgggccctcccactcagacagtggccggtcctcctccagcaagagcacaggctccctagggggccgtgtggctggggggcttttgggcagtggtactcgggcctcccctgacagcagctcctgtggggagcgctcaccaccacccccgcctccacctccttcggatgaggccctgctgcactgtgtcctggaaggaaagctccgagaccgggaggcagagcttcagcagctgcgggacagtctggacgagaatgaggctaccatgtgccaggcatacgaggagcggcagcggcactggcagcgagagcgtgaggccctgcgagaggactgtgcggcccaggcacagcgggcacagcgggcccaacagctgctgcagctgcaggtgttccagctgcagcaggagaagcggcaattgcaggacgacttcgcacagctgctgcaggagcgcgaacagctggagcggcgctgcgccaccttggagcgggagcagcgggagctcgggccgaggcttgaggagaccaagtgggaggtgtgccagaaatcaggcgagatctccctgctgaagcagcagctgaaagagtctcaggcagagctggtgcagaagggcagcgagctggtggctctgcgggtggcgctgcgggaggcccgtgctacgctgcgggtcagtgagggccgtgcgcggggtctacaggaggccgcccgagctcgggagctggagctggaagcctgttcccaggagctgcagcgacaccgccaggaagctgagcagctgcgggagaaagctgggcagttggatgctgaggcggccggactccgggagccccctgtgccacctgccaccgctgacccattcctcctggcagagagtgatgaggccagtgccactgccaaccctgttcacaggcgcttccagcccactccagccaggggagcagggaagaagaaggggctccctcctcttcacattccccccgaccccaaagccagagaaagccagatggcaccagctgctccggatgtgcctgcccacattgggggacagggccgggcctgggctcggttcccaggtttgagctctgcagcctctctcctggagtgagggggctgaagtcagaccaaaggaagaactcagaaatgtcttgtttatttgtgtttgtgaccaagcagcctctcccttcacccaggtttatggcctcgttttcacttgtatatttttcacactgtaaatttcttgtac

SEQ ID NO: 853 - DNA, 5763 bp, Homo sapiens
  source 1..5763: mol_type = genomic DNA
aaaagggcggtggggcggggggcggggcagggagagggagagaaatccagcagacatctagctctgcctttctttcccagccacagccagggtagggctgataaggcgctgatgcgttgatggcagccttgcagagctagacctgcacttaacttgcagctgcctcccgagcctccaagatgtccacgccctgggtgacaggcggcagggcgctgccccgtgctcccccggctctgctcgacagcagcacgcagtgagagcctcgccgccgccgaggagcaactcatgtaacggcacagccaacaagatgaacggagctttggatcactcagaccaaccagacccagatgccattaagatgtttgtcggacagatcccccggtcatggtcggaaaaggagctgaaagaactttttgagccttacggagccgtctaccagatcaacgtcctccgggaccggagtcagaaccctccgcagagtaaaggttgttgtttcgtaacattttatacaagaaaagctgcacttgaggcccagaatgcactgcacaatattaaaactttacctgggatgcatcatcccattcagatgaaacctgcagatagtgaaaagtccaacgctgtggaagacagaaaattgttcataggaatggtatcgaagaaatgtaatgagaacgacatcagggtgatgttctctccatttggccagatagaagaatgccggatcctccggggacctgatgggctgagtcgaggctgtgcgtttgtcacattttctacaagggcaatggcacagaatgcaatcaaagccatgcatcagtctcagaccatggagggctgctcttcacctatcgtggtgaagtttgctgacactcagaaggacaaagagcaaaggcgcctccagcagcagctcgctcagcagatgcagcagctcaacactgccacctgggggaacctgacagggctgggcggactgaccccacagtatctggcgctcctgcagcaggccacctcctccagcaacctgggtgcgttcagcggcattcaacaaatggcaggcatgaatgctttacagttgcagaacctggcgacgctggctgctgctgcagctgcggcccagacctcagccaccagcaccaatgcaaaccctctctctaccacgagcagcgccctgggagccctcacgagtcccgtggctgcttcaacccccaactccactgctggtgcagccatgaactccttgacctctctcgggactctgcaaggactggctggagccactgttggactgaataatattaatgcactagcagttgctcaaatgctctcaggtatggcggctctgaatggaggacttggcgccacaggcttgacgaatggcacggctggcaccatggacgccctcacccaggcctactcaggaattcaacagtacgcagccgccgcgctgcccactctgtacagccagagcctgctgcagcagcagagcgctgcaggcagccagaaggaaggtccagagggggcaaacctctttatttaccaccttccacaggaatttggagaccaggacattctgcagatgttcatgccttttggaaatgttatctctgctaaagtcttcattgacaaacagaccaatctgagcaagtgctttggttttgttagctacgacaatccagtctctgcacaagctgctatccaagctatgaatggctttcagatcggcatgaaacgcttgaaggtgcagctgaagcgttccaaaaacgacagcaaaccttactgatcctaaccccagaggctccctgctctcattttagctttcttaggacatcttcatgcccgttagttcatcgtttgcctagcatgtccctgtggcgtctcaaaaaaaagtttcatcgtcccgtcattgtttctgatgtctttctgacctcacatcatatttggttctcctactgacctttgatctagtttgacctttgaaatttgcatgtgacctcatctagctatgaattctgggaagtcaatgtgaaaaacattgctgcattcatgcaagactgaaatttattattagacaaattcattatagaaaaaacctgtggcaaaaacgtttctttcttattttttttcttttcctaaaacagacttgaaagtattatacagggattggcattcttcccggtcactggtaacaatagcaatatgtgtccagggacacagaatgttggtttctaacagactacttccaaaaacagtttgagaaaaaaactgtctgattttaagtctctagaggtctgtaatagtttttacatttttcaggcagtgtaaagttttttgataaggccattttaggtggctcactttctcattaagatatatatatagaaccactttttgtagattagtataagaaaaatatttaccctgttttggggcaaatgctacctatttgtgtcaccttttgctgaactcacagttagacaatccatggtttaatgcacatgaaattacctatattttatactgtttcaatgtacaggagaaaggttactgtaaactgtgttatgttggtgcttctgtgaattaagttgtggtttcatcatgagtcttaatgttctttgttgataagacaagtttagaattggtttacttaatacaaaaaaaaaaaaaagaatttcaaaaaaaaaagttgtttgcttaaaaaaaatttcatgtgagggaaaaaaaaaaaacctattccagaataagttttgtgttggcttgtgaagcattgatgtcattttttttaattgtggactatttagatgtgtttgtgttcagcaaaatgtgatgtttttttcttttaaagaaaaaaagtgaaaatatatagtgccaaattccaaaggtacttccttcctagagcttcagtgtgtttcttgtgagaagtaatttgataacatgggtattttattatgtgttttgtataaatccctaatatttaaaaaaaaaaacaaaacaaaaaaaggttacaaagtttgttaacttgctatcctgtggtcttgttgcctgaaattgttattgtttgttatttctctctgatgttttttgtaagacattgtataagtgcccatgtcccacttttttaaccactccgcacatcagtgctgtgaaggcaacctcaccatgtattttcttcataatctatggaaacctctaaggtgagaaagttttgaacttttaaccctttctacccagagctatctggaatgttgatgactttttatactgtcatgatttgagtttgttttggggtgtttccaatttggatttttttccctgcatctatcctctaagttgtttcggtttgactactttgttctttggttaagatccaaaagaaaacagaaaacaattccacgaggccaatctaaagggaaaaaatcctacactacttttactacttttgattatttctcatttttgggaaaagaattcctaatgtgctactagaattccttcttcagttttaacgagtaattggataaaccctgagggaaaacggaggtagattcagcacctaacaatcctgtatgcttttgagatcacgtttagtgctatgtcctagtctagaatattttcatataccttgcagtaaaacgactttgtggcaggacagtctcttgaggggttttgtttctgtttcctaaatactcctaaataatatttctaatcagccattatgctggggcatctctgatcccagtaggtacctctgaatataccaggtgtctggagttagaagcccatagccctttcccagcctttttggtttttttaattgaacacatttcatctaagtaaagctcagttctttatcacaatttactgaccaaatacctagcaccagttcctgctgccactttttaaagtgccatatgactttctacgaacaggtaccttgctgtcttgacaaatcctaatgtcacgcctacagccccaacacaagctccagtcttcctcttcggcatgccctggaagcttcttccagtcttcctcttcggcatgccctggaagcttcttggcctcagctccccttccccgctcagcaccctgttaggatcagtgtgtgtggatgggatagccctgggatggaaaggactagcctctactgatgcaaaaaaacaaaaagcaacacaaacgtttccttcttatagcacatgcacttccttacaatgacatgatttgtattatcctcacatgtgtttactactgctggggccttccttcatcctctgagggctattttgtactttctgcagcaatcagcttaataacaacacttattgcacctgtctctctctgagaacacggtgtgtctcgacacgtaccacgtacgtggaaacacaagagcccaccacttgaatttctaagaccatttcattctgaaacttcttatcaattacctaaatctcaacgaaaaacaatttactgaagccgactcccctccccatctccctctcaacctcaacccacctgcatgcatctcccccagaggaaacactgagggtaggggacaggaggctcaggacgcgccctctgaatcgagtgtttcttcttcacaagtcaccaagagaggacatgagggggaaagtcctttttgcccttctccaaaaaataaccttccacagagacaaactgtccttctatccacttttatcttttaataaatatcaaaaggaaaaagctgcaagggtgcaaagggcctgtgccagaagaaaacacacacagggaaaccgctttttttaatcaattgtagagaatagtcatttttaatctaaattagagaattgtgatacaatggcagtcctcaaaggcgtaacgagttcatctttctttcaccataggggttatagttggcttgtgctactctggaatcattttactgtttgtttttattatcttaagtgctaattaaaaaaaaaataaaattttaaaaaaacctgtagtttcattacctttttgaataatgtcatacaaaaaatgtatttgtttttttgtgctgtgagaattgatgtttgtagattaataatcattttgtttagaattacaaaatagtttttaaatattgtctgagaaaagccaaagttaatgcaacctagtggaaactgtaagaccatttgagtattgtttgttttattgatgcatttggattttgttgtttgatggaatttgagccaaaaaaaaaatacgcaggctttcctatttctacaactgattgtacttatgcattttgtaccagtggaactttttatactggagattaaaaaaaaaatggaaatttttgtggcttgctctggtgggcccctgacaatgactgatttcaagtttgatttcgggttgattgattgattgattgatagaaagaaagttgcttttcttttgagaattaaaaactttggcttgatttcttttttccctttgcttatatctagcattagaattttgtcttaaaataacagcggtaagtttcactttttattctgtattgtgcagttacacaataaggtaattagatttagaagtactcagtcactttaagtggataaatgtattagttaaaactttagggtttgcttttttgctgtttagatcaaagttttttctgattcttctgtcctcattgtgaacataaccgtgtagttgaaacagtcaaacttatttttgtaatgtatgttattgtgtgatgcagttttttgcttctgtctccaatattaaaccattttcctaata

SEQ ID NO: 854 - DNA, 2236 bp, Homo sapiens
  source 1..2236: mol_type = genomic DNA
ctactcatggcgcctgccctggttggcgatgtgttaccaacgtctggcctgtcccagcccaaggctccgcgtggcgaccaggcccagcactgggaggctgtgcagagcgtggcgtttactgcttattgctactctgcagaggttggcaacatctgacccgctctactggcaggaaacaggctcgggggcattgggaaaacgatcaaggccacttggctggacactggcggagcctcgcactcaaacctgtcgggcctcaactccgtgccaggccaacaagttgccctgggcagttcaagctggggataagggggatggggagcaggaagacagcagcaaggatgcgatcccgaaggaactttcctcctcagactgctccatgtccatgtggggcaggtcgctgaagagttcgaaaccgtgctcagcaccgcgtttggggcatgtgagaccgagaggctttgggaaactgacgccgctgtgagaacgagtttagcggagtctatggacgctgcgagcttgtggccacaagagggcgccccggagcacggcccagtccccgcccccgctggatggggcccggcctcttcccagcgttcctcctccggccccaggtcaccgccagcacgcgcctgcttcccgtctgcgcgagtccacgcagctccccaggcccttcaccagcacagcagcagcaggcatggcagcaagcgtggagcagcgcgagggcaccatccaggtgcagggccaggccctcttcttccgagaggccctgcccggcagtgggcaggctcgcttctctgtactgctgctgcatggtattcgcttctcctccgagacctggcagaacctgggtacactgcacaggctggcccaggctggctaccgggctgtggccattgacctgccagggctcaagggcgagcctcctgcccaggagcctctcttgtcccaatccagggccagcttcctggcggctgtggtggatgccttggagctgggccccccggttgtgatcagtccatcactgagtggcatgtactccctgcccttcctcacggcccctggctcccagctcccgggctttgtgccagtggcccccatctgcactgacaaaatcaatgctgccaactatgccagtgtgaagactccagctctgattgtatatggagaccaggaccccatgggtcagaccagctttgagcacctgaagcagctgcccaaccaccgggtgctgatcatgaagggggcggggcacccctgttacctggacaaaccagaggagtggcatacagggctgctggacttcctgcaggggctccagtgaagcccagcactgctgcagggggtgggctgcctgcctgctctgagctctctcttgcacgctctctcttctctcccaggctctggctcatgcacatgcaacaggtgcgtctgtctatatgtctgggttcttgtcttttgtggtctgtttgtcttttctacctctttctcttgcagtgatagactgagggggtaaaatcaagagaaaaaactctcaggaatcaaggaacataatcctgtggagggtaatccattacatgagcttctcctgttcttccactttcctgcctggctttcactccttcccctgctctgcccagcctttccctcccacccactcctccttctgcaaatgccctgaaggccagcccttaccccaacacccacttccccacctccttaggccccagatacatacatgcccacatgcacgcttacatgtttagagccatccttgtttccaaatatgacccttcgcttgagggcaactgcataggtacatctaactctggactggcatgcacattgtcatgtgcagctttgcatatacacacatgcatacatgagcctccacacaagcacttgcacacatgtggactcctaaccatgctaacctcactggctgggaaggtggggaccccatgggccagcccttgcaggaggcccttttgcaaggcttagggtgtggccagccctgaaagctacttggacacaggtttcagctggccccagcccagaagtgacccccagaaagggagggccaccgctttgccccctgcttttacccttccttctgggtgctctacacctcaggttaccaggcctgaggcatctcagccaagcttgtttcctgctctgaggcttgtggggtgggagccagagtggaggtcggtgaaataaagtgatgcaattagacccc

SEQ ID NO: 855 - DNA, 860 bp, Homo sapiens
  source 1..860: mol_type = genomic DNA
gtcccggcccgagcctccggccgcccgccgggtttgtcccgcgatccccgaccatgcccgccgacctcagcggtacttggaccctgctcagcagcgacaacttcgagggctacatgctggccctagatggagtctcgctctgttgctcaggctggagtgcagtggtgtgatcttggctcactgcaacctccgcctcctgggttcaagcaattctcctacttcagcctccaaagtagctgggattacaggtatgtgccaccatgcccggctaattttgtatttttagtagagatggggtttctacatgttgatcaggctggtctcaaactcctgacctcaggtattgactttgccactcgtaaaatagccaagttgctgaagccacagaaagtgattgagcagaatggggattcttttaccatccacacgaacagcagcctaaggaactactttgtgaaatttaaagttggagaagaatttgatgaagataacagaggcctggacaacagaaaatgcaagagtttggttatctgggacaatgacaggctcacctgtatccagaagggagaaaagaagaacagaggctggacccattggatcgaaggagacaaactccacctggaaatgttctgtgaaggtcaagtgtgcaaacagacattccagagagcctgatccacatccagcagcagagcccacttgtggctgcagctttatgccaaattatattgcagactgaacagacgtttatctatcccatttggcgacgaggactcgtggctggagagagccacacagcgtgtaacctgaagtcatctagattatggggaaactgctcagcttcaataaacctgtccaaatga

SEQ ID NO: 856 - DNA, 2912 bp, Homo sapiens
  source 1..2912: mol_type = genomic DNA
tttgttgttgacaactgtcagcttcgacctccttctcctcacaaccccgtctaaatggggtttgtaatcctccttcccacccactctcttcactccctggggcaagaatgttgactcctgctctccgtcacctgtcaggatccatcctcctgtcactggcttatatggacacgtcagcccaccgtcacgtgaccgcaggctgctaaaaacagctccagcacccactccaaaccagggcctgaaacaatgtcctccaccgagagaaacgtaaaggacacttgatcacacaatccctggaataatatccaggaaacacttgctggagccactcgcagcacccttccctggcagcacacttggggacagcgaggagatgagcgcatctctgaattacaaatctttttccaaagagcagcagaccatggataacttagagaagcaactcatctgtcccatctgcttagagatgttcacgaaacctgtggtgattctcccttgtcagcacaacctgtgtaggaaatgtgccagtgatattttccaggcctctaacccgtatttgcccacaagaggaggtaccaccatggcatcagggggccgattccgctgcccatcctgtagacatgaagtggttttggatagacatggggtatatggacttcagaggaacctgctggtggaaaatatcattgacatctacaagcaggagtccaccaggccagaaaagaaatccgaccagcccatgtgcgaggaacatgaagaggagcgcatcaacatctactgtctgaactgcgaagtacccacctgctctctgtgcaaggtgtttggtgcacacaaagactgccaggtggctcccctcactcatgtgttccagagacagaagtctgagctcagtgatggcatcgccatcctcgtgggcagcaacgatcgagtccagggagtgatcagccagctggaagacacctgcaaaactatcgaggaatgttgcagaaaacagaaacaagagctttgtgagaagtttgattacctgtatggcattttggaggagaggaagaatgaaatgacccaagtcattacccgaacccaagaggagaaactggaacatgtccgtgctctgatcaaaaagtattctgatcatttggagaacgtctcaaagttggttgagtcaggaattcagtttatggatgagccagaaatggcagtgtttctgcagaatgccaaaaccctgctaaaaaaaatctcggaagcatcaaaggcatttcagatggagaaaatagaacatggctatgagaacatgaaccacttcacagtcaacctcaatagagaagaaaagataatacgtgaaattgacttttacagagaagatgaagatgaagaagaagaagaaggcggagaaggagaaaaagaaggagaaggagaagtgggaggagaagcagtagaagtggaagaggtagaaaatgttcaaacagagtttccaggagaagatgaaaacccagaaaaagcttcagagctctctcaggtggagctgcaggctgcccctggggcacttccagtttcctctccagagccacctccagccctgccacctgctgcggatgcccctgtgacacagggggaggttgtacccactggctctgagcagaccacagagtctgaaactccagtccctgcagcagcagaaactgcggatcccttgttttaccctagttggtataaaggccaaacccggaaagccaccaccaacccaccttgcaccccagggagcgaaggtctggggcaaatagggcctccaggttctgaggattcgaatgtacggaaggcagaagtggcagcagccgcagcgagtgagagggcagctgtgagtggtaaggaaactagtgcacctgcagctacttctcagattggatttgaggctcctcccctccagggacaggctgcagctccagcgagtggcagtggagctgattctgagccagctcgccatatcttctccttttcctggttgaactccctaaatgaatgatattcattccaactgctgcccctctgtctgcctggctgagatgcatgtgggcagcaggaagcccaagtgaaattaatattatgcagatgatgaaagggacctctgaacaggatttctgcaaaaatagccccaaactgcaattccatatgacttatctaacatcttggggggaaagaatattttgagaaaatagttgcagaaagcactggaaataataaacttgatcttatacaaatcttctattgtgtggaaaatgttgtgaagggtgtgtaggtgtggtacatgtgtatgtcactaacaagtggcaaatggtgaaaaaagtggtcactatgcttttgtctctcataggcactgactttttgttattatattatggtagctttcatttcctttactctttaacagtgcaggtggtcagtgaaaatcagtgtcaactcagaagtgactgatttatcaatacatggacaaaaagtaaatcattgaccaaagctatgaaatgtttcacaaagttttcctcttttgcataacagatgtcactggatgtacattcagaaatgttctttgaatttggtgacactttcatggtccagaaagctgaaggcctgggcatctcttgtgacatttttctaatattagttttagattttcacgtattaggcactttagttgaatcttccagcaaaagctgtctactttctcttttattcactgtggcaccaatctggtaaattgtagaacaattgcatgtgtttaaatatatatacaaacatatcacacattaaatatatatatatttaaatcatgctttgttaatatttgtcccaccataatgcctccttcagaacataagtgtaactttatatgaactcttaaataaatgatgtttttaaaa

SEQ ID NO: 857 - DNA, 1878 bp, Homo sapiens
  source 1..1878: mol_type = genomic DNA
atatgaatcattactccttacccaggcagtaatgttcccgaagttttctcttcgttctatgtttcatggagctggaggagggaatgatattcagtggtgtttttctcaggtgaaaggagcagtagatgatgatgtagcagaagcagatataatttctacagtagaatttaatcattctggagaattactagcaacaggagataaaggtggtagagttgtcatctttcaacaggagcaggagaacaaaatccagtctcatagcagaggagaatataatgtttacagcaccttccagagccatgaaccagagtttgactacttgaaaagtttagaaatagaagaaaagatcaacaaaattaggtggttaccccagaaaaatgctgctcagtttttattgtctaccaatgataaaacaataaaattatggaaaatcagtgaaagggacaaaagaccagaagggtataacttgaaagaggaggatggaaggtatagagatcctactacagttactacactacgagtgccagtctttaggcctatggatctaatggttgaggccagtccacgaagaatatttgccaatgctcatacatatcacatcaactcaatttctattaatagtgattatgaaacatatttatctgcagatgatttgcggattaatctttggcatctggaaattacagacaggagttttaacattgtggatatcaagcctgccaatatggaagagctaacagaggtgattacagcagcagaatttcatccaaacagctgtaacacatttgtatacagcagcagtaaaggaactattcggctatgtgacatgagggcatctgccctctgtgatagacattctaaattgtttgaagaacctgaagatcccagtaacaggtcatttttttccgaaatcatctcctctatttcggatgtaaaattcagccatagtggtcgatatatgatgactagagactatttgtcagtcaaaatttgggacttaaatatggaaaacaggcctgtggaaacataccaggtgcatgaatacctcagaagtaaactctgttcactgtatgaaaatgactgcatatttgacaaatttgaatgttgttggaatggatctgacagtgttgtcatgactggatcttacaataatttcttcagaatgtttgacagaaacacaaagcgagacataaccctagaagcatcgcgggaaaacaataagcctcgcacagttctgaagcctcgcaaagtctgtgcaagtggcaagcgaaagaaagatgaaataagtgttgacagcctagacttcaataagaaaatccttcacacagcctggcaccccaaggaaaatatcattgccgtagctactacaaacaatctgtatatatttcaagacaaagtgaattagggttggcattcctagcagaagaacccacttcctgcttagttgagatagttgaatctagcattcgttcctataaaagagagaggtccattgtggcgcccctttccagtgtttgacagtgtgccattcgacaacacattgttatagctacatggagaaagctctgtggattcatcactgtggtgttctccatgtctgctagccatttaggtaagggtagggcacttttaatttaaatgacttcttgcaccatcttgcctaatggactagattggactgtatcaacattgatttactccactttttatgccttccattgtgatgacgtcaaacacagtgaaagccttcagtcatgctatgggatttaattgtgtatcctcattactgtatcatttgtggggtacaccccttccccctttttttaaattaaatacagctcattcttactgtggcttgtagcattcctcctcttctgg

SEQ ID NO: 858 - DNA, 887 bp, Homo sapiens
  source 1..887: mol_type = genomic DNA
acctccggaaaccgtagattccgggcggtcggagccgccgggagctgtagttctcccgcggctcagagaagtaggcagagagcggacctggcggccgggcagcatggcggggctggagctcttgtcggaccagggctaccgggtggacgggcggcgcgccggggagctgcgcaagatccaggcgcggatgggcgtgttcgcgcaggctgacggctcggcctacattgagcagggcaacaccaaggcactggctgtggtctacggcccgcacgagatccggggctcccgggctcgagccctgccggacagggccctagtgaactgtcaatatagttcagcgaccttcagcacaggtgagcgcaagcgacggccacatggggaccgtaagtcctgtgagatgggcctgcagctccgccagactttcgaagcagccatcctcacacagctgcacccacgctcccagattgatatctatgtgcaggtgctacaggcagatggtgggacctatgcagcttgtgtgaatgcagccacgctggcagtgctggatgccgggatacccatgagagactttgtgtgtgcgtgctcagctggcttcgtggacggcacagccctggcggacctcagccatgtggaggaagcagctggtggcccccagctggccctggccctgctgccagcctcaggacagattgcgctgcttgagatggatgcccggctgcacgaggaccacctggagcgggtgttggaggctgctgcccaggctgcccgagatgtgcacaccctcttagatcgagtggtccggcagcatgtgcgtgaggcctctatcttgctgggggactgaccacccagccacccatgtccagaataaaaccctcctctgcccacac

(The sequence listing continues in the following parts.)

1-92. (canceled)

93. A method of expressing a secreted protein in a mammalian subject, the method comprising administering to the subject a pharmaceutical composition comprising a plurality of lipid nanoparticles encapsulating a polynucleotide, wherein the lipid nanoparticles comprise a cationic lipid, a neutral lipid, cholesterol, and a PEGylated lipid, wherein the plurality of lipid nanoparticles has a mean particle size of from 80 nm to 160 nm, and
wherein the polynucleotide comprises:
(a) an open reading frame encoding the secreted protein and consisting of nucleosides selected from uridine, cytidine, adenosine, and guanosine;
(b) a 5′-UTR;
(c) a 5′ cap structure;
(d) a 3′-UTR; and
(e) a 3′ tailing sequence of linked nucleosides.

94. The method of claim 93, wherein the cationic lipid is a biodegradable cationic lipid.

95. The method of claim 94, wherein the biodegradable cationic lipid comprises an ester linkage.

96. The method of claim 93, wherein the method comprises administering about 0.05 to about 0.5 mg/kg of polynucleotide.

97. The method of claim 93, wherein the administration is intramuscular administration.

98. The method of claim 93, wherein the administration is intravenous administration.

99. The method of claim 93, wherein upon administration, expression of the secreted protein is maximal at 8-24 hours.

100. The method of claim 93, wherein the 3′-tailing sequence of linked nucleosides is selected from the group consisting of a poly-A tail and a polyA-G quartet.

101. The method of claim 100, wherein the poly-A tail comprises at least 100 nucleosides.

102. The method of claim 93, wherein the 5′ cap structure is Cap0, Cap1, ARCA, inosine, N1-methyl-guanosine, 2′fluoro-guanosine, 7-deaza-guanosine, 8-oxo-guanosine, 2-amino-guanosine, LNA-guanosine, or 2-azido-guanosine.

103. The method of claim 102, wherein the 5′-cap structure is cap0, cap1, or ARCA.

104. The method of claim 93, wherein the plurality of lipid nanoparticles has a mean PDI of between 0.02 and 0.2.

105. The method of claim 93, wherein the plurality of lipid nanoparticles has a mean lipid to polynucleotide ratio (wt/wt) of between 10 and 20.

106. The method of claim 93, wherein the 3′-UTR comprises a miR binding site.

107. The method of claim 93, wherein the 5′-UTR comprises a Kozak sequence.

108. The method of claim 93, wherein the neutral lipid is a phospholipid.

109. The method of claim 93, wherein the open reading frame is codon optimized to bias GC content.

110. The method of claim 93, wherein the lipid nanoparticles comprise about 50 mol % biodegradable cationic lipid, about 38.5% cholesterol, about 10% neutral lipid, and about 1.5% PEGylated lipid.

111. The method of claim 93, wherein the polynucleotide includes at least two stop codons before the 3′-UTR.
